United States Patent Application Publication US 2023/0272434 A1 - sequence listing, part 9

SEQ ID NO: 14109 - protein, 1028 aa, Sacculina carcini
MTQELHHLSCAVCDSKNGVRQTHNDVALCRACDIFWRRHQDSGVRERQCDRGGSCRLTPHDRSCAPCRLARCQAVGIQAERAFSADTGSNPAQPCHHCGTANSRRRVISCAQCERLFHLTCVGITRAQADVLPVWHCGACMQSRGADGDVDPPADVNTTTPTDLAAALAELRQKRRVRQHVPRALRHRVAADLAQHITAALEQRSLSAWWKLLSYALTGPISSDAAARKKRGTQNRVRSQHDENEARSRGVRAKCADGDIGAALRLLTSSDCLAGDDEAVTAELERKHPPALPDEQLQMHDAGTLPIFEEHEIRSVVHSMPKGSSGGLDGIRPLHLRQLIAPQTAEAGAQLLKALTQLCNCCVQGRIPDFVLGAFYSARLIALRKKSGGLRPVAVGSVLRRLASKLIAGKMTSAVAQQLRPVQLGVGCKLGCEAAVHATRAFVNEANGRHGHILLKLDVTNAFNTLSRRALLDEVARRFPAALPLVQQAYGQPTPLYHGTTRIWSCRGVQQGDPLGPILFALAVDPVAQSLQSPLNLWYLDDATLAGPREVVLADVSRLIPALGSIGLELNAGKCEVVSLGPATDTRPADTEDSNEAATSLLASATVTPLSDLHLLGAPVQTGGIAEALNKIEHQTSLLIQRSVNIGSHPALFFLSRYASVPRAIYLLRAAPVYQAREQMGDIDEQLRSAISDCCNVAMSDAQWLQASLPVRHGGIGARRLSDVALPAHIASLEATRDLVCLINHRTSGDRPCSLVAAIEEFVDTMCPDFSASEPLHQRHLDDRSSSVRQQHLLGSANQLCRARLLAASAPHSGAWLSALPVASLGLLLPDEAVRVGVALRLGAAVQEPHRCRCGATTDRWGHHSLSCSRNAGRLPRHTALNNIIRRSLASAGIAAVLEPRGLDRGDGRRPDGITVFPVRHGKSLLWDVTCVNTFCDTHLLDGAVTPGAAAQAAEVRKRRRYSELCQRYDFVPLTIETTGVMGASLDDFVKLLGGRISERSGEPRETAWLRQRISLAVIRGNAASIVL

SEQ ID NO: 14110 - protein, 1028 aa, Sacculina carcini
MTQELHHLSCAVCDSTNGVRQTHNDVALCRACDVFWRRHQGSGVRGRQCDRGGSCRLTPHDRSCAPCRLARCQAVGIQAERAPSADTGSYPTQPCHHCGTANSRRRVISCAQCERLFHLTCVGITRAQADVLPVWHCGACMQSRGADGDVDPPADVNTTTPTDLAAALAELRQKRRVRQHVPRALRHRVAADLAQHITAALEQRSLSAWWKLLSYALTGPISSDAAARKKRGTQNRVRSQHDENEARSRGVRAKCADGDIGAALRLLTSSDCLAGDDEAVTAELERKHPPALPDEQLQMHDTGTLPIFEEHEIRSVVHSMPKGSSGGLDGIRPLHLRQLIAPQTAEAGAQLLKALTQLCNCCVQGRIPDFVLGAFYSARLIALRKKSGGLRPVAVGSVLRRLASKLIAGKMTSAVAQQLRPVQLGVGCKLGCEAAVHATRAFVNEANGRHGHILLKLDVTNAFNTLSRRALLDEVACRFPAALPLVQQAYGQPTPLYHGTTRIWSCRGVQQGDPLGPILFALAVDPVAQSLQSPLNLWYLDDATLAGPREVVLADVSRLIPALGSMGLELNAGKCEVVSLGPATDTRPAETDDSNEAATSLLASATVTPLSDLHLLGAPVQTGGIAEALNKIEHQTSLLIQRSVNIGSHPALFFLSRYASVPRAIYLLRAAPVYQAREQMGDIDEQLRSAISDRCNVAMSDAQWLQASLPVRHGGIGARRLSDVALPAHIASLEATRDLVCLINHRTSGDRPCSLVAAIEEFVDTMCPDFSASEPLQQRHLDDRSSSVRQQHLLGSANQLCRARLLAASAPHSGAWLSALPVASLGLLLPDEAVRVGVALRLGAAVQEPHRCRCGATTDRWGHHSLSCSRNAGRLPRHTALNNIIRRSLASAGIAAVLEPRGLDRGDGRRPDGITVFPVRHGKSLLWDVTCVNTFCDTHLLDGAVTPGAAAQAAEVRKRRRYSELCQRYDFVPLAIETTGVMGASLDDFVKLLGGRISERSGEPRETAWLRQRISLAVIRGNAASIVL

SEQ ID NO: 14111 - protein, 1028 aa, Sacculina carcini
MTQELHHLSCAVCDSKNGVRQTHNDVALCRACDVFWRRHQDSGVRGRQCDRGGSCRLTPQDRSCAPCRLARCQAVGIQAERAPSADTGSDPTQPCHHCGTANSRRRVISCAQCERLFHLTCVGITRAQADVLPVWHCGACMQSRGADGDVDPPADVNTTTPTDLAAALVELRQKRRVRQHVPRALRHRVAADLAQHITAALEQRSLSAWWKLLSYALTGPISSDAAARKKRDTQNRVRSQHDENEARSRGVRAKCADGDIGAALRLLTSSDCLAGDDEAVTAELERKHPPALPDEQLQMHDAGTLPIFEEHEIRSVVHSMPKGSSGGLDGIRPLHLRQLIAPQTAEAGAQLLKALTQLCNCCVQGRIPDFVLGAFYSARLIALRKKSGGLRPVAVGSVLRRLASKLIAGKITSAVAQQLRPVQLGVGCKLGCEAAVHATRAFVNEANGRHGHILLKLDVTNAFNTLSRRALLDEVARRFPAALPLVQQAYGQPTPLYHGTTRIWSCRGVQQGDPLGPILFALAVDPVAQSLQSPLNLWYLDDATLAGPREVVLADVSRLIPALGSIGLELNAGKCEVVSLGPATDTRPAETDDSNEAATSLLASATVTQLSDLHLLGAPVQTDGISEALNKIEHQTSLLIQRSVNIGSHPALFFLSRYASVPRAIYLLRAAPVYQAREQMGDIDEQLRSAISDCCNVAMSDAQWLQASLPVRHGGIGARRLSDVALPAHIASLEATRDLVCLINHRTSGDRPCSLVAAIEEFVDTMCPDFSASEPLHQRHLDDRSSSVRQQHLLGSANQLCRARLLAAAAPHSGAWLSALPVASLGLLLPDEAVRVGVALRLGAAVQEPHRCRCGATTDRWGHHSLSCSRNAGRLPRHTALNNIIRRSLASAGIAAVLEPRGLDRGDGRRPDGITVFPVRHGKSLLWDVTCVNTFCDTHLLDGAVTPGAAAQAAEVRKRRRYSDLCQRYDFVPLAIETTGVMGASLDDFVKLLGGRISERSGEPRETAWLRQRISLAVIRGNAASIVL

SEQ ID NO: 14112 - protein, 892 aa, Sacculina carcini
MSVGTSHNIQTPTHTHTHTHTHTHTHTHTHTHTLHYITLRHLYRAFHPRVSKALTHTHTHTHTHTHTHTHTHTHTHTQAQESYTYTITNIHNHLHTHTYTHICTHDEDEARSRGIRAKCADGDIGAALRLLTSSDCLAGDDEAVTAELERKHPPALPDEQLQMHDAGTLPIFEEHEIRSVVHSMPKGSSGGLDGIRPLHLRQLIAPQTAEAGAQLLKALTQLCNCCAQGRIPDFVLGAFYSARLIALRKKSGGLRPVAVGSVLRRLASKLIAGKMTSAVAQQLRPVQLGVGCKLGCEAAVHATRAFVNEANGRHGHILLKLDVTNAFNTLSRRALLDEVARRFPAALPLVQQAYGQPTPLYHGTTRIWSCRGVQQGDPLGPILFALAVDPVAQSLQSPLNLWYLDDATLAGPREVVLTDVSRLIPALGSIGLELNAGKCEVVSLGPATDTRPAETDDSNAAATSLLASATVTPLSDLHLLGAPVQTGGIAEALNKIEHQTSLLIQRSVNIGSHPALFFLSRYASVPRAIYLLRAAPVYQAREQMGDIDEQLRSAISDCCNVAMSDAQWLQASLPVRHGGIGARRLSDVALPAHIASLEATRDLVCLINHRTSGDRPCSLVAAIEEFVDTMCPDFSASEPLHQRHLDDRSSSVRQQHLLGSANQLCRARLLAAAAPHSGAWLSALPVASLGLLLPDEAVRVGVALRLGAAVQEPHRCRCGATTDRWGHHSLSCSRNAGRLPRHTALNNIIRRSLASAGIAAVLEPRGLDRGDGRRPDGITVFPVRHGKSLLWDVTCVNTFCDTHLLDGAVTPGAAAQAAEVRKRRRYSELCQRYDFVPLAIETTGVMGASLDDFVKLLGGRISERSGEPRETAWLRQRISLAVIRGNAASIVL

SEQ ID NO: 14113 - protein, 1028 aa, Sacculina carcini
MTQELHHLSCAVCDSTNGVRQTHNDVALCRACDVFWRRHQDSGVRGRQCDRGGSCRLTPHDRSCAPCRLARCQAVGIQAERAPSADTGSDPAQPCHHCGTANSRRRVSSCAQCERLFHLTCVGITQAQADVLPVWHCGACMQSRGADGDVNPPADVNTTTPTDLAAALAELRQQRRVRQHVPRALRHRVAADLAQHITAALEQRSLSAWWKLLSYALTGPISSDAAARKKRGTQNRGRSQHDEDEARSRGVRAKCADGDIGAALRLLTSSDCLAGDDEAVTAELERKHPPALPDEQLQMHDAGALPIFEEHEIRSVVHSMPKGSSGGLDGIRPLHHRQLIAPQTAEAGAQLLKALTQLCNCCVQGRIPDFVLGAFYSARLIALRKKSRGLRPVAVGSVLRRLASKLIAGKMTSAVAQQLRPVQLGMGCKLGCEAAVHTTRAFVNEANGRHGHILLKLDVTNAFNTISRRALLDEVARRFPAALPLVQQAYGQPTPLYHGTTRIWSCRGVQQGDPLGPILFALAVDPVAQSLQSPLNLWYLDDATPAGPREVVLTDVSRLIPALGSIGLELNAGKCEVVSLGPATDTRPADTEDSSAAATSLLASATVTQLSDLHLLGAPVQTGGIAEALNGIEGQTSLLIQRSVNIGSHPALFFLSRYASVPRAIYLLRAAPVYQAREQMGDIDEQLRSAISDCCNVAMSDAQWLQASLPVRHGGIGARRLSDVALPAHIASLEATRDLVCLINHRTSGDRPCSLVAAIEEFVDTMCPDFSTSEPLHQRHLDDRSSSVRQQHLLGSANQLCRARLLAAAAPHSGAWLSALPVASLGLLLPDEAVRVGVALRLGAPVQEPHRCRCGATTDRWGHHSLSCSRNAGRLPHHKTLNNIIRRSLASAGIAAVLEPRGLDRGDGRRPDGITVFPVRHGKSLLWDVTCVNTFCDTHLLDGAVTPGAAAQAAEVRKRRRYSELCQRYDFVPLAIKTTGVMGASLDDFVKLLGGRISERSGEPRETAWLRQRISLAVIRGNATSIVL

SEQ ID NO: 14114 - protein, 937 aa, Sacculina carcini
MQAEQAPSADTRSDPALACHHCGTVNSRKRVISCAQCERFFHLTCVGITRAQADVLPVWHYGACMQSRGADGDVDPPDGNNTTTPTDLAAALADTRQLCRVRQHVPRALRHRVAADLAQHITAALEQRSLSAWWKLLSYAWTGPISSDAAARKKRGTQNRVRSQHDKGQARSRGVRAKCADGNIFAALSLLTSSDCLAEHDEAVTAELERKHPPALPDEQLQLHDAETMPTFEEHEVRSAVHSMHKGSSGGLDGIWPLHLRQLIAPQTAEAGAQLLKALTQLCNCCVHGRIPDFMLGAFYNARLIALRKKSGRLRPVAVGSVLRRLASKLIAGKMTSAVAQQFRPVQLGVGCKLGCEAAVHATRGFVNDADGRHGHILLKLDVTNAFNTISRRALLNEVARRFPAALPLVQQAYGQPTPLYHGTTRIWSCRGVQQGDPLGPILFALAVDPVAQSLQSPLNLWYLDDATLAGPREVVLADVSRLIPALGSIGLELNAGKCEVVSLGPATDTRPADTEDTNAAATSLLASATVTQLSDLHLLGAPVQTGGIAEALNRIEGQTSLLIQRSVNIGSHPALFFLSRYASVPRAIYLLRAAPVYQAREQMGDIDEQLRSAISDCCNVAMSDAQWLQASLPVRHGGIGATRLSDVAPPAHIASLEATIDLVCLINQRTSGDRPCSLVAAIEEFVDTMCPDFSTSEPLKQRHLDDRSSPVRQQNLLSSADQLCRARLLTAAAPHSGACLSALPVASLGLLLPDEAVRVGVVLRLGAAVQEPHRCRCGATTDRWGHHSLSCSCNAGHLPRHTALNNIIRRNLASAGIAAVLEPRGLDRGDGRRSDGITVVPVWHGKSLLWDVTCVDTFCHTHLLDGAVTFGAAARAAEERKRRRYVELGQRYDFVPLAIETTGVMGRPWTTSSSSWADESASVQGSREKRPGFGSE

SEQ ID NO: 14115 - protein, 1028 aa, Sacculina carcini
MTQELHHLSCAVCDSTNGVRQTHNDVALCRACDVFWRRHQDSGVRERQCDRGGSCRLTPRDRSCAPCRVARCQAVGIQAERAPSADTVSDPAQPCHHCATVNSRRRVISCAQCERLFHLTCVGITRAQADVLPVCHCGACMQSCGADGDVDPPADGNTTTPTDLAAALAELRQQRRVRQHVPRALRHRVAADLAQHITAALEQRSLSAWWKLLSYALTGPISSDAAARKKRGTQNRGRSRHDEDEARSRGVRAKCADGDIGAALRLLTSSHCLAGDDEAVTAELERKHPPALPDEQLQMHDAGTLPIFEEHEIRSVVHSMLKGSSGGLDGIRPLHLRQLIAPQTAEAGAQLLKALTQLCNCCVQGRIPDFVLGAFYSARLIALRKKSGGLRPVAVGSVLRRLASKLIAGKMTSAVAQQLRPVQLGVGCKLGCEAAVHATRAFVNEANGRHGHILLKLDVTNAFNTVSRPALLVEVARRFPAALPLVQQAYGQPTPLYHGTTRIWSCRGVQQGYPLGPILFALAVDPVAQSLQSPLNLWYLDDATLAGPREAVLADVSRLIPALGSIGLELNAGKCEAVSLGPATDTRPADTEDSKAAATSLLASATVTPLSDLHLLGAPVQTGGIAEALNRIEGQTSLLIQRSVNIGSHPALFFLSRYASVPRAIYLLRAAPVYQAREQMGDIDEQLRSAISDCCNVAMSDAQWLQASLPVRHGGIGARRLSDVALPAHIASLEATRDLVCLINHRTSGDRPSSLVEAIEEFVDTMFPDFSTSEPLHQRHLDDRSSSVRQQHLLASADQLCRARLLAAAAPHSGDWLSALPVASLGLLLPDEAVRVGVALRLGAAVQEPHRCRCGATTDRWGHHSLSCSRNAGRLSRHTALNNIIRRSLASAVIAAVLEPRGLDRGDGRRPDGITVFPVRHGKSLLWDVTCVNTFCDTHLLDGAVTPGAAAQAAEDRKRRRYSELCQRYDFVPLAIETTAVIGAPLDDFVKLLGGRISERSGEPRETAWLRQRISLAVIRGNAASIVL

SEQ ID NO: 14116 - protein, 1028 aa, Sacculina carcini
MTQELHHLSCAVCDSKNGVRQTHNDVALCRACDIFWRRHQDSGVRGRQCDRGGSCRLTPQDRSCAPCRLARCQAVGIQAERAPSADTGSDPAQPCHHCGTANSRRRVISCAQCERLFHLTCVGITRAQADVLPVWHCGACMQSRGADGDVDPPADVNTTTPTDLAAALAELRQKRRVRQHVPRALRHRVAADLAQHITAALEQRSLSAWWKLLSYALTGPISSDAAARKKRDTQNRVRSQHDENEVRSRGVRAKCADGDIGAALRLLTSSDCLAGDDEAVTAELERKHPPALPDEQLQMHDAGTLPIFEEHEIRSVVHSMPKGSSGGLDGIRPLHLRQLIAPQTAEAGAQLLKALTQLCNCCVQGRIPDFVLGAFYSARLIALRKKSGGLRPVAVGSVLRRLASKLIAGKMTSAVAQQLRPVQLGVGCKLGCEAAVHATRAFVNEANGRHGHILLKLDVTNAFNTLSRRALLDEVARRFPAALPLVQQAYGQPTPLYHGTTRIWSCRGVQQGDPLGPILFALAVDPVAQSLQSPLNLWYLDDATLAGPREVVLTDVSRLIPALGSIGLELNAGKCEIVSLGPATDTRPSETDDSNEAATSLLASATVTPLSDLHLLGAPVQTGGIAEALNKIQHQTSLLIQRSVNIGSHPALFFLSRYASVPRAIYLLRAAPVYQAREQMGDIDEQLRSAISDCCNVAMSDAQWLQASLPVRHGGIGARRLSDVALPAHIASLEATRDLVCLINHRTSGDRPCSLVAAIEEFVDTMCPDFSASEPLHQRHLDDRSSSVRQQHLLGSANQLCRARLLAASAPHSGAWLSALPVASLGLLLPDEAVRVGVALRLGAAVQEPHRCRCGATTDRWGHHSLSCSRNAGRLPRHTALNNIIRRSLASAGIAAVLEPRGLDRGDGRRPDGITVFPVRHGKSLLWDVTCVNTFCDTHLLDGAVTPGAAAQAAEVRKRRRYSDLCQRYDFVPLAIETTGVMGASLDDFVKLLGGRISERSGEPRETVWLRQRISLAVIRGNAASIVL

SEQ ID NO: 14117 - protein, 1026 aa, Sacculina carcini
MTQELHHLSCAVCDSTNGVRQTHNDVALCRACDIFWRRHQDSGVRGRQCDRGGSCRLTPHDRSCAPCRLARCQAVGIQAERAPSADTGSDPTQPCHHCGTANSRRRVISCAQCERLFHLTCVGITRAQADVLPVWHCGACMQSRGADGDVDPPADGNDTTTPTDLAAALAELRQQRRVRQHVPRALRHRVAADLAQHITAALEQRSLSAWWKLLSYALTGPISSDAAARKKRGTQNRVRSQHDENEARSRGVRAKCADGDIGAALRLLTSSDCLAGDDEAVTAELQRKHPPALPDEQLQMHDAGTLPIFEEHEIRSVVHSMPKGSSGGLDGIRPLHLRQLIAPQTAEAGAQLLKALTQLCNCCAQGRIPDFVLGAFYSARLIALRKKSGGLRPVAVGSVLRRLASKLIAGKMTSAVAQQLRPVQLGVGCKLGCEAAVHATRAFVNEANGRHGHILLKLDVTNAFNTISRRVLLDEVARRFPAALPLVQQAYGQPAPLYHGTTRIWSCRGVQQGDPLGPILFALAVDPVAQSLQSPLNLWYLDDATLAGPREVVLADVSRLIPALGSIGLELNTGKCEVVSLGPATDTRPAETDDSNEAATSLLASATVTPLSDLHLLGAPVQTGGISEALNKIQHQTSLLIQRSVNIGSHPALFFLSRYASVPRAIYLLRAAPVYQAREQMGDIDEQLKSAISDCCNVAMSDAQWLQASLPVRHGGIGARRLSDVALPAHIASLEATRDLVCLINHRTSGDRPCSLVAAIEEFVDTMCPDFSASEPLQQRHLDDRSSSVRQQHLLGSANQLCRARLLAAAAPHSGAWLSALPVASLGLLLPDEAVRVGVALRLGAAVQEPHRCRCGATTDRWGHHSLSCSRNAGRLPRHTALNNIIRRSLASAGIAAVLEPRGLDRGDGRRPDGITVFPVRHGKSLLWDVTCVNTFCDTHLLDGAVTPGAAAQAAEVRKRRRYSELCQRYDFVPLAIETTGVPLDDFVKLLGGRISERSGEPRETAWLRQRISLAVIRGNAASIVL

SEQ ID NO: 14118 - protein, 1028 aa, Sacculina carcini
MTQELHHLSCAVCDSKNGVRQTHNDVALCRACDIFWRRHQDSGVRGRQCDRGGSCRLTPHDRSCAPCRLARCQAVGIQAERAPSADTGSDPAQPCHHCGTANSRRRVISCAQCERLFHLTCVGITRAQADVLPVWHCGACMQSRGADGDVDPPADVNTTTPTDLAAALAELRQQRRVRQHVPRALRHRVAADLAQHITAALEQRSLSAWWKLLSYALTGPISSDAAARKKRGTQNRGRSQHDENEARSRGVRAKCADGDIGAALRLLTSSDCLAGDDEAVTAELERKHPPALPDEQLQMHDAGTLPIFEELKIRSVVHSMPKGSSGGLDGIRPLHLRQLIAPQTAEAGAQLLKALTQLCNCCVQGRIPDFVLGAFYSARLIALRKKSGGLRPVAVGSVLRRLASKLIAGKMTSAVAQQLRPVQLGVGCKLGCEAAVHATRAFVNEANGRHGHILLKLDVTNAFNTLSRRALLDEVARRLPTALPLVQQAYGQPTPLYHGTTRIWSCRGVQQGDPLGPILFALAVDPVAQSLQSPLNLWYLDDATLAGPREVVLADVSRLIPALGSMGLELNAGKCEVVSLGPATDTRPAETDDSNEAATSLLASATVTPLSDLHLLGAPVQTGGISEALNKIQHQTSLLIQRSVNIGSHPALFFLSRYASVPRAIYLLRAAPVYQARKQMGDIDEQLRSAISDCCNVAMSDAQWLQASLPVRHGGIGARRLSDVALPAHIASLEATRDLVCLINHRTSGDRPCSLVAAIEEFVDTMCPDFSTSEPLHQRHLDDRSSSVRQQHLLGSANQLCRARLLAASAPHSGAWLSALPVASLGLLLPDEAVRVGVALRLGAAVQEPHRCRCGATTDRWGHHSLSCSRNAGRLPRHTALNNIIRRSLASAGIAAVLEPRGLDRGDGRRPDGITVLPVRHGKSLLWDVTCVNTFCDTHLLDGAVTPGAAAQAAEVRKRRRYSELYQRYDFVPLAIETTGVMGASLDDFVKLLGGRISERSGEPRETAWLRQRISLAVIRGNAASIVL

SEQ ID NO: 14119 - protein, 1028 aa, Sacculina carcini
MTQELHHLSCAVCDSKNGVRQTHNDVALCRACDVFWRRHKDSGVRGRQCDRGGSCRLTPQDRSCAPCRLARCQAVGIQAELAPSADTGSDPTQPCHHCGTANSRRRVISCAQCERSFHLTCVGITRAQADVLPVWHCGACMQSRGADGDVDPPADVNTTTPTDLAAALAELRQKRRVRQHVPRALRHRVAADLAQHITAALEQRSLSAWWKLLSYALTGPISSDAAARKKRDTQNRVRSQHDENEARSRGVRAKCADGDIGAALRLLTSSDCLAGDDEAVTAELERKHPPALPDEQLQMHDAVTLPIFEEHEIRSVVHSMPKGSSGGLDGTRPLHLRQLIAPQTAEAGAQLLKALTQLCNCCVQGRIPDFVLGAFYSARLIALRKKSGGLRPVAVGSVLRRLASKLIAGKMTSAVAQQLRPVQLGVGCKLGCEAAVHATRAFVNEANGRHGHILLKLDVTNAFNTLSRRALLDEVARRFPAALPLVQQAYGQPTPLYHGTTRIWSCRGVQQGDPLGPILFALAVDPVAQSLQSPLNLWYLDDATLVGPREVVLADVSRLIPALGSMGLELNVGKCEVVSLGPATDTRPAETDDSNEAATSLLASATVTPLSDLHLLGAPVQTSGIAEALNKIEHQTSLLIQRSVNIGSHPALFFLSRYASVPRAIYLLRAAPVYQAREQMGDIDEQLRSAISDCCNVAMSDAQWLQASLPVRHGGIGARRLSDVALPAHIASLEATRDLVCLINHRTSGDRPCSLVTAIEEFVDTMCPDFSASEPLHQRHLDDRSSSVRQQHLLGSANQLCRARLLAASAPHSGAWLSALPVASLGLLLPDEAVRVGVALRLGAAVQEPHRCRCGATTDRWGHHSLSCSRNAGRLPRHTALNNIIRRSLASAGIAAVLEPRGLDRGDGRRPDGITVFPVRHGKSLLWDVTCVNTFCDTHLLDGAVTPGAAAQAAEFRKRRRYSDLCQRYDFVPLAIETTGVMGASLDDFVKLLGGRISERSGEPRETAWLRQRISLAVIRGNAASIVL

SEQ ID NO: 14120 - protein, 888 aa, Sacculina carcini
MQSRGADGDVDPPADGDTTTPTDLAAALAELRQQRRVRQHVPRALRHRVAANLAQHITAALEQRSLLAWWKLLSYALTGPISSDAAARKKLGTQNRGRPQHDEDEARSRGVRAKCANGDIGAALRLLTSSDCLAGDDEAVTADLERKHPPALPDEQLQMHDAGTLPIFEEHEIRSVVHSMPKGSSGGLDAIRPLHLRQLIAPQTAETGAQLLKALTQLCNCCVQGRIPDFVLGAFYSARLIALRKKSGGLRPVAVGSVLRRLASKLIAGKMTSAVAQQLRPVQLGVGCKLGCEAAVHATRAFVNEANGRHSHILLKLDVTNAFNTISRRALFDEVARRFPAALPLVQQAYGQPTPLYHGTTRIWSCRGVQQGDPLGPILFALAVDPVAQSLQSPLNLWYLDDATLAGPKDVVPTDVSRLIPALGSIGLELNAGKCEVVSLGPATDTRPADTEVSSAAVTSLLASATVTQLSDLHLLGAPVQTGGIAEALNRIEGQTSLLIQRSVNIGSHPALFFLSRYASVPRAIYLLRAAPVYQAREQMGDIDEQLRSAISDCCNVAMSDAQWLKASLPVRHGGIGTRRLSDVELPAHIASLEATRDLVCLINHRTSGDRPCSLVAAIEEFVDTMCPDFSTSEPLHQRHLDDRSSSVRQQHLLGSANQLCRARLLAAAAPHSGAWLSALPVASLGLLLPDEAVRVGVALRLGAAVQEPHRCRCGATTDRWGHHSLSCSRNAGRLPRHTALNNIISRSLASAGIAAVLKPRDLDRGDGRRPDEITVFPVLHCKSLLWDVTCVNTFCDTHLLDGAVTPGAAAQAAEVRKRRRYSELCQRYDSVPLAIETTGVMGASLDDFVKLLGGRISERSGEPRETAWLRQRISLAVIRGNAASIVL

SEQ ID NO: 14121 - protein, 1028 aa, Sacculina carcini
MTQELHHLSCAVCDSTIGVRQTHNDTALCRACDVFWRRHQASGVRERQCDRGGSCRLTPHDRSCAPCRLARCQAVGIQAERAPSADTGSDPAQPCHHCGTANSRRRVISCAQCERLFHLTCVGITRAQADVLPVWHCGACMQSRGADGDMDPPADGNTTTPTDLAAALAELRQQRRVRQHVPRALRHRVAADLAQHITAALEQRSLSAWWKLLSYALTGPISSDAAARKKRGTQNRGRSQHDEDEARSRGVRAKCADGDIGAALRLLTSSDCLAGEDEAVTAELERKHPPALPDEQLQMHDAGTLPIFEEHEIRSVVHSMPKGSSGGLDGIRPLHLRQLIAPQTAEAGAQLLKALTQLCNCCVQGRIPDFVLGAFYSARLIALRKKSGGLRPVAVGSVLRRLASKLIAGKMTSAVAQQLRPVQLGVGCKLGCEAAVHATRAFVNEANGRHGHILLKLDVTNAFNTLSRRALLDEVARRFPAALPLVQQAYGQPTPLYHGTTRIWSCRGVQQGDPLGPILFALAVDPVAQSLQSPLNLWYLDDATLAGPREVVLADVSRLIPALGSIGLELNAGKCEVVSLGPATDTRPADTEDSNAAATSLLASATVTQLSDLHLLGAPVQTGGIAEALNRIEGQTSLLIQRSVNIGSHPALFFLSRYASVPRAIYLLRAAPVYQAREQMGDIDEQLRSAISDCCNVAMSDAQWLQDSLPVRHGGIGARRLSDVALPAHIASLEATRDLVCLINHRTSGDRPCSLVAAIEEFVDTMCPDFSTSQPLHQRHLDDRSSSVRQQHLLASANQLCRARLLAAAAPHSGAWLSALPVASLGLLLPDEAVRVGVALRLGAAVQEPHRCRCGATTDRWGHHSLSCSRNAGRLPRHTALNNIIRRSLASAGIAAVLEPRGLDRGDGRRPDGITVFPVRHGKSLLWDVTCVNTFCDTHLLDGAVTPGAAARAEEVRKRRRYSELCQRYDFVPLAIETTGVMGASLDDFVKLLGGRISERSGEPRETAWLRQRISLAVIRGNAASIVI

SEQ ID NO: 14122 - protein, 1029 aa, Sacculina carcini
MTQELHHLSCAVCDSTNGVRQTHNDVALCRACDIFWRRHQDSGVRERQCDRGGSCRLTPHDRSCAPCRLARCQAVGIQTERAPSADTGSDPTQPCHHCGTANSRRRVISCAQCERLFHLTCVGITRAQADVLPVWHCGACMQSRGADGDVDPPADGNDTTTPTDLAAALAELRQQRRVRQHVPRALRHRVAADLAQHITAALEQRSLSAWWKLLSYALTGPISSDAAARKKRGTQNRVRSQHDENEARSRGVRAKCADGDIGAALRLLTSSDCLAGDDEAVTAELERKHPPALPDEQLQMHDAGTLPIFEEHEIHSVVHSMPKGSSGGLDGIRPLHLRQLIAPQTAEAGAQLLKALTQLCNCCAQGRIPDFVLGAFYSARLIALRKKSGGLRPVAVGSVLRRLASKLIAGKMTSAVAQQLRPVQLGVGCKLDCEAAVHATRVFVNEANGRHGHILLKLDVTNAFNTISRRALLDEVARRLPAALPLVQQAYGQPTPLYHGTTRIWSCRGVQQGDPLGPILFALAVDPVAQSLQSPLNLWYLDDATLAGPREVVLADVSRLIPALGSIGLELNAGKCEVVSLGPATDTRPAETDDSNEAATSLLASATVTPLSDLHLLGAPVQTGGISEALNKIQHQTSLLIQRSVNIGSHPALFFLSRYASVPRAKYLLRAASVYQAREQMGDIDEQLRSAISDCCNVAMSDAQWLQASLPVRHGGIGARRLSDVALPAHIASLEATRDLVCLINHRTSGDRPCSLVAAIEEFVDTMCPDFSASEPLQQRHLDDRSSSVRQQHLLGSANQLCRARLLAAAAPHSGAWLSALPVASLGLLLPDEAVRVGVALRLGAAVQEPHRCRCGATTDRWGHHSLSCSRNAGRLPRHTALNNIIRRSLASAGIAAVLEPRGLDRGDGRRPDGITVFPVRHGKSLLWDVTCVNTFCDTHLLDGAVTPGAAAQAAEVRKRRRYSELCQRYDFVPLAIETTGVMGAPLDDFVKLLGGRISERSGEPRETAWLRQRISLAVIRGNAASIVL

SEQ ID NO: 14123 - protein, 1074 aa, Sacculina carcini
MCTCRKKTKNKKHIHTYTNIHTHTHIHTYIHQHTHTYTHTPTYIDTHTNIHTQIHIPTYINRYTPTPTYTHTHTPTYTNIHTHTHQHTYTHTYIHRYTPTCIHTHTKTHTHIHTHQNTYTHTYRHTYIHSADTGSDPAQPCHHCGTANSRRRVISCAQCERLFHLTCVGITRAQADVLPVWHCGACMQSRGADGDVDPPADVNTTTPTDLAAALAELRQKRRVRQHVPRALRHRVAADLAQHITAALEQRSLSAWWKLLSYALTGPISSDAAARKKRGTQNRVRSQHDENEARSRGVRAKCADGDIGAALRLLTSSDCLAGDDEAVTAELERKHPPALPDEQLQMHDAGTLPIFEEHEIRSVVHSMPKGSSGGLDGIRPLHLRQLIAPQTAEAGAQLLKALTQLCNCCVQGRIPDFVLGAFYSARLIALRKKSGGLRPVAVGSVLRRLASKLIAGKMTSAVAQQLRPVQLGVGCKLGCEAAVHATRAFVNEANGRHGHILLKLDVTNAFNTLSRRALLDEVARRFPAALPLVQQAYGQPTPLYHGTTRIWSCRGVQQGDPLGPILFALAVDPVAQSLQSPLNLWYLDDATLAGPREVVLADVSRLIPALGSIGLELNAGKCEVVSLGPATDTRPAETDDSNEAATSLLASATVTPLSDLHLLGAPVQTGGIAEALNKIEHQTSLLIQRSVNIGSHPALFFLSRYASVPRAIYLLRAAPVYQAREQMGDIDEQLRSAISDCCNVAMSDAQWLQASLPVRHGGIGARRLSDVALPAHIASLEATRDLVCLINHRTSGDRPCSLVAAIEEFVDTMCPDFSASEPLHQRHLDDRSSSVRQQHLLGSANQLCRARLLAASAPHSGAWLSALPVASLGLLLPDEAIRVGVALRLGAAVQEPHRCRCGATTDRWGHHSLSCSRNAGRLPRHTALNNIIRRSLASAGIAAVLEPRGLDRGDGRRPDGITVFPVRHGKSLLWDVTCVNTFCDTHLLDGAVTPGVAAQAAEVRKRRRYSELCQRYDFVPLAIETTGVMGASLDDFVKLLGGRISERSGEPRETAWLRQRISLAVIRGNAASIVL

SEQ ID NO: 14124 - protein, 1028 aa, Sacculina carcini
MTQELHHLSCAVCDSKNGVRQTHNDVALCRACDIFWRRHQGSGVRGRQCDRGGSCRLTPHDRSCAPCRLARCQAVGIQAERAPSADTGSDPAQPCHHCGTANSRRRVISCAQCERLFHLTCVGITRAQADVLPVWHCGACMQSRGADGDVDPPADVNTTTPTDLAAALAELRQKRRVRQHVPRALRHRVAADLAQHITAALEQRSLSAWWKLLSYALTGPISSDAAARKKRGTQNRLRSQHDENEARSRGVRAKCADGDIGAALRLLTSSDCLVGDDEAVTAELERKHPPALPDEQLQIHDAGTLPIFEEHEIRSVVHSMPKGSSGGLDGIRPLHLRQLIAPQTAEAGAQLLKALTQLCNCCVQGRIPDFVLVAFYSARLIALRKKSGGLRPVAVGNVLRRLASKLIAGKMTSAVAQQLRPVQLGVGCKLGCEAAVHATRAFVNEANGRHGHILLKLDVTNAFNTLSRRALLDEVARRFPAALPLVQQAYGQPTPLYHGTTRIWSCRGVQQGDPLGPILFALAVDPVAQSLQSPLNLWYLDDTTLAGPREVVLADVSRLIPALGSMGLELNAGKCEVVSLGPATDTRPAETDDSNEAATSLLASATVTPLSDLQLLGAPVQTGGIAEALNKIEHQTSLLIQRSVNIGSHPALFFLSRYASVPRAIYLLRAAPVYQAREQMGDIDEQLRSAISDCCNVAMSDAQWLQASLPVRHGGIGARRLSDVALPAHIASLEATRDLVCLINHRTSGDRPCSLVAAIEEFVDTMCPDFSASESLHQRHLDDRSSSVRQQHLLGSANQLCRARLLAASAPHSGAWLSALPVASLGLLLPDEAVRVGVALRLGAAVQEPHRCRCGATTDRWGHHSLSCSRNAGRLPRHTALNNIIRRSLASAGIAAVLEPRGLDRGDGRRPDGITVFPVRHGKSLLWDVTCVNTFCDTHLLDGAVTPGAAAQAAEVRKRRRYSDLCQRYDFVPLAIETTGVMGASLDDFVKLLGGRISERSGEPRETAWLRQRISLAVIRGNAASIVL

SEQ ID NO: 14125 - protein, 1029 aa, Sacculina carcini
MTQELHHLSCAVCDSTNGVRQTHNDVALCRACDIFWRRHQDSGVRGRQCDRGGSCRLTPHDRSCALCRLARCQAVGIQAERAPSADTGSDPTQPCDHCGTVNSRRRVISCAQCERLFHLTCVGITRAQADVLPVWHCGACMQSRGADGDVDPPADGNDTTIPTDLAAALAELRQQRRVRQHVPRALRHRVAADLAQHITAALEQRSLSAWWKLLSYALTGPISSDAAARKKRGTQNRVRSQHDENEARSRGVRAKCADGDIGAALGLLTSSDCLAGDDEAVTAELERKHPPALPDEQLQMHDAGTLPIFEEHEIRSVVHSMPKGSSGGLDGIRPLHLRQLIAPQTAEAGAQLLKALTQLCNCCAQGRIPDFVLGAFYSARLIALRKKSGGLRPVAVGSVLRRLASKLIAGKMTSAVAQQLRPVQLGVGCRLGCEAAVHATRAFVNEANGRHGHILLKLDVTNAFNTISRRALLDEVARRLPAALPLVQQAYGQPTPLYHGTTRIWSCRGVQQGDPLGPILFALAVDPVAQSLQSPLNLWYLDDATLAGPREVVLADVSRLIPALGSIGLELNAGKCEVVSLGPATDTRPAETDDSNEAATSLLASATVTPLSDLHLLGAPVQTGGISEALNKIQHQTSLLIQRSVNIGSHPALFFLSRYASVPRAIYLLRAAPVYQAREQMGDIDEQLRSAISDCCNVAMSDAQWLQASLPVRHGGIGARRLSDVALPAHIASLEATRDLVCLINHRTSGDRPCSLVAAIEEFVDTMCPDFSASEPLQQRHLDDRSSSVRQQHLLGSANQLCRARLLAAAAPHSGAWLSALPVASLGLLLPDEAVRVGVALRLGAAVQEPHRCRCGATTDRWGHHSLSCSRNAGRLPRHTALNNIIRRSLASAGIAAVLEPRGLDRGDGRRPDGITVFPVRHGKSLLWDVTCVNTFCDTHLLDGAVTPGAAAQAAEVRKRRRYSELCQRYDFVPLAIETTGVMGAPLDDFVKLLGGRISERSGEPRETAWLRQRISLAVIRGNAASIVL

SEQ ID NO: 14126 - protein, 1028 aa, Sacculina carcini
MTQELHHLSCAVCDSTNGVRQTHNDVALCRACDVFWRRHQGSGVRGRQCDRGGSCRLTPHDRSCAPCRLARCQAVGIQAERAPSADTGSYPTQPCHHCGTANSRRRVISCAQCERLFHLTCVGITRAQADVLPVWHCGACMQSRGADGDVDPPADGNTTTPTDLAAALAELRQKRRVRQHVPRALRHRVAADLAQHITAALEQRSLSAWWKLLSYALTGPISSDAAARKKRGTQNRVRSQHDENEARSRGVRAKCADGDIGAALRLLTSSDCLAGDDEAVTAELERKHPPALPDEQLQMHDTGTLPIFEEHEIRSVVHSMPKGSSGGLDGIRPLHLRQLIAPQTAEAGAQLLKALTQLCNCCVQGRIPDFVLGAFYSARLIALRKKSGGLRPVAVGSVLRRLASKLIAGKMTSAVAQQLRPVQLGVGCKLGCEAAVHATRAFVNEANGRHGHILLKLDVTNAFNTLSRRALLDEVACRFPAALPLVQQAYGQPTPLYHGTTRIWSCRGVQQGDPLGPILFALAVDPVAQSLQSPLNLWYLDDATLAGPREVVLADVSRLIPALGSMGLELNAGKCEVVSLGPATDTRPAETDDSNEAATSLLASATVTPLSDLHLLGAPVQTGGIAEALNKIEHQTSLLIQRSVNIGSHPALFFLSRYASVPRAIYLLRAAPVYQAREQMGDIDEQLRSAISDCCNVAMSDAQWLQASLPVRHGGIGARRLSDVALPAHIASLEATRDLVCLINHRTSGDRPCSLVAAIEEFVDTMCPDFSASEPLQQRHLDDRSSSVRQQHLLGSANQLCRARLLAASAPHSGAWLSALPVASLGLLLPDEAVRVGVALRLGAAVQEPHRCRCGATTDRWGHHSLSCSRNAGRLPRHTALNNIIRRSLASAGIAAVLEPRGLDRGDGRRPDGITVFPVRHGKSLLWDVTCVNTFCDTHLLDGAVTPGAAAQAAEVRKRRRYSELCQRYDFVPLAIETTGVMGASLDDFLKLLGGRISERSGEPRETAWLRQRISLAVIRGNAASIVL

SEQ ID NO: 14127 - protein, 1018 aa, Sacculina carcini
MTQELHHLSCAVCDSTNGVRQTHNDVALCRACDIFWRRHQDSGVRERQCDRGGSCRLTPHDRSCVPCRLARCQAVGIQAERAPSADTGSDPTQPCHHCGTANSRRRVISCAQCERLFHLTCVGITRAQADVLPVWHCGACMQSRGADGDVDPPADGNTTTPTDLAAALAELRQQRRVRQHVPRALRHRVAADLAQHITAALEQRSLSAWWKLLSYSLTGPISSDAGARKKRGTQNQGRSQHDEDEARSRGVRAKCADGDIGAALRLLTSSDCLAGDDEAVTAELERKHPPTLPDEQLQMHDAGTLPIFEEHEIRSVVHSMPKGSSGGLDGIRSLHLRQLIAPQTAEAGAQLLKALTQLCNCCAQGRIPDFVLGAFYSARLIALRKKSGGLRPVAVGSVLRRLASKLIAGKMTSAVAQSHSRSARSGVQAGLRNNEANGRHGHILLKLDVTNAFNTISRRALLDEVARRLPAALPLVQQAYGQPTPLYHGTTRIWSCRGVQQGDPLGPILFALAVDPVAQSLQSPLNLWYLDDATLAGPREVVLADVSRLIPALGSIGLELNAGKCEVVSLGPATDTRPAETDDSNEAATSLLASATVTPLSDLHLLGAPVQTGGIAEALNKIQHQTSLLIQRSVNIGSHPALFFLSRYASVPRAIYLLRAAPVYQAREQMGDIDEQLRSAISDCCNVAMSDAQWLQASLPVRHGGIGARRLSDVALPAHIASLEATRDLVCLINHRTSGDRPCSLVAAIEEFVDTMCPDFSASEPLQQRHLDDRSSSVRQKHLLGSANQLCRARLLAAAASHSGAWLSALPVASLGLLLPDEAVRVGVALRLGAAVQEPHRCRCGATTDRWGHHSLSCSRNAGRLPRHTALNNIIRRSLASAGIAAVLEPRGLDRGDGRRPDGITVFPVRHGKSLLWDVTCVNTFCDTHLLDGAVTPGAAAQAAEVRKRRRYSELCQRYDFVPLAIETTGVMGAPLDDFVKLLGGRISERSGEPRETAWLRQRISLAVIRGNAASIVL

SEQ ID NO: 14128 - protein, 1029 aa, Sacculina carcini
MTQELHHLSCAVCDSTNGVRQTHNDVALCRACDIFWRRHQGSGVRGRQCDRGGSCRLTPHDRSCAPCRLARCQAVGIQAERAPSADTGSDPTQPCHHCGTANSRRRVISCAQCERLFHLTCVGITRAQADVLPVWHCGACMQSRGADGDVDPPADGNDTTTPTYLAAALAELRQQRRVRQHVPRALRHRVAADLAQHITAALEQRSLSAWWKLLSYALTGPISSDAAAMKKRGTQNRVRSQHDEDEARSRGVRAKCADGDIGAALRLLTSSDCLAGDDEAVTAELERKHPPALPDEQLQMHDAGTLPIFEEHEIRSVVHSMPKGSSGGLDGIRPLHLRQLIAPQTAEAGAQLLKALTQLCNCCAKGRIPDFVLGAFYSARLIALRKKSGGLRPVAVGSVLRRLASKLIAGKMTSAVAQQLRPVQLGVGCKLGCEAAVHATRAFVNEANGRHGHILLKLDVTNAFNTLSRRALLDEVTRRFPAALPLVQQAYGQPTPLYHGTTRIWSCRGVQQGDPLGPILFALAVDPVAQSLQSPLNLWYLDDATLAGPREVVLADVSRLIPALGSIGLELNAGKCEVVSLGPATDTRPAETDDSNEAATSLLASATVTPLSDLHLLGAPVQTGGISEALNKIQHQTSLLIQRSVNIGSHPALFFLSRYASVPRAIYLLRAAPVYQAREQMGDIDEQLRSAISDCCNVAMSDAQWLQASLPVRHGGIGARRLSDVALPAHIASLEATRDLVCLINHRTSGDRPCSLVAAIEEFVDTMCPDFSASEPLQQRHLDDRSSSVRQQHLLGSANQLCRARLLAAAAPHSGAWLSALPVASLGLLLPDEAVRVGVALRLGAAVQEPHRCRCGATTDRWGHHSLSCSRNAGRLPRHTALNNIIRRSLASAGIAAVLEPRGLDRGDGRRPDGITVFPVRHGKSLLWDVTCVNTFCDTHLLDGAVTPGAAAQAAEVRKRRRYSELCQRYDFVPLAIETTGVMGAPLDDFVKLLGGRISERSGEPRETAWLRQRISLAVIRGNAASIVL

SEQ ID NO: 14129 - protein, 1028 aa, Sacculina carcini
MTQELHHLSCAVCDSKNGVRQTHNDVALCRACDVFWRRHQDSGVRGRQCDRGGSCRLTPQHRSCAPCRLARCQAVGIQAERAPSADTGSDPTQPCHHCGTANSRRRVISCAQCERLFHLTCVGITRAQADVLPVWHCGACMQSRGADGDVDPPADVNTTTPTDLAAALAELRQKRRVRQHVPRALRHRVAADLAQHITAALEQRSLSAWWKLLSYALTGPISSDAAARKKRDTQNRVRSQHDENEARSRGVRAKCADGDIGAALRLLTSSDCLAGDDEAVTAELERKHPPALPDEQLQMHDAGTLPIFEEHEIRSVVHSMPKGSSGGLDGIRPLHLRQLIAPQTAEAGAQLLKALTQLCNCCVQGRIPDFVLGAFYSARLIALRKKSGGLRPVAVGSVLRRLASKLIAGKMTSAVAQQLRPVQLGVGCKLGCEAAVHATRAFVNEANGRHGHILLKLDVTNAFNTLSRRALLDEVARRFPAALPLVQQAYGQPTPLYHGTTRIWSSRGVQQGDPLGPILFALAVDPVAQSLQSPLNLWYLDDATLAGPSEVVLADVSRLIPALGSMGLELNAGKCEVVSLGPATDTRPAETDDSNEAATSLLASATVTPLSDLHLLGAPVQTGGIAEALNKIEHQTSLLIQRSVNIGSHPALFFLSRYASVPRAIYLLRAAPVYQAREQMGDIDEQLRSAISDCCNVAMSDAQWLQASLPVRHGGIGARRLSDVALPAHIASLEATRDLVCLINHRTSGDRPCSLVAAIEEFVDTMCPDFSASEPLHQRHLDDRSSSVRQQLLLGSANQLCRARLLAASAPHSGAWLSALPVASLGLLLPDEVVRVGVALRLGAAVQEPHRCRCGATTDRWGHHSLSCSRNAGRLPRHTALNNIIRRSLASAGIAAVLEPRGLDRGDGRRPDGITVFPVRHGKSLLWDVTCVNTFCDTHLLDGAVTPGAAAQAAEVRKRRRYSDLCQRYDFVPLAIETTGVMGASLDDFVKLLGGRISERSGEPRETAWLRQRISLAVIRGNAASIVL

SEQ ID NO: 14130 - protein, 1025 aa, Sacculina carcini
MTQELHHLSCAVCDSTNGVRQTHNDVALCKACDIFWRRRQGSGVRGRQCDRGGICRLTPHDRSCAPCRLARCQAVGIQAERAPSADTGSDPTQPCHHCGTANSRRRVISCAQCERLFHLTCVGITRAQADVLPVWHCGACMQSRGADGDVDPPADGNDTTTPTDLAAALAELRQQRRVRQHVPRALRYRVAADLAQHITAALEQRSLSAWWKLLSYALTGPISSDAAARKKRGTQNRVRSQHDENEARSRGVRAKCADGDIGAALRLLTSSDCLAGDDEAVTAELERKHPPALPDEQLQMHDAGTLPIFEEHEIRSVVHSISGGLDGIRPLHLRQLIAPQTAEAGAQLLKALTQLCNCCAQGRIPDFVLGAFYSARLIALRKKSGGLRPVAVGSVLRRLASKLIAGKMTSAVAQQLRPVQLGVGCKLGCEAAVHATRAFVNEANGRHGHILLKLDVTNAFNTISRRALLDEVARRLPAALPLVQQAYGQPTPLYHGTTRIWSCRGVQQGDPLGPILFALAVDPVAQSLQSPLNLWYLDDATLAGPREVVLADVSRLIPALGSIGLELNAGKCEIVSLGPATDTRPAETDDSNEAATSLLASATVTPLSDLHLLGAPVQTGGISEALNKIQHQTSLLIQRSVNIGSHPALFFLSRYASVPRAIYLLRAAPVYQAREQMGDIDEQLRSAISDCCNVAMSDAQWLQASLPVRHGGIGARRLSDVALPAHIASLEATRDLVCLINHRTSGDRPCSLVAAIEEFVDTMCPDFSASEPLQQRHLDDRSSSVRQQHLLGSANQLCRARLLAAAAPHSGAWLSALPVASLGLLLPDEAVRVGVALRLGAAVQEPHRCRCGATTDRWGHHSLSCSRNAGRLPRHTALNNIIRRSLASAGIAAVLEPRGLDRGDGRRPDGITVFPVRHGKSLLWDVTCVNTFCDTHLLDGAVTPGAAAQAAEVRKRRRYSELCQRYDFVPLAIETTGVMGAPLDDFVKLLGGRISERSGEPRETAWLRQRISLAVIRGNAASIVL

SEQ ID NO: 14131 - protein, 1028 aa, Sacculina carcini
MTQELHHLSCAVCDSTNGVRQTHNDVALCRACNIFWRRHQDSGVRGRQCDRGGSCRLTPHDRSCAPCRLARCQAVGIQAERAPSADTGSDPTQPCHHCGTANSRRRVISCAQCERLFHLTCVGITRAQADVLPVWHCGACMQSRGADGDVDPPADGNTTTPTDLAAALAELRQQRRVRQHVPRALRHRVAADLAQHITAALEQRSLLAWWKLLSYALTGPISSDATARKKRGTQNRGRSQHDEDEARSRGVRAKCADGDIGAALRLLTSSDCLAGDDEAVTAELERKHPPALPDEQLQMHDAGTLPIFEEHEIRSVVHSMPKGSSGGLDAIRPLHLRQLIAPQTAEAGAQLLKALTQLRNCCVQGGIPDFVLGAFYSARLIALRKKSGGLRPVAVGSVLRRLASKLIAGKMTSAVAQQLRPVQLGVGCKLGCEAAVHATRAFVNEANGRHGHILLKLDVTNAFNTISRRALLDEVARRFPAALPLVQQAYGQPTPLYHGTTRIWSCRGVQQGDPLGPILFALAVDPVAQSLQSPLNLWYLDDATRAGPREVVLTDVSRLIPALGSIGLELNAGKCEDVSLGPATDTRPADTEDSSAAITSLLASATVTQLSDLHLLGAPVQTGGIAEALNRIEGQTSLLIQRSVNIGSHPALFFLSRYASVPRAIYLLRAAPVYQAREQMGDIDEQLRSAISDSCNVAMSDAQWLQASLPVRHGGIGARRLSDVALPAHIASLEATRDLVCLINHRKSGDRPCSLVAAIEEFVDTMCPDFSTSEPLHRRHLDDRSSSVRQPHLLGSANQLCRARLLAAAAPHSGAWLSALPVASLGLLLPDEAVRVGVALRLGAAVQEPHRCRCGATTDRWGHHSLSCSRNAGRLPRHTALNNIIRRSLASAGIAAVLEPRGLDRGDGRRPDGITVFPVRHGKSLLWDVTCVNTFCDTHLLDGAVTPGAAAQAAEVRKRRRYSELCQRYDFVPLAIETTGVMGASLDDFVKLLGSRISERSGEPRETAWLRQRISLAVIRGNAASIVL

SEQ ID NO: 14132 - protein, 1008 aa, Sacculina carcini
MTQELHHLSCAVCDSTNGVRQTHSDVALCRACDIFWRRHQDSGVRGRQCDRGGSCRLTPHDRSCAPCRLARCQAVGIQAERAPSADTGSDPTQLCHHCGTANSRRRVISCAQCERLFHLTCVGITRAQADVLPVWHCGACMQSRGADGDVDPPADGNDTTTPTDLAAALAELRQQRRVRQHVPRALRHRVAADLAQHITAALEQRSLSAWWKLLSYALTGPISSDAAARKKRGTQNRVRSQHDENEARSRGVRAKCADGDIGAALRLLTSSDCLAGHDEAVTAELERKHPPALPDEQLQMHDAGTLPIFEEHEIRSVVHSMPKGSSGGLDGMRPLHLRQLIAPQTAEAGAQLLKALTQLCNCCAQGRIPDFVLGAFYSARLIALRKKSGGLRPVAVGSVLRRLASKLIAGKMTSAVAQQLRPVQLGVGCKLGCEAAVHATRAFVNEANGRHGHILLKLDVTNAFNTISRRALLDEVARRFPAALPLVQQAYGQPTPLYHGTTRIWSCRGVQQGDPLGPILFALAVDPVAQSLQSPLNLWYLDDATLAGPREVVLADVSRLIPALGSIGLELNAGKCEVVSLGPATDTRPAETEDSNAAATSLLASATVTPLSDLHLLGAPVQTGGISEALNKIQHQTSLLIQRSVNIGSHPALFFLSRYASVPRAIYLLRAAPVYQAREQMGDIDEQLRSAISDCCNVAMSDAQWLQASLPVRHGGIGARRLSDVALPAHIASLEATRDLVCLINHRTSGDRPCSLVAAIEEFVDTMCPDFSASEPLQQRHLDDRSSSVRQQHLLGSANQLCRARLLAAAAPHSGAWLSALPVASLGLLLPDEAVRVGVALRLGAAVQEPHRCRCGATTDRWGHHSLSCSRNAGRLPRHTALNNIIRRSLASAGIAAVLEPRGLDRGDGRRPDGITVFPVRHGKSLLWDVTCVNTFCDTHLLDGAVTPGVAAQAAEVRKRRRYSELCQRYDFVPLAIETTGVMGTSLDDFVKLLGGRISERSGEPRET

SEQ ID NO: 14133 - protein, 1028 aa, Sacculina carcini
MTQELHHLSCAVCDSTNGVRQTHNDVALCRACDVFWRRHQGSGVRGRQCDRGGSCRLTPHDRSCAPCRLARCQAVGIQAERAPSADTGSYPTQPCHHCGTANSRRRVISCAQCERLFHLTCVGITRAQADVLPVWHCGACMQSRGADGDVDPPADVNTTTPTDLAAALAELRQKRRVRQHVPRALRHRVAADLAQHITAALEQRSLSAWWKLLSYALTGPISSDAAARKKRGTLNRVRSQHDENEARSRGVRAKCADGDIGAALRLLTSSDCLAGDDEAVTAELERKHPPALPDEQLQMHDTGTLPIFEEHEIRSVVHSMPKGSSGGLDGIRPLHLRQLIAPQTAEAGAQLLKALTQLCNCCVQGRIPDFVLGAFYSARLIALRKKSGGLRPVAVGSVLRRLASKLIAGKMTSAVAQQLRPVQLGVGCKLGCEAAVHATRAFVNEANGRHGHILLKLDVTNAFNTLSRRALLDEVACRFPAALPLVQQAYGQPTPLYHGTTRIWSCRGVQQGDPLGPILFALAVDPVAQSLQSPLNLWYLDDATLAGPREVVLADVSRLIPALGSMGLELNAGKCEVVSLGPATDTRPAETDDSNEAATSLLASATVTPLSDLHLLGAPVQTGGIAEALNKIEHQTSLLIQRSVNIGSHPALFFLSRYASVPRAIYLLRAAPVYQAREQMGDIDEQLRSAISDCCNVAMSDAQWLQASLPVRHGGIGARRLSDVALPAHIASLEATRDLVCLINHRTSGDRPCSLVAAIEEFVDTMCPDFSASEPLQQRHLDDRSSSVRQQHLLGSANQLCRARLLAASAPHSGAWLSALPVASLGLLLPDEAVRVGVALRLGAAVQEPHRCRCGATTDRWGHHSLSCSRNAGRLPRHTALNNIIRRSLASAGIAAVLEPRGLDRGDGRRPDGITVFPVRHGKSLLWDVTCVNTFCDTHLLDGAVTPGAAAQAAEVRKRRRYSELCQRYDFVPLAIETTGVMGASLDDFVKLLGGRISERSGEPRETAWLRQRISLAVIRGNAASIVL

SEQ ID NO: 14134 - protein, 957 aa, Sacculina carcini
MTQELHHLSCAVCDSTNGARQMHNDVALCRACDIFWRRHQGSGVRGRQCDRGDSCRLTPHDRSCAPCRLARCQAVGIQAERAPSADTGSDPTQPCHHCGTANSRRRVISCAQCERLFHLTCVEITRAQADVLPVWHCGACMQSRGADGDVDPPADGNDTTTPTDLAAALAELRQQRRVRQHVPRALRHRVAADLAQHITAALEQRSLSAWWKLLSYALTGPICSDAAARKKRGTQNRGRSQHDENEARSRGVRAKCADGDIGAALRLLTSSDCLAGDDEAVTAELERKHPPALPDEQLQMHDAGTLPIFEEHEIRSVVHSMPKGSSGGLDGIRPLHLRQLIAPQSAEAGAQLLKALTQLCNCCAHGRIPDFVLGAFYSARLIALRKKSGGLRPVAVGSVLRRLASKLIAGKMTSAVAQQLRPVQLGVGCKLGCEAAVHATRAFVNEANGRHGHILLKLDVTNAFNTISRRALLDEVARRLPAALPLVQQAYGQPTPLYHGTTRIWSCRGVQQGDPLGPILFALAVDPVAQSLQSPLNLWYLDDATLAGPREVVLADVSRLIPALGSIGLELNAGKCEVVSLGPATDTRPAETDDSNEAATSLLASATVTPLSDLHLLGAPVQTGGISEALNKIQHQTSLLIQRSVNIGSHPALFFLSRYASVPRAIYLLRAAPVYQAREQMGDIDEQLRSAISDCCNVAMSDAQWLQASLPVRHGGIGARRLSDVALPAHIASLEATRDLVCLINHRTSGDRPCSLVAAIEEFVDTMCPDFSASEPLQQRHLDDRSSSVRQQHLLGSANQLCRARLLAAAAPHSGAWLSALPVASLGLLLPDEAVRVGVALRLGAAVQEPHRCRCGATTDRWGHHSLSCSRNAGRLPRHTALNNIIRRSLASAGIAAVLEPRGLDRGDGRRPDGITVFPVRHGKSLLWDVTCVNTFCDTHLLDGAVTPGAAAQAAEV

SEQ ID NO: 14135 - protein, 997 aa, Sacculina carcini
MRHILAATPGQRRAGETVRPWRQLPSHSARQIVRAMPSSPLPSCRNSGRAGPQRRHGIRPHAAVLSLRQCCRRRVISCAQCERLFHLTCVGITRAQADVLPVWHCGACMQSRGADGDVDPPADGNDTTTPTDLAAALAELRQQRRVRQHVPRALRHRVAADLAQHITAALEQRSLSAWWKLLSYALTGPISSDAAARKKRGTQNRVRSQHDENEARSRGVRAKCADGDIGAALRLLTSSDCLAGDDEAVTAELERKHPPALPDEQLQMHDAGTLPIFEEHEIRSVVHSMPKGSSGGLDGIRPLHLRQLIAPQTAEAGAQLLKALTQLCNCCAQGRIPDFVLGAFYSARLIALRKKSGGLRPVAVGSVLRRLASKLIAGKMTSAVAQQLRPVQLGVGCKLGCEAAVHATRAFVNEANGRHGHILLKLDVTNAFNTISRRALLDEVARRLPAALPLVQQAYGQPTPLYHGTTRIWSCRGVQQGDPLGPILFALAVDPVAQSLQSPLNLWYLDDATLAGPREVVLADVSRLIPALGSIGLELNAGKCEVVSLGPATDTRPAETDESNEAAISLLASATVTPLSDLHLLGAPVQTGGISEALNKIQHQTSLLIQRSVNIGSHPALFFLSRYASVPRAIYLLRAAPVYQAREQMGDIDEQLRSAISDCCNVAMSDAQWLQASLPVRHGGIGARRLSDVALPAHIASLEATRDLVCLINHRTSGDRPCSLVAAIEEFVDTMCPHFSASEPLQQRHLDDRYSSVRQQHLLGSANQLCRARLLAAAAPHSGAWLSALPVASLGLLLPDEAVRVGVALRLSAAVQEPHRCRCGATADRWGNHSLSCSRNAGRLPRHTALNNIIRRSLASAGIAAVLEPRGLDRGDGRRPDGITVFPVRHGKSLLWDVTCVNTFCDTHLLDGAATPGAAAQAAEVRKRRRYSELCQRYDFVPLAIETTGVMGAPLDDFVKLLGGRISERSGEPRETAWLRQRISLAVIRGNAASIVL

SEQ ID NO: 14136 - protein, 1028 aa, Sacculina carcini
MTQELHHLSCAVCDSTNGVRQTHNDVALCRACDVFWRRHQGSGVRGRQCDRGGSCRLTPHDRSCAPCRLARCQAVGIQAERAPSADTGSYPTQPCHHCGTANSRRRVISCAQCERLFHLTCVGITRAQADVLPVWHCGACMQSRGADGDVDPSADVNTTTPTDLAAALAELRQKRRVRQHVPRALRHRVAADLAQHITAALEQRSLSAWWKLLSYALTGPISSDAAARKKRGTQNRVRSQHDENEARSRGVRAKCADGDIGAALRLLTSSDCLAGDDEAVTAELERKHPPALPDEQLQMHDTGTLPIFEEHEIRSVVHSMPKGSSGGLDGIRPLHLRQLIAPQTAEAGAQLLKALTQLCNCCVQGRIPDFVLGAFYSARLIALRKKSGGLRPVAVGSVLRRLASKLIAGKMTSAVAQQLRPVQLGVGCKLGCEAAVHATRAFVNEANGRHGHILLKLDVTNAFNTLSRRALLDEVACRFPAALPLVQQAYGQPTPLYHGTTRIWSCRGVQQGDPLGPILFALAVDPVAQSLQSPLNLWYLDDATLAGPREVVLADVSRLIPALGSMGLELNAGKCEVVSLGPATDTRPAETDDSNEAATSLLASATVTSLSDLHLLGAPVQTGGIAEALNKIEHQTSLLIQRSVNIGSHPALFFLSRYASVPRAIYLLRAAPVYQAREQMGDIDEQLRSTISDCCNVAMSDAQWLQASLPVRHGGIGARRLSDVALPAHIASLEATRDLVCLINHRTSGDRPCSLVAAIEEFVDTMCPDFSASEPLQQRHLDDRSSSVRQQHLLGSANQLCRARLLAASAPHSGAWLSALPVASLGLLLPDEAVRVGVALRLGAAVQEPHRCRCGATTDRWGHHSLSCSRNAGRLPRHTALNNIIRRSLASAGIAAVLEPRGLDRGDGRRPDGITVFPVRHGKSLLWDVTCVNTFCDTHLLDGAITPGAAAQAAEVRKRRRYSELCQRYDFVPLAIETTGVMGASLDDFVKLLGGRISERSGEPRETAWLRQRISLAVIRGNAASIVL

SEQ ID NO: 14137 - protein, 730 aa, Sacculina carcini
MHDAGTLPIFEEHEIRSVVHSMPKGSSGGLDGIRPLHLRQLIAPQTAEAGAQLLKALTQLCNCCVQGRILDFVLGAFYSARLIALRKKSGGLRPVAVGSVLRRLASKLIAGKMTSAVAQQLRPVQLGVGCKLGCEAAVHATRAFVNEANGRHGHILLKLDVTNAFNTLSRRALLDEVARRFPAALPLVQQAYGQPTPLYHGTTRIWSCRGVQQGDPLGPILFALAVDPVAQSLQSPLNLWYLDDATLAGPREVVLADVSRLIPALGSIGLELNAGKCEVVSLGPATDTRPAETDDSNEAATSLLASATVTPLSDLHLLGAPVQTGGISEALNKIQHQTSLLIQRSVNIGSHPALFFLSRYASVPRAIYLLRAAPVYQAREQMGDIDEQLRSAISDCCNVAMSDAQWLQASLPVRHGGIGARRLSDVALPAHIASLEATRDLVCLINHRTSGDRPCSLVAAIEEFVDTMCPDFSASEPLQQRHLDDRSSSVRQQHLLGSANQLCRARLLAAAAPHSGAWLSALPVASLGLLLPDEAVRVGVALRLGAAVQEPHRCRCGATTDRWGHHSLSCSRNAGRLPRHTALNNIIRRSLASAGIAAVLEPRGLDRGDGRRPDGITVFPVRHGKSLLWDVTCVNTFCDTHLLDGAVTPGVAAQAAEVRKRRRYSELCQRYDIVPLAIETTGVMGASLDDFVKLLGGRISERSGEPRDTAWLRQRISLAVIRGNAASIVL

SEQ ID NO: 14138 - protein, 996 aa, Sacculina carcini
MCACLIVHYYKMNTNCKYMCVCQKKNTYTHYTSFVVRTHTHHLSCAVCDSTNGVRQTHNDVALCRACDVFWRRHQDSGVRERQCDRGGSCRLTPHDRSCAPCRLARCQAVGIQAERAPSADTGSDPAQPCHHCGTANSRRRVISCAQCERLFHLTCVGITRAQADVLPVWHCGACMQSRGADGDVDPPADGNTTTPTDLAAPLAELRQQRRVRQHVPRALRHRVAADLAQHITAALEQRSLSAWWKLLSYALTGPISSDAAARKKRDTQNRGRSQHDEDEPRSRGVRAKCADGDIGAALRLLTSSDCLAGDDEAVTAELERKHPPALPDEQLQMHDAETLPIFEEHEIGSVVHSMPKGSSGGLDAIRPLHLRQLIAPQTAEAGAQLLKALTQLCNCCVQGRIPDFVLGAFYSARLIALRKKSGGLRPVAVGSVLRRLASKLIAGKMASAVAQQLRPVQLGVGCKLGCEAAVHATRAFVNEANGRHGHILLKLDVTNAFNTISRRALLDEVARRFPAALPLVQQAYGQLTPLYHGTTRIWSCRGVQQGDPLGPILFALAVDPVAQSLQSPLNLWYLHDATLAGPREVVLTDVSRLIPALGSIGIELNAGKCEVVSQGPATDTRPADTEDSSAAATSLLASATVTQLSDLHLLGAPVQTGGIAEALNRIEGQTSLLIQRSVNIGSHPALYFLIRYASVPRAIYQLRAAPVYQAREQMGDIDEQLRSAISDCCNVAMSDAQWLQASLPVRHGGIGARRLSDVALPAHIASLEATRDLVCLINHRTSGDRPCSLVAAIEEFVDTMCPDFSTSEPPHQRHLDDRSSSVRQQHLLGSANQLCRARLLAATAPHSGAWLSALPVASLGLLLPDEAVRVGVALRLGAAVQEPHRCRCGATTDRWGHHSLSCSRNAGRLPRHTALNNIIRRSLASAGIAAVLEPRGLDRGDGRRPDEITVFPVRHGKSLLWDVTCVNTFCDTHLLDGAVTPGAAARAAEERKRRR

SEQ ID NO: 14139 - protein, 1028 aa, Sacculina carcini
MTQELHHLSCAVCDSKNGVRQTHNDVALCRACDIFWRRHQDSGVRGRQCDRGGSCRLTPHDRSCAPCRLARCQAVGIQAERAPSADTGSDPAQPCHHCGTANSRRRVISCAQCERLFHLTCVGITRAQADVLPVWHCGACMQSRGADGDVDPPADVNTTTPTDLAAALAELRQKRRVRQHVPRALRHRVAADLAQHITAALEQRSLSAWWKLLSYALTGPISSDAAARKKRGTQNRVRSQHDENEARSRGVRAKCADGDIGAALRLLTSSDCLAGDDEAVTAELERKHPPALPDEQLQMHDAGTLPIFEEHEIRSVVHSMPKGSSGGLDGIRPLHLRQLIAPQTAEAGAQLLKALTQLCNCCVQGRIPDFVLGAFYSARLIALRKKSGGLRPVAVGSVLRRLASKLIAGKMTSAVAQQLRPVQLGVGCKLGCEAAVHATRAFVNEANGRHGHILLKLDVTNAFNTLSRRALLDEVARRFPAALPLVQQAYGQPTPLYHGTTRIWSCRGVQQGDPLGPILFALAVDPVTQSLQSPLNLWYLDDATLAGPREVVLADVSRLIPALGSIGLELNAGKCEVVSLGPATDTRPAETDDSNEAATSLLASATVTPLSDLHLLGAPVQTGGIAEALNKIEHQTSLLIQRSVNIGSHPALFFLSRYASVPRAIYLLRAAPVYQAREQMGDIDEQLRSAISDCCNVAMSDAQWLQASLPVRHGGIGARRLSDVALPAHIASLEATRDLVCLINHRTSGDRPCSLVAAIEEFVDTMCPDFSASEPLHQRHLDDRSSSVRQQHLLGSANQLCRARLLAASAPHSGAWLSALPVASLGLLLPDEAIRVGVALRLGAAVQEPHRCRCGATTDRWGHHSLSCSRNAGRLPRHTALNNIIRRSLASAGIAAVLEPRGLDRGDGRRPDGITVFPVRHGKSLLWDVTCVNTFCDTHLLDGAVTPGVAAQAAEVRKRRRYSELCQRYDFVPLAIETTGVMGASLDDFVKLLGGRISERSGEPRETAWLRQRISLAVIRGNAASIVL

SEQ ID NO: 14140 - protein, 888 aa, Sacculina carcini
MQSRGADGDVDPPADVNTTTPTDLAAALAELRQKRRVRQHVPRALRHRVAADLAQHITAALEQRSLSAWWKLLSYALTGPISSDAAARKKRGTQNRVRSQHDENEARSRGVRAKCADGDIGAALRLLTSSDCLAGDDEAVTAELERKHPPALPDEQLQMHDAGTLPIFEEHEIRSVVHSMPKGSSGGLDGIRPLHLRQLIAPQTAEAGAQLLKALTQLCNCCVQGRIPDFVLGAFYSARLIALRKKSGGLRPVAVGSVLRRLASKLIAGKMTSAVAQQLRPVQLGVGCKLGCEAAVHATRAFVNEANGRHGHILLKLDVTNAFNTLSRRALLDEVARRFPAALPLVQQAYGQPTPLYHGTTRIWSCRGVQQGDPLGPILFALAVDPVAQSLQSPLNLWYLDDATLAGPREVVLADVSRLIPALGSIGLELNAGKCEVVSLGPATDTRPAETDDSNEAATSLLASATVTPLSDLHLLGAPVQTGGIAEALNKIEHQTSLLIQRSVNIGSHPALFFLSRYASVPRAIYLLRAAPVYQAREQMGDIDEQLRSAISDCCNVAMSDAQWLQASLPVRHGGIGARRLSDVALPAHIASLEATRDLVCLINHRTSGDRPCSLVAAIEEFVDTMCPDFSASEPLHQRHLDDRSSSVRQQHLLGSANQLCRARLLAASAPHSGAWLSALPVASLGLLLPDEAIRVGVALRLGAAVQEPHRCRCGATTDRWGHHSLSCSRNAGRLPRHTALNNIIRRSLASAGIAAVLEPRGLDRGDGRRPDGITVFPVRHGKSLLWDVTCVNTFCDTHLLDGAVTPGVAAQAAEVRKRRRYSELCQRYDFVPLAIETTGVMGASLDDFVKLLGGRISERSGEPRETAWLRQRISLAVIRGNAASIVL

SEQ ID NO: 14141 - protein, 1028 aa, Sacculina carcini
MTQELHHLSCAVCDSKNGVRQTHNDVALCRACDIFWRRHQGSGVRGRQCDRGGSCRLTPHDRSCAPCRLARCQAVGIQAERAPSADMGTDPTQPCHHCGTANSRRRVISCAQCERLFHLTCVGITRAQADVLPVWHCGACMQSRGADGDVDPPADVNTTTPTDLAAALAELRQKRRVRQHVPRALRHRVAADLAQHITAALEQRSLSAWWKLLSYALTGPISSDAAARKKRDTQNRVRSQHDENEARSRGVRAKCADGDIGAALRLLTSSDCLAGDDEAVTAELERKHPPALPDEQLQMHDAGTLPIFEEHEIRSVVHSMPKGSSGGLDGIRPLHLRQLIAPQTAEAGAQLLKALTQLCNCCVQGRIPDFVLGAFYSARLIALRKKSGGLRPVAVGSVLRRLASKLIAGKMTSAVAQQLRPVQLGVGCKLGCEAAVHATRAFVNEANGRHGHIPLKMDVTNAFNTLSRRALLDEVARRFPAALPLVQQAYGQPTPLYHGTTRIWSCRGVQQGDPLGPILFALAVDPVAQSLQSPLNLWYLDDATLAGPREMVLADVSRLIPALGSIGLELNTGKCEVVSLGPATDTRPADTEDSNAAATSLLASATVTPLSDLHLLGAPVQTGGIAEALNKIEHQTSLLIQRSVNIGSHPALFFLSRYASVPRAIYLLRAAPVYQAREQIGDIDEQLRSAISDCCNVAMSDAQWLQASLPVRHGGIGARRLSDVALPAHIASLEATRDLVCLINHRTSGDRPCSLVAAIEEFVDTMCPDFSASEPLHQRHLDDRSSSVRQQHLLGSANQLCRARLLAAAAPHSGAWLSALPVASLGLLLPDEAVRVGVALRLGAAVQEPHRCRCGATTDRWGHHSLSCSRNAGRLPRHTALNNIIRRSLASAGIAAVLEPRGLDRGDGRRPDGITVFPVRHGKSLLWDVTCVNTFCDTHLLDGAVTPGAAAQAAEVRKRRRYSELCQRYDFVPLAIETTGVMGASLDDFVKLLGGRISERSGEPRETAWLRQRISLAVIRGNAASIVL

SEQ ID NO: 14142 - protein, 1028 aa, Sacculina carcini
MTQELHHLSCAVCDSKNGVRQTHNDVALCRACDVFWRRHQDSGVRGRQCDRGGSCRLTPQDRSCAPCRLARCQAVGIQAERAPSADTGSDPTQPCHHCGTANSRRRVISCAQCERSFHLTCVGITRAQADVLPVWHCGACMQSRGADGDVDPPADVNTTTPTDLAAALAELRQKRRVRQHVPRALRHRVAADLAQHITAALEQRSLSAWWKLLSYALTGPISSDAAARKKRDTQNRVRSQHDENEARSRGVRAKCADGDIGAALRLLTSSDCLAGDDEAVTAELERKHPPALPDEQLQMHDAGTLPIFEEHEIRSVVHSMPKGSSGGLDGIRPLHLRQLIAPQTAEAGAQLLKALTQLCNCCVQGRIPDFVLGAFYSARLIALRKKSGGLRPVAVGSVLRRLASKLIAGKMTSAVAQQLRPVQLGVGCKLGCEAAVHATRAFVNEANGRHGHILLKLDVTNAFNTLSRRALLDEVARRFPAALPLVQQAYGQPTPLYHGTTRIWSCRGVQQGDPLGPILFALAVDPVAQSLQSPLNLWYLDDATLAGPREVVLADVSRLIPALGSMGLELNAGKCEVVSLGPATDTRPAETDDSNEAATSLLASATVTPLSDLHLLGAPVQTGGIAEALNKIEHQTSLLIQRSVNIGSHPALFFLSRYASVPRAIYLLRAAPVYQAREQMGDIDEQLRSAISDCCNVAMSDAQWLQASLPVRHGGIGARRLSDVALPAHIASLEATRDLVCLINHRTSGDRPCSLVTAIEEFVDTMCPDFSASEPLHQRHLDDRSSSVRQQHLLGSANQLCRARLLAASAPHSGAWLSALPVASLGLLLPDEAVRVGVALRLGAAVQEPHRCRCGATTDRWGHHSLSCSRNAGRLPRHTALNNIIRRSLASAGIAAVLEPRGLDRGDGRRPDGITVFPVRHGKSLLWDVTCVNTFCDTHLLDGAVTPGAAAQAAEVRKRRRYSDLCQRYDFVPLAIETTGVMGASLDDFVKLLGGRISERSGEPRETAWLRQRISLAVIRGNAASIVL

SEQ ID NO: 14143 - protein, 1028 aa, Sacculina carcini
MTQELHHLSCAVCDSKNGVRQTHNDVALCRACDIFWRRHQDSGVRGRQCDRGGSCRLTPHDRSCAPCRLARCQAVGIQAERAPSADTGSDPAQPCHHCGTANSRRRVISCAQCERLFHLTCVGITRAQADVLPVWHCGACMQSRGADGDVDPPADVNTTTPTDLAAALAELRQKRRVRQHVPRALRHRVAADLAQHITAALEQRSLSAWWKLLSYALTGPISSDAAARKKRGTQNRVRSQHDENEARSRGVRAKCADGDIGAALRLLTSSDCLAGDDEAVTAELERKHPPALPDEQLQMHDAGTLPIFEEHEIRSVVHSIPKGSSGGLDGIRPLHLRQLIAPQTAEAGAQLLKALTQLCNCCVQGRIPDFVLGAFYSARLIALRKKSGGLRPVAVGSVLRRLASKLIAGKMTSAVAQQLRPVQLGVGCKLGCEAAVHATRAFVNEANGRHGHILLKLDVTNAFNTLSRRALLDEVARRFPAALPLVQQAYGQPTPLYHGTTRIWSCRGVQQGDPLGPILFALAVDTVAQSLQSPLNLWYLDDATLAGPREVVLADVSRLIPALGSIGLELNAGKCEVVSLGPATDTRPAETDDSNEAATSLLASATVTPLSDLHLLGAPVQTGGIAEALNKIEHQTSLLIQRSVNIGSHPALFFLSRYASVPRAIYLLRAAPVYQAREQMGDIDEQLRSAISDCCNVAMSDAQWLQASLPVRHGGIGARRLSDVALPAHIASLEATRDLVCLINHRTSGDRPCSLVAAIEEFVDTMCPDFSASEPLHQRHLDDRSSSVRQQHLLGSANQLCRARLLAASAPHSGAWLSALPVASLGLLLPDEAIRVGVALRLGAAVQEPHRCRCGATTDRWGHHSLSCSRNAGRLPRHTALNNIIRRSLSSAGIAAVLEPRGLDRGDGRRPDGITVFPVRHGKSLLWDVTCVNTFCDTHLLDGAVTPGVAAQAAEVRKRRRYSELCQRYDFVPLAIETTGVMGASLDDFVKLLGGRISERSGEPRETAWLRQRISLAVIRGNAASIVL

SEQ ID NO: 14144 - protein, 1028 aa, Sacculina carcini
MTQELHHLSCAVCDSKNGVRQTHNDVALCRACDIFWRRHQDSGVRGRQCDRGGSCRLTPHDRSCAPCRLARCQAVGIQAERAPSADTGSDPAQPCHHCGTANSRRRVISCAQCERLFHLTCVGITRAQADVLPVWHCGACMQSRGADGDVDPPADVNTTTPTDLAAALAELRQKRRVRQHVPRALRHRVAADLAQHITAALEQRSLSAWWKLLSYALTGPISSDAAARKKRGTQNRVRSQHDENEARSRGVRAKCADGDIGAALRLLTSSDCLAGDDEAVTAELERKHPPALPDEQLQMHDAGTLPIFEEHEIRSVVHSIPKGSSGGLDGIRPLHLRQLIAPQTAEAGAQLLKALTQLCNCCVQGRIPDFVLGAFYSARLIALRKKSGGLRPVAVGSVLRRLASKLIAGKMTSAVAQQLRPVQLGVGCKLGCEAAVHATRAFVNEANGRHGHILLKLDVTNAFNTLSRRALLDEVARRFPAALPLVQQAYGQPTPLYHGTTRIWSCRGVQQGDPLGPILFALAVDTVAQSLQSPLNLWYLDDATLAGPREVVLADVSRLIPALGSIGLELNAGKCEVVSLGPATDTRPAETDDSNEAATSLLASATVTPLSDLHLLGAPVQTGGIAEALNKIEHQTSLLIQRSVNIGSHPALFFLSRYASVPRAIYLLRAAPVYQAREQMGDIDEQLRSAISDCCNVAMSDAQWLQASLPVRHGGIGARRLSDVALPAHIASLEATRDLVCLINHRTSGDRPCSLVAAIEEFVDTMCPDFSASEPLHQRHLDDRSSSVRQQHLLGSANQLCRARLLAASAPHSGAWLSALPVASLGLLLPDEAIRVGVALRLGAAVQEPHRCRCGATTDRWGHHSLSCSRNAGRLPRHTALNNIIRRSLSSAGIAAVLEPRGLDRGDGRRPDGITVFPVRHGKSLLWDVTCVNTFCDTHLLDGAVTPGVAAQAAEVRKRRRYSELCQRYDFVPLAIETTGVMGASLDDFVKLLGGRISERSGEPRETAWLRQRISLAVIRGNAASIIL

SEQ ID NO: 14145 - protein, 1019 aa, Macropis europaea
MTNINGGPSGSTIPTLNKGNDDLTSQAETPAQNVPCRFAGCPRVFGKPAGRSIHERSAHPDWYDNYTKREPTKARWNAEENALLARKEAELTTSGVKFMNQALAKAFPERSLESIKSRRKQAQYRQLVEQFVSEGKRGEPPTPDRISMDTEVVSPRRDYDGPIISHLDSLPAPDTTDFCAAELVDICNSAKRSSKQAILERLTLYLRDVFPCNKTRTRQVPKTPAVELPRRKLRRMEYARTQNLWKRNPGRCLKSLLKDHNTTEQPPIEAMVPYWEGLLTKSSEACPEMEDLKTEIYELWAPVTSEEIKSSFPGSSSAPGPDGVPIRVLRRMPKGLLERILNLLMWCGKLPQHLRESRTTMIPKKTNATDPADFRPITVSSGIVRILHKVLARRIAAKIRIDSRQRSFRDSDGCSENVFLLDLALRYHHAHFKPFFMASIDVAKAFDSVSQKALLQTLQLCGAPEPLVQYIQEVYATSVTRLSCGNWTSHLIQPRQGVKQGDPMSPVLFNLVIDRLWRRLPSAVGIQIGDLDINGAAFADDLVLFASTKRGLQLTIDETSDFLSQCGMHINAAKSMTVSLKPVPHDKKTVVDAANVFSCAGKQLTALKRTDEWKYLGIPFTPEGRVVADPVGQLTASLSTITSAPLKPQQRLFGLRTVILPGLYHLLGLGGMRLGILNKIDRVVRQAIKQWLCLPHDTTSAYFHASVKDGGLGIPSVRWEIPRQRLGRLLALPLSEGAKRTIPGVFLTKEIVNAQNRLKDGGNDLLTPDLIKKRWAEKLYTSVDGIALKESHKVPQQHRWVAEGNRFLTGRDFINLCKMRINALPTRSRTTRGRVEDRYCRGGCNTAETLNHILQQCHRTHSARIQRHNAVATYVARSLKTKSSVVDVEPRIETDEGLRKPDIIAKIGDEVIVIDAQVVGEQTDLNRAHRMKADYYRKNESLVERTKNKYSADMVAFETITITNRGLWSSHSAEGLVKRGLIKKSELKLLSTRAMVGGLNAYRMFNATTNMAWRRVGVG

SEQ ID NO: 14146 - protein, 998 aa, Osmia bicornis
MKNNNGEPTGPTKPTLVDGGGGDDIPSHATTQAPNIPCRYPGCPRVFGKTAGRSIHEKSAHPDYYDQLSKKEPTKARWNAEENALLARKEAELTLAGVRFINQGLAESFPERTLDSIKSHRKQAQYKLLVERYMTEAASSNTPTPDIVVAEVNDTPNIQRDYDGEILSYLESLPAPDTTKFQAAGLVDLCNSARSIGKQAVLEKLTLYLTDVFRCKNTSKRRINRPKSGHLTRRQLRKTEYARTQNLWTRNPGKCLRSILKDHSLNEQPPKEVMVPYWERLFTDASDVCPDGENHTAEIYSLWSPIVPEEIKSSFPGLGSSPGPDKVTVRLLRSVPPNLLTRILNLFMFCGRIPRHLRESKTTLIPKKPGASEPGDFRPITVSSSLIRVFHKILAKRISKMIPVDSRQRAFGRTDGCSENVFLLDLALRYHRTHFKPLYMASIDVAKAFDSVSHKAISQTLSIRGAPPPMVQYIDEVYRTSVTKLSCGDWTSHPIKPRQGVKQGDPMSPILFNLIMDRLWKRFPDEIAIDIGEVKINGAIFADDMVLFASTKRGLQMAIDITSDFLSQCGMSINAAKSMTVSLVPVPHEKKTVVDASVVFNCSGRRLPALKRTDEWKYLGVPFTPEGRVAVDPVKQLNIAINKLTSAPLKPQQRLFGLRTVILPGLYHALELGSTRIGVLNKIDRVVRQTVRKWLCLPHDTTNAYFHASVKDGGLGIPSVRWMVPRQRLKRLNALPLSEKAKQTVPGAFLAKEISQTQNRLKDGQSMLSTPELMHKRWADKLYSSVDGHALKESNNVPQQHRWIADGSRFLSGRDFLNLCKMRINALPTRSRTSRGRAEDRRCRGGCNTAETQNHILQKCHRTHGARVQRHNAIASYIARAMRTKGCEVEEEPRVLTDVGVRKPDLVAKIGDEVIVIDAQVVGEQVDLNKAHKTKADYYRNNSTLTNTIKVKHNVKRVVFETITISNRGIWSSHSATGLINLKIIKKSELKILSTRAM

SEQ ID NO: 14147 - protein, 1019 aa, Macropis europaea
MTNINGGPSGSTIPTLNKGNDDLTSQAETPAQNVPCRFAGCPRVFGKPAGRSIHERSAHPDWYDNYTKREPTKARWNAEENALLARKEAELTTSGVKFMNQALAKAFPERSLESIKSRRKQAQYRQLVEQFVSEGKRGEPPTPDRISMDTEVVSPRRDYDGPIISHLDSLPAPDTTDFCAAELVDICNSAKRSSKQAILERLTLYLRDVFPCNKTRTRQVPKTPAVELPRRKLRRMEYARTQNLWKRNPGRCLKSLLKDHNTTEQPPIEAMVPYWEGLLTKSSEACPEMEDLKTEIYELWAPVTSEEIKSSFPGSSSAPGPDGVPIRVLRRMPKGLLERILNLLMWCGKLPQHLRESRTTMIPKKTNATDPADFRPITVSSGIVRILHKVLARRIAAKIRIDSRQRSFRDSDGCSENVFLLDLALRYHHAHFKPFFMASIDVAKAFDSVSQKALLQTLQLCGAPEPLVQYIQEVYATSVTRLSCGNWTSHLIQPRQGVKQGDPMSPVLFNLVIDRLWRRLPSAVGIQIGDLDINGAAFADDLVLFASTKRGLQLTIDETSDFLSQCGMHINAAKSMTVSLKPVPHDKKTVVDAANVFSCAGKQLTALKRTDEWKYLGIPFTPEGRVVADPVGQLTASLSTITSAPLKPQQRLFGLRTVILPGLYHLLGLGGMRLGVLNKIDRVVRRAIKQWLCLPHDTTSAYFHASVKDGGLGIPSVRWEIPRQRLGRLLALPLSEGAKRTIPGVFLTKEIVNAQNRLKDGGNDLLTPDLIKKRWAEKLYTSVDGIALKESHKVPQQHRWVAEGNRFLTGRDFINLCKMRINALPTRSRTTRGRVEDRYCRGGCNTAETLNHILQQCHRTHSARIQRHNAVATYVARSLKTKSSVVDVEPRIETDEGLRKPDIIAKIGDKVIVIDAQVVGEQTDLNRAHRMKADYYRKNESLVERIKNKYSADMVAFETITITNRGLWSSHSAEGLVKRGLIKKSELKLLSTRAMVGGLNAYRMFNATTNMAWRRVGVG

SEQ ID NO: 14148 - protein, 1019 aa, Macropis europaea
MTNINGGPSGSTIPTLNKGNDDLTSQAETPAQNVPCRFAGCPRVFGKPAGRSIHERSAHPDWYDNYTKREPTKARWNAEENALLARKEAELTTSGVKFMNQALAKAFPERSLESIKSRRKQAQYRQLVEQFVSEGKRGEPPTPDRISMDTEVVSPRRDYDGPIISHLDSLPAPDTTDFCAAELVDICNSAKRSSKQAILERLTLYLRDVFPCNKTRTRQVPKTPAVELPRRKLRRMEYARTQNLWKRNPGRCLKSLLKDHNTTEQPPIEAMVPYWEGLLTKSSEACPEMEDLKTEIYELWAPVTSEEIKSSFPGSSSAPGPDGVPIRVLRRMPKGLLERILNLLMWCGKLPQHLRESRTTMIPKKTNATDPADFRPITVSSGIVRILHKVLARRIAAKIRIDSRQRSFRDSDGCSENVFLLDLALRYHHAHFKPFFMASIDVAKAFDSVSQKALLQTLQLCGAPEPLVQYIQEVYATSVTRLSCGNWTSHLIQPRQGVKQGDPMSPVLFNLVIDRLWRRLPSAVGIQIGDLDINGAAFADDLVLFASTKRGLQLTIDETSDFLSQCGMHINAAKSMTVSLKPVPHDKKTVVDAANVFSCAGKQLTALKRTDEWKYLGIPFTPEGRVVADPVGQLTASLSTITSAPLKPQQRLFGLRTVILPGLYHLLGLGGMRLGILNKIDRVVRQAIKQWLCLPHDTTSAYFHASVKDGGLGIPSVRWEIPRQRLGRLLALPLSEGAKRTIPGVFLTKEIVNAQNRLKDGGNDLLTPDLIKKRWAEKLYTSVDGIALKESHKVPQQHRWVAEGNRFLTGRDFINLCKMRINALPTRSRTTRGRVEDRYCRGGCNTAETLNHILQQCHRTHSARIQRHNAVATYVARSLKTKSSVVDVEPRIETDEGLRKPDIIAKIGDEVIVIDAQVVGEQTDLNRAHRMKADYYRKNESLVERIKNKYSADMVAFETITITNRGLWSSHSAEGLVKRGLIKKSELKLLSTRAMVGGLNAYRMFNATTNMAWRRVGVG

SEQ ID NO: 14149 - protein, 986 aa, Dendrolimus punctatus
MKRPRLPKIRPSKKLTEIITVFNRSILPTKIPSLDNITKTHTLIYCTAITILEHFKIKIDTPNTPRTYNKPKWQERLQNHIENLRKDIGRLYQYKNGNRSRKLVNKVQNIMERTLCHNRHENMNRTVDDFLDTLKQKLAVKSNRIQRYKKAQTRRESNTLFSVNEKLFYRKLKGSNIVKNSPSENSLTDFWSDIWSQEVEHNYRAEWIQNEIERMKNVKEMEFDNIDIEELQSVINRTQNWKAPGADGIHNYWFKKLLSLQEVLTKQIFQIIKGTDTLPEFLTKGLTFMLPKINNSVDPSHFRPITCFPTLYKIITACIANKINNHIENNNILSEEQKGCRRFHMGCKEQLTIDSIALKYAQKNKQDLYISYIDYKKAFDSVPHSWLTQILEIYKINPAIINFLKAIMNNWKTSLRLHTDSICVTTREIAIKRGIFQGDSLSPLWFCLALNPLSQKLNRSQLGFDIQLNRCSLSQITHLLYMDDLKLYSDSSRNITALLDITKTFSQDIRMDFGLDKCRRLNIRKGKNEDGNYILNETEEILAMKEQEVYKYLGYAQNRLIDHSKIKEKLRKEVINRIYKLSKSYLSSKNLFKAINTYAIPVLTYSFGIIKWSKTDLQKFEIKIRTLLTQFRVHHPKSSKERLTIKRKEGGRGLIDISFLHKKQVNKLKSFFMKKKMSSSLHAAICDVDKEYSPLNLSDNYVEAINTSDYNKDKYNTWKQKELHGRHLKDLDQQHIDKEASNKWLCSAGLFPETEGFISAIQDQIIATKNYRKFIIKDRSVSNDLCRKCHNKPETIQHITGACVTLTQNDYTHRHNQLANIIHQKLALKHKLNKEPYTPYYKYKPPTVLENTTHKLYYDRTILTDHTVHNNRPDITLVDKENKHTYLIDIAIPNTHNIQSTITEKIRKYTELQEEVKRLWNMHKVTIVPIVVSTTGVIAKDLSSRLVLLDLPKYIYISLQKAAILNTCRLVRKFLQLNEEEQYVTI

SEQ ID NO: 14150 - protein, 1372 aa, Dendrolimus punctatus
MKMVNKRYNLRPLPGGRRGASGADAGCSSMRTIGDGGLSRRAPLNKYATSEISQQLEFDITSSVTTNSFHPIASSDTTSTSPYTVSEDVAQETIAVNFPVPTKDQTRTRKKWSNEMNDFILRTYLQLTFLETDLTSYLEPLHLKFLERFPHMEVSRQRVGDQRRAIVRRNLIASHKIQQIYEEVRSQLNNIGTPIQCAQSTTQAEHTNTQNNFTQLIHNNAKQRMRWTNAINEEIMRIYYEITNLETNFAAYRKQLHEKFIQKFPHLSHLTEQRISDQRRAIVNNKMIREDRLLQIKEEVETQILNINTYTVNDNVITQDTYTENTAFASSFQSTPEILSTSADLTLTQSNNTLYQRNSNFNDINIEGILLNKLDENIEKYSFIDPMKRPRLPKIRPSKKLTEIITVFNRSILPTKISSLDNITKTHTLIYCTAITILEHFKIKIDTPNTPRTYNKPKWQERLQNHIENLRKDIGRLYQYKNGNRSRKLVNKVQNIMERTLCHNRHENMNRTVDDFLDTLKQKLAVKSNKIQRYKKAQTRRESNKLFSVNEKLFYRKLKGYNIVKNSPSENSLTDFWSDIWSQEVEHNYRAEWIQNEIERMKNVKEMDFDNIDIEELQSVINRTQNWKAPGADGIHNYWFKKLGSLQEVLTKQIFQIIKGTDTLPEFLTKGLTFMLPKINNSVDPSHFRPITCLPTLYKIITACIANKINNHMENNNILSEEQKGCRRVHMGCKEQLTIDSIALKYAQKNKQDLYISYIDYKKAFDSVPHSWLTQVLEIYKINPAIINFLKAIMNNWKTSLRLHTDSICVTTREIDIKRGIFQGDSLSPLWFCLALNPLSQELNRSQLGFDIQLNRCSLSQITHLLYMDDLKLYSDSNRNITALLDITKTFSQDIRMDFGLDKCRRLNIRKGKNEDGNYILNETEEILAMKEQEVYKYLGYAQNRLIDHSKIKEQLRKEVINRIYKLSKSYLSSKNLFKAINTYAIPVLTYSFGIIKWSKTDIQKFEIKIRTLLTQFRVHHPKSSKERLTIKRKEGGRGLIDISFLHKKQVNKLKSFFMKKKMSSSLHAAICVVDKEYSPLHLSDNYVEAINTLDYNKDKYNTWKQKELHGRHLKDLDQQHIDKEASNKWLSSAGLFPETEGFISAIQDQIIATKNYRKFIIKDRSVSNDLCRKCHNKPETIQHITGACVTLTQNDYTHRHNQLANIIHQKLALKHKLNKEPYTPYYKYKPSTVLENTTHKLYYDRTILTDHTVHNNRPDITLVDKENKHTYLIDIAIPNTHNIQSTITEKIRKYTELQEEVKRLWNMHKVTIVPIVVSTTGVIPKDLSSRLELLGLPKYIYISLQKAAILNTCRLVRKFLQLNEEEQYVTI

SEQ ID NO: 14151 - protein, 1372 aa, Dendrolimus punctatus
MKMVNKRYNLRPLPGGRRGASGADAGCSSMRTIGDGGLSRRAPLNKYATSEISQQLEFDITSSVTTNSFHPIASSDTTSTSPYTVSEDVAQETIAVNFPVPTKDQTRTRKKWSNEMNDFILRTYLQLTLLETDLTSYLEPLHLKFLERFPHMEVSRQRVGDQRRAIVRRNLIASHKIEQIYEEVRSQLNNIGTPIQCAQSTTQAEHTNTQNNFTQLIHNNAKHRMRWTNAINEEIMRIYYEITNLETNFAAYRKQLHEKFIQKFPHLSHLTEQRISDQRRAIVNNKMIREDRLLQIKEEVETQILNINTYTVNDNVITQDTYTENTEFASSFQSTPEILSTSADLTLTQSNNTLYQRNSNFNDINIEGILLNKLDENIEKYSFIDPMKRPRLPKIRPSKKLTEIITVFNRSILPTKIPSLDNITKTHTLIYCTAITILEHFKIKIDTPNTPRTYNKPKWQERLQNHIENLRKDIGRLYQYKNGNRSRKLVNKVQNIMERTLCHNRHENMNRTVDDFLDTLKQKLAVKSNRIQRYKKAQTRRESNKLFSVNEKHFYRKLKGYNIVKNSPSENSLTDFWSDIWSQEVEHNYRAEWIQNEIERMKNVKEMDFDNIDVEELQSVINRTQNWKAPGADGIHNYWFKKLGSLQEVLTKQIFQIIKGTDTLPEFLTKGLTFMLPKINNSVDPSHFRPITCLPTLYKIITACIANKINNHMENNNILSEEQKGCRRVHMGCKEQLTIDSIALKYAQKNKQDLYISYIDYKKAFDSVPHSWLTQVLEIYKINPAIINFLKAIMNNWKTSLRLHTDSICVTTREIAIKRGIFQGDSLSPLWFCLALNPLSQELNRSQLGFDIQLNRCSLSQITHLLYMDDLKLYSDSNRNITALLDITKTFSQDIRMDFGLDKCRKLNIRKGKNEDGNYILNETEEILAMKEQEVYKYLGYAQNRLIDHSKIKEQLRKEVINRIYKLSKSYLSSKNLFKAINTYAIPVLTYSFGIIKWSKTDLQKFEIKIRTLLTQFRVHHPKSSKERLTIKRKEGGRGLIDISFLHKKQVNKLKSFFMKKKMSSSLHAAICVVDKEYSPLHLSDNYVEAINTLDYNKDKYNTWKQKELHGRHLKDLDQQHIDKEASNKWLCSAGLFPETEGFISAIQDQIIATKNYRKFIIKDRSVSNDLCRKCHSKPETIQHITGACVTLTQNDYTHRHNQLANIIHQKLALKHKLNKEPYTPYYKYKPSTVLENTTHKLYYDRTILTDHTVHNNRPDITLVDKENKHTYLIDIAIPNTHNIQSTITEKIRKYTELQEEVKRLWNMHKVTIVPIVVSTTGVIPKDLSSRLELLGLPKYIYISLQKAAILNTCRLVRKFLQLNEEEQYVTI

SEQ ID NO: 14152 - protein, 1207 aa, Danionella translucida
MLPSKTFSMESPNSIPILDGRAPRITSCPRGTKDRSSLVRARSGYPRAGGSVMVRGLSDAEILRGLGLRECLVILPKIKAVTSPDCSESPLDLGRNGPGQDGRKSVTIGTGTPRADDPSSLVPTIAPPMCSGDQRSIVVELPVLPDGFYCERCGVSVGMVARTERHLKARHPEMSIRYRCRACGKEFNGRRKGIEHLYKCNVRRGPIKVKRKERCLQCDREFVSRRALSTHERHVHPEYRNRLRAQVTDRTNTGSPDRVEVGGSVVFSPVEGAVMASLGRSESTDSPHASLLMPRGLSRTLRDAALSTVRDSNGAENEVGTYRVLTAWLAGHDQLDLLIEEQAVAVFGGIKEANPTRVVRPPRATARGPRPRWKQAVEAKKRAYFEIQLNYKRDRAGLIAELLDGVRPSKCTIETEVIQRHYRDVWETGAEFHGLGPHTTTQRANNTALGGLISASEVLGCLKQASNASASGPDKIEKCHLLKWDPTGEKLSRTFNLWWLTGKTPVCAKRCRTVLIPKTSNQAEMNDVGNWRPITIGSLVWRLFSKIITKRLAECCPIHPRQRGFRATPGCSENIQILKSILELGREEKSQTAIVFVDFAKAFDSVSHSHIVSAVEQVGLDPHVVELIRSSYENCVTRVELRDGRTSDINIRVGVKQGDPMSPLLFNLAMDPLIHSLERHGKGVKVKGLSLTCLAFADDLVLLSSSWGDMATNLKILEDFCERTGLRVNVRKCNGFLLTPSRDSLLVNDCPPWMLGGSPLTMVGPGESVKYLGVQISPWKGVMKPMLHEKLDGWMRSIHKAMLKPSQKVKVLNEYAIPRLLYQADHCEVSSGYLQRMDLMIRHQVKGWLRLPPSTANGLLYARNRDGGLALTKLARLVPNTQAKRLWRLSASSEEVVKSLMDSDAVKEKFRVLWLRAGNKMERIPGDELAMAAETGGIAGSLTPMRPVCGDWRQDEFLRWAGLETQGVGILSFHRSLASNRWLVKPKGFTERQYLLALRLRANVYPTREFDARGRGKEEASCRRCPHRLESCSHILGQCPATHRARIVRHNKVRDLLATEALKRNWTVIPELTFTTERGEERRPDLVLVKDNRALVVDVTIRYEFAPDSLTRGAAEKVQYYGPHKSILAALLDVHSIEVFGFPMGARGLWHPGNAEVLEAIGIPGARRRDFAALLSRRTVIYSLDVLHAFRQGLPPKSRHRLKGRKR

SEQ ID NO: 14153 - protein, 1214 aa, Danionella translucida
MRRRGAGMLPSKTFSMESPNSIPILDGRAPRITSCPRGTKDRSSLVRARSGYPRAGGSVMIRGLSDAEILRGLGLRECLVILPKIKAVTSPDCSESPLDLGRNGPGQDGRKSVTIGTGTPRADDPSSLVPTIAPPMCSGDQRSIVVELPVLPDGFYCERCGVSVGMVARTERHLKARHPEMSIRYRCRACGKECNGRRKGIEHLYKCNVRRGPIKVKRKERCLQGDREFVSRRALSTHERHVHPEYRNRLRAQVTDRTNTGSPDRVEVGGSVVFSPVEGAVMAPLGRSESTDSPHASLLMPRGLSRTLRDAALSTIRDSNGAENEVGTYRVLTAWLAGHDQLDLLIEEQAAAVFGGIKEANPTRVVRPPRATARGPRPRWKQAVEAKKRAYFEIQLNYKRDRAGLIAELLDGVRPSKCTIETEVIQRHYRDVWETGAEFHGLGPHTTTQRANNTALGGLISASEVLGCLKQASNASASGPDKIEKCHLLKWDPTGEKLSRTFNLWWLTGKPPVCAKRCRTVLIPKTSNQAEMNDVGNWRPITIGSLVWRLFSKIITKRLAECCPIHPRQRGFRATPGCSENIQILKSILEPGREEKSQTAIVFVDFAKAFDSVSHSHIVSAGEQVGLDPHVVELIRSSYENCVTRVELRDGRTSDINIRGGVKQGDPMSPLLFNLAMDPLIHSLERHGKGVKVKGLSLTCLAFADDLVLLSSSWGDMATNLKILEDFCERTGLRVNVRKCNGFLLTPSRDSLLVNDCPPWMLGGSPLTMVGPGESVKYLGVQISPWKGAMKPMLHEKLDGWMRSIHKAMLKPSQKVKVLNEYAIPRLLYQADHCEVSSGYLQRMDLMIRHQVKGWLRLPPSTANGLLYARIRDGGLALTKLARLVPNTQAKRLWRLSASSEEVVKSLMDSDAVKEKFRVLWLRAGNKMERIPGDEQAEAAEIGGIAGSLTPMRPVYGDWRQEEFLRWAGLETQGVGILSFHRSLASNRWLVKPKGFTERQYRLALRLRANVYPTREFDARGRGKEEASCRRCPHRLESCSHILGQCPATHRARIVRHNKVRDLLATEALKRNWTVIPELTFTTERGEERRPDLVLVKDNRALVVDVTIRYEFAPDSLTRGAAEKVQYYGPHKSILAALLDVHSIEVFGFPMGARGLWHPGNAEVLEAIGIPGARRRDFAALLSRRTVIYSLDVLHAFRQGLPPKSRHRLKGRKQ

SEQ ID NO: 14154 - protein, 1154 aa, Pseudomyrmex concolor
MVALRRPCSLERNMERRVLRGASEAGGSVRVSGGPPAACMANRRRDASGASRLLGAPPNGRWEQIPVVRHEIFDIGSDAVFPISCPVCQRSGHNVELIDEGQLNRHVLKEHVGATLRWECSSCSKKFVKWHALRCHRPKCPGQQPHQCEQCDMRFETPMGRSQHERHAHPNLRNAKRALEANAPAGQAGRQKSVWSDEELKRLQQLSHEMCDERFINIKLMRFFPGKTNKQISDARRRLKPLEEVERDVAGQPEPQEIGVNLLEEGRDETSSEVLPQNISGHISLAESGSEWRDRLAQALEPAQDLPSAWKDWNDELVAAREGATGAAIDKLYDSLVSKLSIDAGNNQPKKAQTRRWPTNGPPTRAQKRKFAYAKCQELMDNCPKKLADIIAANDMSLLQIKAAPSSEKTKELYDKLWGEPGPVQAEIFNDGRAEAVEVGEVWRPVTETEVQKRIKRIANSSAAGIDEITKVCLKRDGVSAMLANFFNLILLAEYPRAWKTNRTTLIPKSGKDVNDIKNWRPITISSMISRIFSSLLDRRIRNVIEQSVRQKGFTEESGCYNNVQLLNCAISQAKVSGGVICILDVAKAFDTVPHGAIKPCLTRKGIPGVVAQFIAESYLGCQTLIKTGDGSVPIELKRGIKQGDPLAPLIFNLVIEPLLDNIQANTSGLVVNEHNLAAMAFADDIILLAKNRESAESQILKVDSYLRAIGMSLSVEKSSVFEYVPRNKTWFVRDPRISVRGNQMPYSEPAGAFKYLGAKMSPWSGLIEGFEISAFEDIIARTAALPIKPMQKIALLRTYLLPRFTYGLIVRPPSVQTLRRIDIAIRNGVKRMLHLHESTTTAFFYTPRGEGGLGLLQIEKMVLIAALRSGIKSMRSEDEIVRIAIGEQSHDKYARYAATLGLEWPVTLEQLNDFKSRLKKSYVVEWERQPVQGQGVADLSFEPVSNRWLFDHGLLRPSRVIDAIKLRTNTFPTRATMRRAHPELCADCRMCGQTEETLGHVLGLCPATKPKRIKRHDDIVSLLQDRLSVKHRVLREPTIAVRGERFKPDLVINMNEEKVLALDVTVRYENGDYLAVAAEEKKNKYKIILPKLREVFKAKDAEVVPIVVGSRGALPKTTIRHLRKLRIGKKHWLTISLIALRSSIEMLNSFMDA

SEQ ID NO: 14155 - protein, 1101 aa, Pseudomyrmex concolor
MQWERIPLVRHATFELRSDTAFPLSCPVCQRTGHNIECLDDRQLNTHVLKEHPGATLRWECINCTKTFLKWHALRCHEPKCPGPQQQQRPHKCEICDMRFETLMGRSQHERHAHPNLRNTKRALEAAAPAGQAGRQKTVWTDEEMERLRRLSYEMRGERFINVELMRYFPGKTNKQISDARRRLKPAQEIEQESASQSESQEMGGNSIEEQTENIPVESLPPNRSEHDPQGNNDEEWRNRLMKALETICELPNMWKSWIDELAVVRASMDSSGIEKLYDNLIHKLSTEIRDERPTRKQERRSSKDKPPTRTQKRKFAYARCRELMENCPKKLADIVAANDLSLLQIKIAPKMEQTRKLYKELWGVSGLVHTGEFDDGKMDAIEMEEVWRPVTADEVEKRVKRIASTSAAGIDGINKTCLKRAGVSAVLAKFFNLILLTKHYPQAWKTNRTTLIPKPDKDVRDIKNWRPITISSMVSRLFSSLLDRRIRKIITQSERQKGFTEESGCYNNVQLLGSAISEAKKRGGIICILDVAKAFDTVPHDAIKPCLVRKGVPAAVAEFVAGSYRGCQTLIKTSEGNLPVELKRGVKQGDPLAPLIFNLVIEPLLDKIQASTSGFELHGHNLAVMAFADDIVLLAKNRESAISQIALVDSYLRANGMSLSVSKCSAFEYVPRNKSWFIRDPRISVRDNQIPYSEPATAFKYLGAKVSPWNGLLEDFEVSVFEDIIARTRALPIKPMQKVDLLRMYLLPRYTYGLVARPPSTQILRQIDATIRGGVKKILHLHETTTNAFLYTPRKEGGLGLLQIEKMVLIAALRSGVRAAQSSDEMVQSVVACEQSRTKYTRYAAALGLEWPISVEQLDGFKQKLKKSYATDWAQQPAQGQGVEDLAYEPVSNRWLINYNLLRQSRIIDAIKLRTNTFPTRATMKRAHPEISAACRACNQSDETLGHVLGKCMATKPARIKRHDEILALLQANLSRKHRVLKEPVIAVRGERFKPDLVINTNEGKVWALDVTVRYENGNYLVAAAEEKENKYRTILPKLREVFKAKDARVVPIVVGSRGALPKATIRELRKLKIGKKHWLTISMIALRSSIEMMNSFMDL

SEQ ID NO: 14156 - protein, 1106 aa, Aspidoscelis marmoratus
MGTNLVSIRAKIQATPLLWANHPLEGFLLVMKRKGMTSPGPSGPQGNSRDNDAVGVPSIPACPPGGFTCPCGRTFPSKRSLAMHRHHIHPAEVNEERTTCLPLKRLAWSKEDDSALLRHATRLWAPSLLRKKHLELLAPLFPGRSVEALKKRLQILKWLPPPPPETVSSPGPTPTMVAPPVIIRSPETPTIVFPDTPTMVFPDTPTMVFPDTPTMVFPDTPTMVFPDTPTMVSPDTPTMDVQETQPPTPSWKVDLLDFAARNLREPKMGADVLLDITSKLQSGTVSQSEAAHLLDEHAKRWFPHSWAPSKRTHRSLGPAPSNRQLRRANYAAVQKLYHLRKKDAASCVLSGQWKTAHRGSKTMIDGLEEYWSQTFEHPSATDPRDPRTPEDTAWTLLDTISAAEVTSALRDMGNSAAGLDRLTPAMLSSWDQPSLAAYFNLILATESVPKHIAKSRVIFLPKTDEPTAPSDLRPISISSVILRAFHKILARRITSTLQFSKLQHAFLKRDGCLEASSLLHAILRKIHEDRTPASLIFLDISKAFDSVSIHTLLRVAKSSGLPPPLTNYLVSLYDHPRVKLESREVTCGRGVRQGDPLSPLLFIMAFEDILQSALPDIGFDLDGHNVPALAYADDLVLFARRPERLQEKLDILVDSLAAAGMSINAKKSIGLTIAKDGKHKTMVLLPHIYRSGSTEIKPLGPSDVTRYLGLDFNWKGKVSPKHTSKLDQMLLELTRAPLKPYQRLDLLKNFAIPRLTHELVLGNAHRNTLKKLDVLIRSAVRSWLRLPKDTPLGFLHAHIRDGGIGLPCLNTSIPILQRNRFAKLLSNPEPIQKAVANQKSFRIIQRITNRPVQIGNHIIQSKKEARTAWKNELRRSVDGRDLFGDPVDPVSHRWVSHPQRVFPRLHLRGIQLRGGLLPTRSRNARGRDPPVTSTSCRGLCGQAETLNHILQVCDKTHDARCARHNRVVHRLSQLLRRKEVPCWTEPIIPTGATYIKPDIVAKVNNELLVMDVSVVSGSRLNETWSIKTEKYGSSKSSTALQSWHGSLIPIRHYPIIISNRGLLFAQSGQALRSIGLSARDLTDICLLTIIGSLKCFDHYTRSTLDL

SEQ ID NO: 14157 - protein, 1020 aa, Aspidoscelis marmoratus
MFPSKRSLAMHRHHVHPDEVNRERAMRVPTKRLAWSEEDDSALVRHATLLWAPNMLRKHHLELLVPFFPGRSAEALKKRLQILKWLPPSHPTLIDPPTPTTRVEDPATSTSSRTEDIPLLSTRIPSTPATFISQDPLLPPVTPTPTVTPQVTSTSTPSWKEVLLDFAANNLHDPRLGADDLLAIVSKIQSGSISSAEAARLLEDHAERWFPHTWAPSKRKHRPLGPTPTSRQLRRANYAAVQKLFHLRKKDAASCVLSGQWRQAHSGPKPTVPGMDDYWAQIFEHPSAPDRREPTPQDDVAWSLLDAITAAEVTSALRDMGNSAAGLDRLSPSTLSTWDPSSIAAYFNLILATESVPKQIAKARVIFLPKTEEPSSPSDFRPISISSVLLRAFHKILARRMTSTLRFSQLQHAFLKRDGCLEAGSLLHAILRKIHDDRVRASLIFLDISKAFDSVSFHTLLRVAKSSGLPPPLTNYLVSLYDHPTVQLESRTVTCGRGVRQGDPLSPLLFIMAFEDILQSSLPEVGFKLDGHKIPALAYADDLVLFARKPERLQEKLDGLVVSLAAAGMSVNAKKSSGLTITKIGKTKTMVLLPHIYTAGSTAIKPMGPSDTIRYLGVDFNWKGRVAPKHTSKLDQMLKDLSMAPLKPYQRLDLLKNFAIPRLTHELVLGNAHRNTLKKMDVLVRSAVRRWLRLPKDTPLGYMYAHIRDGGVGLPCLNTSIPLIQKKRFAKLLSNPSPIQRTVVNQKSFKVIQRATDLPVLIGGQAIQSKKEARTAWRDDLRRSYDGRDLFGDPVDPTSHHWVSHPQRVFPRLHLRGIQLRGGLLPTRARNARGRDPTGTPTTCRGACGQVETLNHILQICDKTHDARCARHNRIVQRLCQFLRKKGIKFWTEPLVPTDTSYIKPDIIVLTNSELLVMDVSIVSGPRMSYSWTLKAEKYGTAKCSSALQHWHGSPIPIRHSPIILSNRGLLYAQSGQALKSIGLTTRDLSDLCLLTIMGSLRCFDHYTRSTMDSSDRGCT

SEQ ID NO: 14158 - protein, 1763 aa, Loxosceles reclusa
MNPTPMDKDNHPSVATRDPRLRKRMTATTHFIPSFHARFTPPQRQVEEDNMCVNTDEDYYTKVKGETTTGREADLDNFCPSPPLIMDIPEIVISGSDDSHDEEEPITTQEIPETPADPVQEQTEAHDWDKQSPLMSCQQRTIWSTERKKRTILLAKIKSIKRATGVWAIGARKEKLTEKKAQVISAREKVRRKWKEMMLEERRRKTNRKRQDSPRLPPKTLTTTPQQKHEPDQKLKAKESPDPPQITRIPQINEEERSKRLPRGLSAANGIAVNENRLSMLFPLPVVIRCPNLSCSCAFRSANSWRSDERALRRHLQKVHDRLIEKTEYWCHACTEEIEGPPASHKCLAGKRLRAEKMSAKKLQCDECSYSTPSRKNMKSHEKRHRRQDQEVKPQTSQEAENGCENNEQTVVQECPDGTEERQLHLHTDSGYMPNTRIDRVGECQAELPLGEREEEKEVLAIQAHDEDMPPPNTMENTSGNQSDSADGSAEVEKTPKGIPLLTQGGTRPLPLRLRTKRKIHQVMERVRNLVDKDSEQDAPDDEYYVVDETERDTNPPASQPDEDFQLVSYRKRKTKKAQSDAPLIQTPPPFPQNHNEEDGRISLVQHTLNMMFPVPTIFVCPMWDCNQRFRSSQSWSAAKQSFKRHIETTHNWPIDETRLWCTYCEQRINGRPSEHQCLVGRNLQEGTERSLRFVCTECRERFPSKKGLYNHVAMHKRQKIQQRTDAPLPRPDTRNNRKNTAKVQPATNLSHPTPRETEETPINPEQEVNRAEERTPGESKNRNRDDMLKNLRIKDTGDEQIQERETDMYHPATDPEAPDRLAPTIGCHMEALDTLLAQRPTEEDWSSFESLLDTITEETQRKLKVPPKREGKHKPRPLNIEDARAIQRMYKRNRKRAMRAILEGAGQQCDLDPQTLQEHFTRIWSERQFDESLYVEHNERAPVDLSPFSEAEVLKALHSADNTAPGEDRITYAGWREIDPEAVILTRVLNVCLQHKRIPRSWKESKTILIPKTKTPKDVTDWRPITLASTICKLFTKCLTARVTHWMSSEQVLSHAQKGFLPYDGVYEHNFILQTRLQNARSEKHPLFIAWLDCANAFGSLPQGALCAALRHAGAGPDFVQLLGNIYENNTTRILTASGPTEPIHQRAGIRQGCPLSGLLFNIAIDPILRVLQDDESTQHTALAYADDIVILQDSHETLQNMVSSTEQMLKRINVVLNPQKSAVLAFSPTKPAGPRQVDISIGGTNVKCLEEGETYSFLGRPTGFNIMPNMGQLGEIIDNALKIMTSKLAPWQRLDAMKCFFYPALNHAMRTRQFRKGDWIHVDKVLRAELKKTTYLPQEASNDFIYGPLKKGCLAIPVAAENADLADIDGAFKLLTSRDNRVRELANADLDLTVRRRLRREADDGDLSRFLSGDNADDFRLTSNAISNCWTAARAASERQKVKWSIERSSTALTYKNIALYEGQRNRLTKTIRDEKRQERLQTLHGNKSQGKVMECVAMDPSSSHFISAGDYTRFADWRFIHRARLNLLPLNGAKPWKKGASRLCRRCGRYDETLPHVLNHCMLQSAAMQRRHKSILQRLTKAAEYKHQVLSVEKAIGTQGLKPDLVVRRGNAVTIIDVAIPFDNRPEALAAARQAKIEKYSNLAEELKSVYQSVTVEALIIGAYGSWDKHNDKVMRPLASKSYMKKFKALCVSDVIRHSRDIYYEFISGRRPSNTQQLPGTSDSGSQSTGDEEPRRTQGRQESEEINAATQRAEQSGGAG

SEQ ID NO: 14159 - protein, 870 aa, Kudoa iwatai
MKRCFREITSPITKWCEASPNEIVAALQNNIPTLIEPEPIQQSTQQTIPNSIQSIDVDEMETYRPADGYSDFNISPEEVRLALDKAKKDTSPGTDGIQMSFWKKLPNAEFILAPLFNNILSSESIPDDWLVSRLVMIPKEDNPDPKNPLHYRPISITQTLYRIFMSIINRKLISLIKLSPSQKGFTHGDGCLEQSFTLQETLDDARRRRQSLFINWIDITKAFDTVPHFEIYKQLNYHNIPQPIINLIKNLYSNCYNIVYDKSGNSASLYPNGRGVRQGCPLSPLLFNITIDPLLVSLDNSNLGYKLNDTTITTLAYADDIAFISNKKENMVDILSKFERFLNNMSLNINHSKCATLTLTFNNSKRLVNDPSIQNFQVNSIDIPKLTNFYKYLGTTSNLNSYKNLPECFNKFLTNLEKISKSPLFGFMKIELLRTYLFPTLDHSLKTNCLKVEELKKIDSQVLKYIRSWLRMSKYTNKAMFYVPTSQGGLGVRCLRNDYFALRLSSALNVLHSNDDRIKKISRDSLIKIVMKRTKSNPLNPVNYLNLEKEQGPTRDIKSLLSSIRANRKALNIQLLQKEDNDENSVDLDLSSLLNPVDIFGGSRYAHMSYQNATRIKRLRWHYQLKYLLNWMEMPDQGRSLACFGDDKLANTWIRTGNIDLPTYRFGILGRINCLPTKAVMFKTKRSPDQKCRHCNCDVENLRHVLNGCQYSRQLQTTRHNQVLQLIQERIRKNRNQELRINKQIPQIPSNRRPDIALISEVERKIIIVEVTVCYEQGMDALNRAKQYKERKYLQEKLMLENLGFEVELYSLVFGSLGSHHHENDSVFRKIGVRGMKPLKLLKSSITTTTLELSYDAPKLLWSFFILISI

SEQ ID NO: 14160 - protein, 1359 aa, Girardia tigrina
MQFPLDSHLITKWFTDLDIWNNFVALFAFTEFTFIDSVDIDMIVKEKACLSSLGINQSLLRNFRLIFCPINIRNIHWTLFVVNPSSGACFFLDPLQSKKMHCETIAKAEQLKKSFINEAGMQNLSIITEFKQDYDKQNNSHDCGPFICTHAERIAADLPTVEIDARRIRYLTYCHLPASTLAPLLEGGSGPEPDSTENFPAHLLHFDDSHIASYSFTHAESKLTTIVHPILAKAISTHNVDFLVDNVRLPDFHNKEKILLPLLVKNSSWILIVADLVTNSIYIMDPMMKPIDEKLREKLKKAADTIAQLALHENPIEISQAPFHQTSSIASNSGPLICGFMEALSHNKSPTEIHIDKIRRTCNSLKRKYTRFHTFEGPKTSSAIPKSATLEVRKHLANNLSSQLVNLSISEANDAIVQHMYLLRSKVPKSNYMGLHQESSLSANDMRKLYKQNSKRAFQLITQNIEADVYPKEEDVFSYYSTKSFERPIHPEVGGLPVKQGPILSFHTITPERLSEIIKKLSKKKSAPGRSNITYADILYCDPDLTLHAALFNRIIETGEIPDAWRDFETMLIPKPMKQGNYHDVSSWRPIALLDCQYKLFTSVLASDLHNWCLHNNLLHPLQKSLGPYDGCTEHNFLLRAIYDKYKNLLGNTQVHTLFLDIADAFGTIAVEVILDLLARMGLSYEACLLIKEIYRNCSHKVICGAQKTQNISVKLGVRQGCPLSMILFNIGINPLLLLSDMVLETGTTIGDHRICGLAFADDLALIAPSKAAAQKLADAAQYIANVLGLTFRSSKCALLSLPQNNDEQITINGDKIAIIKPGEVQVYLGTDLGHFTSSTPEALFKRLIDEYTAITHSGLTPWQKLHAKTVHIHSALIFAFRNFLIPISQIYGNKNRNSIERVMRALDKKILGLHSGASNAYLYAPRKSGGVGLTSIVDEYMAQSLAHAIQILNCKDQITRDSARYFLRRAASGKNANILISFEEALEWLNTGIEYTSSLCWWSRVKYSIRKMAKLHKTRIEFTVITGEITMYISQHYMHSDHTAFLITKKNLKEASQCLHIIFSKSWLYMWKNQPSAGRFVEAIEESHLNKSIIYSGELTHSEWNFVHQCNTVTLPVLALPGSKNKQKCRRCHKEDEILAHVLVGCDLSDMFWTLRHNAIVYFMASQIRLHTDADVKVDDECQFTGSKKRADLVLKYERKNTILLVDVKCPYQTEATIKRADERNKTYYSNLANEIGGVMERWTVEVLTIAVGTPGTWPTLSTETLQRIGFRSHTIKTIARHCIISNIRWSTAQWKFHRDGIMPDISRMGNIQLVPSLCEPESTTEVNLLDELVVNIDEIDEANDWLNLDEIFNDELL

SEQ ID NO: 14161 - protein, 1150 aa, Phormia regina
MEEHENTQPEPKNNKILNGLTGTVTMLDNNIPGHMETTNTTISSQATRTKAILASVLEGIKAEEKKEWLKEFSLKKGERYTRMPKNGYAEVTDFYNKKFESELSVKEIQRELSKLKKQQNLPLNQEGKTIKRKKEEPLSNSATEGILPGLSDLVRIKEHFFKHLEINKSKPMNERERTKKIPMRKVCYHTLRGLDIVIKNHLSSREEPCFEELSLILYTAQSSYDELTYVKKEKSKWMEENMKKIEDARKDAEDIDKHVEAVSNNRKMPMTKKIKKTVKKNGGKKNCIEDLKRIATIKRDYALAIEKRVRMHKERVDYRRQNDFFEFNRKLFYRKIDYEAAKKSEQTHEEMLNFWCKAWEKTGNEQKKFIILEETDRNTQNYEDVTNNDQLEAMIKDLINTLPNWKTPGSDKIYNFFIKNIKSLHIPLTNNITKSIENPSLIPAFMYKGHTYLIPKKQVPASAADYRPITCLSNIYKLLTKTITRQLRSFVELNQIISINQLGTVRNSQGAKEQCLFNKVINKSNNYNLKTCWIDVKKAFDSVEHKYLLLCLNKLNIPEKYISFIKVAMSQWELHLSYNNEMIGTTKIKRGILQGDSLSPLLFVLALEPLSRYLNKHCKKINVKSADETLEINHLIFIDDIKLFADDEKTLNDLYRSTSNITKDIGMAINTEKTASNIQIEHEEVPCLEDHDGYKYLGVLETPKGEIHSTVKKTVFAKIKERISLLCKTKLNAANMMQAINEYAISLINYYCGIVDIEPEEYARLDLEIRAVLTEHNIYFKPSCMERLYMPRTKLGRGLSNVEDKSEKILLQFNTFLNNKKEICDRKRCIITNEQNSLTQLGLIEGYLRSKYSLKETIDIDILQTAQTKARKEKLMTKSLHSVLFKSTIDENVDIKASSLWLNKGNNSAQSEALYCLLQDRNMFLGRTDICNHCNVATKTVDHLATRCGKLLNMSYAQRHDEILRSLHLHYAKKYGFKKSAKLRTHKTERCMSNELAIIKTDSFIFTDVKIACNKPDLFIHDLVQNKITLVEVGVTSQDRLKTKETEKYRKYDILAKELSSMYKCEVDIIPFVITWDGIVTKYHKKHVGKIGIDNKTRAYIQSTILKKTFESISFDYRRNNMLKGIRREIAVSEACEETVRLVEQYGQEM

SEQ ID NO: 14162 - protein, 975 aa, Idaea aversata
MFSVILILFVLVLLLFCKLFVIMPYRNVSVPSLDGVEGNPVRCNQCSKVFKGEKGLKIHIGKVHKFNTGIGTSSIDLSTPSVSSLNNSQPFWQKLSNLKSNVPILKRIPRGARISVAKILSQKISKVVKDNSESAWEDLFCFCFSVLHSNKEKKVSLTTSIKQNCHNTSDINFDNFSSNNLHHVFNLFKKVESKVYDGDIKGASYLLFSSDSAAPDSPETFKSLQDKHPLQLTPFPLHSMPVDELPLEVTAKNVYAAVMSFKNGSAGGLDGLSPQHLKDLVCNSTGDAGKLLLKDLTDLTNLMLSGKVNSNIIPLLYGANLVALKKKDGGIRPIAVGCTFRRLTSKLCCNFILPKLTSKFQPVQLGFGSKGGCEAAVHGVRSFLEHDKCEVLVKVDVKNAFNSIDRQNFLFESKNYIPKIYPYLNQCYSFPSDLVYKSHLIHSVTGCQQGDPLGPAIFSLGIHKIISALKSKLNVWYLDDGTLGGTVSDVIEDLETITKQFQNIGLQLNFSKCELFISDLIQPSEKKFIFKKFNDLAPNIKIVDKKSLNLLGAPIFSDSYENFISGQSSKFSEMSSRLLKIHAHVAFTIIRFCLFVPKLTYVLRCTPFFKHINLLLSLDDTLKNILTQILNCQFNNKTWSQATLPIRYGGLGVRKISSVSLPAYLSSIHSCKCLFEKIIRNDCDISVPSCMSEAIDKWKNECPDLNVPTESSSQRLWDEPICEKIQKELLTSENNLAERARLIASAKKESGFWLQALPSPNLGTLLDNITFNTCISLRLGCSYISSHNCVCGFQVDYKGYHGLSCQRSAGRISRHAAINDVIRRALVSVNVPALLEPNGLVRDDGKRPDGMTLIPWSRGKPLVWDATCVDTLAASHLSSTSREAGSAAAAAEVTKRRKYASIGDGYIFLPFATETLGPWGPDALKFYKEVSKLLVLASGDQRAGSYLGQRISIAIQRGNAASLLGTLPRDPHLDF

SEQ ID NO: 14163 - protein, 953 aa, Idaea aversata
MPYRNVSVPSLDGVEGNPVRCNQCSKVFKGEKGLKIHIGKVHKFNTGIGTSSIDLSTPSVSSLNNSQPFWQKLSNLKSNVPILKRIPRGARISVAKILSQKISKVVKDNSESAWEDLFCFSFSVLHSNKEKKVSLTTSIKQNCHNTSDINFDNFSSNNLHHVFNLFKKVESKVYDGDIKGASYLLFSSDSAAPDSPETFKSLQDKHPLPLTPFPLHSMPVDELPLEVTAKNVYAAVMSFKNGSAGGLDGLSPQHLKDLVCNSTGDAGKLLLKDLTDLTNLMLSGKVNSNIIPLLYGANLVALKKKDGGIRPIAVGCTFRRLTSKLCCNFILPKLTSKFQPVQLGFGSKGGCEAAVHGVRSFLEHDKCEVLVKVDVKNAFNSIDRQNYLFESKNYIPKIYPYLNQCYSFPSDLVYKSHLIHSVTGCQQGDPLGPAIFSLGIHKIISALKSKLNVWYLDDGTLGGTVSDVIEDLETITKPFQNNGLQLNFSKCELFISDLIQPSEKKFIFKKFNDLAPNIKIVDKKSLNLLGAPIFSDSYENFISGQSSKFSEMSSRLLKIHAHVAFTIIRFCLFVPKLTYVLRCTPFFKHINLLLSLDDTLKNILTQILNCQFNNKTWSQATLPIRYGGLGVRKISSVSLPAYLSSIHSCKCLFEKIIRNDCDISVPSCMSEAIDKWKNECPDLNVPTESSSQRLWDEPICEKIQKELLTSENNLAERARLIASAKKESGFWLQALPSPNLGTLLDNITFNTCISLRLGCSYISSHNCVCGFQVDYKGYHGLSCQRSAGRISRHAAINDVIRRALVSVNVPALLEPNGLVRDDGKRPDGMTLIPWSRGKPLVWDATCVDTLAASHLSSTSREAGSAAAAAEVTKRRKYASIGDGYIFLPFATETLGPWGPDALKFYKEVSKLLVLASGDQRAGSYLGQRISIAIQRGNAASLLGTLPRDPHLDF

SEQ ID NO: 14164 - protein, 975 aa, Idaea aversata
MFSVILILFVLVLLLFCKLFVIMPYRNVSVPSLDGVEGNPVRCNQCSKVFKGEKGLKIHIGKVHKFNTGIGTSSIDLSTPSVSSLNNSQPFWQKLSNLKSNVPILKRIPRGARISVAKILSQKISKVVKDNSESAWEDLFCFSFSVLHSNKEKKVSLTTSIKQNCHNTSDINFDNFSSNNLHHVFNLFKKVESKVYDGDIKGASYLLFSSDSAAPDSPETFKSLQDKHPLPLTPFPLHSMPVDELPLEVTAKNVYAAVMSFKNGSAGGLDGLSPQHLKDLVCNSTGDAGKLLLKDLTDLTNLMLSGKVNSNIIPLLYGANLVALKKKDGGIRPIAVGCTFRRLTSKLCCNFILPKLTSKFQPVQLGFGSKGGCEAAVHGVRSFLEHDKCEVLVKVDVKNAFNSIDRQKFLFESKNYIPKIYPYLNQCYSFPSDLVYKSHLIHSVTGCQQGDPLGPAIFSLGIHKIISALKSKLNVWYLDDGTLGGTVSDVIEDLETITKQFQNIGLQLNFSKCELFISDLIQPSEKKFIFKKFNDLAPNIKIVDKKSLNLLGAPIFSDSYENFISGQSSKFSEMSSRLLKIHAHVAFTIIRFCLFVPKLTYVLRCTPFFKHINLLLSLDDTLKNILTQILNCQFNNKTWSQATLPIRYGGLGVRKISSVSLPAYLSSIHSCKCLFEKIIRNDCDISVPSCMSEAIDKWKNECPDLNVPTESSSQRLWDEPICEKIQKELLTSENNLAERARLIASAKKESGFWLQALPSPNLGTLLDNITFNTCISLRLGYSYISTHNCVCGFQVDSKGYHGLSCRRSAGRISRHAAINDVIRRALVSVNVPALLEPNGLVRDDGKRPDGMTLIPWSRGKPLVWDATCVDTLAASHLSSTSREAGSAAAAAEVTKRRKYASIGDGYIFLPFATETLGPWGPDALKFYKEVSKLLVLASGDQRAGSYLGQRISIAIQRGNAASLLGTLPRDPHLDF

SEQ ID NO: 14165 - protein, 997 aa, Idaea aversata
MFFDILVLILFIVAGLFLTKFIIMISSPCTSVSASIRGNLVSVVDDNNLVKCDQCPQLRYFKGEKGLKIHIGRVHKKNLLSPSSTTSAIPSNVFTSTHQIHVQNPQQPFWQSLSYLKNNVSVIKRIPRGARIRVAQSLSDKISKIISENSVQAWEELLSFSFNILHVQRKKDTSLTASIKQNCNISVSDIKNYTNSYNNNIHPFNIFKKVESKMFDGDIKGASNLLFSHDTAATVSPETLISLQSKHPPPLIHFPLQFCPPDQEHLKVSEKNVYAAIMSFKNGSAGGLDGLTPQHLKDLVCTSTGDAGRVLLKEITALTNLMLSGEINPQILPVLYGANLIALNKKDGGIRPIAVGCTFRRLTSKICCNNILPSLSTLLQPLQIGFGSKGGCEAAVHAVRSFLDNECGEVLLKVDVKNAFNSIERQNLLFEIRDQIPSIYSYLFQSYGFPSKLVYKNNLIHSTTGCQQGDPLGPAIFSLGIHNIISSLSSELNVWYLDDGTLGGKASDVLADLEILIVKFRSIGLELNISKCELFVSEHVPFSERSNIIEKFNSLAQNIKITNKETLYLLGAPIFEDSFPSYISKQNSKFLEMSSRLLKIHAHVAYFIIRYCLFVPKLTYVLRCTPLWKYENLLNTLDDSLKILLIKILNCNLNDISWNQASLPIRFGGLGIRKIYSVSLPAFISSTHSTKNLFIEILKKSPLDLDSTQPSSMTEAINAWRLACPDTDFPSCLSSQRQWDEPICSRIQESLLNSAGNLSDRARLLAAAKKESGFWLQALPSPNLGTLLDNISFQMCIGLRLGTLTTHIHKCICGVDTDNFGHHGLSCRRSAGRLSRHAAINDVIRRALVSVNVPALLEPNGLVRDDGKRPDGMTLIPWSHGKPLVWDATCVDTLAASHLVSTSREAGAAATAAEVVKRRKYVSIGDGYMFLPFATETLGPWGPEALDFYKNISKLLVLASGDQRAGCYFGQRIGIAIQRGNAASLLGTLPREIHLDY

SEQ ID NO: 14166 - protein, 784 aa, Idaea aversata
MFDGDIKGASNLLFSHDTAATVSPETLISLQSKHPPPLIHFPLQFCPPDQEHLKVSEKNVYAAIMSFKNGSAGGLDGLTPQHLKDLVCTSTGDAGRVLLKEITALTNLMLSGEINPQILPVLYGANLIALNKKDGGIRPIAVGCTFRRLTSKICCNNILPSLSTLLQPLQIGFGSKGGCEAAVHAVRSFLDNECGEVLLKVDVKNAFNSIERQNLLFEIRDQIPSIYPYLFQSYGFPSKLVYKNNLIHSTTGCQQGDPLGPAIFSLGIHNIISSLSSELNVWYLDDGTLGGKASDVLADLEILIVKFRSIGLELNFSKCELFVSEHVPFSERSNIIEKFNSLAQNIKITNKETLYLLGAPIFEDSFPSYISKQNSKFLEMSSRLLKIHAHVAYFIIRYCLFVPKLTYVLRCTPLWKYENLLNTLDDSLKILLIKILNCNLNDISWNQASLPIRFGGLGIRKIYSVSLPAFISSTHSTKNLFIEILKKSPLDLDSTQPSSMTEAINAWRLACPDTDFPSCLSSQRQWDEPICSRIQESLLNSAGNLSDRARLLAAAKKESGFWLQALPSPNLGTLLDNISFQMCIGLRLGTLTTHIHKCICGVDTDNFGHHGLSCRRSAGRLSRHAAINDVIRRALVSVNVPALLEPNGLVRDDGKRPDGMTLIPWSHGKPLVWDATCVDTLAASHLVSTSREAGAAATAAEVVKRRKYVSIGDGYMFLPFATETLGPWGPEALDFYKNISKLLVLASGDQRAGCYFGQRIGIAIQRGNAASLLGTLPREIHLDY

SEQ ID NO: 14167 - protein, 784 aa, Idaea aversata
MFDGDIKGASNLLFSHDTAATVSPETLISLQSKHPPPLIHFPLQFCPPDQEHLKVSEKNVYAAIMSFKNGSAGGLDGLTPQHLKDLVCTSTGDAGRVLLKEITALTNLMLSGEINPQILPVLYGANLIALNKKDGGIRPIAVGCTFRRLTSKICCNNILPSLSTLLQPLQIGFGSKGGCEAAVHAVRSFLDNECGEVLLKVDVKNAFNSIERQNLLFEIRDQIPSIYPYLFQSYGFPSKLVYKNNLIHSTTGCQQGDPLGPAIFSLGIHNIISSLSSELNVWYLDDGTLGGKASDVLADLEILIVKFRSIGLELNFSKCELFVSEHVPFSERSNIIEKFNSLAQNIKITNKETLYLLGAPIFEDSFPSYISKQNSKFLEMSSRLLKIHAHVAYFIIRYCLFVPKLTYVLRCTPLWKYENLLNTLDDSLKILLIKILNCNLNDISWNQASLPIRFGGLGIRKIYSVSLPAFISSTHSTKNLFIEILKKSPLDLDSTQPSSMTEAINAWRLACPDTDFPSCLSSQRQWDEPICSRIQESFLNSAGNLSDRARLLAAAKKESGFWLQALPSPNLGTLLDNISFQMCIGLRLGTLTTHIHKCICGVDTDNFGHHGLSCRRSAGRLSRHAAINDVIRRALVSVNVPALLEPNGLVRDDGKRPDGMTLIPWSHGKPLVWDATCVDTLAASHLVSTSREAGAAATAAEVVKRRKYVSIGDGYMFLPFATETLGPWGPEALDFYKNISKLLVLASGDQRAGCYFGQRIGIAIQRGNAASLLGTLPREIHLDY

SEQ ID NO: 14168 - protein, 948 aa, Blastobasis adustella
MSSSSPSLKCPYCADSFRSFTTHGLKVHIGRMHKNVPPVTPSSFAGSVVVSQPSQADTSGIAVLRSLATLRRTVRVLRHIPKGARSLAAGRMSDLIDKCIEDNGTEDWSAFLTFAYSGLKSPESMGSGTLTTKVKQNIQDSCNGFSSDEFGGNKPLSSVERRIESKVHEGDLRGAVRLLMSSDTVAPSSPETLASLHEKHPAPSRPLAFPPSPDRSVSACKVKAEDVLQALKTFHNGSAAGLDGIRPVHLKELTSLSAGDNGRRLIDGLTKLSNFLLSGLLNPEVCPFLYGATLCALSKKDGGLRPIAIGNTIRRLVAKLGCCAVREEMANYLRPRQLGFGTPLGCEAAIHAVRTVAMDPERANYVIVKLDIKNAFNTVERDVLLSEARDKLPSLYSFLHQLYHSPSNLFYDGSLILSQVGAQQGDPLGPLAFSLAIHKAISELKSPLNIWYLDDGTIGGTAEVVKEDLQILLPHFRRLGLEVNTGKCEFLPCSTKSRASFPLFSSLLPGLRELFSSSFQLLGSPIFPEAIPETFDSRGQLLLVARDRLEKLSAHVALLLLRMCFAVPKINYFLRTCPTWLFPDSIAAFDEILRDSVESILNVSLSEDQWSQASLPIRCGGLGIRRVRDVSLPAFLASSHGVVSLVTNILSVDGGRINIPHVGDALTAWGALNPTTPKTECPESQRSWDSIGAKRVLEQLEGVAMGVDLARLKAVSQPESGAWLHALPSPHLGTLLDSESLRVAVALRLGCDVCEPHQCICGSRVEANGHHALSCCRCLGRFPRHHALNDIVRRALVSSNIPCALEPPGLSRSDGKRPDGVTLVPWHKGKCLLWDATCVSTFAASHLGRTVRAAGAAAESAALRKRDKYSALQNNYLFVALAAETTGCWCEEARVFLKDVGRRMRERGGDPRSGSFLLQRLSIAIQRGNAASVMGTFAPGMAKSGLNI

SEQ ID NO: 14169 - protein, 917 aa, Blastobasis adustella
MHKDISRTPVASQFSNVASHPLQVSDGTEALKSLATLKRTVWVLRHVPKGARSLAAGRLCHLIDDCIELNGIEQWSVLLTFAYKGLKSPEATGPGTLTTKVKENIQNCCGCCFSDGTGGNKSPTTVERRIENKVFEGDLRGAVRLLMSNDTVAPPGPETLASLHVKHPPPSRPLDFPRSPDRSIPTYTIKAQDVVQALNTFYNGSVSGLDGIRPAHLKELTSPSAGDNGHRLVDSLAKLCNFLFSGQLNTEVCPFLYGATLCALSKKDGGLRPIAIGNTIRRLAAKLGCCAVREEIAGYLSPHQLGFGTRLGCEAAIHAVRAFAMDPGQTGSVIVKLDIKNAFNSVERDVLLSEVGEKLPSLYPFLYQLYHSPSNLFYDETLILSQVGAQQGDPLGPLAFSLAIHKAILELKSPLNVWYLDDGTIGGKPEVVEQDLKILLPHFRRLGLEINSTKCEFFSCGLESRSSFPLFSSLLPGLRELSPSSFHILGSPIFPEAIPEAFEFRRQLLLVAGRRLENLSAHVALLLLRMCFAVPKVNYFLRTCPTWLYPDSIAAFDEVLRNSVERILNVALNAEQWSQASLPIRCGGLGVRRVRDVSLPAFLASSHGVVSLVTNILTVNGGRTNIPYVSDALTAWGALNPTSPLPEGPECQRSWDGVGVKRTLEQLESVAMGVDLARLKAVSRPESGAWLHALPSPHLGTLLDSDSLRVAVSLRLGCDVCVPHQCICGSRVEANGHHALSCCRCSGRFPRHHALNDIVRRALVAANIPCTLEPPGLCRSDGKRPDGLTLVPWQRSKCLLWDATCVSTFAASHLARTVRAAGAAAELAALRKRDKYSELENNYLFVPLAAETTGCWCEEARGFIKDVGRRMRERGGDPRSGSFLLQRLSIAIQRGNAASVMGTFGPGMAKSGASSLS

SEQ ID NO: 14170 - protein, 888 aa, Blastobasis lacticolella
MSSSPSLKCPYCADSFRSFTPHGLKVHIGRMHKNVPVTSSSSADRVVVSQPPQADTSGIAVLGSLATLRRTVRVLRHIPKGARSLAAGRVSDLINKCVKDNGTEDWSAFLTFAYSGLKSPESTGSETLTTKVKQNIQDSCNGFSLDEFSGNKSVSSVERRVESKVHEGDLRGAVRLLMSSDTVAPSGPETLASLHAKHPTPTRPLAFPPPPDLGTVSACKVKAEDVLQALNTFHNGSAAGLDGIRPVHVKELSSPSAGDNGRRLVEGLTKLSNFLLSGQLNPEVRPFLYGATLCALSKKDGGLRPIAIGNTIRRLVAKLGCCAVKEEMANYLRPRQLGFSTPLGCEAAIHAVRTVVMDPEKANYVIVKLDIKNAFNSVERDVLLSEARDKLPSLYPFLHQLYHSPSNLFYDGSLILSQVGAQQGDPLGPLVFSLAIHKAISELKSPLNIWYLDDGTIGGTADVVKEDLQILLPHFQRLGLEVNTGKCEFFPCSIESRAFFPLFSSLLPGLRELSSSSFQLLGSPIFPEAIPETFDSRRQLLLVARDRLEKLSAHVALLLLRMYYAVPKINYFLRTCPTWLFPDSIATFDEVLRDSVESILNVSLSEDQWSQASLPIRCGGLGIRRVRDVSLPAFLASSHGVVSLVTNILSVDGGRINIPHVSDALTAWGALNPTTPITECPESQRSWDNVGAKRVLEQLEGVAVGVDLARLKAVSQPESGAWLHALPSPHLGTLMDSESLRVAVALRLGCDVCEPHQCICGSRVEADGHHALSCCRCAGRFPRHHALNDVVRRALVSANIPCALEPPGLSRSDGKRPDGVTLVPWQKGKCLLWDATCVSTFSASHLGRTVRAAGAAAESAALRKRNKYSALQNNYLFVPLAAETTGCW

SEQ ID NO: 14171 - protein, 947 aa, Blastobasis lacticolella
MSSSPSLKCPYCADSFRSFTPHGLKVHIGRMHKNVPVTSSSSADRVVVSQPPQADTSGIAVLGSLATLRRTVRVLRHIPKGARSLAAGRMSDLINKCVKDNGTEDWSAFLTFAYSGLKFPESTGSETLTTKVKQNIQDSCNGFSLDEFSGNKSVSSVERRVESKVHEGDLRGAVRLLMSSDTVAPSGPETLASLHAKHPAPTRPLAFPPPPDLGTVSACKVKAEDVLQALNTFHNGSAAGLDGIRPVHLKELSSPSAGDNGLRLVEGLTKLSNFLLSGQLNPEVCPFLYGATLCALSKKDGGLRPIAIGNTIRRLVAKLGCCAVKEEMANYLRPRQLGFGTPLGCEAAIHAVRTVVMDPEKANYVIVKLDIKNAFNSVERDVLLSEARDKLPSLYPFLHQLYHSPSNLFYDGSLILSQVGAQQGDPLGPLAFSLAIHKAISELKSPLNIWYLDDGTIGGTADVVKEDLQILLPHFQRLGLEVNTGKCEFFPCSIESRAFFPLFSSLLPGLRELSLSSFQLLGSPIFPEAIPETFDSRRQLLLVARDRLEKLSAHVALLLLRMCFAVPKINYFLRTCPTWLFPDSIATFDEVLRDSVESILNVSLSEDQWSQASLPIRCGGLGIRRVRDVSLPAFLASSHGVVSLVTNILSVDGGRINIPHVGDALTAWGALNPTTPITECPESQRSWDNIGAKRVLEQLEGVAVGVDLARLKAVSQPESGAWLHALPSPHLGTLMDSESLRVAVALRLGCDVCEPHQCICGSRVEANGHHALSCCRCAGRFPRHHALNDVVRRALVSANIPCALEPPGLSRSDGKRPDGVTLVPWQKGKCLLWDATCVSTFSASHLGRTVRAAGAAAESAALRKRNKYSALQNNYLFVPLAAETTGCWCDEARVFFKDVGRRLRERGGDPRSGSFLLQRLSIAIQRGNAASVMGTFAPGMAKSGLNI

SEQ ID NO: 14172 - protein, 969 aa, Blastobasis adustella
MQNLFTSFFIYSVIVYLCTFSMSSSSPSLKCPYCADSFRSFTTHGLKVHIGRMHKNVPPVTPSSFAGSVVVSLPSQADTSGIAVLRSLATLRRTVRVLRHIPKGARSLAAGRMSDLIDKCIEDNGTEDWSAFLTFAYSGLKSPESMGSGTLTTKVKQNIQDSCNGFSLDEFGGNKPLSSVERRIESKVHEGDLRGAVRLLMSSDTVAPSSPETLASLHEKHPAPSRPLAFPPSPDRSVSACKVKAEDVLQALNTFHNVSAAGLDGIRPVHLKELTSLSAGDNGRRLIDGLTKLSNFLLSGLLNPEVCPFLYGATLCALSKKDGGLRPIAIGNTIRRLVAKLGCCAVREEMANYLRPRQLGFGTPLGCEAAIHAVRTVAMDPERANYVIVKLDIKNAFNMVERDVLLSEARDKLPSLYSFLYQLYHSPSNLFYDGSLILSQVGAQQGDPLGPLAFSLAIHKAISELKSPLNIWYLDDGTIGGTAEVVKEDLQILLPHFRRLGLEVNTGKCEFFPCSTESRASFPLFSSLLPGLRELSSSSFQLLGSPIFPEAIPETFDSRGQLLLVARDRLEKLSAHVALLLLRMCFAVPKINYFLRTCPTWLFPNSIAAFDEILRDSVESILNVSLSEDQWSQASLPIRCGGLGIRRVRDVSLPAFLASSHGVVSLVTNILSVDGGRINIPHVGDALTAWGALNPTTPKTECPESQRSWDNIGAKRVLEQLEGVAMGVDLARLKAVSQPESGAWLHALPSPHLGTLLDSESLRVAVALRLGCDVCEPHQCICGSRVEANGHHALSCCRCLGRFPRHHALNDIVRRALVSSNIPCALEPPGLSRSDGKRPDGVTLVPWHKGKCLLWDATCVSTFAASHLGRTVRAAGAAAESAALRKRDKYSALQNNYLFVALAAETTGCWCEEARVFLKDVGRRMRERGGDPRSGSFLLQRLSIAIQRGNAASVMGTFAPGMAKSGLNI

SEQ ID NO: 14173 - protein, 948 aa, Blastobasis adustella
MSSSSPSLKCPYCADSFRSFTTHGLKVHIGRMHKNVPPVTPSSFAGSVVVSQPSQADTSGIAVLRSLATLRRTVRVLRHIPKGARSLAAGRMSDLIDKCIEDNGTEDWSAFLTFAYSGLKSPESMGSGTLTTKVKQNIQDSCNGFSSDEFGGNKPLSSVERRIESKVHEGDLRGAVRLLMSSDTEAPSSPETLASLHEKHPAPSRPLAFPPSPDRSVSACKVKAEDVLQALKTFHNGSAAGLDGIRPVHLKELTSLSAGDNGRRLIDGLTKLSNFLLSGLLNPEVCPFLYGATLCALSKKDGGLRPIAIGNTIRRLVAKLGCCAVREEMANYLRPRQLGFGTPLGCEAAIHAVRTVAMDPERANYVIVKLDIKNAFNTVERDVLLSEARDKLPSLYSFLHQLYHSPSNLFYDGSLILSQVGAQQGDPLGPLAFSLAIHKAISELKSPLNIWYLDDGTIGGTAEVVKEDLQILLPHFRRLGLEVNTGKCEFFPCSTESRASFPLFSSLLPGLRELSSSSFQLLGSPIFPEAIPETFDSRGQLLLVARDRLEKLSAHVALLLLRMCFAVPKINYFLRTCPTWLFPDSIAAFDEILRDSVESILNVSLSEDQWSQASLPIRCGGLGIRRVRDVSLPAFLASSHGVVSLVTNILSVDGGRINIPHVGDALTAWGALNPTTPKTECPESQRSWDSIGAKRVLEQLEGVAMGVDLARLKAVSQPESGAWLHALPSPHLGTLLDSESLRVAVALRLGCDVCEPHQCICGSRVEANGHHALSCCRCLGRFPRHHALNDIVRRALVSSNIPCALEPPGLSRSDGKRPDGVTLVPWHKGKCLLWDATCVSTFAASHLGRTVRAAGAAAESAALRKRDKYSALQNNYLFVALAAETTGCWCEEARVFLKDVGRRMRERGGDPRSGSFLLQRLSIAIQRGNAASVMGTFAPGMAKSGLNI

SEQ ID NO: 14174 - protein, 1337 aa, Blastobasis adustella
MALDTAIPPRGLLEDVAQGANCGSYTAPTTSTAPNTRTRRRWSTDTNEFILRAYFQLTALEIDKKCYLGPLHSKFTEKYPNTDVSRQRLGDQCRAILRNKLIPQPRIDTIYNEVKCELQNLQQEVYMQNNTHSTIPITCTQQTTAHSSSILTSSLSHSATQNPQQSSRMRWLQEHNEAIMFSYLRITLMETNKTAYRKQLHRDFISKFPHLAHLTEQRIADQRRLIVNNKYIGDNRMNVIKQEVAAALQVDTNRNDTHIMDTNMESYEVDAIPNDTQTTIDPCSEMDTNLEPHTTEPDLTSNVLQANSETASNRNIKIDETFHSIYQHYKDTPPTNRAYIPKLKSSKKLSKIIHYMNEVILPERINGDTDFNTLQTTIYCAAWTVAKENGSKMSVTQPDGSFHTATHTKPKWQRRLEQKICELRRKIGRLTQYIKGNRNRKLSEQVQKILEENKIHTVHESANTQLTYFLDTLKQKLSLTSCRLKRYMECTHRKKQNIQFNNNEKQFYRQITKTTFDSHESITQTNINSTPDPEELHRFWSNIWQTPVEHNADAEWIKTETANNIHKQPMQFDHISADIFQRVLRRIHNWKAPGSDHIHSYWYKQFTSIHPFIHNFINEFILYPDKMPKYIATGITYMIPKDVNDLVNPAKYRPITYLQTLYKILTSCLAELIYEHINSNEILAEQQKGCRKFSQGCKEQLTIDSIVLKQVKKTKSDLYTMYIDYKKAYDSVPHSWLLKILEIYKVHPKLISFLHNTMLSWATNLKINTDINTTQIRIQRGIFQGDALSPLWFCLALNPLSNLLNTCDAGYPLNSNMQTDRDQLKLNHLLYMDDIKLYAVNREELHLIASTTENMSKDICMEFGIDKCKINSVRAGIHVEHHYELQSGDRIESLNENETYKYLGYHQTQQIEHKNIKASLTKQFKHRLNLILKSQLNSKNTIKAINSFAIPILTYSFGIINWTKSDLNNLQRTINTNMTKQRKHHPRSCVQRLILPRIEGGRGLIDIKNLHDKQISTLKIYFNDKTSTSKIHEAIVQIDRKLTPLNLSDTNTLRNEHQINTQTLFSDWARKSLHGRHLHDLNQPNVDKSASNEWLRRGELFPETEGFMLAIQDQIIETRNYQKYIIRSITSDTCRRCNSSSETIQHITGACKSIVQTDYKYRHDQVAKIIQQQLALKYQLIAQPLIPYYKYNPNTVLENSSHKLYYDRAILTDRTVHYNRPDITLIDKTNKTAHLIDIAIPNSHNLQNTIAEKITKYIVLKDEIVRLWKLQRATIVPIVLSTTGIIPKQLHRSLETLDLPNFIYTLLQKAVILNTCRIVRMFLQNNPQPHDSANNNT

SEQ ID NO: 14175 - protein, 946 aa, Blastobasis adustella
MVPKCLLLNQTDHFTHTKPKWQRRLEQKICELRRKIGRLTQYIKGNRNRKLSEQVQKILEENKIHTVHESANTQLTYFLDTLKQKLSVTSCRLKRYMECTHRKKQNIQFNNNEKQFYRQITKTTFDSHEIITQTNINSTPDPEELHRFWSNIWQTPVEHNADAEWIKTETANNIHKQPMQFDHISADIFQRVLRRIHNWKAPGSDHIHSYWYKQFTSIHPFIHNFINEFILYPDKMPKYIATGISYMIPKDRNDLVNPAKYRPITCLQTLYKILTSCLAELIYEHINSNEILAEQQKGCRKFSQGCKEQLTIDSIVLKQVKKTKSDLYTMYIDYKKAYDSVPHSWLLKILEIYKVHPKLISFLHNTMLSWATNLKINTDINTTQIRIQRGIFQGDALSPLWFCLALNPLSNLLNTCDAGYPLNSNMQTDRDQLKLNHLLYMDDIKLYAVNREELHLIASITENMSKDICMEFGIDKCKINSVRAGIHVEHHYELQSGDRIESLNENETYKYLGYHQTQQIEHKNIKASLTKQFKHRLNLILKSQLNSKNTIMAINSFAIPILTYSFGIINWTKSDLNNLQRTINTNMTKQRKHHPRSCVQRLILPRIEGGRGLIDIKNLHDKQISTLKIYFNDKTSTSEIHEAIVQIDRKLTPLNLSDTNTLRNEHQINTQTLLSDWARKSLHGRHLHDLNQPNVDKSASNEWLRRGELFPVTEGFMLAIQDQIIETRNYQKYIIRSITSDTCRRCNSSSETIQHITGACKSIVQTDYKYRHDQVAKIIHQELALKYQLIAQPLIPYYKYNPNIVLENSSHKLYYDRAILTDRTVHYNRPDITLIDKTNKTAHLIDIAIPNSHNLQNTIAEKITKYIVLKDEIVRLWKLQRATIVPIVLSTTGIIPKQLHRSLETLDLPNFIYTLLQKAVILNTCRIVRMFLQNNPQPHDSANNNT

SEQ ID NO: 14176 - protein, 1397 aa, Blastobasis adustella
MITRSKYKKYLIHAREPVIAEETAENKSYSPITDIDNSSVDSQSLFSSIPSTRPSYMTRRTSIASTSTVTSLLEDVAQGANCGSYTAPTTSTAPNTRTRRRWSTDTNEFILRAYFQLTALETDKKCYLGPLHSKFTEKYPNTDVSRQRLGDQCRAILRNKLIPQLRIDTIYNEVKCELQNLQQEVYMQNNTHSTIPITCTQLTTAHSSSILTSSLSHSATQNPQQSSRMRWLQEHNEAIMFSYLRITLMETNKTAYRKQLHRDFISKFPHLAHLTEQRIADQRRLIVNNKYIGDNRMNVIKQEVAAALQVDTNRNDTHIMDTNLESYEVDAIPNDTQTTIDPCSEMDTNLEPHTTEPDLTSNVLQANSETASNRNIKIDETFHSIYQHYKDTPPTNRAYIPKLRSSKKLSKIIHYMNEVILPERINGDTDFNTLQTTIYCAAWTVAKENGSKMSVTQPDGSFHTATHTKPKWQRRLEQKICELRRKIGRLTQYIKGNRNRKLSEQVQKILEENKIHTVHESANTQLTYFLDTLKQKLSLTSCRLKRYMECTHRKKQNIQFNNNEKQFYRQITKTTFDSHESITQTNINSTPDPEELHRFWSNIWQTPVEHNADAEWIKTETANNIHKQPMQFDHISADIFQRVLRRIHNWKAPGSDHIHSYWYKQFTSIHPFIHNFINEFILYPDKMPKYIATGITYMIPKDRNDLVNPAKYRPITCLQTLYKILTSCLAELIYEHINSNEILAEQQKGCRKFSQGCKEQLTIDSIVLKQVKKTKSDLYTMYIDYKKAYDSVPHSWLLKILEIYKVHPKLISFLHNTMFSWATNLKINTDINTTQIRIQRGIFQGDALSPLWFCLALNPLSNLLNTCDAGYPLNSNMQTDRDQLKLNHLLYMDDIKLYAVNREELHLIASTTENMSKDICMEFGIDKCKINSVRAGIHVEHHYELQSGDRIESLNENETYKYLGYHQTRQIEHKNIKASLTKQFKHRLNLILKSQLNSKNTIKAINSFAIPILTYSFGIINWTKSDLNNLQRTINTNMTKQRKHHPRSCVQRLILPRIEGGRGLIDIKNLHDKQISTLKIYFNDKTSTSKIHEAIVQIDRKLTPLNLSDTSTLRNEHQINTQTLLSDWARKSLHGRHLHDLNQPNVDKSASNEWLRRGELFPETEGFMLAIQDQIIETRNYQKYIIRSITSDTCRRCNSSSETIQHITGACKSIVQTDYKYRHDQVAKIIHQQLALKYQLIAQPLIPYYKYNPNTVLENSSHKLYYDRAILTDRTVHYNRPDITLIDKTNKTAHLIDIAIPNLHNLQNTIAEKITKYIVLKDEIVRLWKLQRATIVPIVLSTTGIIPKQLHRSLETLDLPNFIYTLLQKAVILNTCRIVRMFLQNNPQPHDSANNNT

SEQ ID NO: 14177 - protein, 1379 aa, Blastobasis lacticolella
MITRSKSKKNFTQAREPVVIDKTVERKSDASDNNSTDSQSLFSSIPSTRPSFMTRRPSIASITTASSLLEDVAQGVNCDSQTAPTEGTAPNARTRRRWSTEINTFILRTYYQLTALGSDKKSYLGSLHTKFTEKYPNIEVSRQRLGDQCRAILRNKLIPQTAIDMIYNEVKNELQNLQREIHMQNNTCSSIPQTVPNTQQATPYSAPTFGSNSATQNPQQNCRMRWLQEHNEAIIFSYLKITQMETNKTAYRKLLHRDFISKFPHLAHLTEQRVADQRRLIINNKYISDERMNSIKQEVAAELQIITSQNNIHMNNDSYLEINTNMQPNNIELYTVPDEVQANSQTTFHRNVKIDETFNKVYQHYKDTPPTNRAYIPKLKASKKLAKIVHYINEVILPENINCDTNFNTLQTIIYCAAWTGAKEVGPKISMTPPDRLRQTNTHTKPNWQRRLEQKITDLRRKIGRLTQYINGNRNSKLNTQVQRILEQYKIHTLHENVNTQLAHFLDTLKQKLSLTSCRLNRYKECTLRKKQNTQFLNNERQFYRQMLKNTSDIHENNTQNNSTPDPEDFHRFWSNIWQTPVDHNAEADWIKTETMNHIHTHTMQFDCIPVDTFQEILRRLHNWKSPGSDNIHSYWYKKFTSIHPFLHNFINEFVLHPDKMPKYLSTGITYMIPKDPNDLENPAKYRPITCLQTLYKIVTSCLADLIYEHINSNKILAEQQKGCRKFSQGCKEQLIIDSTILKQVQKSKSNLYTMYIDYKKAYDSVPHFWLLQILDIYKIHPKLISFLHHTMLSWATSLKINTPITDMETEQIQIQRGIFQGDALSPLWFCLALNPLSNLLNTCDAGYPLNHKSDSTRRPDQEQLKLNHLLYMDDIKLYAMDREELHLLATITENLSQDIRMDFGIDKCKINSVRAGQLDEHNYELQSGDQIESLDQNGTYKYLGYHQSRQIDDKNTKHILTKQFIQRLNLILKSQLNARNTIKAINTFAIPILTYSFGIINWTVTELKNLQRIINTSMTKQRKHHPRSCVQRLTLPRTDGGRGLIDIKNLHNKQITTLRDYFYDKANTSTVHKAIVQKDRKLTPLNLSDTSTQKNELQLNAQTKISDWARKSLHGRHLHELSQPNVDKLASNEWLRRGELFPETEGFMLAIQDQVIETRNYQKHIIRSIPTDTCRRCNSSPETIQHITGGCKAIVQTDYKHRHDQVAKIIHQQLAIKYQLITQPLTPYYKYSPDTVLENSTHKLYFDRAILTDRTVHYNRPDITLIDKLNKTAQLIDIAVPNSHNLQNTIAEKMTKYIVLRDEIVRLWKLQKATIVPVVLSTTGVIPKQLHQSLETLALPNFTYSLLQKAAILNTCRIVRIFLQNTSNPHPQVPTGNP

SEQ ID NO: 14178 - protein, 785 aa, Blastobasis lacticolella
METTNNTHKHPMQFDYIPADIFQRVLRRLHNWKAPGSDHIHSYWYKQFTSIHPYIHNYINEFILHPEKMPKYIYHRITYMIPKDHSDLKNPAKYRPITCLQTLYKIITSCLADLIYDHIDNNQILAEQQKGCRKFSQGCKEQLTIDSVVLKQVQKTKSDIYTMYIDYKKAYDSVPHSWLLQILEIYKIHPTLISFLQNTMSNWVTSLKINTSISDIETEDIRIQRGIFQGDALSPLWFCLALNPLSNLLNTCDAGYPLKYNSNCNTQTDRVQLKLKHLLYMDDIKLYAADREELHLLASITEALSHDIHMDFGIDKCKINSVIAGQQDDQCYELQSGEQIEPLDENGTYKYLGYLQSQQIEHKNTKVNLRKQFKHRLNLILKSQLNARNTIKAINTFAIPILTYSFGIITWTKTELINLQRTINTTMTKQRKHHPRSCVQRLVLPRTDGGRGLIDIKNLHNKQISTLRTYFHDKANTSTIHEAIIQRDRKLTPLNLSDTSSKRNEHQVDTQTKLSEWARKSLHGRHLHDLNQPNVDKLALNEWLRRGELFPETEGFMLAIQDQVIETRNYQKHIIKSIPSDTCRRCNSLPETIQHITGACRAIVQTDYKHRHDQVAKIIHQQLALKYQLTTQPLTPYYKYNPDTVLENSTHKLYYDRAILTDRTIHYNRPDITLINKINKTAQLIDIAIPNSHNLQTTISEKLTKYIDLKDEVVRLWKLQKATIVPIVLSTTGIIPKQLHQSLESLDLPKFTYSLLQKATILNTCRIVWIFLQNNPQPHESNSNS

SEQ ID NO: 14179 - protein, 1388 aa, Blastobasis adustella
MSLATRGNQMITRSKSKKNFTQAREPVVVDKTVKRKSDASDNNSTDSQSLFSSIPSTRQSYMTRRPSIASTITASSLLEDVAQGVNCDSQVAPTESTAPNVRTRRRWSTEINIFILRTYYQLTALGSDKKSYLGSLHTKFAEKYPSIEVSRQRLGDQCRAILRNKLIPQTTIDMIYNEVKDELQNLQREIHMRNSTCSNILQAVPNTQQATPCSASTFASNSATQNPQQSCRMRWLQEHNETIMFSYLKITQMETNKTAYRKLLHRDFISKFPHLAHLTEQRVADQRRLIINNKYISDERMNSIKQEVTAELQIITSQNNIHMSNESYLEIDTNMQSNNKEPDTVPDEAQDNSQTTSHRNGKIDETFNKVYQHYKDTPPTNRAYIPKLKTSKKLAKIVHYINEVILPENINCDTDFNTLQTIIYCAAWTGAKESGSKISMTPPDRLHPTNIHTKPNWQRRLEQKITDLRRKIGRLTQYINGNRNRKLNTQVQSILEQYKIHTLHENVNTQLAHFLDTLKQKLSLTSCRLNRYKECTLRKKQNTQFLNNERQFYRQMPKNTSDSHENNTQNNTTPNPEDFHRFWSNIWQTPVDHNAEADWIKTETMNHIHTHTMQFDCIPVDTFQGVLRRLHNWKSPGSDHIHSYWYKRFTSIHPFLHNFINEFILHPDEMPKYLSTGITYMIPKDPNDLENPAKYRPITCLQTLYKIVTSCLADLIYEHINGNKILAEQQKGCRKFSQGCKEQLIIDSTILKQVQKSKSNLYTMYIDYKKAYDSVPHSWLLQILDIYKIHPKLISFLHHTMLSWVTSLKINTPIRDIETEQIQIQRGIFQGDALSPLWFCLALNPLSNLLNTCDVGYPLNHQSDSTRRPDREQLKLNHLLYMDDIKLYAIDREELNLLATITESLSQDIRMDFGIDKCKINSVRAGQLDEHHYELQSGDRIESLDQNGTYKYLGYHQSRQIDNKNTKLNLTKQFKQRLNFLLKSQLNARNTIKAINTFAIPILTYSFGIINWTISELKNLQRIINTSMTKQRKHHPRSCVQRLTLPRTDGGRGLIDIKNLHNKQITTLRDYFYDKANTSTVHKAIVKKDRKLTPLNLSDTSTQKNELQINAQTKISDWAQKSLHGRHLHELNQPNVDKLASNEWLRRGELFPETEGFMLAIQDQVIETRNYQKHIIRSIPTDTCRRCNSSPETIQHITGACKAIVQTDYKHRHDQVAKIIHQQLAIKYQLITQPLTPYYKYSPDTVLENSTHKLYFDRAILTDRTVHYNRPDITLIDKLNKTAKLIDIAIPNSHNLQNTIAEKMTKYIVLRDEIVRLWKLQRATIVPVVVSTTGVIPKQLHQSLETLALPNFTYSLLQKAAILNTCRIVRMFLQNTSNPHPQVPTGIP

SEQ ID NO: 14180 - protein, 1215 aa, Blastobasis adustella
MIYNEVKDELQNLQREIHMRNSTCSNILQAVPNTQQATPCSASTFASNSATQNPQQSCRMRWLQEHNETIMFSYLKITQMETNKTAYRKLLHRDFISKFPHLAHLTEQRVADQRRLIINNKYISDERMNSIKQEVTAELQIITSQNNIHMSNESYLEIDTNMQSNNIEPDTVPDEAQDNSQTTSHRNGKIDETFNKVYQHYKDTPPTNRAYIPKLKTSKKLAKIVHYINEVILPENINCDTDFNTLQTIIYCAAWTGAKESGSKISMTPPDRLHPTNIHTKPNWQRRLEQKITDLRRKIGRLTQYINGNRNRKLNTQVQSILEQYKIHTLHENVNTQLAHFLDTLKQKLSLTSCRLNRYKECTLRKKQNTQFLNNERQFYRQMPKNTSDSHENNTQNNTTPNPEDFHRFWSNIWQTPVDHNAEADWIKTETMNHIHTHTMQFDCIPVDTFQGVLRRLHNWKSPGSDHIHSYWYKRFTSIHPFLHNFINEFILHPDEMPKYLSTGITYMIPKDPNDLENPAKYRPITCLQTLYKIVTSCLADLIYEHINGNKILAEQQKGCRKFSQGCKEQLIIDSTILKQVQKSKSNLYTMYIDYKKAYDSVPHSWLLQILDIYKIHPKLISFLHHTMLSWVTSLKINTPIRDIETEQIQIQRGIFQGDALSPLWFCLALNPLSNLLNTCDVGYPLNHQSDSTRRPDREQLKLNHLLYMDDIKLYAIDREELNLLATITESLSQDIRMDFGIDKCKINSVRAGQLDEHHYELQSGDRIESLDQNGTYKYLGYHQSRQIDNKNTKLNLTKQFKQRLNFLLKSQLNARNTIKAINTFAIPILTYSFGIINWTISELKNLQRIINTSMTKQRKHHPRSCVQRLTLPRTDGGRGLIDIKNLHNKQITTLRDYFYDKANTSTVHKAIVKKDRKLTPLNLSDTSTQKNELQINAQTKISDWAQKSLHGRHLHELNQPNVDKLASNEWLRRGELFPETEGFMLAIQDQVIETRNYQKHIIRSIPTDTCRRCNSSPETIQHITGACKAIVQTDYKHRHDQVAKIIHQQLAIKYQLITQPLTPYYKYSPDTVLENSTHKLYFDRAILTDRTVHYNRPDITLIDKLNKTAKLIDIAIPNSHNLQNTIAEKMTKYIVLRDEIVRLWKLQRATIVPVVVSTTGVIPKQLHQSLETLALPNFTYSLLQKAAILNTCRIVRMFLQNTSNPHPQVPTGIP

SEQ ID NO: 14181 - protein, 1379 aa, Blastobasis lacticolella
MITRSKSKKNFTQAREPVVIDKTVERKSDASDNNSTDSQSLFSSIPSTRPSFMTRRPSIASTTTASSLLEDVAQGVNCDSQTAPTEGTAPNARTRRRWSTEINTFILRTYYQLTALGSDKKSYLGSLHTKFTEKYPNIEVSRQRLGDQCRAILRNKLIPQTAIDMIYNEVKNELQNLQREIHMQNNACSSIPQIVPNTQQATPYSAPTFASNSATQNPQQNCRMRWLQEHNEAIIFSYLKITQMETNKTAYRKLLHRDFISKFPHLAHLTEQRVADQRRLIINNKYISDERMNSIKQEVAAELQIITSQNNIHMNNDSYLEINTNMQPNNIEPYTVPDEVQANSQTTFHRNVKIDETFNKVYQHYKDTPPTNRAYIPKLKASKKLAKIVHYINEVILPENINCDTDFNTLQTIIYCAAWTGAKEVGSKISMTPPDRLRQTTTHTKPNWQRRLEQKITDLRRKIGRLTQYINGNRNRKLNTQVQRILEQYKIHTLHENVNTQLAHFLDTLKQKLSLTSCRLNRYKECTLRKKQNTQFLNNERQFYRQMRKNTSDIHENNTQNNSTPDPEDFHRFWSNIWQIPVDHNAEADWIKTETMNHIHTHTMQFDCIPVDTFQEVLRRLHNWKSPGSDNIHSYWYKKFTSIHPFLHNFINEFVLHPDKMPKYLSTGITYMIPKDPNDLENPAKYRPITCLQTLYKIVTSCLADLIYEHINSNKILAEQQKGCRKFSQGCKEQLIIDSTILKQVQKSKSNFYTMYIDYKKAYDSVPHSWLLQILDIYKIHPKLISFLHHTMLSWATSLKINAPITDMETEQIQIQRGIFQGDALSPLWFCLALNPLSNLLNTCDAGYPLNHKSDSTRRPDQEQLKLNHLLYMDDIKLFAMDREELHLLATITENLSQDIRMDFEIDKCKINSVRAGQLDEHNYELQSGDQIESLDQNGTYKYLGYHQSRQIDNKNTKHILTKQFKQRLNLILKSQLNARNTIKAINTFAIPILTYSFGIINWTVTELKNLQRIINTSMTKQRKHHPRSCVQRLTLPRTDGGRGLIDIKNLHNKQITTLRDYFYDKANTSTVHKAIVQKDRKLTPLNLPDTSTQKNELQLNAQTKISDWARKSLHGRHLHELSQPNIDKLASNEWLRRGELFPETEGFMLAIQDQVIETRNYQKHIIRSIPTDTCRRCNSSPETIQHITGGCKAIVQTDYKHRHDQVAKIIHQQLAIKYQLITQPLTPYYKYSPDTVLENSTHKLYFDRAILTDRTVHYNRPDITLIDKLNKTAQLIDIAVPNSHNLQNTIAEKMTKYIVLRDEIVRLWKLQRATIVPVVLSTTGVIPKQLHQSLETLALPNFTYSLLQKAAILNTCRIVRIFLQNTSNPHPQVPTGNP

SEQ ID NO: 14182 - protein, 1379 aa, Blastobasis lacticolella
MSLAPRGNYMITRSKNKNITTAWVPAMSTTTMSTTNMSTTTSPSLLEDVAQGAEIGSDPAPTTSHKRVRMRWSTEMNEFILRTYLQLTALGKDKNGYLGPLHTKFIERYPNLQVSRQRIGDQCRAITRAKLLSQNRIDTISNEVKKELDRIQDQIHEQEYQQNPSTLLGNTEQGAPQSSTFSSTYTSSQNQLNTPIPQTTQNSSSRSRMRWSQEHNETIIRIYLQITHLETNKTAYRKLLYEKFISKYPTLAHLSEQRVADQRRLIINNKYISDDRYNVIKQEIAHELQTELDYFDRHETDAVNLPTNANTNNLDETPVLNNVDSNSLSLNEVHGTYIRDAKIDETFQDVYEYYRDIGPTDRTYIPKQKTSKKFAKIVNYINNYVLPEKVNGDTDFKTLQTVIYCAAWTAAKENGAKLSLTPKSPPEYRKSKPKWQKRLEIKIMDLRRKIGKLTHYINGNRSRKLANQVNKILEQYKVHTIHEPENIQLTHFLDTLKQKLKLTASRLSRYKSCTLRKLQNCQFKNNERLFYRQISKTTSNNQSNNAPSNSDNNGIDPSEMYSFWSNIWQNPIVHNTEAEWISKEIINKPETQSMQFDNIPIEIYQKVLNNLHNWKAPGSDQIHSYWYKKFTSLHPFIHNYINEFIHNPDSMPTYLTAGITFMIPKDKNDLNNPAKYRPITCLQTLYKIITSCIAEIMHEHIETNNILAEQQKGCRKLSQGCKEQLTIDSIVLKKVQKTKADLYTTYIDYKKAYDSVPHSWLIKVLQMYKIHSNLIAFLKAIMLTWTTTLRVTTPNKTIETDRIKIERGIFQGDSLSPLWFCLALNPLSDLLNASNAGYTLEFSKNDDDPQTDEHKLNHLLYMDDIKLYATRKEGLYTLINTTERFSEDICMTFGIDKCKINSVKAGQHHEHHYELESGDNIESLGEGETYKYLGYQQSKQIHHKNTKADLKKQFKHRLNLILKSELNSVNIIKAINTFAIPILTYSFGIIRWSKSELDQLQRVINTTMTKQRKHHPRSCVQRLTLPRKDGGRGLIDIKNLHNKQITTLRAYFYSKSHNSDLHKAIAQCDKKYTPLNLSDKTIQKNEHQTDSQTKLSDWARKSLHGRHFQDLSQPNVDKVASNEWLRRGELFPETEGFMLAIQDQIIETRNYQKHILRSIPNDTCRKCNASAETIQHITGACKAIVQTDYKHRHDQVANIIHQQLAHKYNLLTQPLLPYYKYNAETVLENTTHKLYFDRAILTDRTVHYNRPDITLIDKVNKTGYLIDIAIPNTHNLQSTIAEKISKYVDLKDEIVRMWKLQKAIIIPIVLSTTGVIPKQLHQSIETLNLPHFTYSMLQKAAILNTCRIVRKFLQYGVHSLEAFRHTNSQPLSIPDNTQL

SEQ ID NO: 14183 - protein, 936 aa, Blastobasis lacticolella
MDLRRKIGKLTHYINGNRSRKLANQVNKILELYKVHTIHEPENIQLTHFLDTLKQKLKLTASRLSRYKSCTLRKLQNCQFKNNERLFYRQISKTTSNNQSNNAPSNSDNNGIDPSEMYSFWSNIWQNPIVHNTEAEWISKEIINKPETQSMQFDHIPIEIYQKVLNNLHNWKAPGSDQIHSYWYKKFTSLHPFIHNYINEFIHNPDSMPTYLTAGITFMIPKDQNDLNNPAKYRPITCLQTLYKIITSCIAEIMHEHIETNNILAEQQKGCRKLSQGCKEQLTIDSIVLKKVQKTKADLYTTYIDYKKAYDSVPHSWLIKVLQIYKIHSNLIAFLQAIMLTWTTTLRVNTPNKTIETDRIKIERGIFQGDSLSPLWFCLALNPLSDLLNASNAGYTLEFSKNDDDPQTDEHKLNHLLYMDDIKLYATGKEGLYTLINTTERFSEDICMTFGIDKCKINSVKAGQHHEHHYELESGDNIESLGEGETYKYLGYQQSKQIHHKNTKADLKKQFKHRLNLILKSELNSVNIIKAINTFAIPILTYSFGIIRWSKSELDQLQRVINTTMTKQRKHHPRSCVQRLTLPRKDGGRGLIDIKNLHNKQITTLRAYFYSKSHNSDLHKAIAQCDKKYTPLNLSDKTIQKNEHQTDSQTKLSDWARKSLHGRHFQDLSQPNVDKVASNEWLRRGELFPETEGFMLAIQDQIIETRNYQKHILRSIPNDTCRKCNASAETIQHITGACKAIVQTDYKHRHDQVANIIHQQLAHKYNLLTQPLLPYYKYNAETVLENTTHKLYFDRAILTDRTVHYNRPDITLIDKVNKTGYLIDIAIPNTHNLQSTIAEKISKYVDLKDEIVRMWKLQKAIIIPIVLSTTGVIPKQLHQSIETLNLPHFTYSMLQKAAILNTCRIVRKFLQYGVHSLEAFRHTNSQPLSIPDNTQL

SEQ ID NO: 14184 - protein, 1169 aa, Blastobasis lacticolella
MRWSQEHNETIIRIYLQITHLETNKTAYRKLLYEKFISKYPTLAHLSEQRVADQRRLIINNKYISDDRYNVIKQEIAHELQTELDYFDRHETDAVNLPTNANTNNLDETPVLNNVESNSLSLNEVHGTYIRDAKIDETFQDVYEYYKDIGPTDRTYIPKQKTSKKFAKIVNYINNYVLPEKVNGDTDFKTLQTVIYCAAWTAAKENGAKLSLTPKSPPEYRKSKPKWQKRLEIKIMDLRRKIGKLTHYINGNRSRKLANQVNKILELYKVHTIHEPENIQLTHFLDTLKQKLKLTASRLSRYKSCTLRKLQNCQFKNNERLFYRQISKTTSNNQSNNAPSNSDNNGIDPSEMYSFWSNIWQNPIVHNTEAEWISKEIINKPETQSMQFDHIPIEIYQKVLNNLHNWKAPGSDQIHSYWYKKFTSLHPFINNYINEFIHNPDSMPTYLTAGITFMIPKDQNDLNNPAKYRPITCLQTLYKIITSCIAEIMHEHIETNNILAEQQKGCRKLSQGCKEQLTIDSIVLKKVQKTKADLYTTYIDYKKAYDSVPHSWLIKVLQIYKIHSNLIAFLQAIMLTWTTTLRVNTPNKTIETDRIKIERGIFQGDSLSPLWFCLALNPLSDLLNASNAGYTLEFSKNDDDPQTDEHKLNHLLYMDDIKLYATGKEGLYTLINTTERFSEDICMTFGIDKCKINSVKAGQHHEHHYELESGDNIESLGEGETYKYLGYQQSKQIHHKNTKADLKKQFKHRLNLILKSELNSVNIIKAINTFAIPILTYSFGIIRWSKSELDQLQRVINTTMTKQRKHHPRSCVQRLTLPRRDGGRGLIDIKNLHNKQITTLRAYFYSKSHNSDLHKAIAQCDKKYTPLNLFDKTIQKNEHQTDSQTKLSDWARKSLHGRHFQDLSQPNVDKVASNEWLRRGELFPETEGFMLAIQDQIIETRNYQKYILRSIPNDTCRKCNASAETIQHITGACKAIVQTDYKHRHDQVANIIHQQLAHKYNLLTQPLLPYYKYNAETVLENTTHKLYFDRAILTDRTVHYNRPDITLIDKVNKTGYLIDIAIPNTHNLQSTIAEKISKYVDLKDEIVRMWKLQKAIIIPIVLSTTGVIPKQLHQSIETLNLPHFTYSMLQKAAILNTCRIVRKFLQYGVHSLEAFRHTNSQPLSIHDNT

SEQ ID NO: 14185 - protein, 1375 aa, Blastobasis lacticolella
MSLAPRGNYMITRSKNKNITTAWVPAMSTTTMSTTSMSTTTSPSLLEDVAQGAEIGSDPAPTTSNKRVRMRWSTEMNEFILRTYLQLTALGKDKNGYLGPLHTKFIERYPNLQVSRQRIGDQCRAITRAKLLSQNRIDTISNEVKKELDRIQDQIHEQEYQQNPSTLLGNTEQGAPQSSTFSSTYTSSQNQLYTPIPQTTQNSSSRSRMRWSQEHNETIIRIYLQITHLETNKTAYRKLLYEKFISKYPTLAHLSEQRVADQRRLIINNKYISDDRYNVIKQEIAHELQTELDYFDRHETDAVNLPTNANTNNLDETPVLNNVDSNSLSLNEVHGTYIRDAKIDDTFQDVYEYYRDIGPTDRTYIPKQKTSKKFAKIVNYINNYVLPEKVNGDTDFKTLQTVIYCAAWTAAKENGAKLSLTPKSPPEYRKSKPKWQKRLEIKIMDLRRKIGKLTHYINGNRSRKLANQVNKILEQYKVHTIHEPENIQLTHYLDTLKQKLKLTASRLSRYKSCTLRKLQNCQFKNNERLFYRQISKNTSNNQSNNAPSNSDSNGIDPSEMYSFWSNIWQNPIVHNTEADRISKEMINKPETQSMQFDNIPIEIYQKVLNNLHNWKAPGSDQIHSYWYKKFTSLHPFIHNYINEFIHKPDSMPTYLTAGITFMIPKDQNDLNNPAKYRPITCLQTLYKIITSCIAEIMHEHIETNNILAEQQKGCRKLSQGCKEQLTIDSIVLKKVQKTKADLYTTYIDYKKAYDSVPHSWLIKVLQIYKIHSNLIAFLQAIMLTWTTTLRVTTPNKTIETDRIKIERGIFQGDSLSPLWFCLALNPLSDLLNASNAGYTLEFSKNDDDPQTDEHKLNHLLYMDDIKLYATGKEGLYTLINTTERFSEDICMTFGIDKCKINSVKAGQHHEHHYELESGDNIESLGEGETYKYLGYQQSKQIHHKNTKADLKKQFKHRLNLILKSELNSVNIIKAINTFAIPILTYSFGIIRWSKSELDQLQRVINTTMTKQRKHHPRSCVQRLTLPRKDGGRGLIDIKNLHNKQITTLRAYFYSKSHNSDLHKAIAQCDKKYTPLNLSDKTIQKNEHQTDSQTKLSDWARKSLHGRHFQDLSQPNVDKVASNEWLRRGELFPETEGFMLAIIETRNYQKHILRSIPNDTCRKCNASAETIQHITGACKAIVQTDYKHRHDQVANIIHQQLAHKYNLLTQPLLPYYKYNAETVLENTTHKLYFDRAILTDRTVHYNRPDITLIDKVNKTGYLIDIAIPNTHNLQSTIAEKISKYVDLKDEIVRMWKLQKAIIIPIVLSTTGVIPKQLHQSIETLNLPHFTYSMLQKAAILNTCRIVRKFLQYGVHSLEAFRHTNSQPLSIPDNTQL

SEQ ID NO: 14186 - protein, 936 aa, Blastobasis lacticolella
MDLRRKIGKLTHYIHGNRSRKLANQVNKILEQYKVHTIHEPENIQLTHYLDTLKQKLKLTASRLSRYKSCTLRKLQNCQFKNNERLFYRQISKNTSNNQSNNAPSNSDSNGIDPSEMYSFWSNIWQNPIVHNTEAEWISKEMINKPETQSMQFDNIPIEIYQKVLNNLHNWKAPGSDQIHSYWYKKFTSLHPFIHNYINEFIHKPDSMPTYLTAGITFMIPKDQNDLNNPAKYRPITCLQTLYKIITSCIAEIMHEHIETNNILAEQQKGCRKLSQGCKEQLTIDSIVLKKVQKTKADLYTTYIDYKKAYDSVPHSWLIKVLQIYKIHSNLIAFLQAIMLTWTTTLRVTTPNKTIETDRIKIERGIFQGDSLSPLWFCLALNPLSDLLNASNAGYTLEFSKNDDDPQTDEHKLNHLLYMDDIKLYATRKEGLYTLINTTERFSEDICMTFGIDKCKINSVKAGQHHEHHYELESGDNIESLGEGETYKYLGYQQSKQIHHKNTKADLKKQFKHRLNLILKSELNSVNIIKAINTFAIPILTYSFGIIRWSKSELDQLQRVINTTMTKQRKHHPRSCVQRLTLPRKDGGRGLFDIKNLHNKQITTLRAYFYSKSHNSDLHKAIAQCDKKYTPLNLSDKTIQKNEHQTDSQTKLSDWARKSLHGRHFQDLSQPNVDKVASNEWLRRGELFPETEGFMLAIQDQIIETRNYQKHILRSIPNDTCRKCNASAETIQHITGACKAIVQTDYKHRHDQVANIIHQQLAHKYNLLTQPLLPYYKYNAETVLENTTHKLYFDRAILTDRTVHYNRPDITLIDKVNKTGYLIDIAIPNTHNLQSTIAEKISKYVDLKDEIVRMWKLQKAIIIPIVLSTTGVIPKQLHQSIETLNLPHFTYSMLQKAAILNTCRIVRKFLQYGVHSLEAFRHTNSQPLSIPDNTQL

SEQ ID NO: 14187 - protein, 1379 aa, Blastobasis lacticolella
MSLAPRGNYMITRSKNKNITRAWVPAMSATTMSTTSMSTTTSPSLLEDVAQGAEIGSDPAPTTSNKRVRMRWSTEMNEFILRTYLQLTALGKDKNGYLGPLHTKFIERYPNLQVSRQRIGDQCRAITRAKLLSQNRIDTISNEVKKELDRIQDQIHEQEYQQNPSTLLGNTEQGAPQSSTFSFTYTSSQNQLNTPIPQTTQNSSSRSRMRWSQEHNETIIRIYLQITHLETNKTAYRKLLYEKFISKYPTLAHLSEQRVADQRRLIINNKYISDDRYNVIKQEIAHELQTELDYFDRHETDAVNLPTNANTNNLDETPVLNNVDSNSLSLNEVHGTYIRDAKIDETFQVVYEYYKDIGPTDRTYIPKQKTSKKFAKIVNYINNYVLPEKVNGDTDFKTLQTVIYCAAWTAAKENGAKLSLTPKSPPEYRKSKPKWQKRLEIKIMDLRRKIGKLTHYIHGNRSRKLANQVNKILEQYKVHTIHEPENIQLTHYLDTLKQKLKLTASRLSRYKSCTLRKLQNCQFKNNERLFYRQISKNTSNNQSNNAPSNSDSNGIDPSEMYSFWSNIWQNPIVHNTEAEWISKEMINKPETQSMQFDNIPIEIYQKVLNNLHNWKAPGSDQIHSYWYKKFTSLHPFIHNYINEFIHKPDSMPTYLTAGITFMIPKDQNDLNNPAKYRPITCLQTLYKIITSCIAEIMHEHIETNNILAEQQKGCRKLSQGCKEQLTIDSIVLKKVQKTKADLYTTYIDYKKAYDSVPHSWLIKVLQIYKIHSNLIAFLQAIMLTWTTTLRVTTPNKTIETDRIKIERGIFQGDSLSPLWFCLALNPLSDLLNASNAGYTLEFSKNDDDPQTDEHKLNHLLYMDDIKLYATAKEGLYTLINTTERFSEDICMTFGIDKCKINSVKAGQHHEHHYELESGDNIESLGEGETYKYLGYQQSKQIHHKNTKADLKKQFKHRLNLILKSELNSVNIIKAINTFAIPILTYSFGIIRWSKSELDQLQRVINTTMTKQRKHHPRSCVQRLTLPRKDGGRGLIDIKNLHNKQITTLRAYFYSKSHNSDLHKAIAQCDKKYTPFNLSDKTIQKNEHQTDSQTKLSDWARKSLHGRHFQDLSQPNVDKVASNEWLRRGELFPETEGFMLAIQDQIIETRNYQKHILRSIPNDTCRKCNASAETIQHITGACKAIVQTDYKHRHDQVANIIHQQLAHKYNLLTQPLLPYYKYNAETVLENTTHKLYFDRAILTDRTVHYNRPDITLIDKVNKTGYLIDIAIPNTHNLQSTIAEKISKYVDLKDEIVRMWKLQKAIIIPIVLSTTGVIPKQLHQSIETLNLPHFTYSMLQKAAILNTCRIVRKFLQYGVHSLEAFRHTNSQPLSIPDNTQL

SEQ ID NO: 14188 - protein, 1050 aa, Coccinella septempunctata
MDFPCGCGKSYGSQRSLKDHQRRYCRMRPEPVLNQICQYCARGFTTLSGMRLHVKRSHPVEYNTELATEYDAARRGRLWTEEEMAEMAREEAVYAGTEMAEHLATIVGRTKDAVRLKRQDPRYQELLRQYTSERQQGGPTSTAFGSPSSRGIAADSPSTLNIIEEDATSASIPDVNPEDAASVAENDPDLRTIDLEDLDPVRRFLIEISPTLEERGDIELAKQVCLMQPGYKTTMDEWTSGLCAKYGKKPRKPTKAPQPNPTPEMSSRKRRVYNYRQAQNKFAKNRKQYAKDLINGAEIDPQNHGVRPPNADIEQIFGSTLGSASPPDDREIPRSEKPEIDAYRPISIEEIEELKKSCPKTSCGPDGITQSSLQRIPNKQLALLFNAILYTQYVPSILKVSKTTLIPKSAGDLRSVDNWRPITVTSIILRLLNRLMAKRVAVIDLEDTQRGFTSVDGCFANNLTLQTIIKRKRKTGRGLAIITLDLKKAFDMVSHNSVRRALKRFKVDAKTSNYIMDNLTGCSTTISCLGEEVTKVKIRRGLKQGDPLSPLLFNMVLDELLEEIKTMRGVTLGRYKVSALAYADDLILLADQVESAQRLLSAAVRFFEHRGLSINPRKCDSLVLRSLPSRRKVFVSTTAIFYIKGEPIRPVDVDHTFRYLGLYFSCMGSTKCNTNELSVQLERIRKSPLKPQQKFNILKNYLLPQYIHSMQNPSVTLKILKEVDRKVRIAVKKIIHLPTHIADAAIYAPAKMGGLGIFSFARKIPIIIKKRCDNLTKTCPGFAELLKEADDWMLRIGRMIKPDLTTKEQVDRANGLELENSFFGGGTMQFQNDSVSNELINNPPKFWNGTEYIKAIHLRLNCLPTRGLPYNPPEARKCRAGCNRVESLSHVLQRCPLGHTARMKRHNFVLKRLKDMSLKKGWRVEEEPHIRDGRGILRKPDLILSNDEEALVVDATVSWECPRDLGETYELKRMVYDQPEFVSVLTERYPNKTIRVLPFAIGARGMWCRQSEATLQAMKINTRANRRELVYTTIRGSWTIHGDFAKRSWE

SEQ ID NO: 14189 - protein, 1475 aa, Apolygus lucorum
MTGVRDQPLVLEESTLRVWHPLPVTSSGQVPLCCPLCRSTFSTRTWTATVRSTQRHLGADHNLVTTIEHRCSLCEDLTGMHPYRHACLRGRDRPSTTTPDTGRHLCPQCPERFTTKRGLTNHINAHNARDRRNATQPRLPAPATRQGRAPMNRTALRPAPAVPPPSHPPPPQLLGFPTSDEEEDVIPSSIPPQDEDVPAPPASPASEDEFSTPTAAPGGMFAASIPHVSTPLSSNVLGSTEPPYDMPRRNVIMSSPLSSQTSHSPRRISPPPPTLDTSLNSSQNSSNNSFNGLQPPLHNSPGHQPPSSPIISLHPSPPTPIRPHTPPSLLPSPPTLPNSPFYLPSHLLDIDLQEISPPSIGPQPAPQNFSGPQPPPRHSSGPQPAPQNISGPQPPPRHFSSPQPAPQNFSSPQPPPRHPSGPQPPPRRSSGPQLTPQRPSGPRSSRSQPPPQDPSGPQPPPHNPSGLQPPPQNSSSRSPLHHNSTPQNASGPQPPPQPPLRCLPPSENSSSYPLQGFKDKFAALLTLPRSDVTWEMFITLFDELTTFSQAHLKIQTTAIRPLSAPQARPQLSPTALQKLYKRNRRRAVRAILNPPSEICPAPVEEITSHFEEAWRPRTWDRSVLTNLPRATDPVNLAPFSPQECRYRLYKFENTSPGVDKIDYRGWKILDPDCQVISLIFSLCLKFHKIPPSWKQSTTILIPKCPNAGALTDWRPISLSLTIYKLYTALLCDRLASWCTVHNIISPYQKGFMPFDGVFEHNYILESRIRAARTQEGELCIAWLDLANAFGSVPHDALVETLNALGVGDQMVGVAGDLLSDLTSAVACSVGQTDSIPVLCGIRQGCPLSGLFFNIYVNSAFSSLPPSEQHQALAFADDLAVIGDPSNLQNLLNLISVHLGKLGFSINPRKCKTLHVSGHRPVGVRDTSFSVLGVQIPVLSEGESYTYLGNPIGFKALPPGATLEQITDSALKIMRSSLAPWQRLDALRSFIFPMLNFPMRNGKILKKDWDQFDQVIRAEVKRTLYVPQEASNDYLYGPRFEGLMGIPIASEESDLALIDSGFKLLTSRDVALTCLAKQELQAEVTSRAPTHNTYRDAMDYLSGATSIRHVGVSSPWSRCRAASRRNNVSWSADNNTETPTIHLGDTIVSPSNRSKLLKSLRSHLQRQRGVSLRQKQNQGRVPDCLQSSPVSSHFLYTGEYLSFADWRFIHKARLNVVPLNGFRHGARDKRCRRCGYHTETLAHVLNHCLPMAAHLQNRHNAIVARIKNAAAYRSWEVMGENTSVDGSLLRPDLTLKKGRQILIIDVTVPFENRPEAFAAARDEKMRKYEPVRAALRQDGMDVTIHPIVIGSLGTWDTKNDKSLLKLVTTKFLRVMARLIVCDTIAWSRCMYMQHISGRQQRPIQWANISRTHTTTDHGGTATAPNEDAAPQDDAAASQDDAAASQDDAAASQDDAAAEPPLHPGDQEQPLDAASLS

SEQ ID NO: 14190 - protein, 971 aa, Apolygus lucorum
MAASQFSCIECGRTFTTKVGLTQHLRHAHPARLSEDRVGQSRNVFWSDEELRIMASKEMKLVAQGVPPRKLVANLAEMMPGRTKDMIKCIRSRAPYQMIRRTLALVDEVENSQQEEETVNEPETRNWQTEELEAEIRKGLATIRKENNRSEASHFLEEAALAALSGSDPSENMVAWAKYIASLDQEGQSVGESEQRSSNARAFHTGRQNTRRISWKKMQKLWKYDRAAAVEEATGHGRGRMRHTPEQMSAYWSARWTRESLPWTNSHFRHPIDRSLADVWKPVTIQEVKSTNPGRSTSGPDDISVDKWKSTPTEQRRLFFNLVLWRGMMPAELLLARTTLIPKKQTPVTPADYRPITVASVITRQFHRILGQRMELCVVHVDGQRGLRRGMDGLGQSIHLLDTIMRDAHRKKRELHLCNLDIEKAYDSISQSALILLMMSRGWPSVLVNYIQSTFENGRTSVAKGEPIRVTSGVRQGDPLSSVLFNCVMDHILMALPERIGYTISRLRISYLAFADDVVLVATSRAGIVTLFKSFDEAALEIGLKLNLNKSLYLPLIHRSGRLVVPREGMHVSSPRGALPTAVYNSRWSYLGLEFGVRGLEEWTAEKPMETLRAVDRAPLTVLQKLEVVRTHFLPGLIHSVVLGRPKKCQLRKLDIAVRKLVRKWFWLPGDSANAYMYGPTGDGGLGLARLETLAPELRKVRIARVKECVFGEEQEGTYETSLERRWNRAQAMHETTDAAELKRSREVGASTIWLRSAHVMAPSWMGRRMIRVHSGSLPSQMRISRGRRTPDMQITCRAGCPSRETAAHVLQVCPSVQLPRNARHNRVCDLLRRSAELRGWKTFSEPHFNLEGRGWRPDLVICVRNGLVAIVDVEVVSGSGQRTLEEMFLTKQAKYSRAALLRAVAALTEQSLESVMVIPAVITWRGVWAKLSAEPLLKLGLPEYVLGWAAERVLLGGGLIWSMFTRNVWR

SEQ ID NO: 14191 - protein, 976 aa, Apolygus lucorum
MAANQFNCMECSRTFTTKVGLTQHLRHAHPARLSEDRVGPSRNVFWSEEELKIMAIKELELVAQGVPQRQLVSKLTEIMPGRTKDMVKSTRSRAPYRLIRETLALVDEDEENRQEEGSTEEQQIGEWRTQELEAEIRRGNAAAKKESSYSDGSRMLEDAALMALSGSDPVTALLAWVESLTTEDQMHQMPQTQTDQGSVVRSQRNPQRDRHQCSWQRMQKLWRDDRRAAVEEAMGRGRGRVIHSRVQMANYWKEKWSTEPQPWSGGHFRHPKDKSFEEMWKPITAMEVKDTNLGRTVGGPDGVSADKWKAIGVQHRRLFYNLIMWRGTMPAELLLARTTLIPKQITPALPADYRPITVASVITRQFHRILGQRLEQCVVHAKGQRGLRRGVDGIGQSVYLLDRIMKEAHRKKRELHMCYLDMERAYDSANQSALVLLMRSRGWPPVLVNYIQSTLDEGRTSIAGSDPIRVTSGVRQGDPLSSVLFNSLMDHILLALPDRIGYTVAGQRVSNIAFADDVVLIATSKAGIMALMKAFEEAASEMGLRLNGGKSLYMPLLPRSGRLVIPQEGFHVASSRGRLPKARYNSTWTYLGLKFGVRGVVEWTAADALKTVRAVDRAPLTVLQKLEVIRSHFLPGLVHSAVLGRSKTKTLRDLDIAIRKLVRKWFWLPGDSANAYMYGPVGDGGLGLMRMETLTPTLRKARMAKAEECLFGVGVDINSETSLERRMKRAELMHSTTDGADLKRSREVRASTEWLRSAHMTSPSWKGRRMVRVHSGSLPSQMRMTRGRRRTEPVTCRAGCHARETAAHVLQLCPVVDLPRHARHNNICELLKTCAEKRGWTTYGEPHFSLEGRGYRPDLIVCPASGSVAIIDVKVVSGSGRRTLEEMYCEKETKYSIPCVLEAVSALTERSVGAIEVIPAILTWRGVWAKKSAARLMSLGVPEYILGWASERVLLGGGFIWSAFTKSINGRRDRRT

SEQ ID NO: 14192 - protein, 976 aa, Apolygus lucorum
MAANQFNCMECSRTFTTKVGLTQHLRHAHPARLSEDRVGPSRNVFWSEEELKIMAIKELELVSQGVPQRQLVSKLTEIMPGRTKDMVKSTRSRAPYRLIRETLALVDEDEENRQEEGSTEEQQIGEWRTQELEAEIRRGNAAAKKESSYSEGSRMLEDAALMALSGSDPVTALLAWVESLTTEDQMHQMPQTQTEQGSVLRSQRNWQRNRQQCSWQRMQKLWRNDRRAAVEEAMGRGRGRVIHSRVQMANYWKEKWSTEPQPWSGGHFRHPKDKSFEEMWKPITAMEVKDTNLGRTVGGPDGVSADKWKAIGVQHRRLFYNLIMWRGTMPAELLLARTTLIPKQITPASPADYRPITVASVITRQFHRILGQRLEQCVVHAKGQRGLRRGVDGIGQSVYLLDRIMKEAHRKKRELHMCYLDMEKAYDSANQSALVLLMRSRGWPPVLVNYIQSTLDEGRTSIAGSDPIRVTSGVRQGDPLSSVLFNSLMDHILLALPDRIGYTVAGQRVSNIAFADDVVLIATSKAGIMALMKAFEEAASEMGLRLNSGKSLYMPLLPRSGRLVIPQEGFYLASSRGRLPTARYNSTWTYLGLKFGVRGVVEWTAADALKTVRAVDRAPLTVLQKLEVIRSHFLPGLVHSAVLGRSKTKTLRELDIAIRKLVRKWFWLPGDSANAYMYGPVGDGGLGLMRMETLTPTLRKARMAKAEECLFGVGVDFNSETSLERRMKRAELMHSTTDGADLKRSREVRASTEWLRSAHMTSPSWKGRRMVRVHSGSLPSQMRMTRGRRRTEPVTCRAGCHARETAAHVLQLCPVVDLPRHARHNNICELLKTCAEKRGWTTYGEPHFSLEGRGYRPDLIVCPASGSVAIIDVKVVSGSGRRTLEEMYCEKETKYSIPCVLEAVSALTERSVGAIEVIPAILTWRGVWAKKSAARLMSLGVPEYILGWASERVLLGGGFIWSAFTKSINGRRDRRT

SEQ ID NO: 14193 - protein, 976 aa, Apolygus lucorum
MAANQFNCMECSRTFTTKVGLTQHLRHAHPARLSEDRVGPSRNVFWSEEELKIMAIKELELVAQGVPQRQLVSKLTEIMPGRTKDMVKSTRSRAPYRLIRETLALVDEDEENRQEEGSTEEQQIGEWRTHELEAEIRRGNAAAKKESSYSDGSRMLEDAALMALSGSDPVTALLAWVESLTTEDQMHQMPQTQTDQGSVLRSQRNPQRDRQQCSWQRMQKLWRDDRRAAVEEAMGRGRGRVIHSRVQMANYWKEKWSTEPQPWSGGHFRHPKDKSFEEMWKPITAMEVKDTNLGRTVGGPDGVSADKWKAIGVQHRRLFYNLIMWRGTMPAELLLARTTLIPKQITPASPADYRPITVASVITRQFHRILGQRLEQCVVHAKGQRGLRRGVDGIGQSVYLLDRIMKEAHRKKRELHMCYLDMEKAYDSANQSALVLLMRSRGWPPVLVNYIQSTLDEGRTSIAGSDPIRVTSGVRQGDPLSSVLFNSLMDHILLALPDRIGYTVAGQRVSNIAFADDVVLIATSKAGIMALMKAFEEAASEMGLRLNSGKSLYMPLLPRSGRLVIPQEGFHVASSRGRLPTARYNSTWTYLGLKFGVRGVVEWTAADALKTVRAVDRAPLTLLQKLEVIRSHFLPGLVHSAVLGRSKTKTLRDLDIAIRKLVRKWFWLPGDSANAYMYGPVGDGGLGLMRMETLTPTLRKARMAKAEECLFGVGVDINSETSLERRMKRAELMHSTTDGADLKRSREVRASTEWLRSAHMTSPSWKGRRMVRVHSGSLPSQMRMTRGRRRTEPVTCRAGCHARETAAHVLQLCPVVDLPRHARHNNICELLKTCAEKRGWTTYGEPHFSLEGRGYRPDLIVCPASGSVAIIDVKVVSGSGRRTLEEMYCEKKTKYSIPCVLEAVSALTERSVGAIEVIPAILTWRGVWAKKSAARLMSLGVPEYILGWASERVLLGGGFIWSAFTKSINGRRDRRT

SEQ ID NO: 14194 - protein, 1165 aa, Carassius auratus
MEEGPRLTDFPVTTGTDTDKDSRITRRCRCGWEKETTFRGLRIHQGRKKCVEGGQQQHCTANAGHTRGTQGQVTNHSTERSTVAVERQVEDTGGPVMDANTSESGTDEDTHRAQSNPNNREQSHRTERKEPGRRQMVKWPKANEVAVWQKLDKDLSLILEHSLHGQVENKLNRIGDILYDECIGRLGVTAGKRRACPVQKGRREREIGQLVKRRRQLRKQWRKASREEKEGLKPLWDEVRKELAGLRRAERIRKRRRRKEKERSNFFKNPFKHARQLLEDKRSGKLEITKSELENYIKEQYSDPAKSTPLGSPGYVPRPAPPTSLFDAALPKLSEVTEAVRKARTASAPGPNGIPYKLYKYCPGVLRHLWNLLRVAWRNKVIPSEWQRAVTVFIPKEQNSSTIGQFRSIALLNVEGKIFFSILAKRLTSYLTGNGYIDTSCQKAGVPGFPGCVEHSSVIWEQIQRAKRERGDLHVVWLDLANAYGSVPHQLIEFALDFFHVPVDIRALVAKYFGDLQMCCTHQDFTTGWQQLEVGIAMGCSISPILFIAAFEIILIGARKMVGGVKLPSGQRLPAVRGYMDDITTILQTAACTTRLLKRIDELVGWARMKIKPSKSRSLSIKKGVRNDNTIFVAGGENIPLVKDQPVRSLGRTYTAELSDRQMGETVRKQLADGLAKINRSQLPGKHKVWCYQAILYQRVMWPLKMSEIPLSVVNKMDGLANSFIRKWLGLPRCFSEVGLFGRNTLQLPLRSISGGYKQEKARLVLELRETTDQLVRAAGTQIRTGRKWKAQEEVDMAIARLKHREVVGRVQEGRAGLGRGDVPLFWSKASKEDRKAMVVAEVARTEHERLNVKAVSQGQQGRWTSWEGLTDRSMSWSDLWKIPQARLSFLIRATYDTLPCPRNLHQWFGAEETCSLCNTSNASLQHILSGCTTALSQGRYRWRHDQVLKKLAEVSESCRKEANSRPSARGWHAIQFARAGESIRPSRQRDTARLLSPGSEWTMRVDLGRQLQFPREIVETSLRPDLIMWSETCKTVLLVELTVPWEGGGGVEASYEWKRAKYSDLAAECREAGWKAVICPVEVGCRFLNRSPTLRHVMHRSEASESHERAGRGGRERQLLAVAKEEGEGLGGKHLGHQQGVAGRDPCHRSATTRRTGVKGVKRR

SEQ ID NO: 14195 - protein, 1139 aa, Carassius gibelio
MEEGPRLTDFPVTTGTDTDKDSRITRRCRCGWEKETTFRGLRIHQGRKKCVEGGQQQHCTANAGQTRGTQGQVANHSAEGSTVAVERQVEDTGGPVMDANASESGTDEDTHRAQSNPNNRGQSHRTERKEPGRRQMVKWPKANEVAVWQKLDKDLSLILEHSLHGQVENKLNRIGDILYDECIGRLGVTAGKRRACPVQKGRREREIGQLVKRRRQLRKQWRKASREEKEGLKPLWDEVRKELAGLRRAERIRKRRRRKEKERSNFFKNPFKHARQLLEDKRSGKLEITKSELENYIKEQYSDPAKSTPLGSPGYVPRPAPPTSLFDAALPKLSEVTEAVRKARTASAPGPNGIPYKLYKYCPGVLRHLWNLLRVAWRNKVIPSEWQRAVTVFIPKEQNSSTIGQFRSIALLNVEGKIFFSILAKRLTSYLTGNGYIDTSCQKAGVPGFPGCVEHSSVIWEQIQRAKRERGDLHVVWLDLANAYGSVPHQLIEFALDFFHVPVDIRALVAKYFGDLQMCCTHQDFTTGWQQLEVGIAMGCSISPILFIAAFEIILIGARKMVGGVKLPSGQRLPAVRGYMDDITTILQTAACTTRLLKRIDELVGWARMKIKPSKSRSLSIKKGVRNDNTIFVAGGENIPLVKDQPVRSLGRTYTAELSDRQMGETVRKQLADGLAKINRSQLPGKYKVWCYQAILYQRVMWPLKMSEIPLSVVNKMDGLANSFIRKWLGLPRCFSEVGLFGRNTLQLPLRSISGGYKQEKARLVLELRETTDQLVRAAGTQIRTGRKWKAQEEVDMAIARLKHREVVGRVQEGRAGLGRGDVPLFWSKASKEDRKAMVVAEVARTEHERLNVKAVSQGQQGRWTSWEGLTDRSMSWSDLWKIPQARLSFLIRATYDTLPCPRNLHQWFGAEETCSLCNTSNASLQHILSGCTTALSQGRYRWRHDQVLKKLAEVSESCRKEANSRPSARGWHAIQFARAGESIRPSRQRDTARLLSPGSEWTMRVDLGRQLQFPREIVETSLRPDLIMWSETCKTVLLVELTVPWEGGGGVEAAYERKRAKYSDLAAECREAGWKAVICPVEVGCRGFVGSSTARLLRDMGCTGARHRKAMKELAEEAEKGSFWLWLRRKEKVWGANT

SEQ ID NO: 14196 - protein, 1139 aa, Carassius gibelio
MEEGPRLTDFPVTTGTDTDKDSRITRRCRCGWEKETTFRGLRIHQGRKKCVEGGQQQHCTANAGQTRGTQGQVANHSAEGSTVAVERQVEDTGGPVMDANASESGTDEDTHRAQSNPNNREQSHRTERKEPGRRQMVKWPKANEVAVWQKLDKDLSLILEHSLHGQVENKLNRIGDILYDECIGRLGVTAGKRRACPVQKGRREREIGQLVKRRRQLRKQWRKASREEKEGLKPLWDEVRKELAGLRRAERIRKRRRRKEKERSNFFKNPFKHARQLLEDKRSGKLEITKSELENYIKEQYSDPAKSTPLGSPGYVPRPAPPTSLFDAALPKLSEVTEAVRKARTASAPGPNGIPYKLYKYCPGVLRHLWNLLRVAWRNKVIPSEWQRAVTVFIPKEQNSSTIGQFRSIALLNVEGKIFFSILAKRLTSYLTGNGYIDTSCQKAGVPGFPGCVEHSSVIWEQIQRAKRERGDLHVVWLDLANAYGSVPHQLIEFALDFFHVLVDIRALVAKYFGDLQMCCTHQDFTTGWQQLEVGIAMGCSISPILFIAAFEIILIGARKMVGGVKLPSGQRLPAVRGYMDDITTILQTAACTTRLLKRIDELVGWARMKIKPSKSRSLSIKKGVRNDNTIFVAGGENIPLVKDQPVRSLGRTYTAELSDRQMGETVRKQLADGLAKINRSQLPGKYKVWCYQAILYQRVMWPLKMSEIPLSVVNKMDGLANSFIRKWLGLPRCFSEVGLFGRNMLQLPLRSISGGYKQEKARLVLELRETTDQLVRAAGTQIRTGRKWKAQEEVDMAIARLKHREVVGRVQEGRAGLGRGDVPLFWSKASKEDRKAMVVAEVARTEHERLNVKAVSQGQQGRWTSWEGLTDRSMSWSDLWKIPQARLSFLIRATYDTLPCPRNLHQWFGAEETCSLCNTSNASLQHILSGCTTALSQGRYRWRHDKVLKKLAEVSESCRKEANSRPSARGWHAIQFARAGESIRPSRQRDTARLLSPGSEWTMRVDLGRQLQFPREIVETSLRPDLIMWSETCKTVLLVELTVPWEGGGGVEAAYERKRAKYSDLAAECREAGWKAVICPVEVGCRGFVGSSTARLLRDMGCTGARHRKAMKELAEEAEKGSFWLWLRRKEKVWGANT

SEQ ID NO: 14197 - protein, 620 aa, Eleutheronema tetradactylum
MSCTHQDFITSWQRQEVGIAMGCSISPILFVAAFEIILIGARKVAGGVKLPSGQRLPPVRGYMDDITTILQTAACTSRLLKRIDELVGWARMRIKPAKSRSLSLRKGIRSDHTIFIAGGEEIPLLAKQPVRSLGRTYTADLSDKQMGEAVRKQLADGLAKISVSQLPGKYKVWSYNFILYPRVMWPLKMCEVPSSVAEKMDRLANRYIKKWLGLPRCLSDVGLFGRNTLQLPLQSISQGYRQEKARLVLELRDSTDQLVRAACSQVRTGRKWKAQEEVDKAISRLQHREVIGRVQEGRAGLGRGEALPFWSKASKEQRRAMVVAEVARTEQERLRIKAVSQSRQGGWMTWEGVTDRPMTWSDLWKIPQARLSFLIKSTYDTLPCPRNLHLWFGAEESCPLCNTTNASLQHILSGCKTALSQGRYRWRHDLVLKKLAEVTEACRLQANSKPPAPVRPSIPFARAGENPKPTHRTVTPRLLSPGGEWTMRVDLGRQLQFPRDIVQTSLRPDLILWSVPLKTILLVELTVPWEQGIEAANERKRDKYADLAAECQEAGWKTITCPVEVGCRGFVGSSTVRLLRNIGCTGAGNRKAIKELAEEAEKGSFWLWLRRRDKGWGQNT

SEQ ID NO: 14198 - protein, 1120 aa, Eleutheronema tetradactylum
MRRCRCGWQKVTTFRGLRIHQGRMKCEEAQKQHCTAAAAAGQTKGTQSQVANHRAEGSNVTEGRQVAQAEGTLVDPDPSEGGTDENTPRTPMDPRAPSHPDTQEPGPRRLQKGQGRRHPVKWPKANETAVWQQLDNDLSTILENSLRGQVETKLNSIGDILYEECRGRFGILEARQSTGPKQKGRREKEIEALVRRRRQLRKQWRKAGAAEKEGLKPLWEEVKKSLASLRRAERIRKRRRRKEKERSSFFRNPYQHARRLLEDKRSGKLEISQPDLESYFKELYSDAERQTPLGPAGYVPRPAPPSHLFDAALPKLSEAAEVVRKARAASAPGPNGIPYKLYKYCPGILKHLWKLLRVAWKNQVIPSEWQRAATVFIPKEANSNTIGQFRSIALLNVEGKIFFAILAKRLTRYLTSNGYIDTTCQKAGVPGFPGCVEHSAVIWEQIQRAKREKSDLHVVWLDLANAYGSVPHQLIEYALDFFYVPACIRALVTSYFADLQMSCTHQDFITSWQRQEVGIAMGCSISPILFVAAFEIILIGARKVAGGVKLPSGQRLPPVRGYMDDITTILQTAACTSRLLKRISELVGWARMRIKPAKSRSLSLRKGIRSDHTIFIAGGEEIPLLAKQPVRSLGRTYTADLSDKQMGEAVRKQLADGLAKISVSQLPGKYKVWSYNFILYPRVMWPLKMCEVPSSVAEKMDRLANRYIKKWLGLPRCLSDVGLFGRNTLQLPLQSISQGYRQEKARLVLELRDSTDQLVRAACSQVRTGRKWKAQEEVDKAISRLQHREVIGRVQEGRAGLGRGEALPFWSKASKEQRRAMVVAEVARTEQERLRIKAVSQSRQGGWMTWEGVTDRPMTWSDLWKIPQARLSFLIKSTYDTLPCPRNLHLWFGAEESCPLCNTTNASLQHILSGCKTALSQGRYRWRHDLVLKKLAEVTEACRLQANSKPPAPVRPSIPFARAGENPKPTHRAVTPRLLSPGGEWTMRVDLGRQLQFPRDIVQTSLRPDLILWSVPLKTILLVELTVPWEQGIEAANERKRDKYADLAAECQEAGWKTITCPVEVGCRGFVGSSTVRLLRNIGCTGAGNRKAIKELAEEAEKGSFWLWLRRRDKGWGQNT

SEQ ID NO: 14199 - protein, 621 aa, Pimephales promelas
MCCTHQDFTTGWQQLEVGIAMGCSISPILFVAAFEIILMGARVMVGGMKLPSGQRLPPVRGYMDDITTILQTAACTTRLLKRVDELVGWARMKIKPAKSRSLSIRKGVRNDHTIFFAGGEEIPLLANQPVRSLGRSYTADLSDRQMGETVRKQLADGLARINQSQLPGKYKVWSYQFILYPRVMWPLKMSEVPSSVANKMDGLANSFIRKWLGLPRCLSEVGLFGRNTLQLPLRSIGLGYKQEKARMVMELRESTDQLVRAAGPNIRTGRKWKAQEEVDRAISRLKHCEIVGRVQEGRAGLGRSETPLFWSKASKEERKAMVVAEVTRTEQERLNIKAVSQSWQGVWMSWEGVTDRHLSWSDLWKIPQARLSFLIRSTYDTLPCPRNLHQWFGTEELCPLCSTSNASLQHILSGCKTALSQGRHRWRHDLVLRKLAEVAESCRQEANRRPFGPTRSPILFARAGEKINHPHQRATSRVLLSGSEWNMRVDLGRQLQFPREIVETLLRPDLIMWSELCKTILLVELTVPWEEGMEAANERKRAKYADLAEACKEAGWKATTWPVEVGCRGFVGSSTVRLLREMGCTGAGCRKAIKELAEEAERGSFWLWLRRKHKVWGPSNI

SEQ ID NO: 14200 - protein, 621 aa, Pimephales promelas
MCCTHQDFTTGWQQLEVGIAMGCSISPILFVAAFEIILMGARVMVGGMKLPSGQRLPPVRGYMDDITTILQTAACTTRLLKRVDELVGWARMKIKPAKSRSLSIRKGVRNDHTIFFAGGEEIPLLANQPVRSLGRSYTADLSDRQMGETVRKQLADGLARINQSQLPGKYKVWSYQFILYPRVMWPLKMSEVPSSVANKMDGLANSFIRKWLGLPGCLSEVGLFGRNTLQLPLRSIGLGYKQEKARMVMELRESTDQLVRAAGPNIRTGRKWKAQEEVDRAISRLKHCEIVGRVQEGRAGLGRSETPLFWSKASKEERKAMVVAEVTRTEQERLNIKAVSQSWQGVWMSWEGVTDRHLSWSDLWKIPQARLSFLIRSTYDTLPCPRNLHQWFGTEELCPLCSTSNASLQHILSGCKTALSQGRYRWRHDLVLRKLAEVAESCRQEANRRPFGPTRSPILFARAGEKINHPHQRATSRVLLSGSEWNMRVDLGRQLQFPREIVETLLRPDLIMWSELCKTILLVELTVPWEEGMEAANERKRAKYADLAEACKEAGWKATTWPVEVGCRGFVGSSTVRLLREMGCTGAGCRKAIKELAEEAERGSFWLWLRRKHKVWGASNI

SEQ ID NO: 14201 - protein, 1139 aa, Carassius auratus
MEEGPRLTDFPVTTGTDTDKDSRITRRCRCGWEKETTFRGLRIHQGRKKCVEGGQQQHCTANAGQTRGTQGQVANHSAEGSTVAVERQVEDTGGPVMDANASESGTDEDTHRAQSNPNNREQSHRTERKEPGRRQMVKWPKANEVAVWQKLDKDLSLILEHSLHGQVENKLNRIGDILYDECIGRLGVTAGKRRACPVQKGRREREIGQLVKRRRQLRKQWRKASREEKEGLKPLWDEVRKELAGLRRAERIRKRRRRKEKERSNFFKNPFKHARQLLEDKRSGKLEITKSELENYIKEQYSDPAKSTPLGSPGYVPRPAPPTSLFDAALPKLSEVTEAVRKARTASAPGPNGIPYKLYKYCPGVLRHLWNLLRVAWRNKVIPSEWQRAVTVFIPKEQNSSTIGQFRSIALLNVEGKIFFSILAKRLTSYLTGNGYIDTSCQKAGVPGFPGCVEHSSVIWEQIQRAKRERGDLHVVWLDLANAYGSVPHQLIEFALDFFHVPVDIRALVAKYFGDLQMCCTHQDFTTGWQQLEVGIAMGCSISPILFIAAFEIILIGARKMVGGVKLPSGQRLPAVRGYMDDITTILQTAACTTRLLKRIDELVGWARMKIKPSKSRSLSIKKGVRNDNTIFVAGGENIPLVKDQPVRSLGRTYTAELSDRQMGETVRKQLADGLAKINRSQLPGKHKVWCYQAILYQRVMWPLKMSEIPLSVVNKMDGLANSFIRKWLGLPRCFSEVGLFGRNTLQLPLRSISGGYKQEKARLVLELRETTDQLVRAAGTQIRTGRKWKAQEEVDMAIARLKHREVVGRVQEGRAGLGRGDVPLFWSKASKEDRKAMVVAEVARTEHERLNVKAVSQGQQGRWTSWEGLTDRSMSWSDLWKIPQARLSFLIRATYDTLPCPRNLHQWFGAEETCSLCNTSNASLQHILSGCTTALSQGRYRWRHDQVLKKLAEVSESCRKEANSRPSARGWHAIQFARAGESIRPSRQRDTARLLSPGSEWTMRVDLGRQLQFPREIVETSLRPDLIMWSETCKTVLLVELTVPWEGGGGVEAAYERKRAKYSDLAAECREAGWKAVICPVEVGCRGFVGSSTARLLRDMGCTGARHRKAMKELAEEAEKGSFWLWLRRKEKVWGANT

SEQ ID NO: 14202 - protein, 1134 aa, Coilia nasus
MDYSVTTGTNTDNESKIMRRCRCGWEKVTTFRGLRIHQGRRKCEEGGLKQHCTATAGQSKGTQSQVANHRAEGSNVAEGGPVADTGWPMVDPDSSEGGTEENTPSTPTEPRQNPDIQDLGPRAERKEPGRRQPLKWPKANEAALWQQLDKDLSIILQYSLRGQVESKLNSIGDILYEECRGRFGVVAGKRSHGPKQKGRREMEIEMLVRRRRHLRKQWRKASAEEKEGLKPLWEEVKKSIASLRRAERIRRRTRRKEKERSSFFKNPYQHARRLLEDKRSGKLEITQSELECHFKEHYSDPARQTPLGPPGYVPRPAPPSHLFDAALPRLSEVEEVVQKARAASAPGPNGIPYKLYKHCPGVLKHLWRLLRVAWKNQVIPSEWQRAVTVFIPKEANSTTIGQFRSIALLNVEGKIFFSILAKRVTSYLVSNGYIDTSCQKAGVPGFPGCVEHSAVIWEQIQRAKRERRDLHVVWLDLANAYGSVPHRLIDYALEFFYIPVCIRAMVSKYFADLQMCCTHQNFTTSWQRQEVGIAMGCSISPILFVAAFEVILIGARKMAGGVKLPSGQRLPPVRGYMDDITTILQTAACTARLLKRIDELVAWARMKIKPTKSRSLSLRKGVRSDRTVFVAGGEEIPLLATQPVRSLGRTYTADLSDKQMGEAVRKQLTDGLAKISESQLPGKYKVWSYQFILYPRVMWPLKMCEVPSSVADKMDRLANSFIKKWLGLPRCLSDVGLFGRNMLQLPLRSISQGYRQEKARLVLELRESTDQLVRAAGSQVRTGRKWKAQEEVDRAISRLKHREVIGRVQEGRTGLGRSETPLFWSRVSKEQRRAMVVAEVARTEQDRLRVKAVSQSRQGGWMSWEGVTDRPMSWSDLWKIPQARLSFLIKSTYDILPCPRNLHLWFGAEETCPLCNTINASLQHILSGCKTALSQGRYRWRHDLVLKKLAEVAEACRQEANSRPPAPARLPIPFTRAGENPKPAQQRATARFLSPGSEWTMRVDLGRQLQFPREIVETSLRPDLVMWSVPSKTVLLVELTVPWEEGMEAANERKRAKYADLAADCREAGWKAVTCPIEVGCRGFVGSSTVRLLRDIGCTGAGCRKASKGLAEEAEKGSFWLWLRRRDKGWGHNT

SEQ ID NO: 14203 - protein, 585 aa, Gobiocypris rarus
MCCTHQDFTTGWQQLEVGIAMGCSISPILFVTAFEIILIGARKMVGGVKLPSGKRLPAVRGYMDDITTILRTAACTTRLLKRIDELVGWARMKIKAPKSRSLSIKNGVRNDNTIFVAGGENIPLLADQPVRSLGRKYTAELSDRQMGETVRKQLADGLSKINQSQLPGKYKVWCYQAILYQRVMWPLKMSEISSSVVNKMDGLANSFIRKWLGLPRCFSEVGLFGRNTLQLPLRAIIVGYKQEKARLVLELRESTDQLVRAAGTQIRTGRKWKAQEEVDMAIGRLKHREVVGRVQEGRAGLGRGDIPLFWSKASKEDRKAMVVAEVARAEHERLNIKAVSQGQQGRWMAWEGLIDRSISWSDLWKIPQARLSFLIRATYDTLPCPRNLHQWFGAEEPCSLCNTSNTSLQHILSGCTTALSQGRYRWRHDQVLKKLAEVVESCRKEANSRPTAHGRHSIQFTRAGESVIPSRQRDVARLLSSGSEWSMRVDLGKQLQFPREIVETSLRPDLVMWSEACKTVFLVELTVPWEGGVEAAYERKRAKYSDLATECSEAGWKAVICPVEVGCRGFVGSSSARLLRDMGCT

SEQ ID NO: 14204 - protein, 620 aa, Gobiocypris rarus
MCCTHQDFTTGWQQLEVGIAMGCSISPILFVTAFEIILIGARKMVGGVKLPSGKRLPAVRGYMDDITTILRTAACTTRLLKRIDELVGWARMKIKAPKSRSLSIKKGVRNDNTIFVAGGENIPLLADQPVRSLGRKYTAELSDRQMGETVRKQLADGLSKINQSQLPGKYKVWCYQAILYQRVMWPLKMSEISSSVVNKMDGLANSFIRKWLGLPRCFSEVGLFGRNTLQLPLRAIIVGYKQEKARLVLELRESTDQLVRAAGTQIRTGRKWKAQEEVDMAIGRLKHREVVGRVQEGRAGLGRGDIPLFWSKASKEDRKAMVVAEVARAEHERLNIKAVSQGQQGRWMAWEGLIDRSISWSDLWKIPQARLSFLIRATYDTLPCPRNLHQWFGAEEPCSLCNTSNTSLQHILSGCTTALSQGRYRWRHDQVLKKLAEVVESCRKEANSRPTAHGRHSIQFTRAGESVIPSRQRDVARLLSSGSEWSMRVDLGKQLQFPREIVETSLRPDLVMWSEACKTVFLVELTVPWEGGVEAAYERKRAKYSDLATECSEAGWKAVICPVEVGCRGFVGSSSARLLRDMGCTGARHRKAMKELAEEAEKGSFWLWLRRKEKGWEANT

SEQ ID NO: 14205 - protein, 1051 aa, Carassius auratus
MCSIYISVMDANASESGTDEDTHRAQSNPNNREQSHRTERKEPGRRKMVKWPKANEVAVWQKLDKDLSLILEHSLHGQVENKLNRIGDILYDECIGRLGVTAGKRRACPVQKGRREREIGQLVKRRRQLRKQWRKASREEKEGLKPLWDEVRKELAGLRRAERIRKRRRRKEKERSNFFKNPFKHARQLLEDKRSGKLEITKSELENYIKEQYSDPAKSTPLGSPGYVPRPAPPTSLFDAALPKLSEVTEAVRKARTASAPGPNGIPYKLYKYCPGVLRHLWNLLRVAWRNKVIPSEWQRAVTVFIPKEQNSSTIGQFRSIALLNVEGKIFFSILAKRLTSYLTGNGYIDTSCQKAGVPGFPGCVEHSSVIWEQIQRAKRERGDLHVVWLDLANAYGSVPHQLIEFALDFFHVPVDIRALVAKYFGDLQMCCTHQDFTTGWQQLEVGIAMGCSISPILFIAAFEIILIGARKMVGGVKLPSGQRLPAVRGYMDDITTILQTAACTTRLLKRIDELVGWARMKIKPSKSRSLSIKKGVRNDNTIFVAGGENIPLVKDQPVRSLGRTYTAELSDRQMGEAVRKQLADGLAKINRSQLPGKHKVWCYQAILYQRVMWPLKMSEIPLSVVNKMDGLANSFIRKWLGLPRCFSEVGLFGRNTLQLPLRSISGGYKQEKARLVLELRETTDQLVRAAGTQIRTGRKWKAQEEVDMAITRLKHREVVGRVQEGRAGLGRGDVPLFWSKASKEDRKAMVVAEVARTEHERLNVKAVSQGQQGRWTSWEGLTDRSMSWSDLWKIPQARLSFLIRATYDTLPCPRNLHQWFGAEETCSLCNTSNASLQHILSGCTTALSQGRYRWRHDQVLKKLAEVSESCRKEANSRPSARGWHAIQFARAGESIRPSRQRDTARLLSPGSEWTMRVDLGRQLQFPREIVETSLRPDLIMWSETCKTVLLVELTVPWEGGGGVEAAYERKRAKYSDLAAECREAGWKAVICPVEVGCRGFVGSSTARLLRDMGCTGARHRKAMKELAEEAEKGSFWLWLRRKEKVWGANT

SEQ ID NO: 14206 - protein, 1131 aa, Carassius auratus
MLYNKNTYRAYMKTKTNKEKQPEGPPRGGMEEGPRLTDFPVTTGTDTDKDSRITRRCRCGWEKETTFRGLRIHQGRKKCVEGGQQQHCTANAGQTRGTQGQVANHSAEGSTVAVERQVEDTGGPVMDANASESGTDEDTHRAQSNPNNREQSHRTEGKEPGRRQMVKWPKANEVAVWQKLDKDLSLILEHSLHGQVENKLNRIGDILYDECIGRLGVTAGKRRACPVQKGRREREIGQLVKRRRQLRKQWRKASREEKEGLKPLWDEVRKELAGLRRAERIRKRRRRKEKERSNFFKNPFKHARQLLEDKRSGKLEITKSELENYIKEQYSDPAKSTPLGSPGYVPRSAPPTSLFDAALPKLSEVTEAVRKARTASAPGPNGIPYKLYKYCPGVLRHLWNLLRVAWRNKVIPSEWQRAVTVFIPKEQNSSTIGQFRSIALLNVEGKIFFSILAKRLTSYLTGNGYIDTSCQKAGVPGFPGCVEHSSVIWEQIQRAKRERGDLHVVWLDLANAYGSVPHQLIEFALDFFHVPVDIRALVAKYFGDLQMCCTHQDFTTGWQQLEVGIAMGCSISPILFIAAFEIILIGARKMVGGVKLPSGQRLPAVRGYMDDITTILQTAACTTRLLKRIDELVGWARMKIKPSKSRSLSIKKGVRNDNTIFVAGGENIPLVKDQPVRSLGRTYTAELSDRQMGETVRKQLADGLAKINRSQLPGKHKVWCYQAILYQRVMWPLKMSEIPLSVVNKMDGLANSFIRKWLGLPRCFSEVGLFGRNTLQLPLRSISGGYKQEKARLVLELRETTDQLVRAAGTQIRTGRKWKAQEEVDMAIARLKHREVVGRVQEGRAGLGRGDVPLFWSKASKEDRKAMVVAEVARTEHERLNVKAVSQGQQGRWTSWEGLTDRSMSWSDLWKIPQARLSFLIRATYDTLPCPRNLHQWFGAEETCSLCNTSNASLQHILSGCTTALSQGRYRWRHDQVLKKLAEVSESCRKEANSRPSARGWHAIQFARAGESIRPSRQRDTARLLSPGSEWTMRVDLGRQLQFPREIVETSQRPDLIMWSETCKTVLLVELTVPWEGGGGVEAAYERKRAKYSDLAAECREAGWKAVICPVEVGCRGFVGSSTARLLRDMG

SEQ ID NO: 14207 - protein, 1181 aa, Cyprinodon tularosa
MTAGKDRTGSGRLVTQPTGLSPERHPTLTTKNKKKQQPVGPPRGGMKDGPNRTDYMVTTAMEKDNETPRTPGNEEKVLRKCACGWEKVTTFRGVRIHQGKAKCGQNGQQQPCTATAGETRGTKSQGKNHRANGPNVAEGRRMTGEEGPLVENESPREHEDQVLTTPDRTEPIAETKKPARKNKIKWPKSSEAEAWRALDADLIKTLQESLQGGAEAKLNRIGDIIYQTCKDRFGEIVSRQRSIQREKGRREKEILQLVQRRRQLRKSWRKATLVEKEGLKALWEEVRKRLALLRRAERIRKRSKRKQKERASFFKDPFKHARQLLEEKKTGKLETTREQLEQHVRKQYSDPQRNVPLGTPGYLPQPAQPTVEFNTMPPKLSEVRQVVEKARSSSAPGPNGVPYKLYKNCPKVLELLWYLMRTAWKKQLIPAEWQRAVAVFIPKETNSKDIGQFRNIALLNVEGKIFFSVLARRMTTYLLQNKYIDTNCQKAGVPGFPGCVEHSTMIWDQIQRAKRDKTDLHVVWLDLANAYGSVPHQLIIYAMEFFHMPACIRSMVKSYFNNLHMCFSALDFTTGWQQLEVGIAMGCAISPTLFVAAFEIILIGARQMAGGIKLPTGQRLPPLRSYMDDVTTLLQTAPCTARLLRRIDELMSWARMKIKPSKSRSLSLRRGVRNDNTTFVVGGEKIPLLAEQPIKSLGRQYTAELSDKQMGKTVMKQLSDGLTRIDQSQLPGKYKVWCYQFTLYQRLLWPLKMSEIPSSTVSRMDGKANSFIRKWLGLPRCLSEAGLFGRNMLQLPLRSLQLGYMQEKTRLVLELRESTDELVRNANARVLTGRKWNAQTEVDQAVSRLQHKEMVGRVQVGRAGLGWGEAPRFWSKAHHKERKEMVVAEVMRMEEDRYKIKAVSQGRQGSWTTWEGISTRNISWSDLWKIPQARLSFLIRSTYDTLPCPRNLHQWFGNEECCALCNAPNASLQHILSGCKVALSQGRYRWRHDQVLRKLAEVLEERRKGSRTPSPAEDPTIFVAEGGIRSFKQRETSRPFTTGQEWSMKVDLDRKLQFPTEITTTSLRPDIVAWSIKARAVALIELTVPMEEGIEAAFERKKAKYSELAAECREAGWKTTIYPVEVGCRGFTGLSTIRLLKDVGVTGGRLKKATKELAEEAEKGSFWLWLRRKDRTWGNNT

SEQ ID NO: 14208 - protein, 961 aa, Fundulus heteroclitus
MGDIIYQTCKDRFGEIVSRQRSIQREKGRREKEILQLVQKRRQLRKSWRKATIAEKEGLKALLEEVRKRLAMLRRAERIRKRNKRKQKERASFFKDPFKHARQLLEEKKTGKLEVTREQLEQHVRKQYSDPQRNVPLGTPGYVPRPAHPTAEFNTMPPKLSEVRQVVKKARSSSAPGPNGVPYKLYKNCPKVLELLWYLMRTVWKKQLIPTEWQRAIAVFIPKETNSKDIGQFRNIALLNVEGKIFFSILARRMTTYLLQNKYIDTNCQKAGVPGFPGCVEHSTMIWDQIQRAKREKTDLHVIWLDLANAYGSVPHQLINYAMEFFHMPTCIRSMVESYFNNLQMCFTAQDFTTGWQRLEVGIAMGCAISPTLFVAAFEIILIGARQMAGGIKLPTGQRLPPLRSYMDDVTTLLQTAPCTARLLRRIDELMSWARMKIKPSKSRSLSLRRGVRNDNTTFVVGGEKIPLLAEQPIKSLGRQYTAELSDKQMGKTVMKQLSDGLKRIDQSQLPGKYKVWCYQFTLYQRLLWPLKISEIPSSTVSRMDGKANSFIRKWLGLPRCLSEAGLFGRNMLQLPLRSLQLGYRQEKTRLVLELRESADESVRNANARVLTGRKWNAQTEVDQAISRLQHKEIVGRVQVGKAGLGWGEAPRFWSKAHRKERKEMVVAEVTRMEEDHYKIKAVSQGRQGSWTTWEGISTRNISWSDLWKIPQARLSFLIRSTYDMLPCPRNLHQWFGNEEYCALCNTPNASLQHILSSCKVALSQGRYRWRHDQVLRKLAEVLEERRQGSRTLPPAEDPTIFVAEGGIRSFKQRETTMPFTAGQEWSMKVDLDRKLQFPTEITTTSLRPDIVAWSVKVRAVALIELTVPMEEGIEAAFERKKAKYSELAAECREAGWKTTTYPVEVGCRGFMGLSTIRLLKEVGVTGGRLRKTTKELAEEAEKGSFWLWLRKKDRTWGNNT

SEQ ID NO: 14209 - protein, 806 aa, Cyprinodon tularosa
MPPKLSEVRQVVEKARSSSAPGPNGVPYKLYKNCPKVLELLWYLMRTAWKKQLIPAEWQRAVAVFIPKETNSKDIGQFRNIALLNVEGKIFFSVLARRMTTYLLQNKYIDTNCQKAGVPGFPGCVEHSTMIWDQIQRAKRDKTDLHVVWLDLANAYGSVPHQLIIYAMEFFHMPACIRSMVKSYFNNLQMCFSALDFTTGWQRLEVGIAMGCAISPTLFVAAFEIILIGARQMTGGIKLPTGQRLPPLRSYMDDVTTLLQTAPCTARLLRRIDELMSWARMKIKPSKSRSLSLRRGVRNDSTTFVVGGEKIPLLAEQPIKSLGRQYTAELSDKQMGKTVMKQLSDGLTRIDQSQLPGKYKVWCYQFTLYQRLLWPLKMSEIPSSTVSRMDGKANSFIRKWLGLPRCLSEAGLFGRNMLQLPLRSLQLGYMQEKTRLVLELRESTDELVRNANARVLTGRKWNAQTEVDQAVSRLQHKEIVGRVQVGRAGLGWGEAPRFWSKAQHKERKEMVVAEVMRMEEDRYKIKAVSQGRQGSWTTWEGISTRNISWSDLWKIPQARLSFLIRSTYDTLPCPRNLHQWFGNEECCALCNAPNASLQHILSGCKVALSQGRYRWRHDQVLRKLAEVLEERRKGSRTPSPAEDPTIFVAEGGIRSFKQRETSRPFTTGQEWSMKVDLDRKLQFPTEITTTSLRPDIVAWSIKARAVALIELIVPMEEGIEAAFERKKAKYSELAAECREAGWKTTIYPVEVGCRGFTGLSTIRLLKDVGVRGGRLRKATKELAEEAEKGSFWLWLRRKDRTWGNNT

SEQ ID NO: 14210 - protein, 1136 aa, Fundulus heteroclitus
MKDGPNRTDYTVTTATEKDNETPRIPGNEEKVLRKCPCGWEKVTTFRGVRIHQGKAKCGQNSRQQSCTAIAGETRGTKSQGKNHRANGPNGAEGKRVTEEEGPLVENESPREHEDPVLTTPDRIEPIAETKKPARRNKIKWPKSSEAEAWCALDADLIKTLQESLQGGAEAKLNRMGDIIYQTCKDRFGEIVSRQRSIQREKGRREKEILQLVQKRRQLRKSWRKATLAEKEGLKALWEEVRKRLAMLRRAERIRKRNKRKQKERASFFKDPFKHARQLLEEKKTGKLEVTREQLEQHVRKQYSDPQRNVPLGTPGYVPRPAHPTAEFNTMPPKLSEVRQVVKKARSSSAPGPNGVPYKLYKNCPKVLELLWYLMRTVWKKQLIPTEWQRAVAVFIPKETNSKDIGQFRNIALLNVEGKIFFSILARRMTTYLLQNKYIDTNCQKAGVPGFPGCVEHSTMIWDQIQRAKREKTDLHVIWLDLANAYGSVPHQLINYAMEFFHMPTCIRSMVESYFNNLQMCFTAQDFTTGWQRLEVGIAMGCAISPTLFVAAFEIILIGARQMAGGIKLPTGQRLPPLRSYMDDVTTLLQTAPCTARLLRRIDELMSWARMKIKPSKSRSLSLRRGVRNDNTTFVVGGEKIPLLVEQPIKSLGRQYTAELSDKQMGKTVMKQLSDGLKRIDQSQLPGKYKVWCYQFTLYQRLLWPLKMSEIPSSTVSRMDGKANSFIRKWLGLPRCLSEAGLFGRNMLQLPLRSLQLGYRQEKTRLVLELRESADESVRNANARVLTGRKWNAQTEVDQAVSRLQHKEIVGRVQVGKAGLGWGEAPRFWSKAHRKERKEMVVAEVTRMEEDRYKIKAVSQGRQGSWTTWEGISTRNISWSDLWKIPQARLSFLIRSTYDTLPCPRNLHQWFGNEEYCALCNTPNASLQHILSSCKVALSQGRYRWRHDQVLRKLAEVLEERRQGSRTLPPAEDPTIFVAEGGIRSFKQRETTMPFTAGQEWSMKVDLDRKLQFPTEITTTSLRPDIVAWSVKVRAVALIELTVPMEEGIEAAFERKKAKYSELAAECREAGWKTTIYPVEVGCRGFMGLSTIRLLKDVGVTGGRLRKTTKELAEEAEKGSFWLWLRRKDRTWGNNT

SEQ ID NO: 14211 - protein, 779 aa, Cyprinodon tularosa
MPPKLSEVRQVVEKARFSSAPGPNGVPYKLYKNCPKVLELLWYLMRTAWKKQLIPAEWQRAVAVFIPKETNSKDIGQFRNIALLNVEGKIFFSVLARRMTTYLLQNKYIDTNCQKAGVPGFPGCVEHSTMIWDQIQRAKRDKTDLHVVWLDLANAYGSVPHQLIIYTMEFFHMPACIRSMVKSYFNNLEMCFSALDFTTGWQRLEVGIAMGCAISPTLFVAAFEIILIGARQMAGGIKLPTGQRLPPLRSYMDDVTTLLQTAPCTARLLRRIDELMSWARMKIKPSKSRSLSLRRGVRNDNTTFVVGGEKIPLLAEQPIKSLGRQYTADLSDKQMGKTVMKQLSDGLMRIDQSQLPGKYKVWCYQFTLYQRLLWPLKMSEIPSSTVSRMDGKANSFIRKWLGLPRCLSEAGLYGRNMLQLPLRSLQLGYMQEKTRLVLELRESTDELVRNANARVLTGRKWNAQTEVDQAVSRLQHKEIVGRVQVGRAGLGWGEAPRFWSKAHHKERKEMVVAEVMRMEEDRYKIKAVSQGWQGSWTTWEGISTRNISWSDLWKIPQARLSFLIRSTYDTLPCPRNLHQWFGNEECCALCNAPNASLQHILSGCKVALSQGRYRWRHEQVLRKLAEVLEERRKVSRTPLPAEDPTIFVAEGGIRSFKQRETSRPFTTGQEWSMKVDLDRKLQFPTEITTTSLRPDIVAWSIKARAVALIELTVPMEEGIEAAFERKKAKYSELAAECREAGWKTTIYPVKVGCRGFTGLSTIRLLKDGREAEEGNKGTG

SEQ ID NO: 14212 - protein, 806 aa, Cyprinodon tularosa
MPPKLSEVRQVVEKARSSSAPGPNGVPYKLYKNCPKVLELLWYLMRTAWKKQLIPAEWQRAVAVFIPKETNSKDIGQFRNIALLNVEGKIFFSVLARRMTTYLLQNKYIDTNCQKAGVPGFPGCVEHSTMIWDQIQRAKRDKTDLHVVWLDLANAYGSVPHQLIIYAMEFFHMPACIRSMVKSYFNNLQMCFSALDFTTGWQRLEVGIAMGCAISPTLFVAAFEIILIGARQMAGGIILPTGQRLPPLRSYMDDVTTLLQTAPCTARLLRRIDELMSWARMKIKPSKSRSLSLRRGVRNDSTTFVVGGEKIPLLAEQPIKSLGRQYTAELSDKQMGKTVMKQLSDGLTRIDQSQLPGKYKVWCYQFTLYQRPLWPLKMSEIPSSTVSRMDGKANSFIRKWLGLPRCLSEAGLFGRNMLQLPLRSLQLGYMQEKTRLVLELRESTDELVRNANARVLTGRKWNAQTEVDQAVSRLQHKEIVGRVQVGRAGLGWGEAPRFWSKAQHKERKEMVVAEVMRMEEDRYKIKAVSQGRQGSWTTWEGISTRNISWSDLWKIPQARLSFLIRSTYDTLPCPRNLHQWFGNEECCALCNAPNASLQHILSGCKVALSQGRYRWRHDQVLRKLAEVLEERRKGSRTPSPAEDPTIFVAEGGIRSFKQRETSRPFTTGQEWSMKVDLDRKLQFPTEITTTSLRSDIVAWSIKARAVALIELTVPMEEGIEAAFERKKAKYSELAAECREAGWKTTIYPVEVGCRGFTGLSTIRLLKDVGVRGGRLRKATKELAEEAEKGSFWLWLRRKDRTWGNNT

SEQ ID NO: 14213 - protein, 959 aa, Hypoplectrus puella
MACTGRRPDQDPTGVTARRGRGQTESMGDIIYQTCKDRFGEIVSRQRPIQREKGRREKEIFQLVQRRRQLRKSWRKATLAEKEGLKALWEEVRKRLAMLRRAERIRKRSKRKQKERASFFKDPFKHARQLLEEKKTGKLETTREQLEQHVRKQYSDPQRNVPLGTPGYVPRPAQPTAEFNTMPPKLSEVKQVVEKARSSSAPGPNGVPYKLYKNCPKVLELLWYLMRTVWRKQLIPAEWQRAVAVFIPKETNSKDIGQFRNIALLNVEGKIFFSVLARRMTTYLLQNKYIDTSCQKAGVPGFPGCVEHSTMIWDQIQRAKRDKTDLHVIWLDLANAYGSVPHQLIIYAMEFFHMPACIRSMVESYFNNLQMCFSALDFTTGWQRLEVGIAMGCAISPTLFVAAFEIILIGARQMVGGIKLPTGQRLPPLRSYMDDVTTLLQTAACTARLLRRIDELMSWARMKIKPSKSRSLSLRRGVRNDNTTFVVGGEKIPLLAEQPIKSLGRQYTAELSDKQMGKTVMKQLSDGLTRIDQSQLLGKYKVWCNQFTLYQRLLWPLKMSEIPSSTVSRMDGKANSFIRKWLGLPRCLSEVGLFGRNMLQLPLRSLKLGYMQEKTRLVLELRESTDESVRNTNARVLTGRKWNAQTEVDQAVSRLQHKEIVGRVQAGRAGLGWGEAPRFWSKAHRKERKEMVVAEVTRMEEDRYKIKAVSQGRQGSWTTWEGISARNISWSDLWKIPQARLSFLIRSTYDTLLLSGCKVALSQGCYRWRHDQVLRKLAEVLEECRQGSRTPSPAEDPTIFVAEGGIRSFRQRETARPFTTGQEWSMKVDLDRKLQFPTEITTTSLRPDIVAWSVKARAVALIELTVPMEEGIEAAFERKKAKYSELAAECREAGWKTTIYPVEVGCRGFTGLSTIRLLKDVGVTGGRLRKATKELAEEAEKGSFWLWLRRKDRTWGNNT

SEQ ID NO: 14214 - protein, 806 aa, Cyprinodon tularosa
MPPKLSEVRQVVEKARSSSAPGPNGVPYKLYKNCPKVLELLWYLMRTAWKKQLIPAEWQRAVAVFIPKETNSKDIGQFRNIALLNVEGKIFFSVLARRMTTYLLQNKYIDTNCQKAGVPGFPGCVEHSTMIWDQIQRAKRDKTDLHVVWLDLANAYGSVPHQLIIYAMEFFHIPACIRSMVKSYFNNLQMCFSALDFTTGWQRLEVGIAMGCAISPTLFVAAFEIILIGARQMPGGIKLPTGQRLPPLRSYMDDVTTLLQTAPCTARLLRRIDELMSWARMKIKPSKSRSLSLRRGVRNDNTTFVVGGEKIPLLAEQPIKSLGRQYTADLSDKQMGKTVMKQLSDGLTRIDQSQLPGKYKVWCYQFTLYQRLLWPMKMSEIPSSTVSRMDGKANSFIRKWLGLPRCLSEAGLFGRNMLQLPLRSLKLGYMQEKTRLVLELWESTDELVRNANARVLTGRKWNAQTEVDQAVSRLQHKEIVGRVQVGRAGLGWGEAPRFWSKAYHKERKEMVVAEVTRMEEDRYKIKAVSQGQQGSWTPWEGISTRNISWSDLWKIPQARLSFLMRSTYDTLPCPRNLHQWFGNEECCALCNAPNASLQHILSGCKVALSQGRYRWRHDQVLRKLAEVLEERRKGSRTQSPAEDPIIFVAEGGIRSFKQRETARPFTTGQEWSMKVDLDRKLQFPTEITTTSLRPDIVAWSIKARAVALIELTVPMEEGIEAAFERKKAKYSELAADCREAGWKTTIYPVEVGCRGFTGLSTIRLLKDVGVTGGRLRKATKELAEEAEKGSFWLWLRRKDRTWGNNT

SEQ ID NO: 14215 - protein, 1181 aa, Cyprinodon tularosa
MTAGKDRTGSGRLVTQPTGLSPERHPTLTTKNKKKQQPVGPPRGGMKDGPNRMDYMVTTAMEKDNETPRTAGNEEKVLRKCACGWEKVTTFRGVRIHQGKAKCGQNGQQQPCTATAGETRGTKSQGKNHRANGPNVAEGRRMTGEEGPLVENESPREHEDQVLTTPDRTEPIAETKKPARKNKIKWPKSSEAEAWRALDTYLIKTLQESLQGGAEAKLNRIGDIIYQTCKDRFGEIVSRQRSIQREKGRREKEILQLVQRRRQLRKSWRKATLVEKEGLKALWEEVRKRLALLRRAERIRKRSKRKQKERASFFKDPFKHARQLLEEKKTGKLETTREQLEQHVRKQYSDPQRNVPLGTPGYLLQPAQPTVEFNTMPPKLSEVRQVVEKARSSSAPGPNGVPYKLYKNCPKVLELLWYLMRTAWKKQLIPAEWQRAVAVFIPKETNSKDIGQFRNIALLNIEGKIFFSVLARRMTTYLLQNKYIDTNCQKAGVPGFPGCVEHSTMIWDQIQRAKRDKTDLHVVWLDLANAYGSVPHQLIIYAMEFFHMPACIRSMVKSYFNNLQMCFSALDFTTGWQRLEVGIAMGCAISPTLFVAAFEIILIGARQMAGGIKLPTGQRLPPLRSYMDDVTTLLQTAPCTARLLRRIDELMSWARMKIKPSKSRSLSLRRGVRNDSTTFVVGGEKIPLLAEQPIKSLGRQYTAELSDKQMGKTVMKQLSDGLTRIDQSQLPGKYKVWCYQFTLYQRLLWPLKMSEIPSSTVSRMDGKANSFIRKWLGLPRCLSEAGLFGRNMLQLPLRSLQLGYMQEKTRLVLELRESTDELVRNANARVLTGRKWNAQTEVDQAVSRLQHKEIVGRVQVGRAGLGWGEAPRFWSKAQHKERKEMVVAEVMRMEEDRYKIKAVSQGRQGSWTTWEGISTRNISWSDLWKIPQARLSFLIRSTYDTLPCPRNLHQWFGNEECCALCNAPNASLQHILSGCKVALSQGRYRWRHDQVLRKLAEVLEERRKGSRTPSPAEDPTIFVAEGGSRSFKQRETSRPFTTGQEWSMKVDLDRKLQFPTEITTTSLRPDIVAWSIKARAVALIELTVPMEEGIEAAFERKKAKYSELAAECREAGWKTTIYPVEVGCRGFTGLSTIRLLKDVGVRGGRLRKATKELAEEAEKGSFWLWLRRKDRTWGNNT

SEQ ID NO: 14216 - protein, 806 aa, Cyprinodon tularosa
MPPKLSEVRQVVEKARSSSAPGPNGVPYKLYKNCPKVLELLWYLMRTAWKKQLIPAEWQRAVAVFIPKETNSKDIGQFRNIALLNVEGKIFFSVLARRMTTYLLQNKYIDTNCQKAGVPGFPGCVEHSTMIWDQIQRAKRDKTDLHVVWLDLANAYGSVPHQLIIYAMEFFHMPACIRSMVKSYFNNLQMCFSALDFTTGWQRLEVGIAMGCAISPTLFVAAFEIILIGARQMAGGIKLPTGQRLPPLRSYMDDVTTLLQTAPCTARLLRRIDELMSWARMKIKPSKSRSLSLRRGVRNDSTTFVVGGEKIPLLAEQPIKSLGRQYTAELSDKQMGKTVMKQLSDGLTRIDQSQLPGKYKVWCYQFTLYQRLLWPLKMSEIPSSTVSRMDGKANSFIRKWLGLPRCLSEAGLFGRNMLQLPLRSLQLGYMQEKTRLVLELRESTDELVRNANARVLTGRKWNAQTKVDQAVSRLQHKEIVGRVQVGRAGLGWGEAPRFWSKAQHKERKEMVVAEVMRMEEDRYKIKAVSQGRQGSWTTWEGISTRNISWSDLWKIPQARLSFLIRSTYDTLPCPRNLHQWFGNEECCALCNAPNASLQHILSGCKVALSQGRYRWRHDQVLRKLAEVLEERRKGSRTPSPAEDPTIFVAEGGIRSFKQRETSRPFTTGQEWSMKVDLDRKLQFPTEITTTSLRPDIVAWSIKARAVALIELTVPIEEGIEAAFERKKAKYSELAAECREAGWKTTIYPVEVGCRGFTGLSTIRLLKDVGVRGGRLRKATKELAEEAEKGSFWLWLRRKDRTWGNNT

SEQ ID NO: 14217 - protein, 1181 aa, Cyprinodon brontotheroides
MTAGKDRTGSGRLVTQPTGLSPERHPTLTTKNKKKQQPVGPPRGGMKDGPNRTDYMVTTAMEKDNETPRTPGNEEKVLRKCACGWEKVTTFRGVRIHQGKAKCGQNGQQQPCTATAGETRGTKSQGKNHRANGPNVAEGRRMTGEEGPLVENESPREHEDQVLTTPDRTEPIAETKKPARKNKIKWPKSSEAEAWRALDADLIKTLQESLQGGAEAKLNRIGDIIYQTCKDRFGEIVSRQRSIQREKGRREKEILQLVQRRRQLRKSWRKATLVEKEGLKALWEEVRKRLALLRRAERIRKRSKRKQKERASFFKDPFKHARQLLEEKKTGKLETTREQLEQHVRKQYSDPQRNVPLGTPGYLPQPAQPTVEFNTMPPKLSEVRQVVEKARSSSAPGPNGVPYKLYKNCPKVLELLWYLMRTAWKKQLIPAEWQRAVAVFIPKETNSKDIGQFRNIALLNVEGKIFFSVLARRMTTYLLQNKYIDTNCQKAGVPGFPGCVEHSTMIWDQIQRAKRDKTDLHVVWLDLANAYGSVPHQLIIYAMEFFHMPACIRSMVKSYFNNLQMCFSALDFTTGWQRLEVGIAMGCAISPTLFVAAFEIILIGARQMAGGIKLPTGQRLPPLRSYMDDVTTLLQTAPCTARLLRRIDELMSWARMKIKPSKSRSLSLRRGVRNDNTTFVVGGEKIPLLAEQPIKSLGRQYTAELSDKQMGKTVMKQLSDGLTRIDQSQLPGKYKVWCYQFTLYQRLLWPLKMSEIPSSTVSRMDGKANSFIRKWLGLPRCLSEAGLFGRNMLQLPLRSLQLGYMQEKTRLVLELRESTDELVRNANARVLTGRKWNAQTEVDQAVSRLQHKEIVGRVQVGRAGLGWGEAPRFWSKAHHKERKEMVVAEVMRMEEDRYKIKAVSQGRQGSWTTWEGISTRNISWSDLWKIPQARLSFLIRSTYDTLPCPRNLHQWFGNEECCALCNAPNASLQHILSGCKVALSQGRYRWHHDQVLRKLAEVLEERRKGSRTPSPAEDPTIFVAEGGIRSFKQRETSRPFTTGQEWSMKVDLDRKLQFPTEITTTSLRPDIVAWSIKARAVALIELTVPMEEGIEAAFERKKAKYSELAAECREAGWKTTIYPVEVGCRGFTGLSTIRLLKDVGVRGGRLRKATKELAEEAEKGSFWLWLRRKDRTWGNNT

SEQ ID NO: 14218 - protein, 1144 aa, Alosa sapidissima
MGPPRGGMKDGPNRTDYTVTTATEMDYENTRTPGNEEKILRKCACGWEKVTTFRGVRIHQGKAKCGQNGQQQPCTATAGETRGTKSPGKNHRANGPNVAEGMRATEEEGPLVENEPPREHEDPVLTTSDRTEPNAETKKPARRSKIKWQKSSEAEVWRALDADLIKTLEESLHGGAEAKLNLIGDIIYQTCKDRYGELVPRQRTTLREKGRREKEILQLVQRCRQLRKNWRKATHADKEGLKALWEEVRKRLAGLRRAERIRKRNRRKQKERASFFKDPFTHARPLLEEKKTGKLETTREQLEHHVREQYSDPQRSVPLGTPGYVPQPAQPTAAFNTVPPKLSEVRQVVGMARSASAPGPNGVPYKLYKNCPKVLELLWYLMRTAWKKQLIPSEWQRAVAVFIPKETNSKDIGQFRNIALLNVEGKIFFSVLARRMTNYLLENGYIDTNCQKAGVPGFPGCVEHSTMIWDQIQKAKREKTDLHVIWLDLANAYGSVPHQLINYAMDFFHMPTCVKNLVAQYFNNLQMCFSAQDFTTGWQRLEVGIAMGCAISPILFVAAFEIILIGARQMVGGIKLPTGQRLPPLRSYMDDVTTLLQTAACTARLLKRLDELMSWARMKIKPSKSRSLSLRRGVRNDNTTFIVGGEKIPLLAEQSIKSLGRQYTAELSDKQMGKTVVKQLCDGLARIDQSQLPGKYKVWCYQFTLYQRVMWPLKMSEIPSSIVSKMDGKANSLIRKWLGLPRCLSETGLFGKNTLQLPLKSLQLGYMQEKARLVLELRESTDESVRNANAKVPTGRKWNAQAEVDQAINRLQHQEIMGRVQVGRAGLGCGDAPRFWSKTNRKERKEMVVAEVTRMEEDRYKIKAVSQGRQGSWTTWEGITSRNVSWSDVWKISQARLSFLIRSTYDTLPCPRNLHQWFGSEERCALCNTPNVSLQHILSGCKIALSQGRYRWRHDQVLRKLAEVLEECRQGSKTPPPAEDPTTFVAEGGVKRSIRPRETSRPFSPDQEWSMRVDLDRKLQFPTEITTTSLRPDIVVWSAKARAAILIELTVPMEEGIEAAFERKKAKYSELAAECREAGWKTTIYPVEVGCRGFMGLSTTRLLRDVGLTGGRLRKAIKDLAEEAEKGSFWLWLRRKDKTWGKNT

SEQ ID NO: 14219 - protein, 1151 aa, Labeo catla
MLQCVKQPAGSPRGGMKDGPNRTDHTVTTAMNMDNENTRTPVNEEKILRKCVCGWEKVTTFRGLRIHQGKAKCGQKGRQQPCTALAGETRRSKSQGKNHRAEGPNVAEVIRVTEEGPLVEAEPPREQEGPIPTTSDRTEPNTETKEPARRSKLKWPKSNEAEAWRNLDSDLIKTLEGSLRGGAETKLNLIGDIIYQTCKDRFGEIVPKQMIASREKGRREREILQLVQRRRRLRKNWRKATHAEREGLKVLWEEVQKRLAGLRRAERIRKRSQRKQKERANFFKDPFKYARQLLEEKKSGKLETTREKLEQHVKEQYSDPQRSVPLGTPGYVPQPAEPTVEFNIMPPKLSEVREVVEKARSSSAPGPNGVPYKLYKNCPKVLELLWYLMRTVWKKQIIPSEWQRAVAVFIPKEMNSKDISQFRSIALLNVEGKIFFSVLARRMTNYLLENGYVDTNCQKAGVPGFPGCVEHSTMIWDQIQKAKREKTDLHVIWLDLANAYGSVPHQLVNYATEFFHMPTCVRNLVAQYFSNLQMCFSLHDFTTGWQRLEVGIAMGCTISPILFVAAFEIILIGARQMVGGIKLPTGKRLPPLRSYMDDVTSLLQTAACTSRLLKRMDELMSWARMKIKPSKSRSLSLRRGVRNDNTIFVVGGEKIPLLSEQPIKSLGRQYTADLSDKQMGKTVMKQLSDGLARIDQSQLPGKFKVWCYQFTLYRRIMWPLKMSEIPSSTVSKMDGKANSFIRKWLGLPQCLSETGLFGKNMLQLPLQSIRLGYMQEKTRLVLELRESTDESVRNTNAKVTTGRKWNAQTEVDQAVSRLQHQEIMGRVQAGRAGLGWGTMPRFWSKANRKQRKEMVVAEVTRMEEDRYKIKAVSQGRQGSWTTWEGIMNRNISWTDVWKIPQARLSFLIRSTYDTLPCPRNLHQWFGSEESCALCNAPNASLQHILSGCKIALSQGCYRWRHDQVLRKLAKVLEECRQDSKQPPSAEDPTFFASEGGVRRSIRSRETARLFSSNQEWNMRVDLDRQLRFPTEITTTSLRPDIVVWSTKARLVHLIELTVPLEEGIEAAFERKKAKYSDLAGECWEAGWKTTSYPVEVGCRGFLGLSTIRLLREAGVTGGKLRRATKDLAEEAEKGSFWLWLRRKDRCWGKNT

SEQ ID NO: 14220 - protein, 1136 aa, Labeo catla
MYIICNRTDHTVTTAMNMDNENTRTPVNEEKILRKCVCGWEKVTTFRGLRIHQGKVKCGQKGRQQPCTALAGETRRTKSQGKNHRAEGPNVAEVIRVTEEGPLVEAEPPREHEGPIPTTSDRTEPNTETKEPARRSKLKWPKSNEAEAWRNLDSDLIKTLEGSLRGGAETKLNLIRDIIYQTCKDRFGEIVPKQMIASREKGRREREILQLVQRRRRLRKNWRKATHAEREGLKVLWEEVQKRLAGLRRAERIRKRSQRKQKERANFFKDPFKYARQLLEEKKSGKLETTREKLEQHVKEQYSDPQRSVPLGTPGYVPQPAKPTVEFNIMPPKLSEVRELVEKARSSSAPGPNGVPYKLYKNCPKVLELLWYLMRTVWKKQIIPSEWQRAVAVFIPKEINSKDISQFRSIALLNVEGKIFFSVLARRMTNYLLENGYVDTNCQKAGVPGFLGCVEHSTMIWDQIQKAKREKTDLHVIWLDLANAYGSVLHQLVNYATEFFHMPTCVRNLVAQYFSNLQMCFSLHDFTTGWQRLEVGIAMGCTISPILFVAAFEIILIGARQMVGGIKLPTGKRLPPLRSYMDDVTSLLQTAACTSRLLKRMDELMSWARMKIKPSKSRSLSLRRGVRNDNTIFVVGGEKIPLLSEQPIKSLGRQYTADLSDKQMGKTVMKQLSDGLARIDQSQLPGKFKVWCYQFTLYRRIMWPLKMSEIPSSTVSKMDGKANSFIRKWLGLPQCLSETGLFGKNMLQLPLQSIRLGYMQEKTRLVLELRESTDESVRNANAKVTTGRKWNAQTEVDQAISQLQHQEIMGRVQAGRAGLGWGTMPRFWSKANRKQRKEMVVAEVTRMEEDRYKIKAVSQGRQGSWTTWEGIMNRNISWTDVWKIPQARLSFLIHSTYDTLPCPRNLHQWFGSEESCALCNAPNASLQHILSGCKIALSQGRYRWRHDQVLRKLAEVLEECRQDSKQPPSAEDPTIFASEGGVRRSIRSRETARLFSSNQEWNMRVDLDRQLRFPTEITTTSLRPDIVVWSTKARSVHLIELTVPLEEGIEAAFERKKAKYSDLAGECREAGWKTTSYPVEVGCRGFLGLSTIRLLREAGVTGGKLRRATKDLAEEAEKGSFWHWLRRKDRCWGKNT

SEQ ID NO: 14221 - protein, 580 aa, Pimephales promelas
MCCTHQDFTTGWQQLEVGIAMGCSISPILFVAAFEIILMGARVMVGGMKLPSGQRLPPVRGYMDDITTILQTAACTTRLLKRVDELVGWARMKIKPAKSRSLSIRKGVRNDHTIFFAGGEEIPLLANQPVRSLGRSYTADLSDRQMGETVRKQLPGKYKVWSYQFILYPRVMWPLKMSEVPSSVANKMDGLANSFIRKWLGLPRCLSEVGLFGRNTLQLPLRSIGLRYKQEKARMVMELRESTDQLVRAAGPNIRTGRKWKAQEEVDRAISRLKHCEIVGRVQEGRAGLGRSETPLFWSKASKEERKAMVVAEVTRTEQERLNIKAVSQSWQGVWMSWEGVTDRHLSWSDLWKIPQARLSFLIRSTYDTLPCPRNLHQWFGTEELCPLCSTSNASLQHILSGCKTALSQGRHRWRHDLVLRKLAEVAESCRQEANRRPFGPTRSPILFARAGEKINHPHQRATSRVLLSGSEWNMRVDLGRQLQFPREIVETLLRPDLIMWSELCKTILLVELTVPWEEGMEAANERKRAKYADLAEACKEASWKATTWPVEVGCRGFVGSSTVLAPRDGMYRSRVSKSH

SEQ ID NO: 14222 - protein, 716 aa, Pimephales promelas
MAKRMTSFLTRNGFIDTSCQKAGIPGFPGCVEHSSVIWEQIQRAKREKGDLHVVWLDLANAYGSVPHQLITYALDFFYIPDPCKVLISRYFEDIQICCTHEDFTTKWQRLEVGIAMGCSISPILFVAAFEIILIGARQVVGGVKLPSGQRLPPLRGYMDDVTTILQTAPCTVRLLKRFDELVEWARMRIKPSKSRSLSLQKGVRSDRTIFSAGGEEIPLLSSQPVRSLGRTYSADLTDKQMGNAVKKQLADGLSRINLSQLPGKYKVWCYQFTLYQRIMWPLKMSEVPSSTVCKLDSLANSYIRKWLGLPRCLSDVGLFGKTKLQLPLRSISGGYKQEKVRLIMELRESTDPLVRAADAQVLTGRKWRAKEEVDLAISRLQHREVLGRVQDGRAGVGWGQAPLFWSNASKEERKAMVAAEVMRAEHERLTIKAVSQGQQGGWLSWEGVLDRQLAWSDVWKIPQARLSFLVRAAYDTLPCPRNLHRWFGNEESCLLCSTANASFQHIMSGCKTALAQGRYRWRHDLVLKKLAEVVETCRQEANSRPPALIAHSIQFARAGERGNTHHRKDTGRLLTPGKGWTLAVDLGKQLQFPREIVETSLRPDLVLWSAACKVVLMVELTVPWEGGLEAAHERKRAKYSDLAAECREAGWRAVTYPVEVGCRGFVGSSTSRLLRDMGATGIRHRKAMKELAEEAERGSYWLWLRRKAKNWGPVSI

SEQ ID NO: 14223 - protein, 1137 aa, Pimephales promelas
MEEGPNRTDFSATTGSNIDNETKRLRKCRCGWEKKTTFRGLRIHQGKMKCVEESLQQHCTAAQAAGKTSGLQSRVTHHSAEGSTAEEREQEVEGGDLIVESDPVEGGLAESTSFGPDNQGPGCRGERREPGRRQAIKWPKAKEVAVWQNLDVDLSTILDHSLRGNVEAKLNLIGDILYEECRGRFGIISGKKCAGPRPKGRREQQIEQLVKRRRQLRKQWRKAEEEEKEGLKSLWKDVKESLAGLRRAERIRKRRKRKEKERSDFFKNPFKHARQLLEDRRSGKLETTKEELERHFSQQLSDADRLIPLGSPGYVPRPAPPAVPFNTAPPKLSEVADIIRKARAASAPGPNGIPYKLYKHCPGVQRILWKLLGAAWKKEVVPVEWRRALSVLIPKEQDSKDIDQFRNIALLNVEGKIFFSIMAKRMTSFLTRNGFIDTSCQKAGIPGFPGCVEHSSVIWEQIQRAKREKGDLHVVWLDLANAYGSVPHQLITYALDFFYIPDPCKVLISRYFEDIQICCTHEDFTTKWQRLEVGIAMGCSISPILFVAAFEIILIGARQVVGGVKLPSGQRLPPLRGYMDDVTTILQTAPCTVRLLKRFDELVEWARMRIKPSKSRSLSLQKGVRSDRTIFSAGGEEIPLLSSQPVRSLGRTYSADLTDKQMGNAVKKQLADGLSRINLSQLPGKYKVWCYQFTLYQRIMWPLKMSEVPSSTVCKLDSLANSYIRKWLGLPRCLSDVGLFGKTKLQLPLRSISGGYKQEKVRLIMELRESTDPLVRAADAQVLTGRKWRAKEEVDLAISRLQHREVLGRVQDGRAGVGWGQAPLFWSNASKEERKAMVAAEVMRAEHERLTIKAVSQGQQGGWLSWEGVLDRQLAWSDVWKIPQARLSFLVRAAYDTLPCPRNLHRWFGNEESCLLCSTANASFQHIMSGCKTALAQGRYRWRHDLVLKKLAEVVETCRQEANSRPPALIAHSIQFARAGERGNTHHRKDTGRLLTPGKGWTLAVDLGKQLQFPREIVETSLRPDLVLWSAACKVVLMVELTVPWEGGLEAAHERKRAKYSDLAAECREAGWRAVTYPVEVGCRGFVGSSTSRLLRDMGATGIRHRKAMKELAEEAERGSYWLWLRRKAKNWGPVSI

SEQ ID NO: 14224 - protein, 1137 aa, Pimephales promelas
MEEGPNRTDFSATTGSNIDNETKRLRKCRCGWEKKTTFRGLRIHQGKMKCVEESLQQHCTAAQAAGKTSGLQSRVTHHSAEGSTAEEREQEVEGGDLIVESDPVEGGLAESTSFGPDNQGPGCRGERREPGRRQAIKWPKAKEVAVWQNLDVDLSTILDHSLRGNVEAKLNLIGDILYEECRGRFGIISGKKCAGPRPKGRREQQIEQLVKRRRQLRKQWRKAEEEEKEGLKSLWKDVKESLAGLRRAERIRKRRKRKEKERSDFFKNPFKHARQLLEDRRSGKLETTKEELERHFSQQLSDADRLIPLGSPGYVPRPAPPAVPFNTAPPKLSEVADIIRKARAASAPGPNGIPYKLYKHCPGVQRILWKLLGAAWKKEVVPVEWRRALSVLIPKEQDSKDIDQFRNIALLNVEGKIFFSIMAKRMTSFLTRNGFIDTSCQKAGIPGFPGCVEHSSVIWEQIQRAKREKGDLHVVWLDLANAYGSVPHQLITYALDFFYIPDPCKVLISRYFEDIQICCTHEDFTTKWQRLEVGIAMGCSISPILFVAAFEIILIGARQVVGGVKLPSGQRLPPLRGYMDDVTTILQTAPCTVRLLKRFDELVEWARMRIKPSKSRSLSLQKGVRSDRTIFSAGGEEIPLLSSQPVRSLGRTYSADLTDKQMGNAVKKQLADGLSRINLSQLPGKYKVWCYQFTLYQRIMWPLKMSEVPSSTVCKLDSLANSYIRKWLGLPRCLSDVGLFGKTKLQLPLRSISGGYKQEKVRLIMELRESTDPLVRAADAQVLTGRKWRAKEEVDLAISRLQHREVLGRVQDGRAGVGWGQAPLFWSNASKEERKAMVAAEVMRAEHERLTIKAVSQGQQGGWLSWEGVLDRQLAWSDVWKIPQARLSFLVRAAYDTLPCPRNLHRWFGNEESCLLCSTANASFQHIMSGCKTALAQGRYRWRHDLVLKKLAEVVETCRQEANSRPPALIAHSIQFARAGERGNTHHRKDTGRLLTPGKGWTLAVDLGKQLQFPREIVETSLRPDLVLWSAACKVVLMVELTVPWEGGLEAAHERKRAKYSDLAAECREAGWRAVTYPVEVGCRGFVGSSTSRLLRDMGATGIRHRKAMKELAEEAERGSYWLWLRRKAKNWGPVSL

SEQ ID NO: 14225 - protein, 743 aa, Onychostoma macrolepis
MNSTTISQFRSIALLNVEGKIFFAILAKRLTTYLISNEYIDTSCQKAGVPGFPGCVEHSAVIWEQIQRAKRERGDLHVVWLDLANAYGSVPHQLIEYALDFFYIPVCIRALVVKYFEDIKMCCTHQVFTTDWQQLEVGIAMGCSISPILFVAAFEVILMGARVMVGGMKLPSGQRLPPVRGYMDDITTILQTAACTTRLLKRIEELVGWARMKIKPAKSRSLSLRKGVRSDHTIFVAGGEEIPVLANQPVRSLGRTYTANLSDRHMGEAVRKQLAVGLARINQSQLPGKYKVWSYQFILYPRVMWPLKISEVPSSVADKMDGLANSFIRKWLGLPRYLSDVGLFGRNMLQLPLRSIGLGYKQEKARMVLVLELRESTDQLVRAVGPNIKTGRKLKAQEEVDMAISRLKHREIVGRFQEGRPGLGRSETPLFWSKASKEERRAMVVAEVTRTEQERLNIKVVSQSRQGGWMSWESVTDRHLSWSDLWKIPQARLSFLIRSTYDTLPCPRNLHQWFGTEELCPLCSTSNASLQHILSGCETALSQGCYRWRHDLVLRKLAEVAESCRQEANSRPFVPTRRPILFARAGENINHPHQRTTARVLSSGSEWSMRVDLGRQLLFPREIVETSLRPDLIMWSESCKTILLVELTVPWEEGMEAANERKRAKYVDLAEDYREAGWKAITCPVEVGCRGFIGSSTVRLLRDMGCSGAGCRKAIKELAEEAEKGSFWLWLKRKHRGWGSNNT

SEQ ID NO: 14226 - protein, 619 aa, Pimephales promelas
MCCTHQDFTTGWQQLEVGIAMGCSISPILFVAAFEIILMGARVMVGGMKLPSGQRLPPVRGYMDDITTILQTAACTTRLLKRVDELVGWARMKIKPAKSRSLSIRKGVRNDHTIFFAGGEEIPLLANQPVRSLGRSYTADLSDRQMGETVRKQLADGLARINQSQLPGKYKVWSYQFILYPRVMWPLKMSEVPSSVANKMDGLANSFIRKWLGLPRCLSEVGLFGRNTLQLPLRSIGLGYKQEKARMVMELRESTDQLVRAAGPNIRTGRKWKAQEEVDRAISRLKHCEIVGRVQEGRAGLGRSETPLFWSKASKEERKAMVVAEVTRTEQERLNIKSQSWQGVWMSWEGVTDRHLSWSDLWKIPQARLSFLIRSTYDTLPCPRNLHQWFGTEELCPLCSTSNASLQHILSGCKTALSQGRYRWRHDLVLRKLAEVAESCRQEANRRPFGPTRSPILFARAGEKINHPYQRATSRVLLSGSEWNMRVDLGRQLQFPREIVETLLRPDLIMWSELCKTILLVELTVPWEEGMEAANERKRAKYADLAEACKEAGWKATTWPVEVGCRGFVGSSTVRLLREIGCTGAGCRKAIKELAEEAERGSFWLWLRRKHKVWGPSNI

SEQ ID NO: 14227 - protein, 806 aa, Neogobius melanostomus
MFNTMPPKLSEVRQVVSKARSSSAPGPNGVPYKLYKNCPKVLELLWYLMRTAWKKQIIPSEWQRAVAVFIPKEENSRDIGQFRNIALLNVEGKIFFSVLAGRMTEFLLKNGYIDTNCQKAGVPGFPGCIEHSSMIWNQIQRAKREKTDLHIVWLDLANAYGSVPHQLISYALDFFHMPLCIRNLVALYFSDLQMCLALQDFTTGWQQLQVGIAMGCAISPILFVAAFEIILIGARQMVGGIKLPSGQRLPPLRSYMDDVTSLLQTAACTSRLLKRFDELMSWARMKVKPAKSRSLSLRRGVINNSTTFVAGGEKIPLLSEQPIRSLGREYSAELSDKQMGRTVMKQLSDGLARIDQSELPGKYKAWCYQFTLYRRLMWPLKMSEIPSSTVRKMDGKANTFIRKWLGLPRCLSDSGLFGRSALQLPLQSLSVGYMQEKARLVLELSQSTDESVRNANAKVPTGRKWNAEAEVGHAVSRLQHREIVGRVQAGRAGLGWGAAPRFWSKATRKERKEMVVAEVTRMEEERYKIKAVSQGRQGRWTTWEGVVDRNISWSDLWKIPQARLSFLIRSTYDTLPCPRNLHQWFGNEECCSLCNAPNASLQHILSGCKIALSQGRYRWRHDQVLRKLAEVLERCRQGNKQLPPAKSHTNFVREGDGPRETSRPFAPNQEWDMRVDLNKQLQFPTEITITSLRPDIVVWSSKAKVVHLIELTVPSEGEIEAAYERKKAKYSELAAECREAGWKAAIYPVEVGCRGFVGLSMIRLLRDAGVTGGKLRRATRELSEEAEKGSFWLWLRRKDRSWGKYS

SEQ ID NO: 14228 - protein, 842 aa, Sphaeramia orbicularis
MEEHVKRQFSDPLKNVPLGTPGHVLQPVLPSVEFNIMPPKLSEVRQAVRKARASSAPGPNGVPYKLYKNCPKVLELLWYLMRTAWKKQVVPSEWQRAVAVFIPKEANSKDICQFRNIALLNVEGKIFFSVLARRLTTYLLENGYIDTNCQKAGVPGFPGCVEHSTMIWSQIQRAKREKTDLHVVWLDLANAYGSVPHQLISYALEFFHVPPCIRNLVAHYFNDLQMCFALQDFTTGWQQLQVGIAMGCAISPVLFVAAFEVILIGARQMVGGMKLPSGQRLPPLRSYMDDVTSLLQTAACTSRLLKRLDELMSWARIKIKPSKSRSLSLRKGVRNDKTTFVVGGEKIPLLSEQPIKSLGRQYSADLSDKQMGRTVMKQLTDGLARIDKSQLPGKYKTWCYQFTLYRRVMWPLKMSQIPSSTVRKMDGKANSFIRKWLGLPRCLSESGLFGKNALQLPLQSVSVGYMQEKARLVLELRESTDQSVRDANAKVPTGQKWNAQTEVNQAVRRLQHQEIVGRVQAGRAGLGWGEVPRFWSKATRKERKEMVVAEVTRMEDERYKIKAVSQSQQGSWTTWEGVVNRNISWSDLWKIPQARLSFLIRSTYDTLPCPRNLHQWFGNEGCCLLCSTPNASLLHILSGCKVALSQGRYRWRHDQVLKKLAEVLEECRQGSKQLPAAGNHINFVKEGGGGYSRPREALRPFSPGQEWDMRVDLNTQLRFPPEITTTSLRPDTVVWSTQARVVHLIELTVPSEEEIEAASERKRAKYSELAAECREAGWKTTIYPVEVGCRGFVGLSTTRLLRDAVVVGAKMRKATNELSEEAEKGSFWLWLRRKDRSWGKNT

SEQ ID NO: 14229 - protein, 1175 aa, Polypterus senegalus
MFKRFFIQLFYPLFLTPTAHTTYLERGLSLNCLSQGFFYFYPTRTDHMVMAMAMETDNANIRTPVNEQRILRKCVCGWEKVTTYRGLRIHQGKAKCHQKGQQRPCTAEAGETKGTRSQVENHSVDGPNVAEGRGGTEEGSPLEEAEPLQGQQHPIPTTPHGTEPQAETKKPGRRNKLKWPKANEAEVWHTLDIDLIKILEERLRGGAEAKLNLFGDVLYKVCKDRFGEAISKPRTAPRERGRREREITQLVQRRRQLRKSWRKAPHAEKEGLKVLWEEVRRRLASLRRAERIRKRSKRKQKERASFFKDPFRHARQLLEGNKSGKLEITREQMEQHVKRQCSDRLRNIPLGTPGYVPRPAPPTAQFNIMSPKLSEVRQAVKKARSSSAPGPNGVPYKLYKNCPKVLELLWYLMRTVWKKQLIPSEWQRAVAVFIPKEANSKVICQFRNIALLNVEGKIFFSVLARRMTTYLLENGYIDTSCQKAGVPGFPGCVEHSTMIWDQIQKAKREKTDLHVVWLDLANAYGSVPYQLINYALEFFHMPPCIKNLVALYFSDLQMCFALQDFTTGWQQLEVGIAMGCAISPILFVAAFEIILIGARQVVGGIKLPSGQRLPPVRSYMDDVTSLLQTAACTSRLLGRVDELMSWARMKIKPSKSRSLSLRRGIRNDNTIFTVGREKIPLLAEQPIRSLGRQYTADLSDKHMGRSVMKQLTDGLRKIDLSQLPGKYKVWCYQFTHFRRVMWPLKMSKIPSSAVSKMDAKANLFIQKWLGLPWCLSEMGLFGKNTLQLPLQSISLGYKQEKSRLVLELRESTDQSVRNANAMVSTGRKWNAQAEVDQAISRLQHQEIMGRVQVGRAGLGWGEAPLSWSKANCKERKEMVVAEVSRTEEERYKIKAVSQGRQGGWTTWEGVVSRNISWLDLWRIPQARVSFLIRATYDTLPCPRNLNQWFGNEESCALCNAPNASLQHILSGCKIALSQGRYRWRHDQVLRKLAEVLEGRRQGSTGPPLSEDCTSFITEGGGQSYTRPREMSRPFSRHQEWNMRVDLNKQLRFPTEITTTSLRPDIVVWSTKVRSVHLIELTVPSEGEIEAAFERKKAKYSELAEECREAGWKTTIYPVEVGCRGYVGLSTTRLPRDAEVTGRNLRKAIKDLAEEAEKGSFWLWLRRKDRSWGKNK

SEQ ID NO: 14230 - protein, 808 aa, Clupea harengus
MPPKLSEVRHVVEKARSSSAPGPNGVPYKLYNNCPKVLELLWYLMRTVWKKRSIPSEWQRAVAVFIPKEENSKNIGQFRSIALLNVEGKIFFSVLAKRMTNYLMENNYIDTSCQKAGVPGFPGCVEHSSMIWEQIQKAKREKTDLHVIWLDLANAYGSVPHQLISYAMEFFHVPSCIKNLVANYFKDLQMCFALQDFITGWQQLEVGIAMGCAISPILFVAAFEIILIGARQTVGGIKLPSGQKLPPLRSYMDDVTSLLQTAPCTSRLLKRMDELMSWARMKIKPAKSRSLSLRRGVRNDSTIFIAGGERIPLLSEHPIRSLGREYTSELSDKQMGRAVLKQLSDGLAKIDQSQLPGKYKVWIYQFTLYRRIMWPLKMSEIPSSTTTKMDGKANSFIRKWLGLPRCFSDTGLFGKNTLQLPLQSISLGYKQEKTRLLLELRESTDQSVRNAGVKVRTGRKWDAQTEVDRAVGRLQHQEIVGRVQAGRAGLGWGEAPRFWSKANRKERKEMVVSEVIRTEEERYKIKAVSQSRQGSWTTWEGVVDRKISWSDLWKIPQARLGFLIRSTYDTLPCPRNLHQWFGNEEVCPLCNTPNASLRHILSGCKIALSQGRYRWRHDQVLTKLAEVLEGRRRESRGCLPPTEHHINFVREGGERRSTRPKATPKLFSSDQEWNMRVDLGRQLQFPSEITTTSLRPDIVVWSTKAKTALLIELTVPWEEGIEAAFERKKTKYSDLAAECREAGWKTTIYPVEVGCRGFVGQSTTRLLRDAGVTGGKLKKATKELAEEAEKGSFWLWLRRRGKGWGKST

SEQ ID NO: 14231 - protein, 1128 aa, Clupea harengus
MEDGPKRTDHMVTTGMETDNEKKILRKCGCGWEKVTTFRGLRIHQGKARCGGKGHKQPCAAASGQTRGTESRVENHSADGPNVAEGREVEEEEGPLVEDEPPCEHQAEKPTSPLRTEPSRKAEGKEPARRSKIKWPKANMVEEWHKLDVDLVRILEGSLRGGAESKLNQFGDILYQECKGRFGEVSNKQRTALREKGRREKEIGQLVQRRRQLRKNWRKATQAEKEGLKALWGEVRQRLALLRRAERIRKRRNRKERERAIFFKDPFKHARQLLEEKKSGKLEITNKQLEQHVRKQYSDPARNIPLGTPGYVPRPTLPTSKFNIMPPKLSEVRHIVEKARSSSAPGPNGVPYNIYKNCPKVLELLWYLMRTVWKKRSIPSEWQRAVFIPKEENSKNIGQFRSIALLNVEGKIFFSVLAKRMTNYLMENNYIDTSCQKAGVPGFPGCVEHSSMIWEQIQKAKREKTDLHVIWLDLANAYGSVPHQLISYAMEFFHMPSCIKNLVANYFKDLQMCFALQDFITGWQQLEVGIAIGCAISPILFVAAFEIILIGARQTVGGIKLPSGQKLPPLKSYIDDVTSLLQTAPCTSRLLKRMDELMSWARMKIKPAKSRSLSLRRGVRNDSTIFVAGGERIPLLSEHPIRSLGREYTSELSDKQMGRAVLKQLSEGLAKIDQSQLPGKYKVWIYQFTLYRRIMWPLKMSEIPSSTTTKMDGKANSFIRKWLGLPRCFSDTGLFGKNTLQLPLQSISLGYKQEKTRLLLELRESTEQSVRNAGVKVHTGRKWDAQTEVDRAVGRLQHQEIVGRVQAGRARLGWGEAPRFWSKANRKERKEMVVSEVIRTEEERYKIKAVSQSRQGSWTTWEGVVDRKISWSDLWKIPQARLGFLIRSTYDTLPCPRNLHQWFGNEEVCPLCNTPNASLRHILSGCKIALSQGRYRWRHDQVLTKLAEVLEGRRRESRGCLPPTEHHINFVREGGGRRSTRPKATPKLFSSDQEWNMRVDLGRQLQFPSEITSTSLRPDIVAWSTKAKTALLIELTVPWEEGIEAAFERKKTKYSDLAAECREAGWKTTIYPVEVGCRGFVGQSTTLRDAGVTGGKLKKATKELAEEAEKGSFWLWLRRRGKGWGKNT

SEQ ID NO: 14232 - protein, 808 aa, Clupea harengus
MPPKLSEVRHVVEKARSSSAPGPNGVPYKLYKNCPKVLELLWYLMRTVWKKRSIPSEWQRAVAVFIPKEENSKSISQFRSIALLNVEGKIFFSVLAKRMTNYLMENNYIDTSCQKAGVPGFPGCVEHSSMIWEQIQKAKREKTDLHVIWLDLANAYGSVPHQLISYAMEFFHMPSCIKNLVANYFKDLQMCFALQDFITGWQQLEVGIAMGCAISPILFVAAFEIILIGARQTVGGIKLPSGQKLPPLRSYMDDVTSLLQTAPCTSRLLKRMDELMSWARMKIKPAKSRSLSLRRGVRNDSTIFVAGGERIPLLSEHPIRSLGREYTSELSDKQMGRAVLKQLSDGLAKIDQSQLPGKYKVWIYQFTLYRRIMWPLKMSEIPSSTTTKMDGKANSFIRKWLGLPRCFSDTGLFGKNTLQLPLQSISLGYKQEKTRLLLELRESTDQSVRNAGVKVRTGRKWDAQTEVDRAVGRLQHQEIVGRVQAGRAGLGWGEAPRFWSKANRKERKEMVVSEVIRTEEERYKIKAVSQSRQGSWTTWEGVVDRKISWSDLWKIPQARLGFLIRSTYDTLPCPRNLHQWFGNEEVCPLCNTPNASLRHILSGCKIALSQGRYRWRHDQVLTKLAEVLEGRRRESRGCLPPTEHHINFVREGGERRSTRPKATPKLFSSDQEWNMRVDLGRQLQFPSEITTTSLRPDIVVWSTKAKTALLIELTVPWEEGIEAAFERKKTKYSDLAAECREAGWKTTIYPVEIGCRGFVGQSTTRLLRDAGVTGGKLKKATKELAEEAEKGSFWLWLRRRGKGWGKNT

SEQ ID NO: 14233 - protein, 1132 aa, Clupea harengus
MEDGPKRTDHTVTTGMETDNEKKILRKCGCGWEKVTTFRGLRIHQGKARCGGKGHKQPCAAASGQTRGTESRVENHSADGPNVAEGREVEEEEGPPVEDEPPCEHQAEKPTSPLRTEPSRKAEGKEPARRSKIKWPKANMVEEWNKLDVDLVRILEGSLRGGAESKLNQFGDILYQECKGRFGEVSNKQRTAPREKGRREKEIGQLVQRRRQLRKNWRKATQAEKEGLKALWGEVRQRLALLRRAERIRKRRNRKEKERANFFKDPFKHARQLLEEKKSGKLEITNEQLEQHVRKQYSDPARNVPLGTPGYVPRPTPPTSKFNIMPPKLSEVRHVVEKARSSSAPGPNGVPYKLYKNCPKVLELLWYLMRTVWKKRSIPSEWQRAVAVFIPKEENSKSISQFRSIALLNVEGKIFFSVLAKRMTNYLMENNYIDTSCQKAGVPGFPGCVEHSSMIWEQIQKAKREKTDLHVIWLDLANAYGSVPHQLISYAMEFFHMPSCIKNLVANYFKDLQMCFALQDFITGWQQLEVGIAMGCAISPILFVAAFEIILIGARQTVGGIKLPSGQKLPPLRSYMDDVTSLLQTAPCTSRLLKRMDELMSWARMKIKPAKSRSLSLRRGVRNDSTIFVAGGERIPLLSEHPIRSLGREYTSELSDKQMGRAVLKQLSDGLAKIDQSQLPGKYKVWIYQFTLYRRIMWPLKMSEIPSSTTTKMDGKANSFIRKWLGLPRCFSDTGLFGKNTLQLPLQSISLGYKQEKTRLLLELRESTDQSVRNAGVKVRTGRKWDAQTEVDRAVGRLQHQEIVGRVQAGRAGLGWGEAPRFWSKANRKERKEMVVSEVIRTEEERYKIKAVSQSRQGSWTTWEGVVDRKISWSDLWKIPQARLGFLIRSTYDTLPCPRNLHQWFGNEEVCPLCNTPNASLRHILSGCKIALSQGRYRWRHDQVLTKLAEVLEGRRRESRGCLPPTEHHINFVREGGEKRSTRPKATPKLFSSDQEWNMRVDLGRQLQFPSEITTTSLRPDIVVWSTKAKTALLIELTVPWEEGIEAAFERKKTKYSDLAAECREAGWKTTIYPVEIGCRGFVGQSTTRLLRDAGVTGGKLKKATKELAEEAEKGSFWLWLRRRGKGWGKNT

SEQ ID NO: 14234 - protein, 993 aa, Clupea harengus
MVEEWHKLDVDLVRILEGSLRGGAESKLNQFGDILYQESKGRFGEVSNKQRTAPREKGRREKEIGQLVQRRRQLRKNWRKATQAEKEGLKALWGEVRQRLALLRRAERIRKRRNRKEKERANFFKDPFKHARQLLEEKKSGKLEIINEQLEQHVRKQYSDPARNVPLGTPGYIPWPTPPTSKFNIMPPKLSEVRHVVEKARSSSAPGPNGVPYKLYKNCPKVLELLWYLMRTVWKKRSIPSEWQRAVAVFIPKEENSKNIGQFRSIALLNVEGKIFFSVLAKRMTNYLMENNYIDTSCQKAGVPGFPGCVEHSSMIWEQIQKAKREKTDLHVIWLDLANAYGSVPHQLISYAMEFFHVPSCIKNLVANYFKDLQMCFALQDFITGWQQLEVGIAMGCAISPILFVAAFEIILIGARQTVGGIKLPSGQKLPPLRSYMDDVTSLLQTAPCTSRLLKRMDELMSWARMKIKPAKSRSLSLRRGVRNDSTIFIAGGERIPLLSEHPIRSLGREYTSELSDKQMGRAVLKQLSDGLAKIDQSQLPGKYKVWIYQFTLYRRIMWPLKMSEIPSSTTTKMDGKANSFIRKWLGLPRCFSDTGLFGKNTLQLPLQSISLGYKQEKTRLLLELRESTDQSVRNAGVKVRTGRKWDAQTEVDRAVGRLQHQEIVGRVQAGRAGLGWGEAPRFWSKANRKERKEMVVSEVIRTEEERYKIKAVSQSRQGSWTTWEGVVDRKISWSDLWKIPQARLGFLIRSTYDTLPCPRNLHQWFGNEEVCPLCNTPNASLRHILSGCKIALSQGRYRWRHDQVLTKLAEVLEGRRRESRGCLPPTEHHINFVREGGERRSTRPKATPKLFSSDQEWNMRVDLGRQLQFPSEITTTSLRPDIVVWSTKAKTALLIELTVPWEEGIEAAFERKKTKYSDVAAECREAGWKTTIYPVEVGCRGFVGQSTTRLLRDAGVTGGKLKKATKELAEEAEKGSFWLWLRRRGKGWGKST

SEQ ID NO: 14235 - protein, 1200 aa, Hyposmocoma kahamanoa
MMEHNSYDERIGPLPGGNRRGAPGAGAGRGSMRAPSRGRLARPSGQSTHDPSPPVGMVSAGAGATRSQQSVPASGGVRRRMAWTIDMNKNAMRAYFRASGSGTGRTGYRAVMYREFLRLEPTLTVTEQNLADRVRYLQRSGLFSAAELEQLRCEAVPPLEEEPPRLERSPVPSREVHREPSAQQPDTGGTESDWGTVALDLEALRSSLEETILEYRHVPLERRPRLPRVPLSIKVRDAVGAINNMLPSFLEESADLWETDSILFAAAMTVCQFVGVRMPPTRPGGNHQVGSTTPRTSTKPAWMRRIEGRIAWARVLIGKLTSFRSGVTRPRVMRFVREAFPGENIFVDSPEFARKLTGRIDDLKQKIAAWGKRIRRYSERVKRYRQNRLFMSDQKKFYRTLERPDVVLTGERPDKAEVVAFWRRLWSQPVDHEEGPWFEAVERACATIAPMNPISISEEDVAVAVRKAPNWKSPGPDGLHHYWLKGFWCCHATLARQFQSALESGTLPNFLTTGVTHLAPKSDATVDPSQYRPITCLCTIYKTLTSVLSSKISQHIVDNSVMSEAQNGCRGGSRGSKELLLIDAVAGQLVRRNRRNFSAAWIDYRKAFDSVPHSWLSRVLELYKIDSAVRHFLGQCMGCWRTILSLDGRRMTDADDRIEIRRGIFQGDCLSPLWFCLALNPLSTLLERSGTGFQFRRGGPRMPHLLYMDDLKLYGPTADRLTELLTITNDFSSSVRMELGIDKCAVVHVEKGRVMHSNGINIGTNHLRVLSETETYRYLGMSQTIGVKEADVKQGVCEVFCGRLKNVLNSYLSGVNKIRAYNSWVMPVLMYTFGVLKWTQTELDALDRRVRTTMTSHRMHHPRSSVMRLYVPRKCGGRGLLSVKTMHNREICSLRNYFLTMTDDVIRGEVTCDKGLTPLSLAKEEWRDPVVLSTSDRESVWKEKELHGRFFKVLHEPFMDRKASLHWLRFGDLFGETEGFICAIQDQVIKTRNYRKYILKDGTVDICRACGRPGESLRHIVSGCSALANTEYLHRHNQAAKILHQELALKYGLVQQRLPYYKYSPEPILEDDRTKIYWDRSIITDRTILANKPDIVILDRSQSRVFLVDVTIPHDEGLVKAETEKRRKYLDLAHEITDMWDVASTEIIPIVLSANGLIPVSLSNSLRRLDFCGVSLPAQMQKAVLLDTARIVRRFLDLSP

SEQ ID NO: 14236 - protein, 1170 aa, Bombyx mori
MSKTFKTNQRSDSLRPLQRVEPPSSSPPGGLVPAESTRTPQQTPALGGGRRMRWTREQNSNVMRAHFGAVGGETGGTGRRARLLRNFQALEPSLTHITDQNLADRVRFIMRSNIFSANELEQLRLEAVPASSLAPAEGRVSIASMQDLNVGGAVDTGYQPLAADGGADGIASQDNEQIRRILEEAILEVREMPLDARPRIPRIAQSHHSRNVVEAVNEMLLPYLENSSSLTETNSILFGAAMAVCRYIGAKLQPNRQVTAADAQRVREAEPAWKRRIERRISDARVLIGKLISFRTGNTRPRVLRFVRIAFAGCGLGPAVPNAQQLADRIDLLKQKVAAWSKRIRRYSERVQRYRQNRLFVSDQRKFYRSLEQANVSAVTERPAGQEMVTFWRNLWSRPVEHVEGSWMQVIEDSCAGIPPMSPVTISKGDIKAAVCSSSHWKSPGCDGLQLYWLKSFRACHETLARQFQEALDTKVLPAFLTTGITHLIPKSESTADPAQYRPITCLPTTYKTLTSVLETKISHHIDSCRVLSGAQNGCRRGSRGTKELLLIDAVAGQQVKRNRRNFSAAWIDYKKAFDSVPHTWLKRVLELYKIDDTVRDFLGACMGQWSTMLSLSGVRLSAVEDRIKVNRGIFQGDCLSPLWFCLALNPLSSLLEASRTGFQFRRGGLKVSHLFYMDDLKLYAPHAAGLRRLLDITCDFSSRIRMRLGVDKCAVLHVERGSIVSSDRLPVSDGINLRALSEGETYRYLGMSQNLGIDVAVVKQAACDVFCERLTKVCKSLLSGVNKTRAFNGWAMPVLLYTFGVLRWTLTELDALDRKVRSIMNLHRMLHPKSSVMRLYIPRKCGGRGLLSAKVMHNSGVCSLREYFLSRADSVMHREVMECDKGLTPLALARDGWQSPAVLSTSDREAIWKGKELHGRFFQALHEPHVDKEASVHWLRFGDLFGETEGFVCAIQDQVIRTNNYRKHILRDGTADICRLCRRPGESLRHVTSGCSMLANTEYLHRHNQAARILHQELALKYGLIEQRLPYYKYQPDAVLENDRAKLYWDRPIITDRTILANKPDIVLMDQTESRVFLVDITIPYDENLVRAEADKKTKYLDLAHEVTDMWRVVSTEIIPVVVSVNGLVPKSLSKHLERLGLNKKSVVAQMQKAVLLDNARIVRRFLSQ

SEQ ID NO: 14237 - protein, 1169 aa, Bombyx mori
MSKTYNTNKRSDSLRPLQRVEPPSSSPPGGLVPAESTRTPQQAPALGGGRRMRWTREQNSNVMRAHFGAVGGETGGTGRRARLLRNFQALEPSLTHITDQNLADRVRFIMRSNIFSANELEQLRLEAVPASSLAPAEGRVSIASMQDLNVGGAVDTGYQPLAADGGADGIASQDNEQIKRILEEAILEVREMPLDARPRIPRIAQSHHNRNVVEAVNEMLLPYLENSSSLTDTNSILFGAAMAVCRCIGAKLQPNRQVTAADAQRVRDAEPAWKRRIERRISDARVLIGKLISFRTGNTRPRVLRFVRIAFAGCGLGPAVPNAQQLADRIDLLKQKVAAWSKRIRRYSERVQRYRQNRLFVSDQRKFYRSLEQTNVSAVTERPAGQEMVTFWRNLWSRPVEHVEGSWMQVIEDSCAGIPPMSPVTISKGDIKAAVCSSSHWKSPGCDGLQLYWLKSFRACHETLARQFQEAIDTKVLPDFLTTGITHLIPKSESTADPAQYRPITCLPTTYKTLTSVLETKISHHIDSCRVLSGAQNGCRRGSRGTKELLLIDAVSGQQVKRNRRNFSAAWIDYKKAFDSVPHTWLKRVLELYKIDDTVRDFLGACMGQWSTMLSLSGVRLSAVEDRIKVNRGIFQGDCLSPLWFCLALNPLSSLLEASRTGFQFRRGGLKVSHLFYMDDLKLYAPHAAGLRRLLDITCDFSSRIRMRLGVDKCAVLHVERGSIVSSDRLPVSDGINLRALSEGETYRYLGMSQNLGIDVAVVKQAACDLFYERLTKVCKSLLSGVNKTKAFNGWAMPVLLYTFGVLRWTQTELDALDRKVRSIMTLHRMLHPKSSVMRLYIPRKCGGRGLLSAKVMHNSGVCSLRKYFLSRADSVMHREVMECDKGLTPLALARDGWQSPAVLSTSDRQAIWKGKELHGRFFQALHEPHVDKEASVHWLRFGDLFGETEGFVCAIQDQVIRTNNYRKHILRDGTADICRLCRRPGESLRHVTSGCSMLANTEYLHRHNQAARILHQELALKYGLIEQRLPYYKYQPDAVLENDRAKLYWDRPIITDRTILANKPDIVLMDRTESRVFLVDITIPYDENLVRAEADKKTKYLDLAHEVTDMWRVATEIIPVVVSVNGLVPKSLSKHLERLGLNKKSVVAQMQKAVLLDNARIVRRFLSQ

SEQ ID NO: 14238 - protein, 1170 aa, Bombyx mori
MSKTYNTNKRSDSLRPLQRVEPPSSSPPGGLVPAESTRTPQQAPALGGGRRMRWTREQNSNVMRAHFGAVGGETGGTGRRARLLRNFQALEPSLTHITDQNLADRVRFIMRSNIFSANELEQLRLEAVPATSLAPAEGRVSIASMQDLNVGGAVDTGYQPLAADGGADGIASQDNEQIKRILEEAILEVREMPLDARPRIPRIAQSHHNRNVVEAVNEMLLPYLENSSSLTDTNSILFGAAMAVCWCIGAKLQPNRQVTAADAQRVRDAEPAWKRRIERRISDARVLIGKLISFRTGNTRPRVLRFVRIAFAGCGLGPAVPNAQQLADRIDLLKQKVAAWSKRIRRYSERVQRYRQNRLFVSDQRKFYRSLEQANVSAVTERPAGQEMVTFWRNLWSRPVEHVEGSWMQVIEDSCAGIPPMSPVTISKGDIKAAVCSSSHWKSPGCDGLQLYWLKSFRACHETLARQFQEALDTKVLPDFLTTGITHLIPKSESTADPAQYRPITCLPTTYKTLTSVLETKISHHIDSCRVLSGAQNGCRRGSRGTKELLLIDAVSGQQVKRNRRNFSAAWIDYKKAFDSVPHTWLKRVLELYKIDDTVRDFLGACMGQWSTMLSLSGVRLSAVEDRIKVNIPIFQGDCLSPLWFCLALNPLSSLLEASRTGFQFRRGGLKVSHLFYMDDLKLYAPHAAGLRRLLDITCDFSSRIRMRLGVDKCAVLHVERGSIVSSDRLPVSDRINLRALSEGETYRYLGMSQNLGIDVAVVKQAACDLFYERLTKVCKSLLSGVNKTRAFNGWAMPVLLYTFGVLRWTQTELDALDRKVRSIMTLHRMLHPKSSVMRLYIPRKCGGRGLLSAKVMHNSGVCSLREYFLSRADSVMHREVMECDKGLTPLALARDGWQSPAVLSTSDREAIWKGKELHGRFFQALHEPHVDKEASVHWLRFGDLFGETEGFVCAIQDQVIKTNNYRKHILRDGTADICRLCRRPGESLRHVTSGCSMLANTEYLHRHNQAARILHQELALKYGLIEQRLPYYKYQPDAVHENNRAKLYWDRPIITDRTILANKPDIVLMDQTESRVFLVDITIPYDENLVRAEADKKTQYLDLAHEVTDMWRVVSTEIIPVVVSVNGLVPKSLSKHLERLGLNKKSVVAQMQKAVLLDNARIVRRFLSQ

SEQ ID NO: 14239 - protein, 1170 aa, Bombyx mandarina
MSKTYNTNKRSDSLRPLQRVEPPSSSPPGGLVPAESTRTPQQAPALGGGRRMRWTREQNSNVMRAHFGAVGGETGGTGRRARLLRNFQALEPSLTHITDQNLADRVRFIMRSNIFSANELEQLRLEAVPASSLAPAEGRVSIASMQDLNVGGAVDTGYQPLAADGGADGIASQDNEQIKRILEEAILEVREMPLDARPRIPRIAQSHHNRNVVEAVNEMLLPYLENSSSLTDTNSILFGAAMAVCRCIGAKLQPNRQVTAADAQRVRDAEPAWKRRIERRISDARVLIGKLISFRTGNTRPRVLRFVRIAFAGCGLGPAVPNAQQLADRIDLLKQKVAAWSKRIRRYSERVQRYRQNRLFVSDQRKFYRSLEQANVSAVTERPAGQEMVTFWRNLWSRPVEHVEGSWMQVIEDSCAGIPPMSPVTISKGDIKAAVCSSSHWKSPGCDGLQLYWLKSFRACHETLARQFQEALDTKVLPDFLTTGITHLIPKSESTADPAQYRPITCLPTTYKTLTSVLETKISHHIDSCRVLSGAQNGCRRGSRGTKELLLIDAVSGQQVKRNRRNFSAAWIDYKKAFDSVPHTWLKRVLELYKIDDTVRDFLGACMGQWSTMLSLSGVRLSAVEDRIKVNRGIFQGDCLSPLWFCLALNPLSSLLEASRTGFQFRRGGLKVSHLFYMDDLKLYAPHAAGLRRLLDITCDFSSRIRMRLGVDKCAVLHVERGSIVSSDRLPVSDGINLRALSEGETYRYLGMSQNLGIDVAVVKQAACDVFYERLTKVCKSLLSGVNKTRAFNGWAMPVLLYTFGVLRWTQTELDALDRKVRSIMTLHRMLHPKSSVMRLYIPRKCGGRGLLSAKVMHNSGVCSLREYFLSRADSVMHREVMECDKGLTPLALARDGWQSPAVLSTSDREAIWKGKELHGRFFQALHEPHVDKEASVHWLRFGDLFGETEGFVCAIQDQVIRTNNYRKHILRDGTADICRLCRRPGESLRHVTSGCSMLANTEYLHRHNQAARILHQELALKYGLIEQRLPYYKYQPDAVLENDRAKLYWDRPIITDRTILANKPDIVLMDQTESRVFLVDITIPYDENLVRAEADKKTKYLDLAHEVTDMWRVVSTEIIPVVVSVNGLVPKSLSKHLERLGLNKKSVVAQMQKAVLLDNARIVRRFLSQ

SEQ ID NO: 14240 - protein, 1170 aa, Bombyx mori
MSKTFKTNQRSDSLRPLQRVEPPSSSPPGGLVPAESTRTPQQTPALGGGRRMRWTREQNSNVMRAHFGAVGGETGGTGRRARLLRNFQALEPSLTHITDQNLADRVRFIMRSNIFSANELEQLRLEAVPASSLAPAEGRVSIASMQDLNVGGAVDTGYQPLAADGGADGIASQDNEQIRRILEEAILEVREMPLDARPRIPKIAQSHHSRNVVEAVNEMLLPYLENSSSLTDTNSILFGAAMAVCRYIGAKLQPNRQVTAADAQRVREAEPAWKRRTERRISDARVLIGKLISFRTGNTRPRVLRFVRIAFAGCGLGPAVPNAQQLADRIDLLKQKVAAWSKRIRRYSERVQRYRQNRLFVSDQRKFYRSLEQANVSAVTERPAGQEMVTFWRNLWSRPVEHVEGSWMQVIEDSCAGIPPMSPVTISKGDIKAAVCSSSHWKSPGCDGLQLYWLKSFRACHETLARQFQEALDTKVLPAFLTTGITHLIPKSESTADPAQYRPITCLPTTYKTLTSVLETKISHHIDSCRVLSGAQNGCRRGSRGTKELLLIDAVAGQQVKRNRRNFSAAWIDYKKAFDSVPHTWLKRVLELYKIDDTVRDFLGACMGQWSTMLSLSGVRLSAVEDRIKVNRGIFQGDCLSPLWFCLALNPLSSLLEASRTGFQFRRGGLKVSHLFYMDDLKLYAPHAAGLRRLLDITCDFSSRIRMRLGVDKCAVLHVERGSIVSSDRLPVSDGINLRALSEGETYRYLGMSQNLGIDVAVVKQAACDVFYERLTKVCKSLLSGVNKTRAFNGWAMPVLLYTFGVLRWTQTELDALDRKVRSIMTLHRMLHPKSSVMRLYIPRKCGGRGLLSAKVMHNSGVCSLREYFLSRADSVMHREVMECDKGLTPLALARDGWQSPAVLSTSDREAIWKGKELHGRFFQALHEPHVDKEASVHWLRFGDLFGETEGFVCAIQDQVIGTNNYRKHILRDGTADICRLCRRPGESLRHVTSGCSMLANTEYLHRHNQAARILHQELALKYGLIEQRLPYYKYQPDAVLENDRAKLYWDRPIIADRTILANKPDIVLMDRTESRVFLVDITIPYDENLVRAEADKKTKYLDLAHEVTDMWRVVSTEIIPVVVSVNGLVPKSLSKHLERLGLNKKSVVAQMQKAVLLDNARIVRRFLSQ

SEQ ID NO: 14241 - protein, 1170 aa, Bombyx mori
MSKTYHTNKRSDSLRPLQRVEPPSSSPPGGLVPAESRRTPQQAPALGGGRRMRWTREQNSNVMRAHFGAVGGETGGTGRRARLLRNFQALEPSLTHITDQNLADRVRFIMRSNIFSANELEQLRLEAVPASSLAPAEGRVSIASMQDLNVGGAVDTGYQPLAADGGADGIASQDNEQIKRILEEAILEVREMPLDARPRIPRIAQSHHNRNVVEAVNEMLLPYLENSSSLTDTNSILFGAAMAVCRCIGAKLQPNRQVTAADAQRVRDAEPAWKRRIERRISDARVLIGKLISFRTGNTRPRVLRFVRIAFAGCGLGPAVPNAQQLADRIDLLKQKVTAWSKRIRRYSERVQRYRQNRLFVSDQRKFYRSLEQANVSAVTERPAGQEMVTFWRNLWSRPVEHVEGSWMQVIEDSCASIPPMSPVTISKDDIKAAVCSSSHWKSPGCDGLQLYWLKSFRACHETLARQFQEAIDTKVLPDFLTTGITHLIPKSESTADPAQYRPITCLPTIYKTLTSVLETKISHHIDSCRVLSGAQNGCRRGSRGTKELLLIDAVSGQQVKRNRRNFSAAWIDYKKAFDSVPHTWLKRVLELYKIDDTVQDFLGACMGQWSTMLSLSGVRLSAVEDRIKVNRGIFQGDCLSPLWFCLALNPLSSLLEASRTGFQFRRGGLKVSHLFYMDDLKLYAPHAAGLRRLLDITCDFSSRIRMRLGVDKCAVLHVERGSIVSSDRLPVSDGINLRALSEGETYRYLGMSQNLGIDVAVVKQAACDLFYERLTKVCKSLLSGVNKTKAFNGWAMPVLLYTFGVLRWTQTELDALDRKVRSIMTLHRMLHPKSSVMRLYIPRKCGGRGLLSAKVMHNSGVCSLRKYFLSRADSVMHREVMECDKGLTPLALARDGWQSPAVLSTSDREAIWKGKELHGRFFQALHAPHVDKEASVHWLRFGDLFGETEGFVCAIQDQVIRTNNYRKHILRDGTSDICRLCRRPGESLRHVTSGCSMLANTEYLHRHNQAARILHQELALKYGLIEQRLPYYKYEPDAVLENDRAKLYWDRPIITDRTILANKPDIVLMDRMESRVFLVDITIPYDENLVRAEADKKTKYLDLAHEVTDMWRVVSTEIIPVVVSVNGLVPKSLSKHLERLGLNKKSVVAQMQKAVLLDNARIVRRFLSQ

SEQ ID NO: 14242 - protein, 1047 aa, Boloria selene
MENNNKNARLGPLPGGRQGAPGAGAGRDSIRAASTTNRPALPPSRPTHPSPPPVGLVPTGSSRTQTSGPAAGGVRRMRWTSQMNENVMRAYYRATGGETGRTGYRAAMYREFLLLEPTLTVTEQNLADRARYIQRSNILNATELERLRREAVPEVRTLKTEQIVPLAATGEDVLTNFHDLPIEGGTQETVALDTERMRRILEEAVSEIRSAPLENRPRLSRLTLNVATREVIEAINQLLPQHLESSIGLDDTASILFGAALAVHRFVGARTPGPERDTAARCKAQPAWKKRIERRINHARGLIGRLQSFRSGNTRPRIVRSVRIAFNGLGVRLDQPDIAQKLTERIDDLKQRIAAWGSRIRRYSERVERFQQNRLFSSDQKRFYRTLECPAVCSTSQKPSPADLVAFWRNVWSKEVQHEEGPWIAAVEEACAVIKPMSPVAISAEDVVDAVRRAPNWKSLGPDGLHHYWLKGFSVCHVTLARQFQEALEQRTLPNLFTTGITHLAPKSTDAADPAKYRPITCLTTIYKTLTSVLSSKISRHVDENNIISGAQNGCRGRSRGTKELLLIDSVAGQLVKRNRRNFSAAWIDYKKAFDSVPHSWLSRVLELYNVDSTVRNFLGKCMGQWSTILSLHGERITAADDRIRIRRGIFQGDCLSPLWFCLSLNPFSSLLESSGTGFQFRRGGTRVPHLLYMDDLKLLAPNANRLQELLKITSEFSNSIRMKLGLDKCAVLHVVRGQVTHSAEINLEPSSIRTLSESESYRYLGMSQSIGVNEADMKQSVCEAFFDRLTKVCKSFLSGANKVRAYNGWVMPVLMYTFGVLRWTQTELDTLDRRVRTTMTLYRIHHPKSSVMRLYIPRKCGGRGLLSVKTMHNREIANLRTYFETKGESPMHREVVECDKGLTPLSLAKTEWQAPVVLSTSDRETVWKEKELHGRFFKALNEPNVDKKASVQWLRFGDLFGETEGFVCAIQDQVVKTRNYRKYILKDGTHDICRACGHPGESLRHVLSGCSALANTEYLHRHNQAAKILHQELALKHGLLDERLPY

SEQ ID NO: 14243 - protein, 1195 aa, Antheraea pernyi
MERSNYGMRKRPLPGGYRRGASGAGAGRGSMRDASHPTHLTQTPGQMNRPPSPSVGLAPAGSPMIQQSVPASGGSRRMRWTHVQNTNVMRAYYSAVGGETRRTGYRARMHRLFQSLEPLLNVTEQNLSDRVRFILRSNIFSANELETLQSEAVSVSPSTPPSTTCTPFEQLIEVPRGTSLVEVTDSTVEPQNVDNAHGAEIPDLEQISRMLHEIILNIRTTTLEERPRLPRIPLSRRNRNAVEAVNKLLPEYLASSNNLSDTNLIIHGAAQVVCLMVGVKLPNTANTTRPSYIVPRWQQRIERRIIQARVLIGKLMSFNSGNHRPRVMRFVKDALKVSSTTPAYDIDRRSVTECIDNLKQKISAWGKRIRRYNERVERHRQNNLFVSDEKRFYKYMQRKSSGATVEPEQEHLVSFWRNIWSHSMSHHEGPWMSLVTQACTDVVSMDPIIITEDDVKHAVNKAPNWKSPGYDGLHHYWLRGFTSCHATLAHQFQVALESYALPTFMTTGVTHLVPKATRITNPSDYRPITCLSTTYKTLMSVLKVKLNTHIINNHVMSPSQNGCREGSRGTKELLIIDAVIGQLVKRRRRNFSAAWIDYKKAFDSVPHSWLLRVLELYKVDDVLRRFLSVCMGQWSTMLCLSGRIISEASDRILIKRGIFQGDCLSPLWFCLALNPLSTLLEKAGIGFQFQRGGHCVSHLLYMDDLKLLAPNSLRLEELLQITRDFSESINMELGVDKCAKLHVERGKVVQTDYTNYNDVDIRTLTESETYRYLGIAQNIGVMGADVKQAVTEKFFERLTTILKSYLSGANKIRAYNSWVMPVLTYTFGLLKWTQTELDALDRKVRTTMTIHRMHHPRSSVMRLYIQRKRGGRGLLNAKTIHNREICNLRSFFCSMTESPIHTEVIKWDNRLTPLSLADEQWNAPPVLTAHDRESVWKTKELHGRFFKALHEQHIDERTSVHWLRFGDLYGETEGFICAIQDQVIKTNNHRKYILKDGTIDLCRLCHHPGETLRHITSGCSMLANTEYLHRHNQAAKILHQELALKYGLIERRLPYYQYAPESVLENDRALLYWDRNIITDRTIAANKPDIVLRDRAQSKVFLVDVSIPFDENLVKAEADKQTKYLDLAYEVTEMWRVTSTEIVPIIISVNGLIPVNLDKHLRRLGLRGRPTMANLQRAILLDNARIVRRFLSVEH

SEQ ID NO: 14244 - protein, 845 aa, Bembecia ichneumoniformis
MLPSYLESSTGLSDTDSILFGAAMAVCRIVGVKVRLPGRATHCNEVPAWQRRIESRIRETRVLIGKLTSFRSGNIRPRVMRFVREAFSGERVNLSHPDVHRKLTERIDDLKQKIAAWGKRIRRYSERVKRYRQNRLFMSDQKKFYKSLGRPDDRVTGPGPNQAETIAFWRNLWSELVTHEEGSWMGTVEEACATISPMNPITITEDDVVAAVRKAPNWKSPGPDGLHGYWLKGFWRSHTTLAVQFQEALENGALPDFLTTGVTHLTPKDGATANPSKYRPITCLCTLYKILTSILSSKIYRHVADNNILSEAQNGCKGGSRGSKELLLIDTAVCRLVKRNRRNFSAAWIDYKKAFDSVPHTWLLRVLELYKVDSTTRHFLETCMGQWSTMLSLSGKRMTDAADRIRICRGIFQGDCLSPLWFCLALNPLSTILEDSAIGFRFRRGGHQMSHLLYMDDLKLFAPNANRLAELLQITENFSRSIRMEFGLDKCAVIHVERGRIIRSTNVEAGPRQMRSLSGTETYRYLGMSESLGVRETVVKQSVGEEFWERLTKVLRSYLSGANKIRAFNSWVMPVLLYTFGVLRWSQTELDTLDRRVRTTMISHRVRHPKSSVERMYVPRKCGGRGLLSAKTMHNREMCNLRNFFLTDSGGGLRRAIVECDNGLTPLSLSDQQWREPLVLSPSAREAVWKEKELHGRFYKALHEPHVDRKASVHWLRFGDLFGETEGFVCAIQDQVVKTRNYRRYIIKDGTEDICRACRHPGETLRHVTSGCSALANTEYLHRHNQAARILHQELALKYGFLEQRIPYYRYSPEPVLENRRAKLYSEEVPVESTGTGPSSRTGLF

SEQ ID NO: 14245 - protein, 1279 aa, Parnassius apollo
MMDKIGKRIGPLPGGRRGASGAGAGRGSMRAASRARGAARSPNSPPHPSSPPDGLMSAGSSRTRQAASAAGGVRRMRWTRDMNANAMRAYYRAKGEETAGIAYRARMHCFFAELEPSIPVTEQNLADRVRYIMRSKIFDDAELERLRREAIPSSNELATAGDEAPQATDQLPRVEAAMDLPVVGDSDDDEMVSHELEQMRSILEEAILETRSMPLENRPRLPRIPLSKRNRAVVRALNPMLVTYLEASRDLCETDSVLFGAAVAACRIIGAKLPMAGRATKQSSAIPAWRKRIEDRIAKARALIGRLISFRSGNNRPRVVRTVRMAFAGTNISLSQPDITQKLTERIDDLKQKIAAWGKRIRRFTERSRRFNQNRLFQSDQKRLYKSLERPEVCGAGPGPDQANTVAFWRGLWSEPVNHSEGPWTEVVASQCASITPMDPVIITPDDVAEAVRRAPNWKSPGLDGLHHYWLKGFMVCHAVLARQFQEALNQKSLPSLFTTGITHLVPKDQVTTDPSKYRPITCLPTIYKTLTSILSARITRHLELNQVMSRAQNGCRGGGRGTKEPLLIDAVIGKVVKRNRRNFSAAWIDYRKAFDSVPHTWLKRVLELYKIDCTVRDFLELCMGQWSTILCHLGERMMAAENHIRIRRGIFQGDCLSPIWFCLSLNPLSTLLEGSGRGFQLRKGGTKVTHLFYMDDLKLFASSRSHLVELLKITCEFSSSIGMELGTDKCAVLHVERGRVANSEGIDLSMPVNLRTLSEAETYRYLGMSQNIGIDEAGVKQSVCDVFYARLTKVLNSLLSGVNKTHAYNGWVMPVLMYTFGILRWTQTELNALDRKVRTTMTSHRMHHPRSSVMRLYLPRKHGGRGFLSALTMHNREVCSLRHYFLARSDDPFYNDVISSDKGLTPLSLANEQWQDPAVLSISDRETVWKEKELHGRYYRVLHEPFVDTVASLNWLRFGDLFGETEGFVCAIQDQVIKTNNYRRYILKDGTVDVCRACRHPGESLRHVISGCSALSNSEYLHRHNLVARILHQALALKYGLVDRKLPYYKYLPEAVLENDRARLYWDRAIITDRTILANKPDIVLMDRAQSRIFLVDITIPYDENLVKAETDKQTKYLDLAHEVTDMWGGLPTEIIPVVVSANGLIPVSLSGHLRRLGLRDGPLRAQMQKAVVLDTARIVRRFLSLSPLTLGRLVSPAEGFHLVGSLFICVFFCIYFILLIFMYIYLFILIYNYIFIETNQMRKLYRYPKNNNNNAQKWTRQALLGPGNHHRQVYSCE

SEQ ID NO: 14246 - protein, 1116 aa, Parnassius apollo
MRWTINMNSNALRAYFRAKGGEIGGFAYRARMHRLFTELEPSITVTEQNLADRVRYILRSNIFDGAELERLRREAVPSSNENATTEGAVPQVAEQPAHVDAAENTSVVADSNDEGTFTQELEIEQMRSTLEEAIMETRSTPLENRPRLPRIALSKRNRAVVRALNPMLVTYLEASRDLCETDSILFGAALAVCRIIGAKLSTAGRTTGQSSAIPAWRTRIEERIAKTRALIGRLICFRSGNTRPRIVRTVRMAFAGTNVSLSQPDIMQKLTERIDDLKQRIAAWGKRIRRYTERSTRFNQNRLFQSDQKRLYKSLERPMVSGTGPVPNQADTVAFWRSLWSEPVNHNEGPWTEVVASQCAGITPMDPVTITPDDVAEAVRRAPNWKSPGLDGLHHYWLKGFVVCHTVLARQFQEVLNQKSLPSLFTTGITHLVPKGQSTTDPSKYRPITCLPTIYKTLTSILSARITRHLDSNQVMSRAQNGCRGGGRGTKEPLLIDAVIGKVVKRNRRNFSAAWIDYRKAFDSVPHTWLKRVLELYKIDCTVRDFLEQCMGQWSTILCHLGERMMAAENHIRIRRGIFQGDCLSPKWFCLSLNPLSTLLEGSGRGFQLRKGGTKVTHLFYMDDLKLFASSRSHLMELLNITCEFSNSIGMELGTDKCAVLHVERGRVANSEGIDLSMPVNLRTLSEAETYRYLGMSQNIGIDEAGMKQSVCDVFYARLTKVLNSLLSGVNKTQAYNGWVMPVLMYTFGILRWTQTELNALDRKVRTTMTSHRMHHPRSSVMRLYLPRKHGGRGFLSALTMHNREVCSLRNYFLARSDDPFYKDVISCDKGLTPLSLANEQWQDPAVQTISDRETVWKEKELHGRFYKSLHGPFVDTVTSLHWLRFGDLFGETEGFVCAIQDQVIKTNNYRRYILKDGTVDICRACRHPGESLRHVISGCSALSNSEYLHRHNLVARILHQELALKYGFVDRKLPYYKYLPEAVLENDRARLYWDRAIITDRTILANKPDIVLMDRAQSRIFLVDITIPCDENLVKAETDKQTKYLDLAHEVTDMWGGLPTEIIPVVVSANGLIPVSLSGHLRRLGLRGGPLQAQMQKAVLLDTARIVRRFLSLSP

SEQ ID NO: 14247 - protein, 865 aa, Parnassius apollo
MAFAGTNVSLSQPDIMQKLTERIDDLKQRIAAWGKRIRRYTERSTRFNQNRLFQSDQKRLYKSLERPMVSGTGPVPNQADTVAFWRSLWSEPVNHNEGPWTEVVASQCAGITPMDPVTITPDDVAEAVRRAPNWKSPGLDGLHHYWLKGFVVCHTVLARQFQEVLNQKSLPSLFTTGITHLVPKGQSTTDPSKYRPITCLPTIYKTLTSILSARITRHLDSNQVMSRAQNGCRGGGRGTKEPLLIDAVIGKVVKRNRRNFSAAWIDYRKAFDSAPHTWLKRVLELYKIDCTVRDFLEQCMGQWGTILCHLGERMMAAENHIRIRRGIFQGDCLSPIWFCLSLNPLSTLLEGSGRGFQLRRGGTKVTHLFYMDDLKLFASSRSHLMELLNITCEFSNSIGMELGTDKCAVLHVERGRVANSEGIDLSMPVNLRTLSEAETYRYLSMSQNIGIDEAGMKQSVCDVFYARLTKVLNSLLSGVNKTQAYNGWVIPVLMYTFGILRWTQTELNALDRKVRTTMTSHRMHHPRSSVMRLYLPRKHGGRGFLSALTMHNREVCSLRNYFLARSDDPFYKDVISCDKGLTPLSLANEQWQDPAVQTISDRETVWKEKELHGRFYKSLHGPFVDTVTSLHWLRFGDLFGETEGFVCAIQDQVIKTNNYRRYILKDGTIDICRACRHPGESLRHVISGCSALSNSEYLHRHNLVARILHQELALKYGFVDRKLPYYKYLPEAVLENDRARLYWDRAIITDRTILANKPDIVLMDRAQSRIFLVDITIPCDENLVKAETDKQTKYLDLAHEVTDMWGGLPTEIIPVVVSANGLIPVSLSGHLRRLGLRGGPLQAQMQKAVLLDTARIVRRFLSLSP

SEQ ID NO: 14248 - protein, 1068 aa, Parnassius apollo
MVEQPANVDAAVNTPVVVDSNDDGTVAQELELEHMRSTLEEAIVETRSTPLENRPRLPRIALSKRNRAVVRALNPMLVTYLEASRDLCETHSILFGAALAVCRIIGAKVSTAGRATGHSSAIPAWRRRIEERIAKARALIGRLICFRSGNNRPRIVRTVRMAFAGTNVSFSQPDITQKLTERIDDLKQRIAAWGKRIRRYTERSTRFNQNRLFQSDQKRLYESLERPMVSGTGPAPNQADTVAFWRGLWSEPVNHSEGPWTEVVASQCAGITPMDPVIITPDDVAEAVRKAPNWKSPGLDGLHHYWLKGFMVCHSVLARQFQEALNQKSLPSLFTTGITHLVPKDQGTTDPSKYRPITCLPTIYKTLTSILSARITCHLDSNQVMSRAQNGCRGGGRGTKEPLLIDAVIGKVVKRNRRNFSAAWIDYRKAFDSVPHTWLKRVLELYKIDCTVRDFLEQCMEQWSTILCHLGERMMAAENHIRIRRGIFQGDCLSPIWFCLSLNPLSTLLEGSGRGFQLRRGGTKVTHLFYMDDLKLFASSRSHLMELLNITCEFSNSIGMELGTDKCAVLHVERGRVANSEGVDLSMPVNLRALSEAETYRYLGMSQNIGIDEAGMKQSVCDVFYARLTKVLNSLLSGVNKAHAYNGWVMPVLMYTFGILRWTQTELNALDRKVRTTMTSHRMHHPRSSVMRLYLSRKHGGRGFLSALTMHNREVCSLRDYFLARSDDPFYMDVISCDKGLTPLSLANEQWQDPAVQSISDRETVWKEKELHGRFYKALHEPFVDTVASLHWLRFGDLFGETEGFVCAIHDQVIKTNNYRRYILKDGTVDICRACRHPGESLRHVISGCSALSNSEYLHRHNLVARILHQELALKYGLVDRKLPYYKYLPEAVLENDRARLYWDRAIITDRTILANKPDIVLMDRAQSRIFLVDITIPYDENLVKAETDKQTKYLDLAHEVTDMWGGLPTEIIPVVVSANGLIPVSLSGHLRRLGLRGGPLQVQMQKAVLLDTARIVRRFLSLSPLTLGRLVSPAEGLHLVGLLFIYVLLYLFYVIDIYVYLFFHFHL

SEQ ID NO: 14249 - protein, 1234 aa, Parnassius apollo
MMEHRRLRKGPLPGGRQGASGAGAGRDSMRTASRARGAARPPSSPSHPSSPPACLVSAGSSQAQQSAPATGGVRRMRWTINMNSNALRAYFRAKGGEIGGFAYRARMHRLFTELEPSITVTEQNLADRVRYILRSNIFDGAELERLRREAVPSSNENATTEGAVPQVAEQPAHVDAAENTPVVADSNEDGTFTQELEIEQMRSTLEEAIMETRSTPLENRPRLPRIALSKRNRAVVRALNPMLVTYLEASRDLCETDSILFGAALAVCRIIGAKLSTAGRTTGQSSAIPAWRTRIEERIAKARALIGRLICFRSGNTRPRIVRTVRMAFAGTNVSLSQPDIMQKLTEHIDDLKQRIAAWGKRIRRYTERSTRFNQNRLFQSDQKRLYKSLERPMVSGTGPVPNQADTVAFWRSLWSEPVNHNEGPWTEVVASQCAGITPMDPVTITPDDVAEAVRRAPNWKSPGLDGLHHYWLKGFVVCHTVLARQFQEVLNQKSLPSLFTTGITHLVPKGQSTTDPSKYRPITCLPTIYKTLTSILSARITRHLDSNQVMSRAQNGCRGGGRGTKEPLLIDAVIGKVVKRNRRNFSAAWIDYRKAFDSVPHTWLKRVLELYKIDCTVRDFLEQCMGQWSTILCHLGERMMAAENHIRIRRGIFQGDCLSPKWFCLSLNPLSTLLEGSGRGFQLRKGGTKVTHLFYMDDLKLFASSRSHLMELLNITCEFSSSIGMELGTDKCAVLHVERGRVANSEGIDLSMPVNLRTLSEAETYRYLGMSQNIGIDEAGMKQSVCDVFYARLTKVLNSLLSGVNKTQAYNGWVMPVLMYTFGILRWTQTELNALDRKVRTTMTSHRMHHPRSSVMRLYLPRKHGGRGFLSALTMHNREVCSLRNYFLARSDDPFYKDVISCDKGLTPLSLANEQWQDPAVQTISDRETVWKEKELHGRFYKSLHGPFVDTVTSLHWLRFGDLFGETEGFVCAIQDQVIKTNNYRRYILKDGTIDICRACRHPGESLRHVISGCSALSNSEYLHRHNLVARILHQELALKYGFVDRKLPYYKYLPEAVLENDRARLYWDRAIITDRTILANKPDIVLMDRAQSRIFLVDITIPCDENLVKAETDKQTKYLDLAHEVTDMWGGLPTEIIPVVVSTNGLIPVSLLGSSEVAGTTWRTAPGSNAEGGAPRYRPHRPPVSFPFHLTLGRLVSPAEGFHLVGLLFIYVFSYLFYFIDIFVYLSFHFRL

SEQ ID NO: 14250 - protein, 908 aa, Parnassius apollo
MAFAGTNVSLSQPDITQKLTERIDDLKQRIAAWGKRIRRYTERSTRFNQNRLFQSDQKRLYESLERPMVSGTGPAPDQADTVAFWRGLWSEPVNHSEGPWTEVVASQCAGITPMDPVIITPDDVAEAVRRAPNWKSPGLDGLHHYWLKGFMVCHSVLARQFQEALNQKSLPSLFTTGITHLVPKDQGTTDPSKYHPITCLPTIYKTLTSILSARITCHLDSNQVMSRAQNGCRGGGRGTKEPLLIDAVIGKVVKRNRRNFSAAWIDYRKAFDSVPHTWLKRVLELYKIDCTVRDFLEQCMGQWSTILCHLGERMMAAENHIRIRRGIFQGDCLSPIWFCLSLNPLSTLLEGSGRGFQLRKGGTKVTHLFYMDDLKLFASSRSHLMELLNITCEFSNSIGMELGTDKCAVLHVERGQVANSEGVDLSMPVNLRTLSEAETYRYLGMSQNIGIDETGMKQSVCDVFYARLTKVLNSLLSGVNKAHAYNGWVMPVLMYTFGILRWTQTELNALDRKVRTTMTSHRMHHPRSSVMRLYLPRKHGGRGFLSALTMHNREVCSLRDYFLARSDDPFYKDVISCDKGLTPLSLANEQWQDPAVQSISDRETVWKEKELHGRFYKALHEPFVDTVASLHWLRFGDLFGETEGFVCAIQDQVIKTNNYRRYILKDGTVDICRACRHPGESLRHVISGCSALSNSEYLHRHNLVARILHQELALKYGLVDRKLPYYKYLPEAVLENDRARLYWDRAIITDRTILANKPDIVLMDRAQSRIFLVDITIPYDENLVKAETDKQTKYLDLAHEVTDMWGGLPTEIIPVVVSANGLIPVSLSGHLRRLGLRGGPLQVQMQKAVLLDTARIVRRFLSLSPLTLGRLVSPAEGLHLVGLLFIYVLLYLFYVIDIYVYLSFHFHL

SEQ ID NO: 14251 - protein, 917 aa, Parnassius apollo
MHNNNNNNKHSFIIIIIIMHWGTLLLPDLKLIGRLTSFRSGNNRPRIVRTVRMAFSGTNISLFQPDITQKLTERIDDLKQKIAAWGKRIRRFSEGSRRFNQNRLFQSDQKRLYKLLERPKVCGAGQGPDQADIIAFWRGLWSEPVNHSEGPWMEVVASQGASVTLMDPITITPEDVAEAVRRAPNWKSPGLDGLHHYWLKGFVVCHAVLARQFQEALDQKSLPSLFITGITHLVPKDQDTTDPSKYRPITCLPTIYKTLTSILSARITRHLELNQVMSRAQNGCRGGGRGTKEPLLIDAVIGKVVKRNRRNFSAAWIDYRKAFDSVPHTWLKRVLELYKIDCTVRDFLEQCMGQWSTILCHLGERMTAAENHIRIRRGIFQGDCLSPIWFCLSLNPLSTLLEGSGRGFQLRKGGTKVTHLFYMDDLKLFASSHSHLMELLNITCEFSSSIGMELGTDKCAVLHVERGRVANSEGIDLSMPVNLRTLSEAETYRYLGMSQNIGIDEAGMKQSVCDVFYARLTKVLNSLLSGVNKTHAYNGWVMPVLMYTFGILRWTQTELNALDRKVRTTMTSHRMHHPRSSVMRLYLPRKYGGRGFLSALTMHNREVCSLRQYFLARSDDPFYNDVISSDKGLTPLSLANEQWQDPAVLSNSDRETVWKEKELHGRYYKALHEPFVDTVASLNWLRFGDLFGETEGFVCAIQDQVIKTNNYRRYILKDGTVDVCRACRHPGESLRHVISGCSALSNSEYLHRHNLVARILHQELALKYGLVDRKLPYYKYLPEAVLENDRARLYWDRAIITDRTILANKPDIVLMDRAQSRIFLVDITIPYDENLVRAETDKQSKYLDLAHEVTDMWGGLPAEIIPVVVSANGLIPVSLSGHLRRLGLRDGPLRAQMQKAVLLDTARIVRRFLSLSS

SEQ ID NO: 14252 - protein, 1191 aa, Parnassius apollo
MMEYGRTRKGPLPGGRQGASGAGAGRGSMRTASRARGAARPPSSPSHPSSPPAGLVSAGSSRAQQSAPASGGVRRMRWTTQMNSNALRAYFGAKGGETGCLAYRARMHRLFAELEPSLTVTEQNLADRVRYILRSNIFDVAELERLRREAVPSSDKNATAEDAAPQMVEQPANVDAAVNTPVVVDSNDDGTVAQELELEHMRSTLEEAIVETRSTPLENRPRLPRIALSKRNRAVVRALNPMLVTYLEASRDLCETDSILFGAALAVCRIISAKVSTAGRATGHSSAIPAWRRRIEERIAKARALIGRLICFRSGNNRPRIVRTVRMAFAGTNVSLSQPDITQKLTERIDDLKQRIAAWGKRIRRYTERSTRFNQNRLFQSDQKRLYESLERPMVSGTGPAPNQADTVAFWRGLWSEPVNHSEGPWTEVVASQCAGITPMDPVIITPDDVAEAVRRAPNWKSPGLDGLHHYWLKGFMVCHSVLARQFQEALNQKSLPSLFTTGITHLVPKDQGTTDPSKYRPITCLPTIYKTLTSILSARITCHLDSNQVMSRAQNGCRGGGRGTKEPLLIDAVIGKVVKRNRRNFSAAWIDYRKAFDSVPHTWLKRVLELYKIDCTVRDFLEQCMGQWSTILCHLGERMMAAENHIRIRRGIFQGDCLSPIWFCLSLNPLSTLLEGSGRGFQLRRGGTKVTHLFYMDDLKLFASSRSHLMELLNVTCEFSNSIGMELGTDKCAVLHVERGRVANSEGVDLSMPVNLRTLSEAETYRYLGMSQNIGIDETGMKQSVCDVFYARLTKVLNSLLSGVNKAHAYNGWVMPVLMYTFGILRWTQTELNALDRKVRTTMTSHRMHHPRSSVMRLYLSRKHGGRGFLSALTMHNREVCSLRDYFLARSDDPFYMDVISCDKGLTPLSLANEQWQDPAVQSISDRETVWKEKELHGRFYKALHEPFVDTVASLHWLRFGDLFGETEGFVCAIQDQVIKTNNYRRYILKDGTVDICRACRHPGESLRHVISGCSALSNSEYLHRHNLVARILHQEFALKYGLVDRKLPYYKYLPEAVLENDRARLYWDRAIITDRTILANKPDIVLMDRAQSRIFLVDITIPYDENLVKAETDKQTKYLDLAHEVTDMWGGLPTEIIPVVVSANGLIPVSLSGHLRRLGLRGGPLQVQMQKAVLLDTARIVRRFLSLSP

SEQ ID NO: 14253 - protein, 950 aa, Parnassius apollo
MLVTYLEASRDLCETDSILFGAALAVCRIIGAKLSTAGRTTGQSSAIPAWRTRIEERIAKARALIGRLICFRSGNTRPRIVRTVRMAFAGTNVSLSQPDIMQKLTERIDDLKQRIAAWGKRIRRYTERSTRFNQNRLFQSDQKRLYKSLERPMVSGTGPVPNQADMVAFWRGLWSEPVNHNEGPWTEVVASQCAGITPMDPVTITPDDVAEAVRRAPNWKSPGLDGLHHYWLKGFVVCHTVLARQFQEVLNQKSLPSLFTTGITHLVPKGQGTTDPSKYRPITCLPTIYKTLTSILSARITRHLDSNQVMSRAQNGCRGGGRGTKEPLLIDAVIGKVVKRNRRNFSAAWIDYRKAFDSVPHTWLKRVLELYKIDCTVRDFLEQCMGQWSTILCHLGERMMAAENHIRIRRGIFQGDCLSPIWFCLSLNPLSTLLEGSGRGFQLRKGGTKVTHLFYMDDLKLFASSRSHLMELLNITCEFSNSIGMELGTDKCAVLHVERGRVANSEGIDLSMPVNLRTLSEAETYRYLGMSQNIGIDEAGMKQSVCDVFYARLTKVLNSLLSGVNKTHAYNGWVMPVLMYTFGILRWTQTELNALDRKVRTTMTSHRMHHPRSSVMRLYLPRKHGGRGFLSALTMHNREVCSLRNYFLARSDDPFYKDVISCDKGLTPLSLANEQWQDPAVQTISDRETVWKEKELHGRFYKSLHGPFVDTVASLHWLRFGDLFGETEGFVCAIQDQVIKTNNYRRYILKDGTVDICRACRHPGESLRHVISGCSALSNSEYLHRHNLVARILHQELALKYGLVDRKLPYYKYLPEAVLENDRARLYWDRAIITDRTILANKPDIVLMDRAQSRIFLVDITIPCDENLVKAETDKQTKYLDLAHEVTDMWGGLPTEIIPVVVSANGLIPVSLSGHLRRLGLRGGPLQAQMQKAVLLDTARIVRRFLSLSP

SEQ ID NO: 14254 - protein, 1085 aa, Parnassius apollo
MHRLFTELEPSITVTEQNLADRVRYILRSNIFDGAELERLRREAVPSSNENATTEGAVPQVAEQPAHVDAAENTPVVADSNDDGTFTQELEIEQMRSTLEEAIMETRSTPLENRPRLPRIALSKRNRAVVRALNPMLVTYLEASRDLCETDSILFGAALAVCRIIGAKLSTAGRTTGQSSAIPAWRTRIEERIAKARALIGRLICFRSGNTRPRIVRTVRMAFAGTNVSLSQPDIMQKLTERIDDLKQRIAAWGKRIRRYTERSTRFNQNRLFQSDQKRLYKSLERPMVSGTGPVPNQADTVAFWRSLWSEPVNHNEGPWTEVVASQCAGITPMDPVTITPDDVAEAVRRAPNWKSPGLDGLHHYWLKGFVVCHTVLARQFQEVLNQKSLPSLFTTGITHLVPKGQSTTDPSKYRPITCLPTIYKTLTSILSARITRHLDSNQVMSRAQNGCRGGGRGTKEPLLIDAVIGKVVKRNRRNFSAAWIDYRKAFDSVPHTWLKRVLELYKIDCTVRDFLEQCMGQWSTILCHLGERMMAAENHIRIRRGIFQGDCLSPIWFCLSLNPLSTLLEGSGRGFQLRKGGTKVTHLFYMDDLKLFASSRSHLMELLNITCEFSNSIGMELGTDKCAVLHVERGRVANSEGIDLSMPVNLRTLSEAETYRYLGMSQSIGIDEAGMKQSVCDVFYARLTKVLNSLLSGVNKTQAYNGWVIPVLMYTFGILRWTQTELNALDRKVRTTMTSHRMHHPRSSVMRLYLPRKHGGRGFLSALTMHNREVCSLRNYFLARSDDPFYKDVISCDKGLTPLSLANEQWQDPAVQTISDRETVWKEKELHGRFYKSLHGPFVDTVTSLHWLRFGDLFGETEGFVCAIQDQVIKTNNYRRYILKDGTIDICRACRHPGESLRHVISGCSALSNSEYLHRHNLVARILHQELALKYGFVDRKSPYYKYLPEAVLENDRARLYWDRAIITDRTILANKPDIVLMDRAQSRIFLVDITIPCDENLVKAETDKQTKYLDLAHEVTDMWGGLPTEIIPVVVSANGLIPVSLSGHLRRLGLRGGPLQAQMQKAVLLDTARIVRRFLSLSP

SEQ ID NO: 14255 - protein, 865 aa, Parnassius apollo
MPGAGTNVSLSQPDITQKLTERIDDLKQRIAAWGKRIRRYTERSTRFNQNRLFQSDQKRLYESLERPMVSGTGPAPNQADTVAFWRGLWSEPVNHSEGPWTEVVASQCAGITPMDPVIITPDDVAEAVRRAPNWKSPGLDGLHHYWLKGFMVCHSVLARQFQEALNQKSLPSLFTTGITHLVPKDQGTTDPSKYRPITCLPTIYKTLTSILSARITCHLDSNQVMSRPQNGCRGGGRGTKEPLLIDAVIGKVVKRNRRNFSAAWVDYRKAFDSVPHTWLKRVLELYKIDCAVRDFLEQCMGQWSTILCHLGERMMAAENHISIRRGIFQGDCLSPIWFCLSLNPLSTLLEGSGRGFQLRKGGTKVTHLFYMDDLKLFASSRSHLMELLNITCEFSNSMGMELGTDKCAVLHVERGRVANSEGVDLSMPVNLRNLSEAETCRYLGMSQNIGIDETGMKQSVCDVFYARLTKVLNSLLSGVNKAHAYNGWVMPVLMYTFGILRWTQTELNALDRKVRTTMTSHKMHHTRSSVMRLYLSRKHGGCGFLSALTMHNREVCSLRDYFLARSDDPFYKDVISCDKGLTPLSLANEQWQDPAVQSISDRETVWKEKELHGRFYKALHEPFVETVASLHWLRFGDLFGETEGFVCAIQDQVIKTNNYRRYILKDGTVDICRACRHPGESLRHVISGCSVLSNSEYLHRHNLVARILHQELALKYGLVDRKLPYYKYLPEAVLENDRARLYWDRAIITDRTILANKPDIVLMDRAQSRIFLVDITIPHDENLVKAETDKQTKYLDLAHEVTDMWGGLPTEIIPVVVSANGLIPVSLSGHLRRLGLRGGPLQVQMQKAVLLDTARIVRRFLSLSP

SEQ ID NO: 14256 - protein, 1191 aa, Parnassius apollo
MMDKKKLRKGPLPGGRRGASGAGAGRGSMRAASRARGAARSSTSPPHPSSPPEGLVSAGSSRTQQAAPAAGGARRMRWSQEMNANALRAYFRAKGEETGCLAYRARMHRLFAELEPSLIVTEQNLADRVRYILRSNIFDVAELERLRREAVPSSDENATAEDAAPQMVEQPANVDAAVNTPVVVDSNDDGTVAQELELEHMRSILEEAIVETRSTLLENRPRLPRIALSKRNRAVVRALNPMLVTYLEASRDLCETDSILFGAALAVCRIIGAKVSTAGRATGHSSAIPAWRRRIEERIAKARALIGRLICFRSGNNRPRIVRTVRMAFAGTNVSLSQPDITQKLTERIDDLKQRIAAWGKRIRRNTERSTRFNQNRLFQSDQKRLYESLERPMVSGTGPAPNQADTVAFWRGLWSEPVNHSEGPWTEVVASQCAGITPMDPVIITPDDVAEAVRRAPNWKSPGLDGLHHYWLKGFMVCHSVLARQFQEALNQKSLPSLFTTGITHLVPKDQGTTDPSKYRPITCLPTIYKTLTSILSARITCHLDSNQVMSRAQNGCRGGSRGTKEPLLIDAVIGKVVKRNRRNFSAAWIDYRKAFDSVPHTWLKRVLELYKIDCTVRDFLEQCMGQWSTILCHLGERMMAAENHIRIRRGIFQGDCLSPIWFCLSLNPLSTLLEGSGRGFQLRKGGTKVTHLFYMDDLKLFASSRFHLMELLNITCEFSNSIGMELGTDKCAVLHVERGRVANSEGVDLSMPVNLRTLSEAETYRYLGMSQNIGIDETGMKQSVCDVFYARLTKVLNSLLSGVNKAHAYNGWVMPVLMYTFGILRWTQTELNALDRKVRTTMTSHRMHHPRSSVMRLYLPRKHGGRGFLSALTMHNREVCSLRDYFLARSDDPFYKDVISCDKGLTPLSLANEQWQDPAVQSISDRETVWKEKELHGRFYKALHEPFVDTVASLHWLRFGDLFGETEGFVCAIQDQVIKTNNYRRYILKDGTVDICRACRHPGESLRHVISGCSALSNSEYLHRHNLVARILHQELALKYGLVDRKLPYYKYLPEAVLENDRARLYWDRAIITDRTILANKPDIVLMDRAQSRIFLVDITIPYDENLVKAETDKQTKYLDLAHEVTDMWGGLPTEIIPVVVSANGLIPVSLSGHLRRLGLRGGPLQVQMQKAVLLDTARIVRRFLSLSP

SEQ ID NO: 14257 - protein, 991 aa, Parnassius apollo
MRSTLEEAIVETRSTTLENRPRLPRLALSKRNRAVVRALNPMLVTYLEASRDLCDTDSILFGAALAVCRIIGAKLSTAGRANGQSSAIPAWRIRIEERIAKARALIGRLICFRSGNTRPRIVRTVRMAFAGTNVSLSQPDIMQKLTERIDDLKQRIAAWGKRIRRYTERSTRFNQNRLFQSDQKRLYKSVERPIVSGTGPAPNQADMVAFWRSLWSEPVNHNEGPWTEVVASQCASITPMDPVIITPDDVAEAVRRAPNWKSPGLDGLHHYWLKGFMVCHSVLARQFQEALNQKSLPSLFTTGITHLVPKDQGATDPSKYRPITCLPTIYKTLTSILSTRIARHLDLNQVMSRAQNGCRGGGRGTKEPLLIDAVIGKVVKCNRRNFSAAWIDYRKAFDSVPHTWLKRVLELYKIDCTVRDFLEQCMGQWSTILCHLGERMTAAESRIRIRRGIFQGDCLSPIWFCLSLNPLSTLLEGSGRGFQLRKGGTKVTHLFYIDDLKLFASSRSHLMELLNITCEFSNSIRMELGTDKCAVLHVERGRVANSEGIDLSMPVNLRTLSEAETYRYLGMSQNIGIDEAGMKQSVCDVFYARLTKVLNSLLSGVNKAHAYNGWVMPVLMYTFGILRWTQTELNALDRKVRTTMTSHRMHHPRSSVMRLYLPRKHGGRGFLSALTMHNREVCSLRDYFLARSDDPFYKDVISCDKGLTPLSLANEQWQDPAVQSISDRETVWKEKELHGRFYKALHEPFVDTVASLHWLRFGDLFGETEGFVCAIQDQVIKTNNYRRYILKDGTVDICRACRHPGESLRHVISGCSALSNSEYLHRHNLVARILHQELALKYGLVDRKLPYYKYLPEAVLENDRARLYWDRTIITDRTILANKPDIVLMDRAQSRIFLVDITIPYDENLVKAETDKQTKYLDLAHEVTDMWGGLPTEIIPVVVSANGLIPVSLSGHLRRLGLRGGPLQVQMQKAVLLDTARIVRRFLSLSP

SEQ ID NO: 14258 - protein, 915 aa, Parnassius apollo
MAGRATTQSNAIPAWRKRIEDRIAKARALIGRLTSFRSGNNRPRIMRTVRMAFAGTNISLSQPDITQKLTERIDDLKQKIAAWGKWIRRFSEGSRRFNQNRLFQSDQKRLYKLLERPKVCGAGQGPDQADIIAFWRGLWSEPVNHSEGPWMEVVASQGASVTPMDPITITPEDVAEAVRRAPNWKSPGLDGLHHYWLKGFVVCHAALARQFQEALDQKSLPSLFTTGITHLVPKDQDTTDPSKYRPITCLPTIYKTLTSILSARITRHLELNQVMSRAQNGCRGGGRGTKEPLLIDAVIGKVVKRNRRNFSAAWIDYRKAFDSVLHTWLKRVLELYKIDCTVRVFLEQCMGQWSTILCHMGERMTAAENHIRTRRGIFQGDCLSSIWFCLSLNPLSTLLEGSGRGFQLRKGGTKVTHLFYMDDLKLFASSRSHLKELLNITCEFSSSIGMELGTDKCAVLHVERGRVANSEGIDLSMPVNLRTLSKAETYRYLGMSQNIGIDEAGVKQSVCDVFYARLTKVLNSLLSGVNKTHAYNGWVMPVLMYTFGILRWTQTELNALDRKVRTTMTSHRMHHPRSSVMRLYLPRKYGGRGFLSALTMHNREVCSLRQYFLARSDDPFYNDVISSDKGLTPLSLANEQWQDPAVLSNSDRETVWKEKELHGRYYKALHEPFVDTVASLNWLRFGDLFGETEGFVCAIQDQVIKTNNYRRYILKDGTVDVCRACRHPGESLRHVISGCSALSNSEYLHRHNLVARILHQELALKYGLVDRKLPYYKYLPETVLENDRARLYWDRAIITDRTILANKPDIVLMDRAQSRIFLVDITIPYDENLVRAETDKQSKYLDLAHEVTDMWGGLPAEIIPVVVSTNGLIPVSLSGHLRRLGLRDGPLRAQMQKAVLLDTARIVRRFLSLSS

SEQ ID NO: 14259 - protein, 951 aa, Parnassius apollo
MLVTYLEASRDLCETDSILFGAAVAVCRIIGAKLPMAGRATTQSNAIPAWRKRIEDRIAKARALIGRLTSFRSGNNRPRIMRTVGMAFAGTNISLSQPDITQKLTERIDDLKQKIAAWGKRIRRFSEGSRRFNQNRLFQSDQKRLYKLLERPKVCGAGQGPDQADIIAFWRGLWSEPVNHSEGPWMEVVASQGASVTPMDPITITPEDVAEAVRRAPNWKSPGLDGLHHYWLKGFVVCHAVLARQFQEALDQKSLPSLFTTGITHLVPKDQDTTDPSKYRPITCLPTIYKTLTSILSARITRHLERNQVMSRAQNGCRGGGRGTKEPLLIDAVIGKVVKRNRQNFSAAWIDYRKAFDSVPHTWLKRVLFELYKIDCTVRDFLEQCMGQWSTILCHLGERMTAAENHIRIRRGIFQGDCLSPIWFCLSLNPLSTLLEGSGRGFQLRKGGTKVTHLFYMDDLKLFASSRSHLMELLNITCEFSSSIGMELGTDKCAVLHVERGRVANSEGIDLSMPVNLRTLSEAETYRYLGMSQNIGIDEAGMKQSVCDVFYARLTKVLNSLLSGVNKTHAHNGWVMPVLMYTFGILRWTQTELNALDRKVRTTMTSHRMHHPRSSVMRLYLPRKYGGRGFLSALTMHNREVCSLRQYFLARSDDPFYNDVISSDKGLTPLSLANEQWQDPAVLSNSDRETVWKEKELHGRYYKALHEPFVDTVASLNWLRFGDLFGETEGFVCAIQDQVIKTNNYRRYILKDGTVDVCRACRHPGESLRHVISGCSALSNSEYLHRHNLVARILHQELALKYGLVDRKLPYYKYLPEALLENDRARLYWDRAIITDRTILANKPDIVLMDRAQSRIFLVDITIPYDENLVRAETDKQSKYLDLAHEVTDMWGGLPAEIIPVVVSANGLIPVSLSGHLRRLGLRDGPLRAQMQKAVLLDTARIVRRFLSLSS

SEQ ID NO: 14260 - protein, 865 aa, Parnassius apollo
MAFSGTNVSLSQPDITQKLTERIDDLKQRIAAWGKRIRRYTERSTRFNQNRLFQSDQKRLYESLERPMVSGTGPAPNQADTVAFWRGLWSEPVNHSEGPWTEVVASQCAGITPMDPVIITPDDVAEAVRRAPNWKSPGLDGLHHYWLKGFMVCHSVLARQFQEALNQKSLPSLFTTGITHLVPKDQGTTDPSKYRPITCLPTIYKTLTSILSARITCHLDSNQVMSRAQNGCRGGGRGTKEPLLIDAVIGKVVKRNRRNFSAAWIDYRKAFDSVPHTWLKRVLELYKIDCTVRDFLEQCMGQWSTILCHLGERMMAAENHIRIRRGIFQGDCLSPIWFCLSLNPLSTLLEGSGRGFQLRRGGTKVTHLFYMDDLKLFASSRSHLMELLNITCEFSNSIGMELGTDKCAVLHVERGRVANSEGVDLSMPVNLRTLSEAETYRYLGMSQNIGIDETGMKQSVCDVFYARLTKVLNSLLSGVNKAHAYNGWVMPVLMYTFGILRWTQTELNALDRKVRTTMTSHRMHHPRSSVMRLYLSRKHGGRGFLSALTMHNREVCSLRDYFLARSDDPFYMDVISCDKGLTPLSLANEQWQDPAVQSISDRETVWKEKELHGRFYKALHEPFVDTVASLHWLRFGDLFGETGGFVCVIQDQVIKTNNYRRYILKDGTVDICRACRHPGESLRHVISGCSALSNSEYLHRHNLVARILHQELALKYGLVDRKLPYYKYLPEAVLENDRARLYWDRAIITDRTILANKPDIVLMDRAQSRIFLVDITIPYDENLVKAETDKQTKYLDLAHEVTDMWGGLPTEIIPVVVSANGLIPVSLSGHLRRLGLRGGPLRAQMQKAVLLDTARIVRRFLSLSP

SEQ ID NO: 14261 - protein, 1193 aa, Parnassius apollo
MMESNGTRKGPLPGGRQGASGAGAGRDSMRTASRARGAARPPSSSSHPSSPPAGLVSAGSSRAQQSAPATGGVRRMRWTTQMNSNALRAYFRAKGGETGGFAYRARMHRLFAELEPSVTVTEQNLADRVRYILRSNTFDVTELERLRREAVPSSGENAAAEDAAPQLAEQTANVDAAVNTPVVVDSNDDGTVAQELELEQMRSTLEEAIVETRSTTLENRPRLPRLALSKRNRAVVRALNPMLVTYLEASRDLCDTDSILFGAALAVCRIIGAKLSTAGRATGQSSAIPAWRIRIEERIAKARALIGRLICFRSGNTRPRIVRTVRMAFAGTNVSLSQPDIMQKLTERIDDLKQRIAAWGKRIRRYTERSTRFNQNRLFQSDQKRLYKSLERPIVSGTGPAPNQADMVAFWRSLWSEPVNHNEGPWTEVVASQCASITPMDPVIITPDDVAEAVRRAPNWKSPGLDGLHHYWLKGFMVCHSVLARQFQEALNQKSLPSLFTTGITHLVPKDQGATDPSKYRPITCLPTIYKTLTSILSARIARHLDLNQVMSRAQNGCRGGGRGTKEPLLIDAVIGKVVKRNRRNFSAAWIDYRKAFDSVPHTWLKRVLELYKIDCTVRDFLEQCMGQWSTILCHLGERMTAAESRIRIRRGIFQGDCLSPIWFCLSLNPLSTLLEGSGRGFQLRKGGTKVTHLFYMDDLKLFASSRSHLMELLNITCEFSNSIRMELGTDKCAVLHVERGRVANSEGIDLSMPVNLRTLSEAETYRYLGMSQNIGIDEAGMKQSVCDVFYARLTKVLNSLLSGVNKAHAYNGWVMPVLMYTFGILRWTQTELNALDRKVRTTMTSHRMHHPRSSVMRLYLPRKHGGRGFLSALTMHNREVCSLRDYFLSRSDDPFYKDVISCDKGLTPLSLANEQWQDPAVQSISDRETVWKEKELHGRFYKALHEPFVDTVASLHWLRFGDLFGETEGFVCAIQDQVIKTNNYRRYILKDGTVDICRACRHPGESLRHVISGCSALSNSEYLHRHNLVARILHQELARGVEYGLVDRKLPYYKYLPEAVLENDRARLYWDRAIITDRTILANKPDIVLMDRAQSRIFLVDITIPYDENLVKAETDKQTKYLDLAHEVTDMWGGLPTEIIPVVVSANGLIPVSLSGHLRRLGLRGGPLQVQMQKAVLLDTARIVRRFLSLSP

SEQ ID NO: 14262 - protein, 1234 aa, Parnassius apollo
MMDKKIVRKGPLPGGRRGASGAGAGRGSMRAASRARGAARSSTSPPHPSSPPEGLVSAGSSRTQQAAPAAGGARRMRWSQEMNANALRAYFRAKGEETGCLAYRARMHRLFAELEPSLIVTEQNLADRVRYILRSNIFDVAELERLRREAVPSSDENATAEDTAPQMVEQPANVDAAVNTPVVVDSNDDGTVAQELELEHMRSILEEAIVETRSTPLENRPRLPRIALSKRNRAVVRALNPMLVTYLEASRDLCETDSILFGAALAVCRIIGAKVSTAGRATGHSSAIPAWRRRIEERIAKARALIGRLICFRSGNNRPRIVRTVRMAFTGTNVSLSQSDITQKLTERIDDLKQRIAAWGKRIRRYTERSTRFNQNRLFQSDQKRLYESLERPMVSGTGPAPNQADTVAFWRGLWSEPVNHSEGPWTEVVASQCAGITPMDPVIITPDDVAEAVRRAPNWKSPGLDGLHHYWLKGFMVCHSVLARQFQEALNQKSLPSLFTTGITHLVPKDQGTTDPSKYRPITCLPTIYKTLTSILSARITCHLDSNQVMSRAQNGCRGGGRGTKEPLLIDAVIGKVVKRNRRNFSAAWIDYRKAFDSVPHTWLKRVLELYKIDCTVRDFLEQCMGQWSTILCHLGERMMAAENHIRIRRGIFQGDCLSPIWFCLSLNPLSTLLEGSGRGFQLRKGGTKVTHLFYMDDLKLFASSRSHLMELLNITCEFSNSIGMELGTDKCAVLHVERGRVANSEGVDLSMPVNLRTLSEAETYRYLGMSQNIGIDETGMKQSVCDVFYARLTKVLNSLLSGVNKAHAYNGWVMPVLMYTFGILRWTQTELNALDRKVRTTMTSHRMHHPRSSVMRLYLPRKHGGRGFLSALTMHNREVCSLRDYFLARSDDPFYKDVISCDKGLTPLSLANEQWQDPAVQSISDRETVWKEKELHGRFYKALHEPFVDTVASLHWLRFGDLFGETEGFVCAIQDQVIKTNNYRRYILKDGTVDICRACRHPGESLRHVISGCSALSNSEYLHRHNLVARILHQELALKYGLVDRKLPYYKYLPEAVLENDRARLYWDRAIITDRTILANKPDIVLMDRAQSRIFLVDITIPYDENLVKAETDKQTKYLDLAHEVTDMWGGLPTEIIPVVVSANGLIPVSLSGHLRRLGLRGGPLQVQMQKAVLLDTARIVRRFLSLSPLTLGRLVSPAEGLHLVGLLFIYVLLYLFYVIDIYVYLSFHFHL

SEQ ID NO: 14263 - protein, 1191 aa, Parnassius apollo
MMESNETRKGPLPGGRQGASGAGAGRDSMRTASRARGAARPPSSSSHPSSPPAGLVSAGSSRAQQSAPATGGVRRMRWTTQMNSNALRAYFRAKGGETGGFAYRARMHRLFAELEPSVTVTEQNLADRVRYILRSNTFDVTELERLRREAVPSSGENAAAEDAAPQLAEQTANVDAAVNTPVVVDSNDDGTVAQELELEQMRSTLEEAIVETRSTTLENRPRLPRLALSKRNRAVVRALNPMLVTYLEASRDLCDTDSILFGAALAVCRIIGAKLSTAGRATGQSSAIPAWRIRIEERIAKARALIGRLICFRSGNTRPRIVRTVRMAFAGINVSLSQPDIMQKLTERIDDLKQRIAAWGKRIRRYTERSTRFNQNRLFQSDQKRLYKSLERPIVSGTGPAPNQADMVAFWRSLWSEPVNHSEGPWTEVVASQCASITPMDPVIITPDDVAEAVRRAPNWKSPGLDGLHHYWLKGFMVCHSVLARQFQEALNQKSLPSLFTTGITHLVPKDQGATDPSKYRPITCLPTIYKTLTSILSARIARHLDLNQVMSRAQNGCRGGGRGTKEPLLIDAVIGKVVKRNRRNFSAAWIDYRKAFDSVPHTWLKRVLELYKIDCTVRDFLEQCMGQWSTILCHLGERMTAAESRIRIRRGIFQGDCLSPIWFCLSLNPLSTLLEGSGRGFQLRKGGTKVTHLFYMDDLKLFASSRSHLMELLNITCEFSNSIRMELGTDKCAVLHVERGRVANSEGIDLSMPVNLRTLSEAETYRYLGMSQNIGIDEAGMKQSVCDVFYARLTKVLNSLLSGVNKAHAYNGWVMPVLMYTFGILRWTQTELNALDRKVRTTMTSHRMHHPRSSVMRLYLPRKHGGRGFLSALTMHNREVCSLRDYFLSRSDDPFYKDVISCDKGLTPLSLANEQWQDPAVQSISDRETVWKEKELHGRFYKALHEPFVDTVASLHWLRFGDLFGETEGFVCAIQDQVIKTNNYRRYILKDGTVDICRACRHPGESLRHVISGCSALSNSEYLHRHNLVARILHQELALKYGLVDRKLPYYKYLPEAVLENDRARLYWDRAIITDRTILANKPDIVLMDRAQSRIFLVDITIPYDENLVKAETDKQTKYLDLAHEVTDMWGGLPTEIIPVVVSANGLIPVSLSGHLRRLGLRGGPLQVQMQKAVLLDTARIVRRFLSLSP

SEQ ID NO: 14264 - protein, 1190 aa, Parnassius apollo
MDDGTKRNAHRAAAWGRRGASGAGAGRGSMRAASRARGAVRSPSSPPHPSSPPEGLVSAGSSRTQQAAPAAGGARRMRWSQTMNANALRAYFRAKGEETGCLAYRARMHRFFAELEPSLSVTEQNLADRVRYILRSNIFGDAELERLRREAVPSSDGNATAGNAAPLIAQQTANVDAAVNIPFVVDSDDDGIVPHELEKMRSILEESMLETRSMPLENRPRLPRIPLSKRNRAVVRALNPMLVTYLEASRDLCETDSILFGAALAVCRIIGAKLPMAGRATQQGSAIPAWRKRIEDRIAKARALIGRLTSFRSGNIRPRVVRTVRMAFAGTNISLSQPDITQKLTERIDDLKQKIAAWGKRIRRFSERLRRFNQNRLFQSDQKRLYKSLERPEVCGAGPGPDQADTVAFWRGLWSEPVNHSEGPWMEVVASQSASVTPMDPVTITPEDVAEAVRRAPNWKSPGLDGLHHYWLKGFVVCHAVLARQYQEALDQKSLPSLFTTGITHLVPKDQDTTDPSKYRPITCLPTIYKTLTSILSARITRHLELNKVMSRAQNGSRGGGRGTKEPLLIDAVIGKVVKRNRRNFSAAWIDYRKAFDSVPHAWLKRVLELYKIDCTVRDFLEQCMGQWSTILCYQGERMMAAENHIRIRRGIFQGDCLSPIWFCLSLNPLSTLLEGSGRGFQLRKGGTKVTHLFYMDDLKLFASSRSHLMELLNITCEFSNSIGMELGTDKCAVLHVERGRVANSEGIDLSMPVNLKTLSEAETYRYLGMSQNIGIDEAGVKQSVCDVFYARLAKVLNSLLSGVNKTHAYNGWVMPVLIYTFGILRWTQTELNALDRKVRTTMTSHRMHHPRSSVMRLYLPRKHGGRGFMSALTMHNREVCSLRDYFLARSDDPFYNDVISSDKGLTPLSLAHEQWQDPAVLSISDRETVWKEKELHGRYYRALHEPFVDTVASLNWLRFGDLFGETEGFVCAIQDQVIKTNNYRRYILKDGTVDVCRACRHPGESLRHVISGCSALSNSEYLHRHNLVARILHQELALKYGLVDRKLPYYKYLPEAVLENDRARLYWDRAIITDRTILANKPDIVLMDRAQSRIFLVDITIPYDENLVKAETDKQTKYLDLAHEVTDMWGGLPTEIIPVVVSANGLIPVSLSGHLRRLGLRGGPLRAQIQKAVLLDTARIVRRFLSLSP

SEQ ID NO: 14265 - protein, 950 aa, Parnassius apollo
MLVTYLEASRDLCETDSILFGAALAVCRIIGAKLSTAGRTTGQSSAIPAWRTRIEERIAKARALIGRLICFRSGNTRPRIVRTVRMAFSGTNVSLSQPDIMQKLTERIDDLKQRIAAWGKRIRRYTERSTRFNQNRLFQSDQKRLYKSLERPMVSGTGPVPNQADTVAFWRSLWSEPVNHNEGPWTEVVASQCAGITPMDPVTITPDDVAEAVRRAPNWKSPGLDGLHHYWLKGFVVCHTVLARQFQEVLNQKSLPSLFTTGITHLVPKGQSTTDPSKYRPITCLPTIYKTLTSILSARITRHLDSNQVMSRAQNGCRGGGRGTKEPRLIDAVIGKVVKRNRRNFSAAWIDYRKAFDSVPHTWLKRVLELYKIDCTVRDFLEQCMGQWSTILCHLGERMMAAENHIRIRRGIFQGDCLSPIWFCLSLNPLSTLLEGSGRGFQLRKGGTKVTHLFYMDDLKLFASSRSHLMELLNITCEFSNSIGMELGTDKCAVLHVERGRVANSEGIDLSMPVNLRTLSEAETYRYLGMSQNIGIDEAGMKQSVCDVFYARLTKVLNSLLSGVNKTQAYNGWVIPVLMYTFGILRWTQTELNALDRKVRTTMTSHRMHHPRSSVMRLYLPRKHGGRGFLSALTMHNREVCSLRNYFLARSDDPFYKDVISCDKGLTPLSLANEQWQDPAVQTISDRETVWKEKELHGRFYKSLHGPFVDTVTSLHWLRFGDLFGETEGFVCAIQDQVIKTNNYRRYILKDGTVDICRACRHPGESLRHVISGCSALSNSEYLHRHNLVARILHQELALKYGFVDRKLPYYKYLPEAVLENDRARLYWDRAIITDRTILANKPDIVLMDRAQSRIFLVDITIPCDENLVKAETDKQTKYLDLAHEVTDMWGGLPTEIIPVVVSANGLIPVSLSGHLRRLGLRGGPLQAQMQKAVLLDTARIVRRFLSLSP

SEQ ID NO: 14266 - protein, 950 aa, Parnassius apollo
MLVTYLEASRDLCETDSVLFGAAVAACRIIGAKLPMAGRATKQSSAIPAWRKRIEDRIAKARAILGRLISFRSGNNRPRVVRTVRMAFAGTNISLSQPDITQKLTERIDDLKQKIAAWGKRIRRFTGRSRRFNQNRLFQSDQKRLYKSLERPEVCGAGPGPDQANTVAFWRGLWSEPVNHSEGPWTEVVASQCASITPMDPVIITPDDVAEAVRRAPNWKSPGLDGLHHYWLKGFMVCHAVLARQFQEALNQKSLPSLFTTGITHLVPKDQVTTDPSKYRPITCLPTIYKTLTSILSARITRHLELNQVMSRAQNGCRGSGRGTKEPLLIDAVIGKVVKRNRRNFSAAWIDYRKAFDSVPHTWLKRVLELYKIDCTVKDFLEQCMGQWSTILCHLGERMMAAENHIRIRRGIFQGDCLSPIWFCLSLNPLSTLLEGSGRGFQLRKGGTKVTHLFYMDDLKLFASSRSHLVELLKITCEFSSSIGMELGTDKCAVLHVERGRVANSEGIDLSMPVNLRTLSEAETYRYLGMSQNIGIDEAGVKQSVCDVFYARLTKVLNSLLSGVNKTHAYNGWVMPVLMYTFGILRWTQTELNALDRKVRTTMTSHRMHHPRSSVMRLYLPRKHGGRGFLSALTMHNREVCSLRHYFLARSDDPFYNDVISSDKGLTPQSLANEQWQDPAVLSISDRETVWKEKELHGRYYRVLHEPFVDTVASLNWLRFGDLFGETEGFVCAIQDQVIKTNNYRRYILKDGTVDVCRACRHPGESLRHVISGCSALSNSEYLHRHNLVARILHQALALKYGLVDRKLPYYKYLPEAVLENDRARLYWDRAIITDRTILANKPDIVLMDRAQSRIFLVDITIPYDENLVKAETDKQTKYLDLAHEVTDMWGGLPTEIIPVVVSANGLIPVSLSGHLRRLGLRDGPLRAQMQKAVVLDTARIVRRFLSLSP

SEQ ID NO: 14267 - protein, 1025 aa, Parnassius apollo
MVEQPANVDAAVNTPVVVDSNDDGTVAQELELEHMRSTLEEAIVETRSTPLENRPRLPRIAPSKRNRAVVRALNPMLVTYLEASRDLCETDSILFGAALAVCRIIGAKVSTAGRATGHSSAIPAWRRRIEERIAKARALIGRLICFRSGNNRPRIVRTVRMAFAGTNVSLSQPDITQKLTESIDDLKQRIAAWGKRIRRYTERSTRFNQNRLFQSDQKRLYESLERPMVSGTGPAPNQADTVAFWRGLWSEPVNHSEGPWTEVVASQCAGITPMDPVIITPDDVAEAVRRAPNWKSPGLDGLHHYWLKGFMVCYSVLARQFQEALNQKSLPSLFTTGITHLVPKDQGTTDPSKYRPITCLPTIYKTLTSILSARITCHLDSNQVMSRAQNGCRGGGRGTKEPLLIDAVIGKVVKRNRRNFSAAWIDYRKAFDSVSHTWVKRVLELYKIDCTVRDFLEQCMGQWSTILCHLGERMMAAENHIRIRRGIFQGDCLSPIWFRLSLNPLSTLLEGSGRGFQLRRGGTKVTHLFYMDDLKLFASSRSHLMELLNITCEFSNSIGMELGTDKCAVLHVERGRVANSEGVDLSMPVNLRTLSEAETYRYLGMSQNIGIDETGMKQSVCDVFYARLTKVLNSLLSGVNKAHAYNGWVMPVLMYTFGILRWTQTELDALDRKVRTTMTSHRMHHPRSSVMRLYLSRKHGGRGFLSALTMHNREVCSLRDYFLARSDDPFYMDVISCDKGLTPLSLANEQWQDPAVQSISDRETVWKEKELHGRFYKALHEPFVDTVASLHWLRFGDLFGETEGFVCAIQDQVIKTNNYRRYILKDGTVDICRACRHPGESLRHVISGCSALSNSEYLHRHNLVARILHQELALKYGLVDRKLPYYKYLPEAVLENDRARLYWDRAIITDRTILANKPDIVLMDRAQSRIFLVDITIPYDENLVKAETDKQTKYLDLAHEVTDMWGGLPTEIIPVVVSANGLIPVSLSGHLRRLGLRGGPLQVQMQKAVLLDTARIVRRFLSLSP

SEQ ID NO: 14268 - protein, 950 aa, Parnassius apollo
MLVTYLEASRDLCETDSILFGAAVAVCRIIGAKLPMAGRATTQSNAIPAWRKRIEDRIAKTRALIGRLTSFRSGNNRPRIMRTVRMAFAGTNISLSQPDITQKLTERIDDLKQKIAAWGKRIRRFSEGSRRFNQNRLFQSDQKRLYKLLERPKVCGAGQGPDQADIIAFWRGLWSEPVNHSEGPWMEVVASQGASVTPMDPITITPEDVAEAVRRAPNWKSPGLDGLHHYWLKGFVVCHAVLARQFQEALDQKSLPSLFTTGITHLVPKDQDTTDPSKYRPITCLPTIYKTLTSILSARITRHLELNQVMSRAQNGCRGGGRGTKEPLLIDAVIGKVVKRNRRNFSAAWIDYRKAFDSVPHTWLKRVLELYKIDCTVRNFLEQCMGQWSTILCHLGERMTAAENHIRIRRGIFQGDCLSPIWFCLSLNPLSTLLEGSGRGFQLRKGGTKMTHLFYMDDLKLFASSRSHLMELLNITCEFSSSIGMELGTDKCAVLHVERGRVANSEGIDLSMPVNLRTLSEAETYRYLGMSQNIGIDEAGMKQSVCDVFYARLTKVLNSLLSGVNKTHAYNGWVMPVLMYTFGILRWTQTELNALDRKVRTTMTSHRMHHPRSSVMRLYLPRKYGGRGFLSALTMHNREVCSLRQYFLARSDDPFYNDVISSDKGLTPLSLANEQWQDPAVLSNSDRETVWKEKELHGRYYKALHEPFVDTVASLNWLRFGDLFGETEGFVCAIQDQVIKTNNYRRYILKDGTVDVCRACRHPGESLRHVISGCSALSNSEYLHRHNLVARILHQELALKYGLVDRKLPYYKYLPEAVLENDRARLYWDRAIITDRTILANKPDIVLMDRAQSRIFLVDITIPYDENLVRAETDKQSKYLDLAHEVTDMWGGLPAEIIPVVVSANGLIPVSLSGHLRRLGLRDGPLRAQMQKAVLLDTARIVRRFLSLSS

SEQ ID NO: 14269 - protein, 1191 aa, Parnassius apollo
MMDKKIVRKGPLPGGRRGASGAGAGRGSMRVASRARGAARSPSSPPHPSSPPEGLVSAGSSRTQQAAPAAGGARRMRWSQAMNANALRAYFRAKGEETGCLAYRARMHRLFAELEPSLTVTEQNLADRVRYILRSNIFDVAELERLRREAVPSSDENATAEDAAPQMVEQPANVDAAVNTPVVVDSNDDGTVAQELELEHMRSTLEEAIVETRSTPLENRPRLPRIALSKRNRAVVRALNPMLVTYLEASRDLCETDSILFGAALATCRIIGAKVSTAGRATGHSSAIPAWRRRIEERIAKARALIGRLICFRSGNNRPRIVRTVRMAFAGTNVSLSQPDITQKLTERIDDLKQRIAAWGKRIRRYTERSTRFNQNRLFQSDQKRLYESLERPMVSGTGPAPNQADTVAFWRGLWSEPVNHSEGPWTEVVASQCAGITPMDPVIITPDDVAEAVRRAPNWKSPGLDGLHHYWLKGFMVCHSVLARQFQEALNQKSLPSLFTTGITHLVPKDQGTTDPSKYRPITCLPTIYKTLTSILSARITCHLDSNQVMSRAQNGCRGRGRGTKEPLLIDAVIGKVVKRNRRNFSAAWIDYRKAFDSVPHTWLKRVLELYKIDCTVRDFLEQCMGQWSTILCHLGERMMAAENHIRIRRGIFQGDCLSPIWFCLSLNPLSTLLEGSGRGFQLRKGGTKVTHLFYMDDLKLFASSRSHLMELLNITCEFSNSIGMELGTDKCAVLHVERGRVANSEGVDLSMPVNLRTLSEAETYRYLGMSQNIGIDETGMKQSVCDVFYARLTKVLNSLLSGVNKAHAYNGWVMPVLMYTFGILRWTQTELNALDRKVRTTMTSHRMHHPRSSVMRLYLPRKHGGRGFLSALTMHNREVYSLRDYFLARSDDPFYKDVISCDKGLTPLSLANEQWQDPAVQSISDRETVWKEKELHGRFYKALREPFVGTVASLHWLRFGDLFGETEGFVCAIQDQVIKTNNYRRYILKDGTVDICRACRHPGESLRHVISGCSALSNSEYLHRHNLVARILHQELALKYGLVDRKLPYYKYLPEAVLENDRARLYWDRAIITDRTILANKPDIVLMDRAQSRIFLVDITIPYDENLVKAETDKQTKYLDLAHEVTDMWGGLPTEIIPVVVSANGLIPVSLSGHMRRLGLRGGPLQVQMQKAVLLDTARIVRRFLSLSP

SEQ ID NO: 14270 - protein, 1191 aa, Parnassius apollo
MMDKKIVRKGPLPGGRRGASGAGAGRGSMRAASRARGAARSSTSPPHPSSPPEGLVSAGSSRTQQAAPAAGGARRMRWSQEMNANALRAYFRAKGEKTGCLAYRARMHRLFAELEPSLIVTEQNLADRVRYILRSNIFDVAELERLRREAVPSSDENATAEDAAPQMVEQPANVDAAVNTPVVVDSNDDGTVAQELELEHMRSILEEAIVETRSTPLENRPRLPRIALSKRNRAVVRALNPMLVTYLEASRDLCETDSILFGAALAVCRIIGAKVSTAGRATGHSSAIPAWRRRIEERIAKARALIGRLICFRSGNNRPRIVRTVRMAFAGTNVSLSQPDITQKLTERIDDLKQRIAAWGKRIRRYTERSTRFNQNRLFQSDQKRLYESLERPMVSGTGPAPDQADTVAFWRGLWSEPVNHSEGPWTEVVASQCAGITPMDPVIITPDDVAEAVRRAPNWKSPGLDGLHHYWLKGFMVCHSVLARQFQEALNQKSLPSLFTTGITHLVPKDQGTTDPSKYRPITCLPTIYKTLTSILSARITCHLDSNQVMSRAQNGCRGGGRGTKEPLLIDAVIGKVVKRNRRNFSAAWIDYRKAFDSVPHTWLKRVLELYKIDCTVRDFLEQCMGQWSTILCHLGERMMAAENHIRIRRGIFQGDCLSPIWFCLSLNPLSTLLEGSGRGFQLRKGGTKVTHLFYMDDLKLFASSRSHLMELLNITCEFSNSIGMELGTDKCAVLHVERGRVANSEGVDLSMPVNLRTLSEAETYRYLGMSQNIGIDETGMKQSVCDVFYARLTKVLNSLLSGVNKAHAYNGWVMPVLMYTFGILRWTQTELNALDRKIRTTMTSHRMHHPRSSVMRLYLPRKHGGRGFLSALTMHNREVCSLRDYFLARSDDPFYKDVISCDKGLTPLSLANEQWQDPAVQSISDRTTVWKEKELHGRFYKALHEPFVDTVASLHWLRFGDLFGETEGFVCAIQDQVIKTNNYRRYILKDGTVDICRACRHPGESLRHVISGCSALSNSEYLHRHNLVARILHQELALKYGLVDRKLPYYKYLPEAVLENDRARLYWDRAIITDRTILANKPDIVLMDRAQSRIFLVDITIPYDENLVKAETDKQTKYLDLAHEVTDMWGGLPTEIIPVVVSANGLIPVSLSGHLRRLGLRGGPLQVQMQKAVLLDTARIVRRFLSLSP

SEQ ID NO: 14271 - protein, 1234 aa, Parnassius apollo
MMEYGRTRKGPLPGGRQGASGAGAGRGSMRTASRARGAARPPSSPSHPSSPPAGLVSAGSSRAQQSAPASGGVRRMRWTTQMNSNALRAYFGAKGGETGCLAYRARMHRLFAELEPSLTVTEQNLADRVRYILRSNIFDVAELERLRREAVPSSDENATAEDAAPQMVEQPANVDAAVNTPVVVDSNDDGTVAQELELEHMRSTLEEAIVETRSTPLENRPRLPRIALSKRNRAVVRALNPMLVTYLEASRDLCETDSILFGAALAVCRIIGAKVSTAGRATGHSSAIPAWRRRIEERIAKARALIGRLICFRSGNNRPRIVRTVRMAFAGTNVSLSQPDITQKLTERIDDLKQRIAAWGKRIRRYTERSTRFNQNRLFQSDQKRLYESLERPMVSGTGPAPNQADTVAFWRGLWSEPVNHSEGPWTEVVTSQCAGITPMDPVIITPDDVAEAVRRAPNWKSPGLDGLHHYWLKGFMVCHSVLARQFQEALNQKSLPSLFTTGITHLVPKDQGTTDPSKYRPITCLPTIYKTLTSILSARITCHLDSNQVMSRAQNGCRGGGRGTKEPLLIDAVIGKVVKRNRRNFSAAWIDYRKAFDSVPHTWLKRVLELYKIDCTVRDFLEQCMGQWSTILCHLGERMMAAENHIRIRRGIFQGDCLSPIWFCLSLNPLSTLLEGSGRGFQLRRGGTKVTHLFYMDDLKLFASSRSHLMELLNITCEFSNSIGMELGTDKCAVLLVERGRVANSQGVDLSMPVNLRTLSEAETYRYLGMSQNIGIDETGMKQSVCDVFYARLTKVLNSLLSGVNKAHAYNGWVMPVLMYTFGILRWTQTELNALDRKVRTTMTSHRMHHPRSSVMRLYLSRKHGGRGFLSALTMHNREVCSLRDYFLARSDDPFYMDVISCDKGLTPLSLANEQWQDPAVQSISDRETVWKEKELHGRFYKALHEPFVDTVASLHWLRFGDLFGETEGFVCAIQDQVIKTNNYRRYILKDGTVDICRACRHPGESLRHVISGCSALSNSEYLHRHNLVARILHQELALKYGLVDRKLPYYKYLPEAVLENDRARLYWDRAIITDRTILANKPDIVLMDRAQSRIFLVDITIPYDENLVKAETDKQTKYLDLAHEVSDMWGGLPTEIIPVVVSANGLIPVSLSGHLRRLGLRGGPLQVQMQKAVLLDTARIVRRFLSLSPLTLGRLVSPAEGLHLVGLLFIYVLLYLFYVIDIYVYLFFHFHL

SEQ ID NO: 14272 - protein, 950 aa, Parnassius apollo
MLVTYLEASRDLCETDSILFGAAVAVCRIIGAKLPMAGRATTQSNAIPAWRKRIEDRIAKARALIGRLTSFRSGNNRPRIMRTVRMAFAGTNISLSQPDITQKLTERIDDLKQKIAAWGKRIRRFSEGSRRFNQNRLFQSDQKRLYKLLERPKVCGAGQGPDQADIIAFWRGLWSEPVNHSEGPWMEVVASQGASVTPMDPITITPEDVAEAVRRAPNWKSPGLDGLHHYWLKGFVVCHAVLARQFQEALDQKSLPSLFTTGITHLVPKDQDTTDPSKYRPITCLPTIYKTLTSILSARITRHLELNQVMSRAQNGCRGGGRGTKEPLLIDAVIGKVVKRNRRNFSAAWIDYRKAFDSVPHTWLKRVLELYKIDCTVRDFLEQCMGQWSTILCHLGERMTAAENHIRIRRGIFQGDCLSPIWFCLSLNPLSTLLEGSGRGFQLRKGGTKVTHLFYMDDLKLFASSRSHLMELLNITCEFSSSIGMELGTDKCAVLHVERGRVANSEGIDLSMPVNLRTLSEAETYRYLGMSQNIGIDEAGMKQSVCDVFYARLTKVLNSLLSGVNKTHAYNGWVMPVLMYTFGILRWTQTELNALDRKVRTTMTSHRMHHPRSSVMRLYLPRKYGGRGFLSALTMHNREVCSLRQYFLARSDDPFYNDVISSDKGLTPLSLANEQWQDPAVLSNSDRETVWKEKELHGRYYKALHEPFVDTVASLNWLRFGDLFGETEGFVCAIQDQVIKTNNYRRYILKDGTVDVCRACRHPGESLRHVISGCSALSNSEYLHRHNLVARILHQELALKYGLVDRKLPYYKYLPEAVLENDRARLYWDRAIITDRTILANKPDIVLMDRAQSRIFLVDITIPYDENLVRAETDKQSKYLDLAHEVTDVWGGLPAEIIPVVVSANGLIPVSLSGHLRRLGLRDGPLRAQMQKAVLLDTARIVRRFLSLSS

SEQ ID NO: 14273 - protein, 950 aa, Parnassius apollo
MLVTYLEASRDLCETDSVLFGAAVAACRIIGAKLPMAGRATKQSSAIPAWRKRIEVRIAKARALIGRLISFRSGNNRPRVVRTVRMAFAGTNISLSQPDITQKLTERIDDLKQKIAAWGKRIRRFTERSRRFNQNRLFQSDQKRLYKSLERPEVCGAGPGPDQANTVAFWRGLWSEPVNHSEGPWTEVVASQCASITPMDPVIITPDDVAEAVRRAPSWKSPGLDGLHHYWLKGFIVCHAVLARQFQEDLNQKSLPSLFTTGITHLVPKNQVTTDPSKYRPITCLPTIYKTLTSILSARITRHLELNQVMSRAQNGCRGGGRGTKEPLLIDAVIGKVVKRNRRNFSAAWIDYRKAFDSVPHTWLKRVLELYKIDCTVRDFLEQCMGQWSTILCHLGERMMAAENHIRIRRGIFQGDCLSPIWFCLSLNPLSTLLEGSGRGFQLRKGGTNVTHLFYMDDLKLFASSRSHLVELLKITCEFSSSIGMELGTDKCAVLHVERGRVANSEDIDLSMPVNLRTLSEAETYRYLGMSQNIGIDEAGVKQSVCDVFYARLTKVLNSLLSGVNKTHAYNGWVMPVLMYTFGILRWTQTELNALDRKVRTTMTSHRMHHPRSSVMRLYLPRKHGGRGFLSALTTHNREVCSLRHYFLARSDDPFYNDVISSDKGLTPLSLANEQWQNPAVLSISDRETVWKEKELHGRYYRVLHEPFVDTVASLNWLRFGDLFGETEGFVCAIQDQVIKTNNYRRYILKDGTVDVCRACRHPGESLRHVISGCSALSNSEYFHRHNLVARILHQELALKYGLVDRKLPYYKYLPEAVLENDRARLYWDRAIITDRTILANKPDIVLMDRAQSRIFLVDITIPYDENLVKAETDKQTKYLDLAREVTDMWGGLPTEIIPVVVSANGLIPVSLSGHLRRLGLRDGPLRAQMQKAVVLDTARIVRRFLSLSP

SEQ ID NO: 14274 - protein, 1221 aa, Parnassius apollo
MMEHRRLRKGPLPGGRQGASGAGAGRDSMRTASRARGAARPPSSPSHPSSPPACLVSAGSSQAQQSAPATGGVRRMRWTINMNSNALRAYFRAKGGEIGGFAYRARMHRLFTELEPSITVTEQNLADRVRYILRSNIFDGAELERLRREAVPSSNENATTEGAVPQVAEQPAHVDAAENTPVVADSNDDGTFTQELEIEQMRSTLEEAIMETRSTPLENRPRLPRIALSKRNRAVVRALNPMLVTYLEASRDLCETDSILFGAALAVCRIIGAKLSTAGRTTGQSSAIPAWRTRIEERIAKARALIGRLICFRSGNTRPRIVRTVRMAFAGTNVSLSQPDIMQKLTERIDDLKQRIAAWGKRIRRYTERSTRFNQNRLFQSDQKRLYKSLERPMVSGTGPVPNQADTVAFWRSLWSEPVNHNEGPWTEVVASQCAGITPMDPVTITPDDVAEAVRRAPNWKSPGLDGLHHYWLKGFVVCHTVLARQFQEVLNQKSLPSLFTTGITHLVPKGQSTTDPSKYRPITCLPTIYKTLTSILSARITRHLDSNQVMSRAQNGCRGGGRGTKEPLLIDAVIGKVVKRNRRNFSAAWIDYRKAFDSVPHTWLKRVLELYKIDCTVRDFLEQCMGQWSTILCHLGERMMAAENHIRIRRGIFQGDCLSPIWFCLSLNPLSTLLEGSGRGFQLRKGGTKVTHLFYMDDLKLFASSRSHLMELLNITCEFSNSIGMELGTDKCAVLHVERGRVANSEGIDLSMPVNFRTLSEAETYRYLGMSQNIGIDEAGMKQSVCDVFYARLTKVLNSLLSGVNKTQAYNGWVIPVLMYTFGILRWTQTELNALDRKVRTTMTSHRMHHPRSSVMRLYLPRKHGGRGFLSALTMHNREVCSLRNYFLARSDDPFYKDVISCDKGLTPLSLANEQWQDPAVQTISDRETVWKEKELHGRFYKSLHGPFVDTVTSLHWLRFGDLFGETEGFVCAIQDQVIKTNNYRRYILKDGTIDICRACRHPGESLRHVISGCSALSNSEYLHRHNLVARILHQELALKYGFVDRKLPYYKYLPEAVLENDRARLYWDRAIITDRTILANKPDIVLMDRAQSRIFLVDITIPCDENLVKAETDKQTKYLDLAHEVTDMWGGLPTEIIPVVVSANGLIPVSLSGHLRRLGLRGGPLQAQMQKAVLLDTARIVRRFLSLSPNPRPFGLPCRGLPSGWAFIYLCIFIFILFY

SEQ ID NO: 14275 - protein, 1192 aa, Parnassius apollo
MMDKKIVRKGPLPGGCRGASGAGAGRGSMRVASRARGASRSPSSPPHPSSAPEGLVSAGSSRTQQAAPAAGGARHMRWSQAMNANALRAYFRAKGEETGCLAYRARMHHLFAELEPSLTVTEQNLADRVRYILRSNIFDVAELERLRREAVPSSDENATAEDAAPQMVEQPANVDVAVNTPVVVDSNDDRTVAQELELEHIAYSTLEEAIVETRSTPLENRPRLPRIALSKRNRAVVRALYPMLVIYLEASRDLCETDSILLGAALATCRIIGAKVSTAGHATGHSRAIPAWRRRIEERIAKARALIGRLICFRSGNNKPRIVRIDRMAFAGTNVSLSQPDITQKLTERIDDLKQRIAAWGKRIRRYTERSTRFNQNRLFQSDQKRLYESLERPMVSGTGPAPNQADTVAFWRGLWSEPVNHSEGPWTEVVASQCAGITPMDPVIITPDDVAEAVRRAPNWKSPGLDGLHHYWLKGFMVCHSVLARQFQEALNQKSLPSLFTTGITHLVPKDQGTTDPSKYRPITCLPTIYKTLTSILSARITCHLELNQVMSRAQNGCRGGGRGTKEPLLIDAVIGKVVKRNRRNFSAAWIDYRKAFDSVPHTWLKRVLELYKIDCTVRDFLEQCMGQWSTILCHLGERMMAAENHIRIRRGIFQGDCLSPIWFCLSLNPLSTLLEGSGRGFQLWKGGTKVTHLFYMDDLKLFASSRSHLMELLNITCEFSNSIGMELGTDKCAVLHVERGRVANSEGVDLSMPVNLRTLSEAEIYRYLVMSQNIGIDEAGMKQSVCDVFYARSTKVLNSLLSGVNKIHAYNGWVKPVLMYTFGTLRWTQTELNALERKVRTTMTSHRMHHPRSSVMRLYLPRKHGGRGFLSALTMHNREVCSLRNYFLARSDDPFFKDVISSDKGLTPLSLANEQWQDPAVQTISDRENVWKEKELHGRFYKALHEPFVDTVASLHWLRFGDLFGETEGFVCAIQDQVIKTNNYRRYILKDGTVDICRACRHPGESLRHVISGCSALSNSEYLHRHNLVARILHQELALKYGLVDRKLPYYKYLPEVVLENDRARLYWDRAIITDRTILANKPDIVLMDRAQSRIFLVDITIPYDENPVKAETDKQTKYLDLAHEVTDMWGGLPTEIIPVVVSANGLIPVSLSGHLRRLGLRGGPLQVQMQKAVLLDTARIVRRFLCLSP

SEQ ID NO: 14276 - protein, 915 aa, Parnassius apollo
MAGRATQQGSAIPAWRKRIEDRIAKARALIGRLTSFRSGNIRPRVVRTVRMAFAGTNISLSQPDITQKLTERIDDLKQKIAAWGKRIRRFSERSRRFNQNRLFQSDQKRLYKSLERPEVCGAGPGPDQADTVAFWRGLWSEPVNHSEGPWMEVVASRSASVTPMDPVTITPEDVAEAVRRAPNWKSPGLDGLHHYWLKGFVVCHAVLARQYQEALDQKSLPSLFTTGITHLVPKDQDTTDPSKYRPITCLPTIYKTLTSILSARITRHLELNKVMSRAQNGCRGGGRGTKEPLLIDAVIGKVVKRNRRNFSAAWIDYRKAFDSVPHAWLKRVLELYKIDCTVRDFLEQCMGQWSTILCYQGERMMAAENHIRIRRGIFQGDCLSPIWFCLSLNPLSTLLEGSGRGFQLRKGGTKVTHLFYMDDLKLFASSRSHLMELLNITCEFSNSIGMELGTDKCAVLHVERGRVANSEGIDLSMPVNLKTLSEAETYRYLGMSQNIGIDEAGVKQSVCDVFYARLTKVLNSLLSGVNKTHAYNGWVMPVLIYTFGILRWTQTELNALDRKVRTTMTSHRMHHPRSSVMRLYLPRKHGGRGFMSALTMHNREVCSLRDYFLARSDDPFYNDVISSDKGLTPLSLAHEQWQDPAVLSISDRETVWKEKELHGRYYRALHEPFVDTVASLNWLRFGDLFGETEGFVCAIQDQVIKTNNYRRYILKDGTVDVCRACRHPGESLRHVISGCSALSNSEYLHRHNLVARILHQELALKYGLVDRKLPYYKYLPEAVLENDRARLYWDRAIITDRTILANKPDIVLMDRAQSRIFLVDITIPYDENLVKAETDKQTKYLDLAHEVTDMWGGLPTEIIPVVVSANGLIPVSLSGHLRRLGLRDGPLRAEIQKAVLLDTARIVRRFLSLSP

SEQ ID NO: 14277 - protein, 1206 aa, Parnassius apollo
MRAASRARGAARSSTSPPHPSSPPEGLVSAGSSRTQQAAPAAGGARRMRWSQEMNANALRAYFRAKGEETGCLAYRARMHRLFAELEPSLIVTEQNLADRVRYILRSNIFDVAELERLRREAVPSSDENATAEDAAPQMVEEPANVDAAVNTPVVVDSNDDGTVAQELELEHMRSILEEAIVETRSTPLENRPRLPRIALSKRNRAVVRALNPMLVTYLEASRDLCETDSILFGAALAVCRIIGAKVSTAGRATGHSSAIPAWRRRIEERIARARALIGRLICFRSGNNRPRIVRTVRMAFAGTNVSLSQPDITQKLTERIDDLKQRIAAWGKRIRRYTERSTRFNQNRLFQSDQKRLYESLERPMVSETGPAPNQADTVAFWRGLWSEPVNHSEGPWTEVVASQCAGITPMDPVIITPDDVAEAVRRAPNWKSPGLDGLHHYWLKGFMVCHSVLARQFQEALNQKSLPSLFTTGITHLVPKDQGTTDPSKYRPITCLPTIYKTLTSILSARITCHLDSNQVMSRAQNGCRGGGRGTKEPLLIDAVIGKVVKRNRRTFSAAWIDYRKAFDSVPHTWLKRVLELYKIDCTVRDFLEQCMGQWSTILCHLGERMMAAENHIRIRRGIFQGDCLSPIWFCLSLNPLSTLLEGSGRGFQLRKGGTKVTHLFYMDDLKLFASSRSHLMELLNITCEFSNSIGMELGTDKCAVLHVERGRVANSEGVDLSMPVNLRTLSEAETYRYLGMSQNIGIDETGMKQSVCDVFYARLTKVLNSLLSGVNKAHAYNGWVMPVLMYTFGILRWTQTELNALDRKVRTTMTSHRMHHPRSSVMRLYLPRKHGGRGFLSALTMHNREVCSLRDYFLARSDDPFYKDVISCDKGLTPLSLANEQWQDPAVQSISNRETVWKEKELHGRFYKALHEPFVDTVASLHWLRFGDLFGETEGFVCAIQDQVIKTNNYRRYILKDGTVDICRACRHPGESLRHVISGCSALSNSEYLHRHNLVARILHQELALKYGLVDRKLPYYKYLPEAVLENDRARLYWDRAIITDRTILANKPDIVLMDRAQSRIFLVDITIPYDENLVKAETDKQTKYLDLAHEVTDMWGGLPTEIIPVVVSANGLIPVSLSGHLRRLGLRGGPLQVQMQKAVLLDTARIVRRFLSLSPLTLGRLVSPAEGLHLVGLLFIYVLLYLFYVIDIYVYLSFHFHL

SEQ ID NO: 14278 - protein, 1107 aa, Parnassius apollo
MKTHCGRILGQKGEETGCLAYRARMHRFFAELEPSLSVTEQNLADRVRYILRSNIFGDAELERLRREAIPSSNGNATAGNAAPLDAQQTAYVDAAVNIPFVANSDDDGIVSHELEKMRSILEESMLETRSMPLENRPRLPRIPLSKRNRAVVRALNPMLVTYFEASRDLCETDSILFGAALAVCRIIGAKLPVAGRATQKSSAIPAWRKRIEDRIAKARALIGRLTSFRSGNNRPRIMRTVRMAFAGTNINLFQPDITQKLTERIDDLKQKIAAWGKRIRRFSERSRRFNQNRLFQSDQKRLYKTLERPKVCGAGPGPDQADTVAFWRGLWSEPVNHSEGPWMEVVASQSASVTPMDPVTITPEDVAEAVRRAPNWKSPGLDGLHHYWLKGFVVCHAVLARQFQEALDQKSLPSLFTTGITHLVPKDQDTTDPSKYRPITCLPTIYKTLTSILSARITRHLELNQVMSRAQNGCRGGGRGTKEPLLIDAVIGKVVKRNRRNFSAAWIDYRKAFDSVPHTWLKRVLRLYKIDCTVGDFLEQCMGQWSTILCYLGERMMAAENHIRIRRGIFQGDCLSPIWFCLSLNPLSTLLEGSGRGFQLRKGGTKVTHLFYMDDLKLFASSRSHLMELLNITCEFSNSIGMELGTDKCAVLHVERGRVANSEGIDLSMPVNLRTLSEAETYRYLGMSQNIGIDETGMKQSVCDVFYARLTKVLNSLLSGVNKTHAYNGWVMPVLMYTFGILRWTQTELNALDRKVRTTMTSHRMHHPRSSVMRLYLPRKHGGRGFLSALTMHNREVCSLRNYFLARSDDPFYKDVIFCDKGLTPLSLANEQWQDPAVQTISDRENVWKEKELHGRFYKALHEPFVDTVASLYWLRFGDLFGETEGFVCAIQDQVIKTNNYRRYILKDGTVDICRACRHPGESLRHVISGCSALSNSEYLHRHNLVARILHQELALKYGLVDRKLPYYKYLPEAVLENDRARLYWDRAIITDRTILANKPDIVLMDRAQSRIFLVDITIPYDENLVKAETDKQTKYLDLAHEVTDMWGGLPTEIIPVVVSANGLIPVSLSGHLRRLGLRGGPLRAQMQKAVLLDTARIVRRFLSLSP

SEQ ID NO: 14279 - protein, 993 aa, Parnassius apollo
MLVTYLEASRDLCETDSILFGAALAVCRIIGAKISTAGRATGHSSAIPAWRRRIEERIAKTRALIGRLICFRSGNNRPRIVRTVRMAFAGTNVSLSQPDITQKLTERIDDLKQRIAAWGKRIRRYTERSTRFNQNRLFQSEQKRLYESLERPMVSGTGPAPNQADTVAFWRGLWSEPVNHSEGPWTEVVASQCAGITPMDPVIITPDDVAEAVRRAPNWKSPGLDGLHHYWLKGFMVCHSVLARQFQEALNQKSLPSLFTTGITHLVPKDQGTTDPSKYRPITCLPTIYKTLTSILSARITCHLDSNQVMSRAQNGCRGGGRGTKEPLLIDAVIGKVVKRNRRNFSAAWIDYRKAFDSVPHTWLKRVLELYKIDCTVRDFLEQCMGQWSTILCHLGERMMAAENHIRIRRGIFQGDCLSPIWFCLSLNPLSTLLEGSGRGFQLRRGGTKVTHLFYMDDLKLFASSRSHLMELLNITCEFSNSIGMELGTDKCAVLHVERGRVANSEGVDLSMPVNLRTLSEAETYRYLGMSQNIGIDETGMKQSVCDVFYARLTKVLNSLLTGVNKAHAYNGWVMPVLMYTFGILRWTQTELNALDRKVRTTMTSHRMHHPRSSVMRLYLSRKHGGRGFLSALTMHNREVCSLRDYFLARSDDPFYMDVISCDKGLTPLSLANEQWQDPAVQSISDRETVWKEKELHGRFYKALHEPFVDTVASLHWLRFGDLFGETEGFVCAIQDQVIKTNNYRRYILKDGTVDVCRACRHPGESLRHVISGCSALSNSEYLHRHNLVARILHHELALKYGLVERKLPYYKYLPEAVLENDRARLYWDRAIITDRTILANKPDIVLMDRAQSRIFLVDITIPYDENLVKAETDKQTKYLDLAHEVTDMWGGLPTEIIPVVVSANGLIPVSLSGHLRRLGLRGGPLQVQMQKAVLLDTARIVRRFLSLSPLTLGRLVSPAEGLHLVGLLFIYVLLYLFYVIDIYVYLFFHFHL

SEQ ID NO: 14280 - protein, 950 aa, Parnassius apollo
MLVTYLEASRDLCETDFILFGAALAVCRIIGAKLPMAGRATQQGSAIPAWRKRIEDRIAKARALIGRLTSFRSGNIRPRVVRTVRMAFAGTNISLSQPDITQKLTERIDDLKQKIAAWGKRIRRFSERSRRFNQNRLFQSDQKRLYKSLERPEVCGAGPGPDQADTVAFWRGLWSEPVNHSEGPWMEVVASRSASVTPMDPVTITPEDVAEAVRRAPNWKSPGLDGLHHYWLKGFVVCHAVLARQYQEALDQKSLPSLFTTGITHLVPKDQDTTDPSKYRPITCLPTIYKTLTSILSARITRHLELNKVMSRAQNGCRGGGRGTKEPLLIDAVIGKVVKRNRRNFSAAWIDYRKAFDSVPHAWLKRVLELYKIDCTVRDFLEQCMGQWSTILCYQGERMMAAENHIRIRRGIFQGDCLSPIWFCLSLNPLSTLLEGSGRGFQLRKGGTKVTHLFYMDDLKLFASSRSHLMELLNITCEFSNSIGMELGTDKCAVLHVERGRVANSEGIDLSMPVNLKTLSEAETYRYLGMSQNIGIDEAGVKQSVCDVFYARLTKVLNSLLSGVNKTHAYNGWVMPVLIYTFGILRWTQTELNALDRKVRTTMTSHRMHHPRSSVMRLYLPRKHGGRGFMSALTMHNREVCSLRDYFLARSDDPFYNDVISSDKGLTPLSLAHEQWQDPAVLSISDRETVWKEKELHGRYYRALHEPFVDTVASLNWLRFGDLFGETEGFVCAIQDQVIKTNNYRGYILKDGTVDVCRACRHPGESLRHVISGCSALSNSEYLHRHNLVARILHQELALKYGLVDRKVPYYKYLPEAVLENDRARLYWDRAIITDRTILANKPDIVLMDRAQSRIFLVDITIPYDENLVKAETDKQTKYLDLAHEVTDMWGGLPTEIIPVVVSANGLIPVSLSGHLRRLGLRGGPLRAQIQKAVLLDTARIVRRFLSLSP

SEQ ID NO: 14281 - protein, 950 aa, Parnassius apollo
MLVTYLEASRDLCETDSILFGAALAVCRIIGAKVSTAGRATGHSSAIPAWRRRIEERIAKARALIGRLICFRSGNNRPRIVRTVRMAFTGTNVSLSQPDITQKLTERIDDLKQRIAAWGKRIRRYTERSTRFNQNRLFQSDQKRLYKSLERPMVSGTGPAPNQADTVAFWRGLWSEPVNHSEGPWTEVVASQCAGITPMDPVTITPDNVAEAVRKAPNWKSPGLNGLHHYWLNGFMVCHAVLARQFQEALNQKSLSSLFTTGITHLVPKDQGTTDPSKYRPITCLPTIYKTLTSILSARIARHLDSNQVMSRAQNGCRGGGRGTKEPLLIDAVIGKVVKRNRRNFSAAWIDYRKAFDSVPHTWLKRVLELYKIDCTVRDFLEQCMGQWSTILCHLGERMMAAENRIRIRRGIFQGDCLSPIWFCLSLNPLSTLLEGSGRGFQLRKGGTKVTHLFYMDDLKLFASSRSHLMELLNVTCEFSNSIGMELGTDKCAVLHVERGRVANSEGVDLSMPVNLRALSEAETYRYLGMSQNIGIDEAGMKQSVCDVFYARLTKVLNSLLSGVNKAHAYNGWVMPVLMYTFGILRWTQTELNALDRKVRTTMTSHRMHHPRSSVMRLYLPRKHGGRGFLSALTMHNREVCSLRDYFLARSDDPFYNDVISSDKGLTPLSLANEQWQDPAVQSISDRETVWKEKELHGRYYKALHEPFVDTVASLNWLRFGDLFGETEGFVCAIQDQVIKTNNYRRYILKDGTVDVCRACRHPGESLRHVISGCSALSNSEYLHRHNLVARILHQELALKYGLVDRKLPYYKYLPEAVLENDRARLYWDRAIITDRTILANKPDIVLMDRAQSRIFLVDITIPYDENLVKAETDKQTKYLDLAHEVTDMWGGLPTEIIPVVVSANGLIPVSLSGHLRRLGLRGGPLRVQMQKAVLLDTARIVRRFLSLSP

SEQ ID NO: 14282 - protein, 990 aa, Mysoria ambigua
MRSILEEAIRETRSTPLENRPRLPRIISKRNRAVVRALNPMLVTYLEASRDLCETDSILFGAALAVCRIIGAKLPTAGRATRQSSAIPAWRRRIEDRIAKARALIGRLISFRSGNNRPRIVRTVRMAFAGTNISLSQPDITQKLTERIDDLKQRIAAWGKRIRRYTERSTRFNQNRLFQSDQKRLYESLERPMVRGTGPAPNQADTIAFWRGLWSEPVNHSEGPWTEVVASQCANVTPMDPVIITPDDVAEAVRRAPNWKSPGLDGLHHYWLKGFVVCHAVLARQFQDALDQKSLPSLFTTGITHLVPKYQDSTDPSKYRPITCLPTIYKTLTSILSARITRHLNSNQVMSRAQNGCRGGGRGTKEPLLIDAVIGKVVKRNRRNLSAAWIDYKKAFDSVPHTWLKRVLELYKVDCTVRDFLGQCMGQWSTILCHLGERMMAAENHIRIRRGIFQGDCLSPIWFCLSLNPLSTLLEGSGRGFQLRRGGTKVTHLFYMDDLKLFASSRSHLMELLNITCDFSNSIGMGLGTDKCAVLHVERGRVANSEGIDLSMPINIKTLSEAETYRYLGMSQNIGVDEAGMKQSVCDVFYARLTKVLNSLLSGVNKTHAYNGWIMPVLMYTFGILRWTQTELNALDRKVRTIMTSHRMHHPRSSVMRLYLPRKHGGRGFLSALTMHNREVCSLRNYFLTRADDPYYRDVISCDKGLTPLSLANEQWQDPAVQSISDRETVWKEKELHGRFYKALHEPFVDTVASLHWLRFGDLFGETEGFVCAIQDQVIKTNNYRRYILKDGTVDICRACRHPGESLRHVISGCSALSNSEYLHRHNLVARILHQELALKYGLVDRKLPYYKYLPEAVLENDRARLYWDRAIITDRTILANKPDIVLMDRAQSRIFLVDITIPYDENLVKAETDKLTKYLDLAHEVTDMWGGLPAEIIPVVVSANGLIPVSLSGHLRRLGLRDGPLQAQMQKAVLLDTARIVRRFLSLSP

SEQ ID NO: 14283 - protein, 1191 aa, Parnassius apollo
MMEHRRLRKGPLPGGRQGASGAGAGRDSMRTASRARGAARPPSSPSHPSSPPACLVSAGSSQAQQSAPATGGVRRMRWTINMNSNALRAYFRAKGGEIGGFAYRARMHRLFIELEPSITVTEQNLADRVRYILRSNIFDGAELERLRREAVPSSNENATTEGAVPQVAEQPAHVDAAENTPVVADSNDEGTFTQELEIEQMRSTLEEAIMETRSTPLENRPRLPRIALSKRNRAVVRALNPMLVTYLEASRDLCETDSILFGAALAVCRIIGAKLSTAGRTTGQSSAIPAWRTRIEECIAKTRALIGRLICFRSDNTRPRIVRTVKMAFAGKNVSLSQPDIMQKLTERIDDLKQRIAAWGKRIRRYTERSTRFNQNRLFQSDQKRLYKSLERPMVSGTGPVTNQADTVAFWRSLWSEPVNHNEGPWTEVVASQCAGITPMDPVTITPDDVAEAVRRAPNWKSPGLDGLHHYWLKGFVVCHTVLARQFQEVLNQKSLPSLFTTGITHLVPKGQSTTDPSKYRPITCLPTIYKTLTSILSARITRHLDSNQVMSRAQNGCRGGGRGTKEPLLIDAVIGKVVKRNRRNFSAAWIDYRKAFDSVPHTWLKRVLELYKIDCTVRDFLEQCMGQWSTILCHLGERMMAAENHIRIRRGIFQGDCLSPKWFCLSLNPLSTLLEGSGRGFQLRKGGTKVTHLFYMDDLKLFASSRSHLMELLNITCEFSNSIGMELGTDKCAVLHVERGRVANSEGIDLSMPVNLRTLSEAETYRYLGMSQNIGIDEAGMKQSVCDVFYARLTKVLNSLLSGVNKTQAYNGWVMPVLMYTFGILRWTQTELNALDRKVRTTMTSHRMHHPRSSVMRLYLPRKHGGRGFLSALTMHNREVCSLRNYFLARSDDPFYKDVISCDKGLTPLSLANEQWQDPAVQTISDRETVWKLKELHGRFYKSLHGPFVDAVNSLHWLRFGDLFGETEGFVCAIQDQVIKTNNYRRYILKDGTIDICRACRHPGESLRHVISGCSALSNSEYLHRHNLVARILHQELALKYGFVDRKLPYYKYLPEAVLENDRARLYWDRAIITDRTILANKPDIVLMDRAQSRIFLVDITIPCDENLVKAETDKQTKYLDPAHEVTDMWGGLPTEIIPVVVSANGLIPVSLSGHLRRLGLRGGPLQAQMQKAVLLDTARIVRRFLSLSP

SEQ ID NO: 14284 - protein, 952 aa, Parnassius apollo
MLVTYLEASRDLCETDSILFGAALAVCRIIGAKLSTAKRTTGQSSAIPAWRTRIEERIAKARALIGRLICFRSGNTRPRIVRTVRMAFAGTNVSLSQPDIMQKLTERIDDLKQRIAAWGKRIRRYTERSTRFNQNRLFQSDQKRLYKSLERPMVSGTGPVPNQADTVAFWRSLWSEPVNHNEGPWTEVVASQCAGITPMDPVTITPDDVAEAVRRAPNWKSPGLDGLHHYWLKGFVVCHTVLARQFQEVLNQKSLPSLFTTGITHLVPKGQSTTDPSKYRPITCLPTIYKTLTSILSARITRHLDSNQVMSRAQNGCRGRGGGRGTKEPLLIDAVIGKVVKRNRRNFSAAWIDYRKAFDSVPHTWLKRVLELYKIDCTVRDFLEQCMGQWSTILCHLGERMMAAENHIRIRRGIFQGDCLSPIWFCLSLNPLSTLLEGSGRGFQLRKGGTKVTHLFYMDDLKLFASSRSHLMELLNITCEFSNSIGMELGTDKCAVLHVERGRVANSEGIDLSMPVNLRTLSEAETYRYLGMSQNIGIDEAGMKQSVCDVFYARLTKVLNSLLSGVNKTQAYNGWVIPVLMYTFGILRWTQTELNALDRKVRTTMTSHRMHHPRSSVMRLYLPRKHGGRGFLSALTMHNREVCSLRNYFLARSDDPFYKDVISCDKGLTPLSLANEQWQDPAVQTISDRETVWKEKELHGRFYKSLHGPFVDTVTSLHWLRFGDLLGETEGFVCAIQDQVIKTNNYRRYILKDGTIDICRACRHPGESLRHVISGCSALSNSEYLHRHNLVARILHQELALKYGFVDRKLPYYKYLPEAVLENDRARLYWDRAIITDRTILANKPDIVLMDRAQSRIFLVDITIPCDENLVKAETDKQTKYLDLAHEVTDMWGGLPTEIIPVVVSANGLIPVSLSGHLRRLGLRGGPLQAQMQKAVLLDTARIVRRFLSLSP

SEQ ID NO: 14285 - protein, 991 aa, Parnassius apollo
MRSTLEEAIVETRSTPLENRPRLPRIAPSKRNRAVVRALNPMLVTYLEASRDLCETDSIIFGAALAVCRIIDAKVSTAGRATGHSSAIPAWRRRIEERIAKARALIGRLICFRSGNNRPRIVRTVKMAFAGTNVSLSQPDITQKLTERIDDLKQRIAAWGKRIRRYTERSTRFNQNRLFQSDQKRLYESLERPMVSGTGPAPNQADTVAFWRGLWSEPVNHSEGPWTEVVAIQCAGITPMDPVILTPDDVAEAVRRAPNWKSPGLDGLHHYWLKGFMVCHSVLARQFQEAHNQKSLPSFFTTGITHLVPKDQGTTDPSKYRPITCLPTIYKTLTSILSARITCHLDSNQVMSRAQNGCRGGGRGTKEPLLIDAVIGKVVKRNRRNFSAAWIDYRKALDSVPHTWLKRVLELYKIDCTVGDFLEQCMGQWSTILCHLGERMMAAENHIRIRRGIFQGDCLSPIWFCLSLNPLSTLLEGSGRGFQLRKGGTKVTHLFYMDDLKLFASSRSHLMELLNITCEFSNSIGMELGTDKCAVLHVERGRVANSEGVDLSMPVNLRTLSEAETYRYLGMSQNIGIDETGMKQSVCDVFYARLTKVLNSLLYGVNKAHAYNGWVVPVLIYTFGILRWTQTELNALDRKVRTTMTSHRMHHPRSSVMRLYLSRKHGGRGFLSALTMHNREVCSLRDYFLARSDDPFHKDVISCDKGLTPLSLANEQWQDPAVQSISDRETVWKEKELHGRFYKALHEPFVDTVASLHWLRFGDLFGETEDFVCAIQDQVIKTNNYRRYILKDGTVDICRACRHPGESLRHVISGCSALSNSEYLHRHNLVARILHQELALKYGLVDRKLPYYKYLPEAVLENDRARLYWDRAIITDRTILANKPDIVLMDRAQSRIFLVDITIPYDENLVKAETDKQTKYLDLAHEVTDMWGGLPTEIIPVVVSANGLIPVSLSGHLRRLGLRGGPLQVQMQKAVLLDTARIVRRFLSLSP

SEQ ID NO: 14286 - protein, 1201 aa, Parnassius apollo
MTKLGSFWRPKMMMAQRGTRIGPLPGGRRGASGAGAGRGSMRAASRARGAARSPSSPSHPSSPPEGLVSAGSSRTQQAAPAAGGARRMRWTKPMNENALRAYYRAKGEETVGIAYRSRMHCFFAELEPSTPVTEQNLADRVRYIMRSKIFDDAELGRLRREAIPSSNESAMAGDAAPHSTDQHPHVEAALDLPVVVDSNDDEIVSHELEKMRSILEEAILETRSTPIENRPRLPRIPLSKRNRAVVRALNPMLVTYLEASRDLCETDSIPFGAAVAVCRIIGAKLPMAGRATTQSSAIPAWRKRIEDRIAKARALIGRLTSFRSGNNRPRIMRTVRMAFAGTNISLSQPDITQKLTERIDDLKQKIAAWGKRIRRFSDRSRRFNQNRLFQSDQKRLYKLLERPKVCGAGQGPDQADIIAFWRGLWSEPVNHSEGPWMEVVASQGASVTPMDPITVTPEDVAEAVRRAPNWKSPGLDGLHHYWLKGFVVCHAVLARQFQEALDQKSLPSLFTTGITHLVPKDQDTTDPSKYRPITCLPTVYKTLTSILSARISRHLELNQLMSRAQNGCRGGGRGTKEPLLIDAVIGKVVKRNRRNFSAAWIDYRKAFDSVPHTWLKRVLELYKIDCTVRDFLEQCMGQWSTILCHLGERMMAAENHIRIRRGIFQGDCLSPIWFCLSLNPLSTLLEGSGRGFQLRRGGTKVTHLFYMDDLKLFASSRSHLMELLNITCEFSSSIGMELGTDKCAVLHVERGRVANSEGIDLSMPVNLRTLSEAETYRYLGMSQNIGIDEAGMKQSVCDVFYARLTKVLNSLLSGVNKTHAYNCWVMPVLMYTFGILRWTQTELNALDRKVRTTMTSHRMHHPRSSVMRLYLPRKHGGRGFLSALTMHNREVCSLRQYFLTRSDDPFYNDVISSDKGLTPLSLANEQWQDPAVLSIPDRETVWKEKELHGRYYRALHEPFVDTVASLNWLRFGDLFGETEGFVCAIQDQVIKTNNYRRYILKDGTVDVCRACRHPGESLRHVISGCSALSNSEYLHRHNLVARILHQELALKYGLVDRKLPYYKYLPEAVLENDRARLYWDRAIITDRTILANKPDIVLMDRAQSRIFLVDITVPYDENLVKAETDKQSKYLDLAHEVTDMWGGVPTEIIPVVVSANGLIPVSLSGHLRRLGLRDGPLRAQMQKAVLLDTARIVRRFLSLSP

SEQ ID NO: 14287 - protein, 991 aa, Parnassius apollo
MRSTLEEAIMETRSTPLENRPRLPRIALSKRNRAVVRALNPMLVTYLEASRDLCETDSILFGAALAVCRIIGAKLSTAGRTTGQSSAIPAWRTRIEERIAKARALIGRLICFRSGNTRPRIVRTVRMAFAGTNVSLSQPDIMQKLTERIDDLKQRIAAWGKRIRRYTERSTRFNQNRLFQSDQKRLYKSLERPMVSGTGPVPNQADTVAFWRSLWSEPVNHNEGPWTEVVASQCAGITPMDPVTITPGDVAEAVRRAPNWKSPGLDGLHHYWLKGFVVCHTVLARQFQEVLNQKSLPSLFTTGITHLVPKGQSTTDPSKYRPITCLPTIYKTLTSILSARITRHLDSNQVMSRAQNGCRGGGRGTKEPLLIDAVIGKVVKRNRRNFSAAWIDYRKAFDSVPHTWLKRVLELYKIDCTVRDFLEQCMGQWSTILCHLGERMMAAENHIRIRRGIFQGDCLSPIWFCLSLNPLSTLLEGSGRGFQLRKGGTKVTHLFYMDDLKLFASSRSHLMELLNITCEFSNSIGMELGTDKCAVLHVERGRVANSEGIDLSMPVNLRTLSEAETYRYLGMSQNIGIDEAGMKQSVCDVFYARLTKVLNSLLSGVNKTQAYNGWVIPVLMYTFGILRWTQTELNALDRKVRTTMTSYRMHHPRSSVMRLYLPRKHGGRGFLSALTMHNREVCSLRNYFLARSDDPFYMDVISCDKGLTPLSLANEQWQDPAVQTISDRETVWKEKELHGRFYKSLHGPFVDTVTSLHWLRFGDLFGETEGFVCAIQDQVIKTNNYRRYILKDGTIDICRACRHPGESLRHVISGCSALSNSEYLHRHNLVARILHQELALKYGFVDRKLPYYKYLPEAVLENDRARLYWDRAIITDRTILANKPDIVLMDRAQSRIFLVDITIPCDENLVKAETDKQTKYLDLAHEVTDMWGGLPTEIIPVVVSANGLIPVSLSGHLRRLGLRGGPLQAQMQKAVLLDTARIVRRFLSLSP

SEQ ID NO: 14288 - protein, 875 aa, Parnassius apollo
MLVTYLEASRDVCEKDSILFGAAVAVCRIIGEKLPMAGRATTQSSTIPAWRKRIEDRIAKARALIGRLTSFRSANNRPRIMRTVRMAFAGTNISLSQPDITQKLTERIDDLKQKIAAWGKRIRRFSERSRRFNQNRLFQSDQKRLYKSLEQPKLCGAGQGPDQGDIIAFWRGLWSEPVNHSEGPWMEVVASQGASVTPMDPITITPEDVAEAVRRAPNWKSPGLDGLHHYWLKGFIVCHAVLSRQFQEALDQKSLTSLFTTGITHLVPKDQDTTDPSKYRPITCLPTIYKTLTSVLSARITRHLELNQVMSRAQNGCRGGGRGTKEPLLIDAVIGKVVKRKRRNFSAAWIDYRKAFDSVPHTWLKRVLELYKIDCTVRDFLEQCMGQWSTILCHLGERMTAAENHIRIRRGIFQGDCLSPIWFCLSLNPISTLLEGSGRRFQLWKEGTKVTHLFYMDDLKLFASSRSHLMELLNVTCEFSSSIGMELGTDKCAVLHVERGRVANSEGIDLSMPVNLGTLSEAETYRYLGMSQNIGIDEAGMKQSVCDVFYARLTKVLNSLLSGVNKSHAYNYWVMPVLMYTFGILRWTQNELNALDRKVRTTMTSHRMHHPRSSVMRLYLPRKYGGRGFLSALTIHNREVCSLRQYFLATSDDPFYNDVISSDKGLTPLSLANEQWQYPAVLSISDRETVWKEKELHGRYYKALHEPFVDTVASLNWLRFGDLFGETEGFVCAIQDQVIKTNNYRRYILKNGTVDVCRACRHPRESLRHVISGCSALSNSEYLHRHNLVARILHQELALKYGLVDRKLPYYMYLTEAVLENDRARLYWDRTIITDRTILANKPDIVLMDRAKSRIFLVDITIPYDENLLRVETDK

SEQ ID NO: 14289 - protein, 991 aa, Parnassius apollo
MRSTLEEAIMETRSTPLENRPRLPRIALSKRNRAVVRALNPMLVTYLEASRDLCETDSILFGAALAVCRIIGAKLSTAGRTTGQSSAIPAWRTRIEERIAKARALIGRLICFRSGNTRPRIVRTVRMAFAGTNVSLSQPDIMQKLTERIDDLKQRIAAWGKRIRRYTERSTRFNQNRLFQSDQKRLYKSLERPMVSGTGPVPNQADTVAFWRSLWSEPVNHNEGPWTEVVASQCAGITPMDPVTITPDDVAEAVRRAPNWKSPGLDGLHHYWLKGFVVCHTVLARQFQEVLNQKSLPSLFTTGITHLVPKGQSTTDPSKYRPITCLPTIYKTLTSILSARITRHLDSNQVMSRAQNGCRGSGRGTKEPLLIDAVIGKVVKHNRRNFSAAWIDYRKAFDSVPHTWLKRVLELYKIDCTVRDFLEQCMGQWSTILCHLGERMMAAENHIRIRRGTFQGDCLSPIWFCLSLNPLSTLLEGSGRGFQLRKGGTKVTHLFYMDDLKLFASSRSHLMELLNITCEFSNSIGMELGTDKCAVLHVERGRVANSEGIDLSMPVNLRTLSEAETYRYLGMSQNIGIDEAGMKQSVCDVFYARLTKVLNSLLSGVNKTQAYNGWVIPVLMYTFGILRWTQTELNALDRKVRTTMTSHRMHHPRSSVMRLYLPRKHGGRGFLSALTMHNREVCSLRNYFLARSDDPFYKDVISCDKGLTPLSLANEQWQDPAVQTISDRETVWKEKELHGRFYKSLHGPFVDTVTSLHWLRFGDLFGETEGFVCAIQDQVIKTNNYRRYILKDGTIDICRACRHPGESLRHVISGCSALSNSEYLHRHNLVARILHQELALKYGFVDRKLPYYKYLPEAVLENDRARLYWDRAIITDRTILANKPDIVLMDRAQSRIFLVDITIPCDENLVKAETDKQTKYLDLAHEMTDMWGGLPTEIIPVVVSANGLIPVSLSGHLRRLGLRGGPLQAQMQKAVLLDTARIVRRFLSLSP

SEQ ID NO: 14290 - protein, 1083 aa, Parnassius apollo
MHCFFAELEPSISVTEQNLADRVRYIMRSKIFDDAELERLRREAIPSSNESAMAGDAAPHSTDQHPHVEAAMDLPVVVDSNDDEIVSHELEQMRSILEEAILETRSTPLENRPRLPRIPLSKRNRAVVRALNPMLVTYLEASRGLCETDSILFGAAVAVCRIIGAKLPMAGRATTQSSAIPAWRKRIEDRIAKARALIGRLTSFRSGNNRPRIVRTVRMAFAGTNISLSQPDIAQKLTERIDDLKQKIAAWGKRIRRFSEGSRRFNQNRLFQSDQKRLYKSLERPKVCGAGPGPDQADTVAFWRGLWSEPVNHSEGPWMEVVASQGASVTPMDPITITPEDVAEAVRRAPNWKSPGLDGLHHYWLKGFVVCHAVLARQFQEALDQKSLPSLFTTGITHLVPKDQDTTDPSKYRPITCLPTIYKTLTSILSARITRHLELNQVMSRAQNGCRGGGRGTKEPLLIDAVIGKVVKRNRRNFSAAWIDYRKAFDSVPHTWLKRVLELYKIDCTVRDFLEQCMGQWSTILCHLGERMTAAENHIRIRRGIFQGDCLSPIWFCLSLNPLSALLEGSGRGFQLRKGGTKVTHLFYMDDLKLFASSRSHLMELLNITCEFSSSIGMELGTDKCAVLHVERGRVANSEGIDLSMPVNLRTLSEAETYRYLGMSQNIGIDEAGMKQSVCDVFYARLTKVLNSLLSGVNKSHAYNCWVMPVLMYTFGILRWTQTELNALDRKVRTTMTSHRMHHPRSSVMRLYLPRKYGGRGFLSALTMHNREVCSLRQYFLARSDDPFYNDVISSDKGLTPLSLANEQWQDPAVLSISDRETVWKEKELHGRYYKALHEPFVDTVASLNWLRFGDLFGETEGFVCAIQDQVIKTNNYRRYILKDGTVDVCRACRHPGESLRHVISGCSALSNSEYLHRHNLVARILHQELALKYGLVDRKLPYYKYLPEAVLENDRARLYWDRAIITDRTILANKPDIVLMDRAQSRIFLVDITIPYDENLVRAETDKQSKYLDLAHEVTDMWGGLPAEIIPVVVSANGLIPVSLSGHLRRLGLRDGPLRAQMQKAVLLDTARIVRRFLSLSP

SEQ ID NO: 14291 - protein, 1085 aa, Parnassius apollo
MHRLFAELEPSVTVTEQNLADRVRYILRSNTFDVTELERLRREAVPSSGENAAAEDAAPQLAEQTANVDAAVNTPVVVDSNDDGTVAQELELEQMRSTLEEAIVETRSTTLENRPRLPRLALSKRNRAVVRALNPMLVTYLEASRDLCDTDSILFGAALAVCRIIGAKLSTAGRATGQSSAIPAWRIRIEERIAKARALIGRLICFRSGNTRPRIVRTVRMAFAGTNVSLSQPDIMQKLTERIDDLKQRIAAWGKRIRRYTERSTRFNQNRLFQSDQKRLYKSLERPIVSGTGPAPNQADMVAFWRSLWSEPVNHNEGPWTEVVASQCASITPMDPVIITPDDVAEAVRRAPNWKSPGLDGLHHYWLKGFMVCHSVLARQFQEALNQKSLPSLFTTGITHLVPKDQGATDPSKYRPITCLPTIYKTLTSILSARIARHLDLNQVMSRAQNGCRGGGRGTKEPLLIDAVIGKVVKRNRRNFSAAWIDYRKAFDSVPHTWLKRVLELYKIDYTVRDFLEQCMGQWSTILCHLGERMTAAESRIRIRRGIFQGDCLSPIWFCLSLNPLSTLLEGSGKGFQLRKGGTKVTHLFYMDDLKLFASSRSHLMELLNITCEFSNSIRMELGTDKCAVLHVERGRVANSEGIDLSMPVNLRTLSEAETYRYLGMSQNIGIDEAGMKQSVCDVFYARLTKVLNSLLSGVNKAHAYNGWVMPVLMYTFGILRWTQTELNALDRKVRTTMTSHRMHHPRSSVMRLYLPRKHGGRGFLSALTMHNREVCSLRDYFLARSDDPFYKDVISCDKGLTPLSLANEQWQDPAVQSISDRETVWKEKELHGRFYKALHEPFVDTVASLHWLRFGDLFGETEGFVCAIQDQVIKTNNYRRYILKDGTVDICRACRHPGESLRHVISGCSALSNSEYLHRHNLVARILHQELALKYGLVDRKLPYYKYLPEAVLENDRARLYWDRAIITDRTILANKPDIVLMDRAQSRIFLVDITIPYDENLVKAETDKKTKYLDLAHEVTDMWGGLPTEIIPVVVSANGLIPVSLSGHLRRLGLRGGPLQVQMQKAVLLDTARIVRRFLSLSP

SEQ ID NO: 14292 - protein, 1190 aa, Parnassius apollo
MMESNGTRKGPLPGGRQGASGAGAGRDSMRTASRARGAARPPSSSSHPSSPPAGLVSAGSSRAQQSAPATGGVRRMRWTTQMNSNALRAYFRAKGGETGGFAYRARMHRLFAELEPSVTVTEQNLADRVRYILRSNTFDVPELERLRREAVPSSGENAAAEDAAPQLAEQTANVDAAVNTPVVVDSNDDGTVTQELELEQTRSTLEEAIVETRSTTLENRPRLPRLALSKRNRAVVRALNPMLVTYLEASRDLCETDSILFGAALAVCRIIGAKLSTAGRATGQSSAIPAWRIRIEERIAKARALIGRLICFRSGNTRPRIVRTVRMAFAGTNSLSQPDIMQKLTECIDDLKQRIATWGKRIRRYTERSTRFNQNRLFQSDQKRLYKSLERPIVSGTGPAPNMPDTVAFWRSLWSEPVNHNEGSWMEVVASQCAGITPMDPVIITPDDVAEAVRRAPNWKSPGLDGLHHYWLKGFMVCHAVLARQFQEALNQKSLPSRFTTGITHLVPKDQGATDPSKYRPITCLPTIYKTLTSILSARIARHLDLNQVMSRAQNGYRGGGRGTKEPLLIDAVIGKVVKRNRRNFSAAWIDYRKAFDSVPHTWLKRVLELYKIDCTVRDFLEQCMGQWSTILCHLGERMTAAESRIRIRRGIFQGDCLSPIWFCLSLNPLSTLLEGSGRGFQLRKGGTKVTHLFYMDDLKLFASSLMDLMELLNITCEFSNSIRMELGTDKCAVLHVERGRVANSEGIDLSMPVNLRTLSEAETYRYLGMSQNIGIDEAGMKQSVCDVFYARLTKVLNSLLSGVNKAHAYNGWVMPVLMYTFGILRWTQTELNALDRKVRTTMTSHRMHHPRSSVMRLYLPRKHGGRGFLSALTMHNREVCSLRDYFLARSDDPFYKDVISCDKGLTPLSLANEQWQDPAVQSISDRETVWKEKELHGRFYKALHEPFVDTVASLHWLRFGDLFGETEGYLCAIQDQVIKTNNYRRYILKDGTVDICRACRHPGESLRHVISGCSALSNSEYLHRHNLVARILHQELALKYGLVDRKLPYYKYLPEAVLENDRARLYWDRAIITDRTILANKPDIVLMDRAQSRIFLVDITIPYDENLVKAETDKQTKYLDLAHEVTDMWGGLPTEIIPVVVSANGLIPVSLSGHLRWLGLRGGPLQVQMQKAVLLDTARIVRRFLSLSP

SEQ ID NO: 14293 - protein, 1163 aa, Parnassius apollo
MRTASRARGAARPPSSPSHPSSPPAGLVSAGSSRAQQSAPASGGVRRMRWTTQMNSNALRAYFRAKGGETGCLAYRARMHRLFAELEPSLTVTEQNLADRVRYILRSNIFDVAELERLRREAVPSSDENATAEDAAPQMVEQPANVDAAVNTPVVADSSDDGTVTQELELEHIRSTLEEAIVETRSTPLENRPRLPRIALSKRNRAVVRALNPMLVTYLEASRDLCETDSILFGAALAVCRIIGAKVSTAGPATGHSSAIPAWRRRIEERIAKARALIGRLICFRSGNNRPRIVRTVRMAFAGTNVSLSQPDITQKLTERIDDLKQRIAAWGKRIRRYTERSTRFNQNRLFQSDQKRLYESLERPMVSGTGPAPNQADTVAFWRGLWSEPVNHSEGPWTEVVASQCAGITPMDPVIITPDDVAEAVRRAPNWKSPGLDGLHHYWLKGFMVCHSVLARQFQEALDQKSLPSLFTTGITHLVPKDQGTTDPSKYRPITCLPTIYKTLTSILSARITCHLDSNQAMSRAQNGCRGGGRGTKEPLLIDAVIGKVVKRNRRNFSAAWIDYRKAFDSVPHTWLKRVLELYKIDCTVRDFLEQCMGQWSTILCHLGERMMAAENHIRIRRGIFQGDCLSPIWFCLSLNPLSTLLEGSGRGFQLRKGGKKVTHLFYMDDLKLFASSRSHLMELLNITCEFSNSIGMELGTDKCAVLHVERGRVANSEGVDLSMPVNLRTLSEAETYRYLGMSQNIGIDETGMKQSVCDVFYARLTKVLNSLLSGVNKAHAYNGWVMPVLMYTFGILRWTQTELNALDRKVRTTMTSHRMHHPRSSVMRLYLSRKHGGRGFLSALTMHNREVCSLRDYFLARSDDPFYKDVISCDKGLTPLSLANEQWQDPAVQSISDRETVWKEKELHGRFYKALHEPFVDTVASLHWLRFGDLFGETEGFVCAIQGQVIKTNNYRRYILKDGTVDICRAYRHPGESLRHVISGCSALSNSEYLHRHNLVARILHQELALKYGLVDRKLPYYKYLPEAVLENDRARLYWDRAIITDRTILANKPDIVLMDRAQSRIFLVDITIPYDENLVKAETDKQTKYLDLAQEVTDMWGGLPTEIIPVVVSANGLIPVSLSGHLRRLGLRGGPLQVQMQKAVLLDTARIVRRFLSLSP

SEQ ID NO: 14294 - protein, 1191 aa, Parnassius apollo
MMEHRRLRKGPLPGGRQGASGAGAGRDSMRTASRARGAARPPSSPSHPSSPPACLVSAGSSQAQQSAPATGGVRRMRWTINMNSNALRAYFRAKGGEIGGFAYRARMHRLFTELEPSITVTEQNLADRVRYILRSNIFDGAELERLRREAVPSSNENATTEGAVPQVAEQPAHVDAAENTPVVADSNDDGTFTQELEIEQMRSTLEEAIMETRSTPLENRPRLPRIALSKRNRAVVRALNPMLVTYLEASRDLCETDSILFGAALAVCRIIGAKLSTAGRTTGQSSAIPAWRTRIEERIAKARALIGRLICFRSGNTRPRIVRTVRMAFAGTNVSLSQPDIMQKLTERIDDLKQRIAAWGKRIRRYTERSTRFNQNRLFQSDQKRLYKSLERPMVSGTGPEPNQADTVAFWRSLWSEPVNHNEGPWTEVVASQCAGITPMDPVTITPDDVAEAVRRAPNWKSPGLDGLHHYWLKGFVVCHTVLARQFQEVLNQKSLPSLFTTGITHLVPKGQGTTDPSKYRPITCLPTIYKTLTSILSARITRHLDSNQVMSRAQNGCRGGGRGTKEPLLIDAVIGKVVKRNRRNFSAAWIDYRKAFDSVPHTWLKRVLELYKIDCTVRDFLGQCMGQWSTILCHLGERMMAAENHIRIRRGIFQGDCLSPIWFCLSLNPLSTLLEGSGRGFQLRKGGTKVTHLFYMDDLKLFASSRSHLMELLNITCEFSNSIGMELGTDKCAVLHVERGRVANSEGIDLSMPVNLRTLSEAETYRYLGMSQNIGIDEAGMKQSVCDVFYARLTKVLNSLLSGVNKTQAYNGWVMPVLMYTFGILRWTQTELNTLDRKVRTTMTSHRMHHPRSSVMRLYLPRKHGGRGFLSALTMHNREVCSLRNYFLARSDDPFYKDVISCDKGLTPLSLANEQWQDPAVQTISDRETVWKEKELHGRFYKSLHGPFVDTVTSLHWLRFGDLFGETEGFVCAIQDQVIKTNNYRRYILKDGTIDICRACRHPGESLRHVISGCSALSNSEYLHRHNLVARILHQELALKYGFVDRKLPYYKYLPEAVLENDRARLYWDRAIITDRTILANKPDIVLMDRAQSRIFLVDITIPCDENLVKAETDKQTKYLDLAHEVTDMWGGLPTEIIPVVVSANGLIPVSLSGHLRRLGLRGGPLQAQMQKAVLLDTARIVRRFLSLSP

SEQ ID NO: 14295 - protein, 984 aa, Passova gellias
MVGSDDDGTVAQELELEQMRSTLEEAILETRSTPLENRPRLPRIPLSKRNRAVVRALNPMLVTYLEASRDLCETDSILFGAALAVCRIIGAKLPTAGRATRQSSAIPAWRRRIEDRIAKARALIGRLISFRSGNNRPRIVRTVRMAFAGTNISLSQPDITQKLTERIDDLKQRIAAWGKRIRRYTERSTRFNQNRLFQSDQKRLYESLERPMVRGTGPAPNQADTIAFWRGLWSEPVNHSEGPWTEVVASQCANVTPMDPVIITPDDVAEAVRRAPNWKSPGLDGLHHYWLKGFVVCHAVLARQFQEALDQKSLPSLFTTGITHLVPKDRDSTDPSKYRPITCLPTIYKTLTSILSARITRHLNSNQVMSRAQNGCRGGGRGTKEPLLIDAVIGKVVKRNRRNLSAAWIDYKKAFDSVPHTWLKRVLELYKVDCTVRDFLGQCMGQWSTILCHLGERMMAAENHIRIRRGIFQGDCLSPIWFCLSLNPLSTLLEGSGRGFQLRRGGTKVTHLFYMDDLKLFASSRSHLMELLNITCDFSNSIRMELGTDKCAVLHVERGRVANSEGIDLSMPISIRTLSEAETYRYLGMSQNIGIDEADMKQSVCDVFYARLTKVLNSLLSGVNKTHAYNGWIMPVLMYTFGMLRWTQTELNALDRKVRTIMTSHRMHHPRSSVMRLYLPRKHGGRGFLSALTMHNREVCSLRNYFLTRADDPYYRDVISCDKGLTPLSLANEQWQDPAVQSISDRETVWKEKELHGRFYKALHEPFVDTVASLHWLRFGDLFGETEGFVCAIQDQVIKTNNYRRYILKDGTVDICRACRHPGESLRHVISGCSALSNSEYLHRHNLVARILHQELALKYGLVDRKLPYYKYLPEAVLENDRARLYWDRAIITDRTILANKPDIVLMDRAQSRIFLVDITIPYDENLVKAETDKLTKYLDLAHEVTDMWGGLPTEIIPVVVSANGLIPVSLSGHLRRLGLRDGP

SEQ ID NO: 14296 - protein, 991 aa, Parnassius apollo
MRSILEESMLETRSMPLENRPRLPRIPLSKRNRAVVRALNPMLVTYLEASRDLCETDSILFGAALAVCRIIGAKLPVAGRATQKSSAIPAWRKRIEDRIAKARALIGRLTSFRSGNNRPRIMRTVRMAFAGTNINLFWPDITQKLTERIDDLKQKIAAWGKRIRRFSERSRRFNQNRLFQSDQKRLYKTLERPKVCGAGPGPDQADTVAFWRGLWSEPVNHSEGPWMEVVASQSASVTPMDPVTITPEDVAEAVRRAPNWKSPGLDGLHHYWLKGFVVCHAVLARQFQEALDQKSLPSLFTTGITHLVPKDQDTTDPSKYRPITCLPTIYKTLTSILSARITRHLELNQVMSRAQNGCRGGGRGTKEPLLIDAVIGKVVKRNRRNFSAAWIDYRKAFDSVPHTWLKRVLQLYKIDCTVGDFLEQCMGQWSTILCYLGERMMAAENHIRIRRGIFQGDCLSPIWFCLSLNPLSTLLEGSGRGFQLRKGGTKVTHLFYMDDLKLFASSRSHLMELLNITCEFSNSIGMELGTDKCAVLHVERGRVANSEGIDLSMPVNLRTLSEAETYRYLGMSQNIGIDEAGMKQSVCDVFYARLTKVLNSLLSGVNKTHAYNGWVMPVLMYTFGILRWTQTELNALDRKVRTTMTSHRMHHPRSSVMRLYLPRKHGGRGFLSALTIHNREVCSLRNYFLARSDDPFYKDVIFCDKGLTPLSLANEQWQDPAVQTISDRENVWKEKELHGRFYKALHEPFVDTVASLYWLRFSDLFGETEGFVCAIQDQVIKTNNYRRYILKDGTVDICRACRHPGESLRHVISGCSALSNSEYLHRHNLVARILHQELALKYGLVDRKLPYYKYLPEAVLENDRARLYWDRAIITDRTILANKPDIVLMDRAQSRIFLVDITIPYDENLVKAETDKQTKYLDLAHEVTDMWGGLPTEIIPVVVSANGLIPVSLSGHLRRLGLRGGPLRAQMQKAVLLDTARIVRRFLSLSP

SEQ ID NO: 14297 - protein, 972 aa, Parnassius apollo
MLVTYLEASQDLCETDSILFGAALAVCRIIGAKLSTAGRATGQSSAIPAWRIRIEERIAKARALVGRLICFRSGNTRPRIVRTVRMAFAGTNVSLSQPDIMQKLTERINDLKQRIAAWGKRIRRSTERSTRFNQNRLFQSDQKRLYKSLERPIVRGTGPAPNQADTVAFWRSLWSEPVNHNEGPWTEVVASQCAGITPMDPVIITPDDVAEAVRRAPNWKSPGLDGLHHYWLKGFMVCHAVLARQFQEALNQKSLPSLFTTGITHLVPKDQDATDPSKYRPITCLPTIYKTLTSILSARIARHLDSNQVMSRAQNGCRGGGRGTKEPLLIDAVIGKVVKRNRRNFSAAWIDYRKAFDSVPHTWLKRVLELYKIDCTVRDFLEQCMGQWSTILCHLGEWMTAAESRIRIRRGIFQGDCLSPIWFCLSLNPLSTLLEGSGRGFQLRKGGAKVTHLFYMDDLKLFASSRSHLMELLNITCEFSNSIRMELGTDKCAVIHVERGRVANSEGIDLSMPVNLRALSEAETYRYLGMSQNIGIDEAGMKQSVCDVFYARLTKVLNSLLSGVNKTHAYNGWVMPVLMYTFGILKWSQTELNALDRKVRTTMTSHRMHHPRSSVMRLYLPRKHGGRGFLSALTMHNREVCSLRHYFLARSDDPFYNDVISNDKGLTPLSLANEQWQDPAVQSISDRETVWKEKELHGRYYRALHEPHVDTAASLNWLRFGDLFGETEGFVCAIQDQVIKTNNYRRYILKDGTVDVCRACRHPGESLRHVISGCSALSNSEYLHRHNLVARILHQELALKYGLVDRKLPYYKYLPEAVLENDRAKLYWDRAIITDRTILANKPDIVLMDRAQSRIFLVDITIPHDENLVKAETEKRTKYLDLAHEVTDMWGGLPTEIIPVVVSANGLIPVSLSGHLRRLGLRDGPLRAQMQKAVLLDTARIVRQFLSLFPVTLGRLVSPAEGSHLVGSYLFM

SEQ ID NO: 14298 - protein, 1189 aa, Parnassius apollo
MMVQRGTRIGPLPGGRRGASGAGAGRGSMRAASRARGAVRSPSSPPHPSSPPEGLVSAGSSRTQQAAPAAGGARRMRWSQTMNANALRAYFRAKGEETGCLAYRARMHRFFAELEPSLSVTEQNLADRVRYILRSNIFGDAELERLRREAVPSSDGNATAGDAAPLIAQQTANVDAAVNIPVVVDSDDDGIVPHELEQMRSILEESMLETRSMPLENRPRLPRIPLSKRNRAVVRALNPMLVTYLEASRDLCETDSILFGAALAVCRIIGAKLPMAGRATQQSSAIPAWRKRIEDRIAKARALIGRLTSFRSGNIRPRVVRTVRMAFAGTNISLSQPDITQKLTERIDDLKQKIAAWGKRIRRFSERSRRFNQNRLFQSDQKRLYKSLERPEVCGAGPGPDQADTVAFWRGLWSEPVNHSEGPWTEVVASRSASVTPMDPVTITPEDVAEAVRRAPNWKSPGLDGLHHYWLKGFVVCHAVLARQYQEALNQKSLPSLFTTGITHLVPKDQDTTDPSKYRPITCLPTIYKTLTSILSARITRHLELNQVMSRAQNGCRGGGRGTKEPLLIDAVIGKVVKLNRRNFSAAWIDYRKAFDSVPHAWLKRVLELYKIDCTVRDFLEQCMGQWSTILCYQGERMMAAENHIRIRRGIFQGDCLSPIWFCLSLNPLSTLLEGSGRGFQLRKGGTKVTHLFYMDDLKLFASSRSHLMELLNITCEFSNSIGMELGTDKCAVLHVERGRVANSEGIDLSMPVNLKTLSEAETYRYLGMSQNIGIDEAGMKQSVCDVFYARLTKVLNSLLSGVNKTHAYNGWVMPVLIYTFGILRWTQTELNALDRKVRTTMTSHRMHHPRSSVMRLYLPRKHGGRGFMSALTMHNREVCSLRDYFLARSDDPFYNDVISSDKGLTPLSLANEQWQDPAVLSISDRETVWKEKELHGRYYRALHEPFVDTVASLNWLRFGDLFGETEGFVCAIQDQVIKTNNYRRYILKDGTVDVCRACRHPGESLRHVISGCSALSNSEYLHRHNLVARILHQELALKYGLVDRKLPYYKYLPEAVLENDRARLYWDRAIITDRTILANKPDIVLMDRAQSRIFLVDITIPYDENLVKAETDKQTKYLDLAHEVTDMWGGLPTEIIPVVVSANGLIPVSLSGHLRRLGLRGGPLRAQMQKAVLLDTARIVRRFLSLSP

SEQ ID NO: 14299 - protein, 1191 aa, Parnassius apollo
MMDKKIVRKGPLPGGRRGASGAGAGRGSMRAASRARGAARSPSSPPHPSSPPEGLVSAGSSRTQQAEPAAGGARRMRWSQAMNANALRAYFRAKGEETGCLAYRARMHRLFAELEPSLTVTEQNLADRVRYILRSNIFDVAELERLRREAVPSSDENATAEDAAPQMVERPANVDAAVNTPVVVDSNDDGTVAQELELEHMRSTLEEAIVETRSTPLENRPRLPRIAISKRNRAVVRALNPMLVTYLEASRDLCESDSIIFGAALAVCRIIGAKVYTAGRATGHSSAIPAWRRRIEERIAKARALIGRLICFRSGNNRPRIVRTVRMAFAGTNVSLSQPDITQKLTERIDDLKQRIAAWGKRIRRYTERSTRFNQNRLFQSDQKRLYESLERPMVSVTGPAPNQADTVAFWRGLWSEPVNHSEGPWTEVVASQCADITPMDPVIITPDDVAEAVRRAPNWKSPGLDGLHHYWLKGFMGCHSVLARQFQEALNQKSLPSLFTTGITHLVPKDQGITDPSKYRPITCLPTIYKTLTSILSARITCHLDSNQVMSRAQNGCRGGGRGTKEPLLIDAVIGKVVKRNRRNFSAAWIDYRKAFDSVPHTWLKRVLELYKIDCTVRDFLEQCMGQWSTILCHLGERMMAAENHIRIRRGIFQGDCLSPIWFCLSLNPLSTLLEGSGRGFQLRKGGTKVTHLFYMDDLKLFASSRSHLMELLNITCEFSNSIGMELGTDKCAVLHVESGRVANSEGVDLSMPINLRTLSEAETYRYLGMSQNIGIDETGMKQSVCDVFYARLTKVLNSLLSGVNKAHAYNGWVMPVLMYTFGILRWIQTELNALDRKVHTTITSHRMHHPRSSVMRLYLPRKHGGRGFLSALTMHNREVCSLRDYFLARSDDPFYKDVISCDKGLTPLSLANEQWQDPAVQSISDRETVWKEKELHGRFYEALHEPFVDTVASLHWLRFGDLFGETEGFVCAIQDQVIKTNNYRRYILKDGTIDICRACRHPGESLRHVISGCSALSNSEYLHRHNLVARILHQELALKYGLVDRKLPYYKYLPEAVLENDRARLYWDRAIITDRTILANKPDIVLMDRAQSRIFLVDITIPYDENLVKAETDKQTKYLDLAHEVTDMWSGLPTEIIPVVVSANGLIPVSLSGHLRRLGLCGGPLQVQMQKAVLLDTARIVCRFLSLSP

SEQ ID NO: 14300 - protein, 1206 aa, Parnassius apollo
MRAASRARGAARSPSSPPHPSSPPEGLVSAGSSRTQQAAPAAGGARRMRWSQAMNANALRAYFRAKGEETGCLAYRARMHRLFAELELSLTVTEQNLADRVRYILRSNIFDVAELERLRCEAFPSSDENATAEDAAPQMVEQPANVDAAVNTPVVVDSNDDGTVARELELEHMRSTLEEAIVETRSTPLENRPRLPRIALSKRNRGVVRALNPMLVTYLEASRDLCETDSILFGAALAVCRIIGAKVSTAGRATGHSSAIPAWRRRIEERIAKARALIGRLICFRSGINRPRIVRTVRMAFAGTNVSLFQPDITQKLTERIDDLKQRIAAWGKRIRRYTERSTRFNQNRLFQSDRKRLYESLERPMVSGTGPAPNQADTVAFWRGLWSEPVNHSEGPWTEVVASQCAGVTPMDPVIITPDDVAEAVRRAPNWKSPGLDGLHHYWLKGFMVCHSVLVRQVQEALNQKSLPSLFTTGITHLVPKDQGTTDPSKYRPITCLPTIYKTLTSILSARITCHLNSNQVMSRAQNGCRGGGRGTKEPLLIDAVIGKVVKRNRRNFSAAWIDYRKAFDSVPHTWLKRVLELYKIDCTVRDFLEQCMGQWSTILCHLGERMMAAENHIRIRRGNFQGDCLSPIWFCLSLNPLSTLLEGSGRGFQLRKGGTKVNHLFYMDDLKLFASSRSHLMELLNITCEFSNSIGMELGTDKCAVLHVERGRVANSEGIDLSMPVNLITLSEAETYRYLGMSQNIGIDETGMKQSVCDVVYARLTKVLNSLLSGVNKAHAYNGWVMPVLMYTFGILRWTQTELNALNRKVRTTMTSHRMHHPRSSVMRLYLPRKHGGRDFLSALTMHNREVCSLRDYFLARSDDPFYKDVISCDKGLTALSLANEQWQDPAVQSISDRETVWKEKELHGRFYKALHEPFVDTVASLHWLRFGDLFGETEGFVCAIQDQVIKTNNYRRYILKDGTVDICRACRHPGESLRHVISGCSALSNSEYLHRHNLVARILHQELALKYGLVDRKLPYYKYLPEAVLENDRARLYWDRAIITDRTILANKPDIVLMDRAQSGIFLVDITVPYDENLVKAERDKQTKYLDLVHEVTDMWGGLPTEIIPVVVSANGLIPVSLLGHLRRLGLRGGPLQAQMQKAVLLDTARIVRRFLSPFPLTLSRLVSPAEGLHLVGLLFIYVLLYLFYVIDIYVYLSFHFHL

SEQ ID NO: 14301 - protein, 991 aa, Parnassius apollo
MRSILEESMLETRSMPLENRPRLPRIPLSKRNRAVVRALNPMLVTYLEASRDLCETDSILFGAALAVCRIIGAKLPMAGRATQQGSAIPAWRKRIEDRIAKARALIGRLTSFRSGNIRPRVVRTVRMAFAGTNISLSQPDITQKLTERIDDLKQKIAAWGKRIRRFSERSRRFNQNRLFQSDQKRLYKSLERPEVCGAGPGPDQADTVAFWRGLWSEPVNHSEGPWMEVVASQSASVTPMDPVTITPEDVAEAVRRAPNWKSPGLDGLHHYWLKGFVVCYAVLARQYQEALDQKSLPSLFTTGITHLVPKDQDTTDPSKYRPITCLPTIYKTLTSILSARITRHLELNQVMSRAQNGCRGGGRGTKEPLLIDAVIGKVVKRNRRNFSAAWIDYRKAFDSVPHAWLKRVLELYKIDCTVRDFLEQCMGQWSTILCYQGERMMAAENHIRIRRGIFQGDCLSPIWFCLSLNPLSTLLEGSGRGFQLRKGGTKVTHLFYMDDLKLFASSRSHLMELLNITCEFSNSIGMELGTDKCAVLHVERGRVANSEGIDLSMPVNLKTLSEAETYRYLGMSQNIGIDEAGMKQSVCDVFYARLTKVLNSLLSGVNKTHAYNGWVMPVLIYTFGILRWTQTELNALDRKVRTTMTSHRMHHPRSSVMRLYLPRKHGGRGFMSALTMHNREVCSLRDYFLARSDDPFYNDVISSDKGLTPLSLAHEQWQDPAVLSISDRETVWKEKELHGRYYRALHEPFVDTVASLNWLRFGDLFGETEGFVCAIQDQVIKTNNYRRYILKDGTVDVCRACRHPGESLRHVISGCSALSNSEYLHRHNLVARILHQELALKYGLVDRKLPYYKYLPEAVLENDRARLYWDRAIITDRTILANKPDIVLMDRAQSRIFLVDITIPYDENLVKAETDKQTKYLDLAHEVTDMWGGLPTEIIPVVVSANGLIPVSLSGHLRRLGLRGGPLRAQMQKAVLLDTARIVRRFLSLSP

SEQ ID NO: 14302 - protein, 896 aa, Parnassius apollo
MAFAGTNVSLSQPDITQKLTERIDDLKQRIAAWGKRIRRYTERSTRFNQNRLFQSDQKRLYESLERPMVSGTGPAPNQADTVAFWRGLWSEPVNHSEGPWTEVVASQCAGITPMDPVIITPDDVAEAVRRAPNWKSPGLDGLHHYWLKGFMVCHSVLARQFQEALNQKSLPSLFTTGITHLVPKDQGTTDPSKYRPITCLPTIYKTLTSILSARITCHLDSNQLMSRAQNGCRGGGRGTKEPLLIDAVIGKVVKRNRRNFSAAWIDYRKAFDSVPHTWLKRVLELYKIDCTVRDFLEQFMWQWSTILCHLGKRMMAAENHIRIRRGIFQGDCLSPIWFCLSLNPLSTLLEGSGRGFQLRKGGTKVTHLFYMDDLKLFASSRSHLMELLNITCEFSNSIGMELGTDKCAVLHVERGRVANSEGVDLSMPVNLRTLSEAETYRYLGMSQNIGIDETGMKQSVCDVFYARLTKVLNSLLSGVNKAHAYNGWVMPVLMYTFGILRWTQTELNALDRKVRTTMTSHRMHHPRSSVMRLYLPRKHGGRGFLSALTMHNREVCSLRDYFLARSDDPFYKDVISCDKGLTPLSLANEQWQDPAVQSISDRETVWKEKELHGRFYKALHEPFVDTVASLHWLRFGDLFVETEGFVCAIQDQVIKTNNYRRYILKDGTVDICRACRHPGESLRHVISGCSALSNSEYLHRHNLVARILHQELALKYGLVDRKLPYYKYLPEAVLENDRARLYWDRAIITDRTILANKPDIVLMDRAQSRIFLVDITIPYDENLVKAETDKQTKYLDLAHEVTDMWGGLPTEIIPVVVSANGLIPVSLSGHLRRLGLRGGPLQVQMQKALLLDTARIVRRFLSLSPPNPRPFGLPCRGPPSGWAFIYLCTFIFILCY

SEQ ID NO: 14303 - protein, 1053 aa, Parnassius apollo
MSPNSNGYDVRLFPRRNENATAEDAAPQMIEPPANVDAAVNTPVVVDSNDDGTVAQELELEHMRSTLEEEIVETRSTPLENRPRLPRIALSKRNRAVVRALNPMLVTYLEASRDLCETDSILFGAALAVSRIIGAKVSTAGRATGHSSAIPAWRRRIEERIAKARALIGRLICFRSGNNRPRIVRTVRMAFAGTNVSLSQPDITQKLTERIDDLKQRIAAWGKRIRRYTERSTRFNQNRLFQSDQKRPYESLERPMVSGTGPAPNQADTVAFWRGLWSEPVNHSEGPWTEVVASQCAGITPMDPVIITPDDVAEAVRRAPNWKSPGLDGLHHYWLKGFMVCHSVLARQFQEALNQKSLPSLFTTGITHLVPKDQGTTDPSKYRPITCLPTIYKTLTSILSARITCHLDSNQVMSRAQNGCRGAGSGTKEPLLIDAVIGKVVKRNRRNFSAAWIDYRKAFDSVPHTWLKRVLELYKIDCTVRDFLEQCMGQWSTILCHLGERMMAAENHIRIRRGIFQGDCLSPIWFCLSLNPLSTLLEGSGRGFQLRKGGTKVTHLFYMDDLKLFASSRSHLMELLNITCEFSNSIGMELGTDKCAVLHVERGRVANPEGIDLSMPVNLRTLSEAETYRYLGMSQNIGIDEAGMKQSVCDVFYARLTKVLNSLLSGVNKTHAYNGWVMPVLIYTFGILGWTQTELNALDRKVRTTMTSHRMHHPRSSVMRLYLPRKHGGRGFMSALTMHNREVCSLRDYFLARSDDPFYNDVISSDKGLTPLSLAHEQWQDPAVLSISDRETVWKEKELHGRYYRALHEPFVDTVASLNWLRFGDLFGETEGFVCAIQDQVIKTNNYRRYILKDGTVDVCRACRHPGESLRHVISGCSALSNSEYLHRHNLVARILHQELALKYGLVDRKLPYYKYLPEAVLENDRARLYWDRAIITDRTILANKPDIVLMDRAQSRIFLVDITIPYDENLVKAETDKQTKYLDLAHEVTDMWGGLPTEIIPVVVSANGLIPVSLSGHLRRLGLRGGPLRAQIQKAVLLDTARIVRRFLSLSP

SEQ ID NO: 14304 - protein, 1189 aa, Parnassius apollo
MMDMIRKRIGPLPGGRRGASGAGAGRGSMRAASRARGAARSPSSPPHPSSPPDGLMSAGSSRTRQAASAAGGVRRMRWTRDMNANALRAYYRAKGEETKGIAYRARMHCFFAELEPSIPVTEQNLADRVRYIMRSKIFDDAELERLRREAIPSSNELATAGDAAPQATDQLPRVEAAMDLPVVVDSDDDEMVSHELEQMRSILEEAILETRTMPLENRPRLPRIPLSKRNRAVVRALNPMLVTYLEASRDLCETDSVLFGAAVAACRIIGAKLPLAGRATKQSSAIPAWRKRIEDRIAKARALIGRLISFRSGNNRPRVVRSVRMAFAGTKISLSQPDITQKLTERIDDLKQKIAAWGKRIRRFTEGSRRFNQNRLFQSDQKRLYKSLERPEVCGAGPGPDQANTVAFWRGLWSEPVNHSESSWTEVVASQCASITPMDPVIITPDDEAEAVRRAPNWESPGLDGLHHYWLKGFMVCHAVLARQFQEALNQKSLPSLFTTGITHLVPKDQVTTDPSKYRPITCLPTIYKTLTSILSARITRHLELNQVMSRAQNGCRGGGRGTKEPLLIDAVIGKVVKRNRRNFSAAWIDYRKAFDSVPHTWLKRVLELYKIDCTVRDFLEQCMGQWSTILCHLGERMMAAENHIRIRRGIFQGDCLSPIWFCLSLNPLSTLLEGSERGFQLRKGGAKVTHLFYMDDLKLFASSRSQLMELLNITCEFSNSIGMELGTDKCAVLHVERGRVANSEGIDLSMPVNLRTLSEAETYRYLGMSQNIGIDEAGMKQSVCDVFYARLTKVLNSLLSGVNKTHAYNGWVIPVLMYTFGILRWSQTELNALDRKVRTTMTSHRMHHPRSSVMRLYLPRKHGGRGFLSALTMHNREVCSLRHYFLARSDDPFYNDVISSDKGLTPLSLANEQWQDPAVLSISDREAVWKEKELHGRYYRALHEPFVDTVASLNWLRFGDLFGETEGFVCAIQDQVIKTNNYRRYILKDGTVDVCRACRHPGESLRHVISGCSALSNSEYLHRHNLVARILHQELALKYGLVDRKLPYYKYLPEAVLENDRARLYWDRAIITDRTILANKPDIVLMDRAQSRIFLVDITVPYDENLVKAETDKQSKYLDLAHEVTDMWGGVPTEIIPVVVSANGLIPVSLSDHLRRLGLRDGPLRAQMQKAVLLDTARIVRRFLSLSP

SEQ ID NO: 14305 - protein, 908 aa, Parnassius apollo
MAFAGTNVSLSQPDIMQKLTERIDDLKQRIAAWGKRIRRYTERSTRFNQNRLFQSDQKRLYKSLERPMVSGTGPVPNQADTVAFWRSLWSEPVNHNEGPWTEVVASQCAGITPMDPVTITPDDVAEAVRRAPNWKSPGLDGLHHYWLKGFVVCHTVLARQFQEVLNQKSLPSLFTTGITHLVPKGQSTTDPSKYRFITCLPTIYKTLTSILSARITRHLDSNQVMSRAQNGCRGGGRGTKEPLLIDAVIGKVVKRNRRNFSAAWIDYRKAFDSVPHTWLKRVLELYKIDCTVRDFLEQCMGQWSTILCHLGERMMAAENHIRIRRGIFQGDCLSPKWFCLSLNPLSTLLEGSGRGFQLRKGGTKVTHLFYMDDLKLFASSRSHLMELLNITCEFSNSIGMELGTDKCAVLHVERGRVANSEGIDLSMPVNLRTLSEAETYRYLGMSQNIGIDEAGMKKSVCDVFYARLTKVLNSLLSGVNKTQAYNGWVMPVLMYTFGILRWTQTELNALDRKVRTTMTSHRMHHPRSSVMRLYLPRKHGGRGFLSALTMHNREVCSLRNYFLARSDDPFYKDVISCDKGLTPLSLANEQCQDPAVQSIADRETVSKEKELHGRFYKSLHGPFVDTVASLHRLRFGDLFGETEGFVCAIQDQVIKTNNYRRYILKDGTVDICRACRHPGESLRHVISGCSALSNSEYLHRHNLVARILHQELALKYGLVDRKLPYYKYLPEAVLENDRARLYWDRAIITDRTILANKPDIVLMDRAQSRIFLVDITIPYDENLVKAEADKQTKYLDLAHEVTDMWGGLPTEIIPVVVSANGLIPVSLSGHLRRLGLRGGPLQGQMQKAVLLDTARIVRRFLSLFPLTLGRLVSPAEGFHLVGLLFIYVFSYLFYFIDIFVYLSFHFRL

SEQ ID NO: 14306 - protein, 1085 aa, Parnassius apollo
MHRLFAELEPSLTVTEQNLADRVRYILRSNIFDVAELERLRREAVPSSDENATAEDAAPQMVEQPANVDAAVNTPVVVDSNDDGTVAQELELEHMRSTLEEAIVETRSTPLENRPRLPRIALSKRNRAVVRALNPMLVTYLEASRDLCETDSILFGAALAVCRIIGAKVSTAGRATGHSSAIPAWRRRIEERIAKARALIGRLICFRSGNNRPRIVRTVRMAFAGTNVSLSQPDITQKLTERIDDLKQRIAAWGKRIRRYTERSTRFNQNRLFQSDQKRLYESLERPMVSGTGPAPNQADTVAFWRGLWSEPVNHSEGPWTEVVASQCAGITPMDPVIITPDDVAEAVRRAPNWKSPGLDGLHHYWLKGFMVCHSVLARQFQEALNQKSLPSLFTTGITHLVPKDQGTTDPSKYRPITCLPTIYKTLTSILSARITCHLDSNQVMSRAQNGCRGGGRGTKEPLLIDAVIGKVVKRNRRNFSAAWIDYRKAFDSVPHTWLKRVLELYKIDCTVRDFLEQCMGQWSTILCHLGERMMAAENHIRIRRGIFQGDCLSPIWFCLSLNPLSTLLEGSGRGFQLRRGGTKVTHLFYMDDLKLFASSRSHLMELLNITCEFSNSIGMELGTDKCAVLHVERGRVANSEGVDLSMPVNLRTLSEAETYRYLGMSQNIGIDETGMKQSVCDVFYARLTKVLNSLLSGVNKAHAYNGWVMPVLMYTFGILRWTPTELNALDRKVRTTMTSHRMHHPRSSVMRLYLSRKHGGRGFLSALTMHNREVCSLRDYFLARSDDPFYMDVISCDKGLTPLSLANEQWQDPAVQSISDRETVWKEKELHGRFYKALHEPFVDTVASLHWLRFGDLFGETEGFVCAIQDQVIKTNNYRRYILKDGTVDICRACRHPGESLRHVISGCSALSNSEYLHRHNLVARILHQELALKYGLVDRKLPYYKYLPEAVLENDRARLYWDRAIITDRTILANKPDIVLMDRAQSRIFLVDITIPYDENLVKAETDKQTKYLDLAHEVTDMWGGLPTEIIPVVVSANGLIPVSLSGHLRRLGLRGGPLQVQMQKAVLLDTARIVRRFLSLSP

SEQ ID NO: 14307 - protein, 1191 aa, Parnassius apollo
MMEHRRLRKGPLPGGRQGASGAGAGRDSMRTASRARGAARPPSSPSHPSSPPACLVSAGSSQAQQSAPATGGVRRMRWTINMNSNALRAYFRAKGGEIGGFAYRARMHRLFTELEPSITVTEQNLADRVRYILRSNIFDGAELERLRREAVPSSNENATTEGAVPQVAEQPAHVDAAENTPVVADSNDDGTFTQELEIEQMRSTLEEAIMETRSTPLENRPRLPRIALSKRNRAVVRALNPMLVTYLEASRDLCETDSILFGAALAVCRIIGAKLSTAGRTTGQSSAIPAWRTRIEERIAKARALIGRLICFRSGNTRPRIVRTVRMAFAGTNVSLSQPDIMQKLTERIDDLKQRIAAWGKRIRRYTERSTRFNQNRLFQSDQKRLYKSLERPMVSGTGPVPNQADTVAFWRSLWSEPVNHNEGPWTEVVASQCAGITPMDPVTITPDDVAEAVRRAPNWKSPGLDGLHHYWLKGFVVCHTVLARQFQEVLNQKSLPSLFTTGITHLVPKGQGTTDPSKYRPITCLPTIYKTLTSILSARITRHLDSNQVMSRAQNGCRGGGRGTKEPLLIDAVIGKVVKRNRRNFSAAWIDYRKAFDSVPHTWLKRVLELYKIDCTVRDFLEQCMGQWSTILCHLGERMMAAENHIRIRRGIFQGDCLSPIWFCLSLNPLSTLLEGSGRGFQLRKGGTKVTHLFYMDDLKLFASSRSHLMELLNITCEFSNSIGMELGTDKCAVLYVERDRVANSEGIDLSMPVNLRTLSEAETYRYLGMSQNIGIDEAGMKQSVCDVFYARLTKVLNSLLSGVNKTQAYNGWVMPVLMYTFGILRWTQTELNALDRKVRTTMTSHRMHHPRSSVMRLYLPRKHGGRGFLSALTMHNREVCSLRNYFLARSDDPFYKDVISCDKGLTPLSLANEQWQDPAVQTISDRETVWKEKELHGRFYKSLHGPFVDTVTSLHWLRFGDLFGETEGFVCAIQDQVIKTNNYRRYILKDGTIDICRACRHPGESLRHVISGCSALSNSEYLHRHNLVARILHQELALKYGFVDRKLPYYKYLPEAVLENDRARLYWDRAIITDRTILANKPDIVLMDRAQSRIFLVDITIPCDENLVKAETDKQTKYLDLAHEVTDMWGGLPTEIIPVVVSANGLIPVSLSGHLRRLGLRGGPLQAKMQKAVLLDTARIVRRFLSLSP

SEQ ID NO: 14308 - protein, 1191 aa, Parnassius apollo
MMEEIQKGTRIGPLPGGRRGASGAGAGRGSMRAASRARGAARSPSSPSHPSSPPEGLVSAGSSRTQQAAPAAGGARRMRWTKSMNENALRAYYRAKGKETVGIAYRSRMHCFFAELEPSIPVTEQNLADRVRYIMRSKIFDDAELERLRREAIPSSNESAMAGDAAPHSTDQHPQVEAAMDLPVVVDSNDDEIVSHELEQMRSILEEAILETRSTPLENRPRLPRIPLSKRNRAVVRALNPMLVTYLEASRDLCETDSILFGAAVAVCRIIGAKLPMAGRATTQSNAIPAWRKRIEDRIAKARALIGRLTSFRSGNNRPRIMRTVRMAFAGTNISLSQPDITQKLTERIDDLKQKIAAWGKRIRRFSAGSRRFNQNRLFQSDQKRLYKLLERPKVCGAGQGPDQADIIAFWRGLWSEPVNHSEGPWMEVVASQGASVTPMDPITITPEDVAEAVRRAPNWKSPGLDGLHHYWLKGFVVCHAVLARQFQEAFNQKSLPSLFTTGITHLVPKDQDTTDPSKYRPITCLPTIYKTLTSILSARITRHLELNQVMSRAQNGCRGGGRGTKEPLLIDAVIGKVVKRNRRNFSAAWIDYRKAFDSVPHTWLKRVLELYKIDCTVRDFFEQCMGQWSTILCHLGERMTAAENHIRIRRGIFQGDCLSPIWFCLSLNPLSTLLEGSGRGFQLRKGGTKVTHLFYMDDLRLFASSRSHLMELLNITCEFSSSIGMELGTDKCAVLHVERGRVANSEGIDLSMPVNLRTLSEAETYRYLGMSQNIGIDEAGMKQSVCDVFYARLTKVLNSLLSGVNKTHAYNGWVMPVLMYTFGILGWTQTELNALDRKVRTTMTSHRMHHPRSSVMRLYLPRKYGGRGFLSALTMHNREVCSLRQYFLARSDDPFYNDVISSDKGLTPLSLANEQWQDPAVLSNSDRETVWKEKELHGRYYKALHEPFVDTVASLNWLRFGDLFGETEGFVCAIQDQVIKTNNYRRYILKDGTVDVCRACRHPGESLRHVISGCSALSNSEYLHRHNLVARILHQELALKYGLVDRKLPYYKYLPEAVLENDRARLYWDRAIITDRTILANKPDIVLMDRAQSRIFLVDITIPYDENLVRAETDKQSKYLDLAHEVTDMWGGLPAEIIPVVVSANGLIPVSLSGHLRRLGLRDGPLRAQMQKAVLLDTARIVRRFLSLSS

SEQ ID NO: 14309 - protein, 1051 aa, Parnassius apollo
MSPNSNGYDVRLFPRRNENATAEDAAPQMIEPPANVDAAVNTPVVVDSNDDGTVAQELELEHMRSTLEEEIVETLSTPLENRPRLPRIALSKRNRAVVRALNPMLVTYLEASRDLCETDSILFGAALAVSRIIGAKVSTAGRATGHSSAIPAWRRRIEERIARARALIGRLICFRSGNNRPRIVRTVRMAFAGTNVSLSQPDITQKLTERIDDLKQRIAAWGKRIRRYTERSTRFNQNRLFQSDQKRPYESLERPMVSGTGPAPNQADTVAFWRGLWSEPVNHSEGPWTEVVASQCAGITPMDPVIITPDDVAEAVRRAPNWKSPGLDGLHHYWLKRFMVCHSVLARQFQEALNQKSLPSLFTTGITHLVPKDQGTTDPSKYRPITCLSTIYKTLTSILSARITCHLDSNQVMSRAQNGCRGAGSGTKEPLLIDAVIGKVVKRNRRNFSAAWIDYRKAFDSVPHTWLKRVLELYKIDCTVRDFLEQCMGQWSTILCHLGERMMAAENHKRIRRGIFQGDCLSPIWFCLSLNPLSTLLEGSGRGFQLRKGGTKVTHLFYMDDLKLFASSRSHLMELLNITCEFSNSIGMELGTDKCAVLHVERGKVVNSEGVDFSMPVNLRTLFEAETYRYLGMSQNIGIDETGMKQSVCDVFYARLTKVLNSLLSGVNKAHAYNGWVMPVLMYTFGILRWTQTALNALDRKVRTTMTSHRMHHPRSSVMRLYLSRKHGGRGFLSALTMHNREVCSLRDYFLARSDDPFYKDVISCNKGLTPLSLANEQWQDPAVQSISDRETVWKEKELHGRFYKALHEPFVDTVASLHWLRFGDPFGETEGFVCAIQDQVIKTNNYRRYILKDGTVDICRACRHPGESLRHVISGCSALSNSEYLYRHNLVARILHQELALKYGLVDRKLPYYKYLPEAVLENDRARLYWDRAIITDRTILANKPDIVLMDRAQSRIFLVDITIPYDEILVKAETDKQTKYLDLAHEVTDMWGGLPTEIIPVVVSTNGLIPVNLSCQPLQAQMQKAVLLDTSSAGFFPFPPNPRPFGLPC

SEQ ID NO: 14310 - protein, 1085 aa, Parnassius apollo
MHRLFTELEPSITVTEQNLADRVRYILRSNIFDGAELERLRREAVPSSNENAKTGGVVPQVAEQPAHVDAAENTPVVADSNDDGTFTQELEIEQMRSTLEEAIMETRSTPLENRPRLPRIALSKRNRAVVRALNPMLVTYLEASRDLCETDSILFGAALAVCRIIGAKLFTAGRTTGQSSAIPAWTTRIEERIAKARALIGRLICFRSGNTRPRIVRTVRMAFAGTNVSLSQPDIMQKLMERIDDLKQRIAAWGKRIRRYTERSTRFNQNRLFQSDQKRLYKSLERPMVSGTGPVPNQADTVAFWRSLWSEPVNHNEGPWTEVVASQCAGITPMDPVTITPDDVAEAVRRAPNWKSPGLDGLHHYWLKGFVVCHTVLARQFQEVLNQKSLPSLFTTGITHLVPKNQGTTDPSKYRPITCLPTIYKTLTSILSARITRHLDSNQVMSRAQNGCRGGGRGTKEPLLIDAVIGKVVKRNRRNFVAAWIDYRKAFDSVPHTWLKRVLELYKIDCTVRDFLEQCMGQWSTILCHLGERMMAAENHIRIRRGIFQGDCLSPIWFCLSLNPLSTLLEGSGRGFQLRKGGTKVTHLFYMDDLKLFASSRSHLMELLNITCEFSNSIGMELGTDKCAVLHVERGRVANSEGIDLSMPVNLGTLSEAETYRYLGMSQNIGIDEAGMKQSVCDVFYARLTKVLNSLLSVVNKTQAYNGWVMPVLMYTFGILRWTQTELNALDRKVRTTMTSHRMHHPRSSVMRLYLPRKHGGRGFLSALTMHNREVCSLRNYFLARSDDPFYKDVISCDKGLPPLSLANEQWQDPAVQTISDRETVWKEKELHRRFYKSLHGPFVDTVTSLHWLRFGDLFGETEGFVCAIQDQVIKTNNYRRYILKDGTIDICRACRHPGESLRHVISGCSALSNSEYLHRHNLVARILHQELALKYGFVDRKLPYYKYLPEAVLENDRARLYWDRAIITDRTILANKPDIVLMDRAQSRIFLVDITIPCDENLVKAETDKQTKYLDLAHEVADMWGGLPNEIIPVVVSANGLIPVSLSGHLRRLGLRGGPLQAQMQKAVLLDTARIVRRFLSLSP

SEQ ID NO: 14311 - protein, 1020 aa, Parnassius apollo
MPLENLPRLPRIPLSKRNRAVVRALNPMLVTYLEASRDLCETDSILFGAALAVCRIIGAKLPVAGRATQKSSAIPAWRKRIEDRIAKARALIGRLTSFRSGNNRPRIMRTVRMAFAGTNISLFQPDITQKLTERIDDLKQKIAAWGKRIRRFSERSRRFNQNRLYQSDQKRLYKSLERPEVCGAGPGPDQADTVAFWRGLWSEPVNHSEGPWMEVVASQSASVTPMDPVTITPEDVAEAVRRAPNWKSPGLDGLHHYWLKGFVVCHAVLARQFQEDLDQKSLSSLFTTGITHLVPKDQDTTDPSKYRPITCLPTIYKTLTSILSARITRHLELNQVMSRAQNGCRGGGRGTKEPLLIDAVIGKVVKRNRRNFSAAWIDYRKAFDSVPHTWLKRVLQLYKIDCTVGEFLEQCMGSWSTILCYLGERMMAAENHIRIRRGIFQGDCLSPIWFCLSLNPLSTLLEGSGRGFQLRKGGTKVTHLFYMDDLKLFASSRSHLMELLNITCEFSNSIGMELGTDKCAVLHVERGRVANSEGIDLSMPVNLRTLSEAETYRYLGMSQNIGIDEAGMKQSVCDVFYARLTKVLNSLLSGVNKTHAYNGWVMPVLMYTFGILRWTQTELNALDRKVRTTMTSHRMHHPRSSVMRLYLPRKHGGRGFLSALTMHNREVCSLRNYFLARSDDPFYKDVISSDKGLTPLSLANEQWQDPAVQTISDRENVWKEKELHGRFYKALHEPFVDTVASLHWLRFGDLFGETEGFVCAIQDQVIKTNNYRRYILKDGTVNICRAYRHPGESLRHVISGCSALSNSEYLHRHNLVARILHQELALKYGLVDRKLPYYKYLPEAVLENDRARLYWDRAIITDRTILANKPDIVLMDRAQSRIFLVDITIPYDENLVKAETDKQTKYLGLAHEVTDMWGGLPTEIIPVVVSANGLIPVSLSGHLRRLGLRGRPLRAQMQKAVLLDTARIVRRFLSLSPLTLGRLVSPAEGLHLVGLLFIYVFLYLFYVIDIYVYLSFHFHL

SEQ ID NO: 14312 - protein, 865 aa, Parnassius apollo
MAFAGTNVSLSQPDITQKLTERIDDLKQRIAAWGKRIRRYTERSTRFNQNRLFQSDQKRLYESLERPMVSGTGPAPNQADTVAFWRGLWSEPVNHSEGPWTEVVASQCAGITPMDPVIITPDDVAEAVRKAPNWKSPGLDGLHHYWLKGFMVCHSVLARQFQEALNQKSLPSLFTTGITHLVPKDQGTTDPSKYRPITCLPTIYKTLTSILSARITCHLDSNQVMSRAQNGCRGGGRGTKEPLLIDAVIGKVVKRNRRNFSAAWIDYRKAFDSVPHTWLKRVLELYKIDCTVRDFLEQCMGQWSTILCHLGERMMAAENHIRIRRGIFQGDCLSPIWFCLSLNPLSTLLEGSGRGFQLRKGGTKVTHLFYMDDLKLFASSRSHLMELLNITCEFSNSIGMELGTDKCAVLHVERGRVANSEGVDLSMPVNLRTLSEAETYRYLGMSQNIGIDETGMKQSVCDVFYARLTKVLNSLLSGVNKAHAYNGWVMPVLMYTFGILRWTQTELNALDRKVRTTMTSHRMHHPRSSVMRLYLPRKHGGRGFLSALTMHNREVCSLRDYFLARSDDPFYKDVISCDKGLTPLSLANEQWQDPAVQSISDRETVWKEKELHGRFYKALHEPFVDTVASLHWLRFGDLFGETEGFVCAIQDQVIKTNNYRRYILKDGTVDICRACRHPGESLRHVISGCSALSNSEYLHRHNLVARILHQELALKYGLVDRKLPYYKYLPEAVLENDRARLYWDRAIITDRTILANKPDIVLMDRAQSRIFLVDITIPYDENLVKAETDKQTKYLDLAHEVTDMWGGLPTEIIPVVVSANGLIPVSLSGHLRRLGLRGGPLQVQMQKAVLLDTARIVRRFLSLSP

SEQ ID NO: 14313 - protein, 950 aa, Parnassius apollo
MLVTYLEASRDLCETDSILFGAALAVCRIIGAKVSTAGRATGHSSAIPAWRRRIEERIAKARALIGRLICFRSGNNRPRIVRTVRMAFAGTNVSLSQPDITQKLTERIDDLKQRIAAWGKRIRRYTERSTRFNQNRLFQSDQKRLYESLERPMVSGTGPAPNQADTVAFWRGLWSEPVNHSEGPWTEVVASQCAGITPMDPVIITPDDVAEAVRRAPNWKSPGLDGLHHYWLKGFMVCHSVLARQFQEALNQKSLPSLFTTGITHLVPKDQGTTDPSKYRPITCLPTIYKTLTSILSARITCHLDSNQVMSRAQNGCRGGGRGTKEPLLIDAVIGKVVKRNRRNFSAAWIDYRKAFDSVPHTWLKRVLELYKIDCTVRDFLEQCMGQWSTILCHLGERMMAAENHIRIRRGIFQGDCLSPIWFCLSLNPLSTLLEGSGRGFQLRRGGTKVTHLFYMDDLKLFASSRSHLMELLNITCEFSNSIGMELGTDKCAVLHVERGRVANSEGVDLSMPVNLRTLSEAETYRYLGMSQNIGIDETGMKQSVCDVFYARLTKVLNSLLSGVNKAHAYNGWVMPVLMYTFGILRWTQTELNALDRKVRTTMTSHRMHHPRSSVMRLYLSRKHGGRGFLSALTMHNREVCSLRDYFLARSDDPFYKDVISCDKGLTPLSLANEQWQDPAVQSISDRETVWKEKELHGRFYKALHEPFVDTVASLHWLRFGDLFGETEGFVCAIQDQVIKTNNYRRYILKDGTVDICRACRHPGESLRHVISGCSALSNSEYLHRHNLVARILHQELALKYGLVDRKLPYYKYLPEAVLENDRARLYWDRAIITDRTILANKPDIVLMDRAQSRIFLVDITIPYDENLVKAETDKQTKYLDLAHEVTDMWGGLPTEIIPVVVSANGLIPVSLSGHLRRLGLRGGPLQVQMQKAVLLDTARIVRRFLSLSP

SEQ ID NO: 14314 - protein, 1191 aa, Parnassius apollo
MMEEIQKGTRIGPLPGGRRGASGAGAGRGSMRAASRARGAARSPSSPSHPSSPPEGLVSAGSSRTQQAAPAAGGARRMRWTKSMNENALRAYYRAKGEETVGIAYRSRMHCFFAELEPSIPVTEQNLADRVRYIMRSKIFDDAELERLRREAIPSSNESAMAGDAAPHSTDQHPHVEAAMDLPVVVDSNDDEIVSHELEQMRSILEEAILETRSTPLENRPRLPRIPLSKRNRAVVRALNPMLVTYLEASRDLCETDSILFGAAVAVCRIIGAKLPMAGRATTQSNAIPAWRKRIEDRIAKARALIGRLTSFRSGNNRPRIMRTVRMAFAGTNISLSQPDITQKLTERIDDLKQKIAAWGKRIRRFSEGSRRFNQNRLFQSDQKRLYKLLERPKVCGAGQGPDQADIIAFWRGLWSEPVNHSEGPWMEVVASQGASVTPMDPITITPEDVAEAVRRAPNWKSPGLDGLHHYWLKGFVVCHAVLARQFQEALDQKSLPSLFTTGITHLVPKDQDTTDPSKYRPITCLPTIYKTLTSILSARITRHLELNQVMSRAQNGCRGRGRGTKEPLLIDAVIGKVVKRNRRNFSAAWIDYRKAFDSVPHTWLKRVLELYKIDCTVRDFLEQCMGQWSTILCHLGERMTAAENHIRIRRGIFQGDCLSPIWFCLSLNPLSTLLEGSGRGFQLRKGGTKVTHLFYMDDLKLFASSRSHLMELLNITCEFSSSIGMELGTDKCAVLHVERGRVANSEGIDLSMPVNLRTLSEAETYRYLGMSQNIGIDEAGMKQSVCDVFYARLTKVLNSLLSGVNKTHAYNGWVMPVLMYTFGILRWTQTELNALDRKVRTTMTSHRMHHPRSSVMRLYLPRKYGGRGFLSALTMHNREVCSLRQYFLARSDDPFYNDVISSDKGLTPLSLANEQWQDPAVLSNSDRETVWKEKELHGRYYKALHEPFVDTVASLNWLRFGDLFGETEGFVCAIQDQVIKTNNYRRYILKDGTVDVCRACRHPGESLRHVISGCSALSNSEYLHRHNLVARILHQELALKYGLVDRKLPYYKYLPEAVLENDRARLYWDRAIITDRTILANKPDIVLMDRAQSRIFLVDITIPYDENLVRAETDKQSKYLDLAHEVTDMWGGLPAEIIPVVVSANGLIPVSLSGHLRRLGLRDGPLRAQMQKAVLLDTARIVRRFLSLSP

SEQ ID NO: 14315 - protein, 915 aa, Parnassius apollo
MAGRATTQSNAIPAWRKRIEDRIAKARALIGRLTSFRSGNNRPRIMRTVRMAFAGTNISLSQPDITQKLTERIDDLKQKIAAWGKRIRRFSEGSRRFNQNRLFQSDQKRLYKLLERPKVCGAGQGPDQADIIAFWRGLWSEPVNHSEGPWMEVVASQGASVTPMDPITITPEDVAEAVRRAPNWKSPGLDGLHHYWLKGFVVCHAVLARQFQEALDQKSLPSLFTTGITHLVPKDQDTTDPSKYRPITCLPTIYKTLTSILSARITRHLELNQVMSCAQNGCRGGGRGTKEPLLIDAVIGKVVKRNRRNFSAAWIDYRKAFDSVPHTWLKRVLELYKIDCTVRDFLEQCMGQWSTILCHLGERMTAAENHIRIRRGIFQGDCLSPIWFCLSLNPLSTLLEGSGRGFQLRKGGTKVTHLFYMDDLKLFASSRSHLKELLNITCEFSSSIGMELGTDKCAVLHVERGRVANSEGIDLSMPVNLRTLSEAETYRYLGMSQNIGIDEAGVKQSVCDVFYARLTKVLNSLLSGVNKTHAYNGWVMPVLMYTFGILRWTQTELNALDRKVRTTMTSHRMHHPRSSVMRLYLPRKYGGRGFLSALTMHNREVCSLRQYFLARSDDPFYNDVISSDKGLTPRSLANEQWQDPAVLSNSDRETVWKEKELHGRYYKALHEPFVDTVASLNWLRFGDLFGETEGFVCAIQDQVIKTNNYRRYILKDGTVDVCRACRHPGESLRHVISGCSALSNSEYLHRHNLVARILHQELALKYGLVDRKLPYYKYLPEAVLENDRARLYWDRAIITDRTILANKPDIVLMDRAQSRIFLVDITIPYDENLVRAETDKQSKYLDLAHEVTDMWGGLPAEIIPVVVSANGLIPVSLSGHLRRLGLRDGPLRAQMQKAVLLDTARIVRRFLSLSS

SEQ ID NO: 14316 - protein, 991 aa, Parnassius apollo
MRSTLEEAIMETRSTPLENRPRLPRIALSKRNRAVVRALNPMLVTYLEASRDLCETDSILFGAALAVCRIIGAKLSTAGRTTGQSSAIPAWRTRIEERIAKARALIGRLICFRSGNTRPRIVRTVRMAFAGTNVSLSQPDIMQKLTERIDDLKQRIAAWGKRIRRYTERSTRFNQNRLFQSDQKRLYKSLERPMVSGTGPVPNQADTVAFWRSLWSEPVNHNEGPWTEVVASQCAGITPMDPVTITPGDVAEAVRRAPNWKSPGLDGLHHYWLKGFVVCHTVLARQFQEVLNQKSLPSLFTTGITHLVPKGQSTTDPSKYRPITCLPTIYKTLTSILSARITRHLDSNQVMSRAQNGCRGGGRGTKEPLLIDAVIGKVVKRNRRNFSAAWIDYRKAFDSVPHTWLKRVLELYKIDCTVRDFLEQCMGQWSTILCHLGERMMAAENHIRIRRGIFQGDCLSPIWFCLSLNPLSTLLEGSGRGFQLRKGGTKVTHLFYMDDLKLFASSRSHLMELLNITCEFSNSIGMELGTDKCAVLHVERGRVANSEGIDLSMPVNLRTLSEAETYRYLDMSQNIGIDEAGMKQSVCDVFYARLTKVLNSLLSGVNKTQAYNGWVIPVLMYTFGILRWTQTELNALDRKVRTTMTSHRMHHPRSSVMRLYLPRKHGGRGFLSALTMHNREVCSLRNYFLARSDDPFYMDVISCDKGLTPLSLANEQWQDPAVQTISDRETVWKEKELHGRFYKSLHGPFVDTVTSLHWLRFGDLFGETEGFVCAIQDQVIKTNNYRRYILKDGTIDICRACRHPGESLRHVISGCSALSNSEYLHRHNLVARILHQELALKYGFVDRKLPYYKYLPEAVLENDRARLYWDRAIITDRTILANKPDIVLMDRAQSRIFLVDITIPCDENLVKAETDKQTKYLDLAHEVTDMWGGLPTEIIPVVVSANGLIPVSLSGHLRRLGLRGGPLQAQMQKAVLLDTARIVRRFLSLSP

SEQ ID NO: 14317 - protein, 950 aa, Parnassius apollo
MLVTYLEASRDLCETDSILFGAALAVCRIIGAKVSTAGRATGHSSAIPAWRRRIEERIAKARALIGRLICFRSGNNRPRIVRTVRMAFAGTNVSLSQPDITQKLTERIDDLKQRIAAWGKRIRRYTERSTRFNQNRLFQSDQKRLYESLERPMVSGTGPAPNQADTVAFWRGLWSEPVNHSEGPWTEVVASQCAGITPMDPVIITPDDVAEAVRRAPNWKSPGLDGLHHYWLKGFMVCHSVLARQFQEALNQKSLPSLFTTGITHLVPKDQGTTDPSKYRPITCLPTIYKTLTSILSARITCHLDSNQVMSRAQNGCRGGGRGTKEPLLIDAVIGKVVKRNRRNFSAAWIDYRKAFDSVPHTWLKRVLELYKIDCTVRDFLEQCMGQWSTILCHLGERMMAAENHIRIRRGIFQGDCLSPIWFCLSLNPLSTLLEGSGRGFQLRKGGTKVTHLFYMDDLKLFASSRFHLMELLNITCEFSNSIGMELGTDKCAVLHVERGRVANSEGVDLSMPVNLRTLSEAETYRYLGMSQNIGIDETGMKQSVCDVFYARLTKVLNSLLSGVNKAHAYNGWVMPVLMYTFGILRWTQTELNALDRKVRTTMTSHRMHHPRSSVMRLYLPRKHGGRGFLSALTMHNREVCSLRDYFLARSDDPFYKDVISCDKGLTPLSLANEQWQDPAVQSISDRETVWKEKELHGRFYKALHEPFVDTVASLHWLRFGDLFGETEGFVCAIQDQVIKTNNYRRYILKDGTVDICRACRHPGESLRHVISGCSALSNSEYLHRHNLVARILHQELALKYGLVDRKLPYYKYFPEAVLENDRARLYWDRAIITDRTILANKPDIVLMDRAQSRIFLVDITIPYDENLVKAETDKQTKYLDLAHEVTDMWGGLPTEIIPVVVSANGLIPVSLSGHLRRLGLRGGPLQVQMQKAVLLDTARIVRRFLSLSP

SEQ ID NO: 14318 - protein, 1191 aa, Parnassius apollo
MMESNGTRKGPLPGDRQGASGAGAGRDSMRTASRARGAARPPSRSSHPSSPPAGLVLAGSSRAQQSAPATGGVRRMRWTTQMNSNALRAYFRAKGGETGGFAYRARMHRLFAELEPSVTVTEQNLADRVRYILRSNTFDVSEHERLRREAVPSSGENAAAEDAAPQLAEQTANVNHAVNTPVVVDSNDDGTVAQELELEQMRSTLEEAIVETRSTSLENRPRLPRLALSKQNRAVVRALNPMLVTYLEASRDLCDTDSILFGAALAVCRIIGAKLSTAGRATGQSSAIPAWRIRIEERIAKARALIGRLICFRSGNTRPRIVRTVRMAFAGTNVSLSQPDIMQKLTERIDDLKQRIAAWGKRIRRYTERSTRFNQNRLFQSDQKRLYKSLERPIVSGTGPAPNQADMVAFWRSLWSEPVNHNEGPWTEVVVSQCASITPMDPVIITPDDVAEAVRRAPNWKSPGLDGLHHYCLKGFMVCHSVLARQFQEALNQKSLPSLFTTGITHLVPKDQGATDPSKYRPITCLPTIYKTLTSILSARIARHLDLNQVMSRAQNGCRGGGRGTKEPLLIDAVIGKVVKRNRRNFSAAWIDYRKAFDSVPHTWLKRVLELYKIDCTVRDFLEQYMGQWSTILCHLGERMTAAESRIRIRRGIFQGDCLSPIWFCLSLNPLSTLLEGSGRGFQLRKGGTKVTHLFYMDDLKLFASSRSHLVQLLNITCVFSNSIRMELGTDKCAVLHVERGRVANSEGIDLSLPVNLRTLSEAETYRYLGMSQNIGIDEAGMKQSVCDVFYARLTKVLNSLLSGVNKAHAYNGWVMPVLMYTFGILRWTQTELNALARKVRTTMTSHRMHHPRSSVMRLYLPRKHGGRGFLSALTMHNREVCSLRDYFLARSDDPFYKDVISCDKGLTPLSLANEQWQDPAVQSISDRETVWKEKELHGRFYKALHEPFVDTVASLHWLRFGDLFGETEGFVCAIQDQVIKTNNYRRYILKDGTVDICRACRHPGESLRHVISGCSALSNSEYLHRHNLVARILHQELALKYGLVERKLPYYKYLPEAVLENDRARLYWDRAIITDRTILANKPDIVLMDRAQSRIFLVDITIPYDESLVKAETDKQTKYLDLAHEVTDMWGGLPTEIIPVVVSANGLIPVSLSGHLRRLGLRGGPLQVQMQKAVLLDTARIVRRFLSLSP

SEQ ID NO: 14319 - protein, 865 aa, Jemadia pseudognetus
MAFAGTNISLSQPDITQKLTERIDDLKQRIAAWGKRIRRYTERSTRFNQNRLFQSDQKRLYESLERPMVRGTGPAPNQADTIAFWRGLWSEPVNHSEGPWTEVVASQCANVTPMDPVIITPDDVAEAVRRAPNWKSPGLDGLHHYWLKGFVVCHAVLARQFQEALDQKSLPSLFTTGITHLVPKDRDSTDPSKYRPITCLPTIYKTLTSILSARITRHLNSNQVMSRAQNGCRGGGRGTKEPLLIDAVIGKVVKRNRRNLSAAWIDYKKAFDSVPHTWLKRVLELYKVDCTVRDFLGQCMGQWSTILCHLGERMMAAENHIRIRRGIFQGDCLSPIWFCLSLNPLSTLLEGSGRGFQLRRGGTKVTHLFYMDDLKLFASSRSHLMELLNITCDFSNSIRMELGTDKCAILHVERGRVANSEGIDLSMPINIKTLSEAETYRYLGMSQNIGVDEAGMKQSVCDVFYARLTKVLNSLLSGVNKTHAYNGWIMPVLMYTFGILRWTQTELNALDRKVRTIMTSHRVHHPRSSVMRLYLPRKHGGRGFLSALTMHNREVCSLRNYFLTRADDPYYRDVISCDKGLTPLSLANEQWQDPAVQSISDRETVWKEKELHGRFYKALHEPFVDTVASLHWLRFGDLFGETEGFVCAIQDQVIKTNNYRRYILKDGTVDICRACRHPGESLRHVISGCSALSNSEYLHRHNLVARILHQELALKYGLVDRKLPYYKYLPEAVLENDRARLYWDRAIITDRTILANKPDIVLMDRAQSRIFLVDITIPYDENLVKAETDKLTKYLDLAHEVTDMWGGLPTEIIPVVVSANGLIPVSLSGHLRRLGLRDGPLQAQMQKAVLLDTARIVRRFLSLSP

SEQ ID NO: 14320 - protein, 991 aa, Parnassius apollo
MRSILEESMLETRSMPLENRPRLPRIPLSKRNRAVVRALNPMLVTYLEASRDLCETDSILFGAALAVCRIIGAKLPMAGRATQQGSAIPAWRKRIEDRIAKARALIGRLTSFRSGNIRPRVVRTVRMAFAGTNISLSQPDITQKLTERIDDLKQKIAAWGKRIRRFSERSRRFNQNRLFQSDQKRLYKSLERPEVCGAGPGPDQADTVAFWRGLWSEPVNHSEGPWMEVVASQSASVTPMDPVTITPEDVAEAVRRAPNWKSPGLDGLHHYWLKGFVVCHAVLARQYQEALDQKSLPSLFTTGITHLVPKDQDTTDPSKYRPITCLPTIYKTLTSILSARITRHLELNQVMSRAQNGCRGGGRGTKEPLLIDAVIGKVVKRNRRNFSAAWIDYRKAFDSVPHAWLKRVLELYKIDCTVRDFLEQCMGQWSTILCYQGERMMAAENHIRIRRGIFQGDCLSPIWFCLSLNPLSTLLEGSGRGFQLRKGGTKVTHLFYMDDLKLFASSRSHLMELLNITCEFSNSIGMELGTDKCAVLHVERGRVANSEGIDLSMPVNLTTLSEAETYRYLGMSQNIGIDEAGMKQSVCDVFYARLTKVLNSLLSGVNKTHAYNGWVMPVLIYTFGILRWTQTELNALDRKVRTTMTSHRMHHPRSSVMRLYLPRKHGGRGFLSALTMHNREVCSLRDYFLARSDDPFYNDVISSDKGLTPLSLAHEQWQDPAVLSISDRETVWKEKELHGRYYRALHEPFVDTVASLNWLRFGDLFGETEGFVCAIQDQVIKTNNYRRYILKDGTVDVCRACRHPGESLRHVISGCSALSNSEYLHRHNLVARILHQELALKYGLVDRKLPYYKYLPEAVLENDRARLYWDRAIITDRTILANKPDIVLMDRAQSRIFLVDITIPYDENLVKAETDKKTKYLDLAHEVTDMWGGLPTEIIPVVVSANGLIPVSLSGHLRRLGLRGGPLRAQMQKAVLLDTARIVRRFLSLSP

SEQ ID NO: 14321 - protein, 1222 aa, Parnassius apollo
MMDKKIVRKRPLPGGRRGASGAGAGRGSMRAASRARGAARSSTSPPHPSSPPEGLVSAGSSRTQQAAPAAGGARRMRWSQEMNANALRAYFRAKGEETGCLAYRARMHRLFAELEPSLIVTEQNLADRVRYILRSNIFDVAELERLRREAVPSSDENATAEDAAPQMVEQPANVDAAVNTPVVVDSNDDGTVAQELELEHMRSILEEAIVETRSTPLENRPRLPRIALSKRNRAVVRALNPMLVTYLEASRDLCETDSILFGAALAVCRIIGAKVSTAGRATGHSSAIPAWRRRIEERIAKARALIGRLICFRSGNNRPRIVRTVRMAFAGTNVSLSQPDITQKLTERIDDLKQRIAAWGKRIRRYTERSTRFNQNRLFQSDQKRLYESLERPMVSGTGPAPDQADTVAFWRGLWSEPVNHSEGPWTEVVASQCAGITPMDPVIITPDDVAEAVRRAPNWKSPGLDGLHHYWLKGFMVCHSVLARQFQEALNQKSLPSLFTTGITHLVPKDQGTTDPSKYRPITCLPTIYKTLTSISSARITCHLDSNQVMSRAQNGCRGGGRGTKEPLLIDAVIGKVVKRNRRNFSAAWIDYRKAFDSVPHTWLKRVLELYKIDCTVRDFLEQCMGQWSTILCHLGERMMAAENHIRIRRGIFQGDCLSPIWFCLSLNPLSTLLEGSGRGFQLRKGGTKVTHLFYMDDLKLFASSRSHLMELLNITCEFSNSIGMELGTDKCAVLHVERGRVANSEGVDLSMPVNLRTLSEAETYRYLGMSQNIGIDETGMKQSVCDVFYARLTKVLNSLLSGVNKAHAYNGWVMPVLMYTFGILRWTQTELNALDRKVRTTMTSHRMHHPRSSVMRLYLPRKHGGRGFLSALTMHNREVCSLRDYFLARSDDPFYKDVISCDKGLTPLSLANEQWQDPAVQSISDRETVWKEKELHGRFYKALHEPFVDTVASLHWLRFGDLFGETEGFVCAIQDQVIKTNNYRRYILKDGTVDICRACRHPGESLRHVISGCSALSNSEYLHRHNLVARILHQELALKYGLVDRKLPYYKYLPEAVLENDRARLYWDRAIITDRTILANKPDIVLMDRAQSRIFLVDITIPYDENLVKAETDKQTKYLDLAHEVTDMWGGLPTEIIPVVVSANGLIPVSLSGHLRRLGLRGGPLQVQMQKAVLLDTARIVRRFLSLSPLTLGRLVSPCRGPPSGWAFIYLCTFIFILCY

SEQ ID NO: 14322 - protein, 991 aa, Parnassius apollo
MRSTLEEAIMETRSTPLENRPRLPRIALSKRNRAVVRALNPMLVTYLEASRDLCETDSILFGAALAVCRIIGAKLSTAGRTTGQSSAIPAWRTRIEERIAKARALIGRLICFRSGNTRPRIVRTVRMAFAGTNVSLSQPDIMQKLTERIDDLKQGIAAWGKRIRRYTERSTRFNQNRLFQSDQKRLYKSLERPMVSGTGPVPNQADTVAFWRSLWSEPVNHNEGPWTEVVASQCAGITPMDPVTITPDDVAEAVRRAPNWKSPGLDGLHHYWLKGFVVCHTVLARQFQEVLNQKSLPSLFTTGITHLVPKGQSTTDPSKYRPITCLPTLYKTLTSILSARITRHLDSNQVMSRAQNGCRGGGRGTKEPLLIDAVIGKVVKRNRRNFSAAWIDYRKAFDSVPHTWLKRVLELYKIDCTVRDFLEQCMGQWSTILCHLGERMMAAENHIRIRRGIFQGDCLSPKWFCLSLNPLSTLLEGSGRGFQLRKGGTKVTHLFYMDDLKLFASSRSHLMELLNITCEFSNSIGMELGTDKCAVLHVERGRVANSEGIDLSMPVNLRTLSEAETYRYLGMSQNIGIDEAGMKQSVCDVFYARLTKVLNSLLSGVNKTQAYNGWVMPVLMYTFGILRWTQTELNALDRKVRTTMTSHRMHHPRSSVMRLYLPRKHGGRGFLSALTMHNREVCSLRNYFLARSDDPFYKDVISCDKGLTPLSLANEQWQDPAVQTISDRETVWKEKELHGRFYKSLHGPFVDTVTSLHWLRFSDLFGETEGFVCAIQDQVIKTNNYRRYILKDGTIDICRACRHPGESLRHVISGCSALSNSEYLHRHNLVARILHQELALKYGFVDRKLPYYKYLPEAVLENDRARLYWDRAIITDRTILANKPDIVLMDRAQSRIFLVDITIPCDENLVKAETDKQTKYLDLAHEVTDMWGGLPTEIIPVVVSANGLIPVSLSGHLRRLGLRGGPLQAQMQKAVLLDTARIVRRFLSLSP

SEQ ID NO: 14323 - protein, 991 aa, Parnassius apollo
MRSILEEAIVETRSTPLENRPRLPRIALSKRNRAVVRALNPMLVTYLEASRDLCETDSILFGAALAVCRIIGAKVSTAGRATGHSSAIPAWRRRIEERIAKARALIGRLICFRSGNNRPRIVRTVRMAFAGTNVSLSQPDITQKLTERIDDLKQRIAAWGKRIRRYTERSTRFNQNRLFQSDQKRLYESLERPMVSGTGPAPDQADTVAFWRGLWSEPVNHSEGPWTEVVASQCAGITPMDPVIITPDDVAEAVRRAPNWKSPGLDGLHHYWLKGFMVCHSVLARQFQEALNQKSLPSLFTTGITHLVPKDQGTTDPSKYRPITCLTTIYKTLTSILSARITCHLDSNQVMSRAQNGCRGGGRGTKEPLLIDAVIGKVVKRNRRNFSAAWIDYRKAFDSVPHTWLKRVLELYKIDCTVRDFLEQCMGQWSTILCHLGERMMAAENHIRIRRGIFQGDCLSPIWFCLSLNPLSTLLEGSGRGFQLRKGGTKVTHLFYMDDLKLFASSRSHLMELLNITCEFSNSIGMELGTDKCAVLHVERGRVANSEGVDLSMPVNLRTLSEAETYRYLGMSQNIGIDEAGMKQSVCDVFYARLTKVLNSLLSGVNKAHAYNGWVMPVLMYTFGILRWTQTELNALDRKVRTTMTSHRMHHPRSSVMRLYLPRKHGGRGFLSALTMHNREVCSLRDYFLARSDDPFYKDVISCDKGLTPLSLANEQWQDPAVQSISDRETVWKEKELHGRFYKALHEPFVDTVASLHWLRFGDLFGETEGFVCAIQDQVIKTNNYRRYILKDGTVDICRACRHPGESLRHVISGCSALSNSEYLHRHNLVARILHQELALKYGLVDRKLPYYKYLPEAVLENDRARLYWDRAIITDRTILANKPDIVLMDRAQSRIFLVDITIPYDENLVKAETDKKTKYLDLAHEVTDMWGGLPTEIIPVVVSANGLIPVSLSGHLRRLGLRGGPLQVQMQKAVLLDTARIVRRFLSLSP

SEQ ID NO: 14324 - protein, 1109 aa, Parnassius apollo
MQTHCGRTLGQKGEETGCLAYRARMHRLFAELEPSLIVTEQNLADRVRYILRSNIFDVAELERLRREAVPSSDENATAEDAAPQMVEQPANVDAAVNTPVVVDSNDDGTVAQELELEHMRSILEEAIVETRSTPLENRPRLPRIALSKRNRAVVRALNPMLVTYLEASRDLCETDSILFGAALAVCRIIGAKVSTAGRATGHSSAIPAWRRRIEERIAKARALIGRLICFRSGNNRPRIVRTVRMAFAGTNVSLSQPDITQKLTERIDDLKQRIAAWGKRIRRYTERSTRFNQNRLFQSDQKRLYESLERPMVSGTGPAPDQADTVAFWRGLWSEPVNHSEGPWTEVVASQCAGITPMDPVIITPDDVAEAVRRAPNWKSPGLDGLHHYWLKGFMVCHSVLARQFQEALNQKSLPSLFTTGITHLVPKDQGTTDPSKYRPITCLSTIYKTLTSILSARITCHLDSNQVMSRAQNGCRGGGRGTKEPLLIDAVIGKVVKRNRRNFSAAWIDYRKAFDSVPHTWLKRVLELYKIDCTVRDFLEQCMGQWSTILCHLGERMMAAENHIRIRRGIFQGDCLSPIWFCLSLNPLSTLLEGSGRGFQLRKGGTKVTHLFYMDDLKLFASSRSHLMELLNITCEFSNSIGMELGTDKCAVLHVERGRVANSEGVDLSMPVNLRTLSEAETYRYLGMSQNIGIDETGMKQSVCDVFYARLTKVLNSLLSGVNKAHAYNGWIMPVLMYTFGILRWTQTELNALDRKVRTTMTSHRMHHPRSSVMRLYLPRKHGGRGFLSALTMHNREVCSLRDYFLARSDDPFYKDVISCDKGLTPLSLANEQWQDPAVQSISDRETVWKEKELHGRFYKALHEPFVDTVASLHWLRFGDLFGETEGFVCAIQDQVIKTNNYRRYILKDGTVDICRACRHPGESLRHVISGCSALSNSEYLHRHNLVARILHQELALKYGLVDRKLPYYKYLPEAVLENDRARLYWDRAIITDRTILANKPDIVLMDRAQSRIFLVDITIPYDENLVKAETDKQTKYLDLAHEVTDMWGGLPTEIIPVVVSANGLIPVSLSGHLRRLGLRGGPLQVQMQKAVLLDTARIVRRFLSLSP

SEQ ID NO: 14325 - protein, 1109 aa, Parnassius apollo
MHNALRAYFRAKGEETGCLAYRARMHRLFAELEPSLTVTEQNLADRVRYILRSNIFDVAELERLRREAVPSSDENATAEDAAPQMVEQPANVDAAVNTPVVVDSNDDGTVAQELELEHMRSILEEAIVETRSTPLENRPRLPRIALSKRNRAVVRALNPMLVTYLEASRDLCETDSILFGAALAVCRIIGAKVSTAGRATGHSSAIPAWRRRIEERIAKARALIGRLICFRSGNNRPRIVRTVRMAFAGTNVSLSQPDITQKLTERIDDLKQRIAAWGKRIRRYTERSTRFNQNRLFQSDQKRLYESLERPMVSGTGPAPNQADTVAFWRGLWSEPVNHSEGPWTEVVASQCAGITPMDPVIITPDDVAEAVRRAPNWKSPGLDGLHHYWLKGFMVCHSVLARQFQEALNQKSLPSLFTTGITHLVPKDQGTTDPSKYRPITCLPTIYKTLTSILSARITCHLDSNQVMSRAQNGCRGGGRGTKEPLLIDAVIGKVVKRNRRNFSAAWIDYRKAFDSVPHTWLKRVLELYKIDCTVRDFLEQCMGQWSTILCHLGERMMAAENHIRIRRGIFQGDCLSPIWFCLSLNPLSTLLEGSGRGFQLRKGGTKVTHLFYMDDLKLFASSRSHLMELLNITCEFSNSIGMELGTDKCAVLHVERGRVANSEGVDLSMPVNLRTLSEAETYRYLGMSQNIGIDETGMKQSVCDVFYARLTKVLNSLLSGVNKAHAYNGWVMPVLMYTFGILRWTQTELNALDRKVRTTMTSHRMHHPRSSVMRLYLPRKHGGRGFLSALTMHNREVCSLRDYFLARSDDPFYKDVISCDKGLTPLSLANEQWQDPAVQSISDRETVWKEKELHGRFYKALHEPFVDTVASLHWLRFGDLFGETEGFVCAIQDQVIKTNNYRRYILKDGTVDICRACRHPGESLRHVISGCSALSNSEYLHRHNLVARILHQELALKYGLVDRKLPYYKYLPEAVLENDRARLYWDRAIITDRTILANKPDIVLMDRAQSRIFLVDITIPYDENLVKAETDKQTKYLDLAHEVTDMWGGLPTEIIPVVVSANGLIPVSLSGHLRRLGLRGGPLQVQMQKAVLLDTARIVRRFLSLSP

SEQ ID NO: 14326 - protein, 991 aa, Parnassius apollo
MRSILEEAIVETRSTPLENRPRLPRIALSKRNRAVVRALNPMLVTYLKASRDLCETDSILFGAALAVCRIIGAKVSTAGRATGHSSAIPAWRRRIEERIAKARALIGRLICFRSGNNRPRIVRTVRMAFAGTNVSLSQPDITQKLTERIDDLKQRIAAWGKRIRRYTERSTRFNQNRLFQSDQKRLYESLERPMVSGTGPAPNQADTVAFWRGLWSEPVNHSEGPWTEVVASQCAGITPMDPVIITPDDVAEAVRRAPNWKSPGLDGLHHYWLKGFMVCHSVLARQFQEALNQKSLPSLFTTGITHLVPKDQDTTDPSKYRPITCLPTIYKTLTSILSARITCHLDSNQVMSRAQNGCRGGGRGTKEPLLIDAVIGKVVKRNRRNFSAAWIDYRKAFDSVPHTWLKRVLELYKIDCTVRDFLEQCMGQWSTILCHLGERMMAAENHIRIRRGIFQGDCLSPIWFCLSVNPLSTLLEGSGRGFQLRKGGTKVTHLFYMDDLKLFASSRSHLMELLNITCEFSNSIGMELGTDKCAVLHVERGRVANSEGVDLSMPVNLRTLSEAETYRYLGMSQNIGIDETGMKQSVCDVFYARLTKVLNSLLSGVNKAHAYNGWVMPVLMYTFGILRWTQTELNALDRKVRTTMTSHRMHHPRSSVMRLYLPRKHGGRGFLSALTMHNREVCSLRDYFLARSDDPFYKDVISCDKGLTPLSLANEQWQDPAVQSISDRETVWKEKELHGRFYKALHEPFVDTVASLHWLRFGDLFGETEGFVCAIQDQVIKTNNYRRYILKDGTVDICRACRHPGESLRHVISGCPALSNSEYLHRHNLVARILHQELALKYGLVDRKLPYYKYLPEAVLENDRARLYWDRAIITDRTILANKPDIVLMDRAQSRIFLVDITIPYDENLVKAETDKQTKYLDLAHEVTDMWGGLPTEIIPVVVSANGLIPVSLSGHLRRLGLRGGPLQVQMQKAVLLDTARIVRRFLSLSP

SEQ ID NO: 14327 - protein, 865 aa, Parnassius apollo
MAFAGTNVSLSQPDIMQKLTERIDDLKQRIAAWGKRIRRYTERSTRFNQNRLFQSDQKRLYKSLERPMVSGTGPVPNQADTVAFWRSLWSEPVNHNEGPWTEVVASQCAGITPMDPVTITPDDVAEAVRRAPNWKSPGLDGLHHYWLKGFVVCHTVLARQFQEVLNQKSLPSLFTTGITHLVPKGQSTTDPSKYRPITCLPTIYKTLTSILSARITRHLDSNQVMSRAQNGCRGGGCGTKEPLLIDAVIGKVVKRNRRNFSAAWIDYRKAFDSVPHTWLKRVLELYKIDCTVRDFLEQCMGQWSTILCHLGERMMAAENHIRIRRGIFQGDCLSPKWFCLSLNPLSTLLEGSGRGFQLRKGGTKVTHLFYMDDLKLFASSRSHLMELLNITCEFSNSIGMELGTDKCAVLHVERGRVANSEGIDLSMPVNLRTLSEAETYRYLGMSQNIGIDEAGMKQSVCDVFYARLTKVLNSLLSGVNKTQAYNGWVMPVLMYTFGILRWTQTELNALDRKVRTTMTSHRMHHPRSSVMRLYLPRKHGGRGFLSALTMHNREVCSLRNYFLARSDDPFYKDVISCDKGLTPLSLANEQWQDPAVQTISDRETVWKEKELHGRFYKSLHGPFVDTVTSLHWLRFGDLFGETEGFVCAIQDQVIKTNNYRRYILKDGTIDICRACRHPGESLRHVISGCSALSNSEYLHRHNLVARILHQELALKYGFVDRKLPYYKYLPEAVLENDRARLYWDRAIITDRTILANKPDIVLMDRAQSRIFLVDITIPCDENLVKAETDKQTKYLDLAHEVTDMWGSLPTEIIPVVVSANGLIPVSLSGHLRRLGLRGGPLQAQMQKAVLLDTARIVRRFLSLSP

SEQ ID NO: 14328 - protein, 1116 aa, Parnassius apollo
MRWSQEMNANALRAYFRAKGEETGCLAYRARMHRLFAELEPSLIVTEQNLADRVRYILRSNIFDVAELERLRREAVPSSDENATAEDAAPQMVEQPANVDAAVNTPVVVDSNDDGTVAQELELEHMRSILEEAIVETRSTPLENRPRLPRIALSKRNRAVVRALNPMLVTYLEASRDLCETDSILFGAALAVCRIIGAKVSTAGRATGHSSAIPAWRRRIEERIAKARALIGRLICFRSGNNRPRIVRTVRMAFAGTNVSLSQPDITQKLTERIDDLKQRIAAWGKRIRRYTERSTRFNQNRLFQSDQKRLYESLERPMVSGTGPAPNQADTVAFWRGLWSEPVNHSEGPWTEVVASQCAGITPMDPVIITPDDVAEAVRRAPNWKSPGLDGLHHYWLKGFMVCHSVLARQFQEALNQKSLPSLFTTGITHLVPKDQGTTDPSKYRPITCLPTIYKTLTSILSARITCHLDSNQVMSRAQNGCRGGGRGTKEPLLIDAVIGKVVKRNRRNFSAAWIDYRKAFDSVPHTWLKRVLELYKIDCTVRDFLEQCMGQWSTILCHLGERMMAAENHIRIRRGIFQGDCLSPIWFCLSLNPLSTLLEGSGRGFQLRKGGTKVTHLFYMDDLKLFASSRSHLMELLNITCEFSNSIGMELGTDKCAVLHVERGRVANSEGVDLSMPVNLRTLSEAETYRYLGMSQNIGIDETGMKQSVCDVFYARLTKVLNSLLSGVNKAHAYNGWVMPVLMYTFGILRWTQTELNALDRKVRTTMTSHRMHHPRSSVMRLYLPRKHGGRGFLSALTMHNREVCSLRDYFLARSDDPFYKDVISCDKGLTPLSLANEQWQDPAVQSISDRETVWKEKELHGRFYKALHEPFVDTVASLHWLRFGDLFGETEGFVCAIQDQVIKTNNYRRYILKDGTADICRACRHPGESLRHVISGCSALSNSEYLHRHNLVARILHQELALKYGLVDRKLPYYKYLPEAVLENDRARLYWDRAIITDRTILANKPDIVLMDRAQSRIFLVDITIPYDENLVKAETDKQTKYLDLAHEVTDMWGGLPTEIIPVVVSANGLIPVSLSGHLRRLGLRGGPLQVQMQKAVLLDTARIIRRFLSLSP

SEQ ID NO: 14329 - protein, 1212 aa, Parnassius apollo
MTQPRNGAGLGRLPLFGAHKMDDGRNTKRNAHRAAAWGSPGRVWSWLWTRQHAGRQPSARSCTITSSPSHPSSPPEGLVSAGSSRTQQAAPAAGGARRMRWTKSMNENALRAYYRAKGEETVGIAYRSRMHCFFAELEPSIPVTEQNLADRVRYIMRSKIFDDAELERLRREAIPSSNESAMAGDAAPHSTDQHPHVEAAMDLPVVVDSNDDEIVSHELEQMRSILEEAILETRSTPLENRPRLPRIPLSKRNRAVVRALNPMLVTYLEASRDLCETDSILFGAAVAVCRIIGAKLPMAGRATTQSNAIPAWRKRIEDRIAKARALIGRLTSFRSGNNRPRIMRTVRMAFAGTNISLSQPDITQKLTERIDDLKQKIAAWGKRIRRFSEGSRRFNQNRLFQSDQKRLYKLLERPKVCGAGQGPDQADIIAFWRGLWSEPVNHSEGPWMEVVASQGASVTPMDPITITPEDVAEAVRRAPNWKSPGLDGLHHYWLKGFVVCHAVLARQFQEALDQKSLPSLFTTGITHLVPKDQDTTDPSKYRPITCLPTIYKTLTSILSARITRHLELNQVMSRAQNGCRGGGRGTKEPLLIDAVIGKVVKRNRRNFSAAWIDYRKAFDSVPHTWLKRVLELYKIDCTVRDFLEQCMGQWSTILCHLGERMTAAENHIRIRRGIFQGDCLSPIWFCLSLNPLSTLLEGSGRGFQLRKGWTKVTHLFYMDDLKLFASSRSHLMELLNITCEFSSSIGMELGTDKCAVLHVERGRVANSEGIDLSMPVNLRTLSEAETYRYLGMSQNIGIDEAGMKQSVCDVFYARLTKVLNSLLSGVNKTHAYNGWVMPVLMYTFGILRWTQTELNALDRKVRTTMTSHRMHHPRSSVMRLYLPRKYGGRGFLSALTMHNREVCSLRQYFLARSDDPFYNDVISSDKGLTPLSLANEQWQDPAVLSNSDRETVWKEKELHGRYYKALHEPFVDTVASLNWLRFGDLFGETEGFVCAIQDQVIKTNNYRRYILKDGTVDVCRACRHPGESLRHVISGCSALSNSEYLHRHNLVARILHQELALKYGLVDRKLPYYKYLPEAVLENDRARLYWDRAIITDRTILANKPDIVLMDRAQSRIFLVDITIPYDENLVRAETDKQSKYLDLAHEVTDMWGGLPAEIIPVVVSANGLIPVSLSGHLRRLGLRDGPLRAQMQKAVFLDTARIVRRFLSLSS

SEQ ID NO: 14330 - protein, 913 aa, Parnassius apollo
MRTVRMAFAGTNINLFQPDITQKLTERIDDLKQKIAAWGKRIRRFSERSRRFNQNRLFQSDQKRLYKTLERPEVCGAGPGPDQADTVAFWRGLWSEPVNHSEGPWMEVVASQSASVTPMDPITITPEDVAEAVRRAPNWKSPGLDGLHHYWLKVFVVCHAVLARQFQEALDQKSLPSLFTTGITHLVPKDQDTTDPSKYRPITCLPTIYKTLRSILSARITRHLELNQVMSRAQNRCRGGGRGTKEPLLIDAVIGKVVKRNRRNFSAAWIDYRKAFDSVPHTWLKRVLQLYKIDCTVGDFLEQCMGQWSTILCYMGERMMAAENHIRIRRGIFQGDCLSPIWFCLSLNPLSTLLEGSGRGFQLRKGGTKVTHLFYMDDLKLLASSRSHLMELLNITCEFSNSNGMELGTDKCAVLHVERGRVANSEGIDLSMPVNLRTLSEAETYRYLGMSQNIGIDEAGMKQSVCDVFYARLTKVLNSLLSGVNKTHAYNGWVMPVLMYTFGILRWTQTELNALDRKVRTTMTSHRMHHPRSSVMRLYLPRKHGGRGFLSALTMHNREVCSLRNYFLARSDDPFYKDVISSDKGLTPLSLANEQWQDPAVQTISDRENVWKEKELHGRFYKALHEPFVDTVASLHWLRFGDLFGETEGFVCAIQDQVIKTNNYRRYILKDGTVDICRACRHPGESLRHVISGCSALSNSEYLHRHNLVARILHQELALKYGLVDRKLPYYKYLPEAVLENDRARLYWDRAIITDRTILANKPDIVLMDRAQSRIFLVDITIPYDENLVKAETDKKTKYLDLAHEVTDMWGGLPTEIIPVVVSANGLIPVSLSGHLRRLGLRGGPLQVQMQKVVLLDTARIVRRFLSLSPLTLGRLVSPAEGLHLVGLLFIYVLLYLFYVIDIYVYLSFHFHL

SEQ ID NO: 14331 - protein, 993 aa, Parnassius apollo
MLVTYLEASRDLCETDSILFGAALAVCRIIGAKLSTAGRATGQSSAIPAWRIRIEERIAKARALIGRLICFRSGNTRPRIVRTVRMAFAGTNVSLSQPDIMQKLTERIDDLKQRIAAWGKRIRRYTERSTRFNQNRLFQSDQKRLYKSLERPIVSGTGPAPNQADTVAFWRSLWSEPVNHNEGPWTEVVASQCASITPMDPVIITPDDVAEAVRRAPNWKSPGLDGLHHYWLKGFMVCHAVLARQFQEALNQKSLPSLFTTGITHLVPKDQGATDPSKYRPITCLPTIYKTLTSILSARIARHLDLNQVMSRAQNGCRGGGRGTKEPLLIDAVIGKVVKRNRRNFSAAWIDYRKAFDSVPHTWLKRVLELYKIDCTVRDFLEQCMGQWSTILCHLGERMTAAESRIRIRRGIFQGDCLSPIWFCLSLNPLSTLLEGSGRGFQLRKGGTKVTHLFYMDDLKLFASSRSHLMELLNITCEFSNSIRMELGTDKCAVLHVERGRVANSEGIDLSMPVNLRTLSEAETYRYLGMSQNIGIDEAGMKQSVCDVFYARLTKVLNSLLSGVNKAHAYNGWVMPVLMYTFGILRWTQTELNALDRKVRTTMTSHRMHHPRSSVMRLYLPRKHGGRGFLSALTMHNREVCSLRDYFLARSDDPFYKDVISCDKGLTPLSLANEQWQDPAVQSISDRETVWKEKELHGRFYKALHEPFVDTVASLHWLRFGDLFGETEGFVCAIQDQVIKTNNYRRYILKDGTVDICRACRHPGESLRHVISGCSALSNSEYLHRHNLVARILHQELALKYGLVDRKLPYYKYLPEAVLENDRARLYWDRAIITDRTILANKPDIVLMDRAQSRIFLVDITIPYDENLVKAETDKQTKYLDLAHEVTDMWGGLPTEIIPVVVSANGLIPVSLSGHLRRLGLRGGPLQVQMQKAVLLDTARIVRRFLSLSPLTLGRLVSPAEGLHLVGLLFIYVLLYLFYVIDIYVYLSFHFHL

SEQ ID NO: 14332 - protein, 1109 aa, Parnassius apollo
MQTHCGRTLGQKGKKLDVWRIGLGCIVFFAELEPSLIDTEQNLADRVRYILRSNIFDVAELERLRREAVPSSDENATAEDAAPQMVEQPANVDAAVNTPVVVDSNDDGTVAQELELEHMRSILEEAIVETRSTPLENRPRLPRIALSKRNRAVVRALNPMLVTYLEASRDLCETDSILFGAALAVCRIIGAKVSTAGRATGHSSAIPAWRRRIEERIAKARALIGRLICFRSGNNRPRIVRTVRMAFAGTNVSLSQPDITQKLTERIDDLKQRIAAWGKRIRRYTERSTRFNQNRLFQSDQKRLYESLERPMVSGTGTAPNQADTVAFWRGLWSEPVNHSEGPWTEVVASQCAGITPMDPVIITPDDVAEAVRRAPNWKSPGLDGLHHYWLKGFMVCHSVLARQFQEALNQKSLPSLFTTGITHLVPKDQGTTDPSKYRPITCLPTIYKTLTSILSARITCHLDSNQVMSRAQNGCRGGGRGTKEPLLIDAVIGKVVKRNRRNFSTAWIDYRKAFDSVPHTWLKRVLELYKIDCTVRGFLEQCMGQWSTILCHLGERMMAAENHIRIRRGIFQGDCLSPIWFCLSLNPLSTLLEGSGRGFQLRKGGTKVTHLFYMDDLKLFASSRSHLMELLNITCEFSNSIGMELGTDKCAVLHVERGRVANSEGVDLSMPVNLRTLSEAETYRYLGMSQNIGIDETGMKQSVCDVFYARLTKVLNSLLSGVNKAHAYNGWVMPVLMYTFGILRWTQTELNALDRKVRTAMTSHRMHHPRSSVMRLYLPRKHGGRGFLSALTMHNREVCSLRDYFLARSDDPFYKDVISCDKGLTPLSLANEQWQDPAVQSISDRETVWKEKELHGRFYKALHEPFVDTVASLHWLRFGDLFGETEGFVCAIQDQVIKTNNYRRYILKDGTVDICRACRHPGESLRHVISGCSALSNSEYLHRHNLVARILHQELALKYGLVDRKLPYYKYLPEAVLENDRARLYWDRAIITDRTILANKPDIVLMDRAQSRIFLVDITIPYDENLVKAETDKQTKYLDLAHEVTDMWGGLPTEIIPVVVSANGLIPVSLSGHLRRLGLRGGPLQVQMQKAVLLDTARIVRRFLSLSP

SEQ ID NO: 14333 - protein, 1085 aa, Parnassius apollo
MHRLFTELEPSITVTEQNLADRVRYILRSNKFDGAELERLRREAAPSSNENATTEGAVPQVAEQPAHVDAAENTPVVADSNDDGTFTQELEIEQMRSTLEEAIMETRSTPLENRPRLPRIALSKRNRAVVRALNPMLVTYLEASRDLCETDSILFGAALAVCRIIGAKLSTAGRTTGQSSAIPAWRTRIEERIAKARALIGRLICFRSGNTRPRIVRTVRMAFAGTNVSLSQPDIMQKLTERIDDLKQRIAAWGKRIRRYTERSTRFNQNRLFQSDQKRLYKSLERPMVSGTGPVPNQADTVAFWRSLWSEPVNHNEGPWTEVVASQCAGITPMDPVTITPDDVAEAVRRAPNWKSPGLDGLHHYWLKGFVVCHTVLARQFQEVLNQKSLPSLFTTGITHLVPKGQSTTDPSKYRPITCLPTIYKTLTSILSARITRHLDSNQVMSRAQNGCRGGGRGTKEPLLIDAVIGKVVKRNRRNFSAAWIDYRKAFDSVPHTWLKRVLELYKIDCTVRDFLEQCMGQWSTILCHLGERMMAAENHIRIRRGIFQGDCLSPIWFCLSLNPLSTLLEGSGRGFQLRKGGTKVTHLFYMDDLKLFASSRSHLMELLNITCEFSNSIGMELGTDKCAVLHVERGRVANSEGIDLSMPVNLRTLSEAETYRYLGMSQNIGIDEAGMKQSVCDVFYARLTKVLNSLLSGVNKTQAYNGWVIPVLMYTFGILRWTQTELNALDRKVRTTMTSHRMHHPRSSVMRLYLPRKHGGRGFLSALTMHNREVCSLRNYFLARSDDPFYKDVISCDKGLTPLSLANEQWQDPAVQTISDRETVWKEKELHGRFYKSLHGPFVDTVTSLHWLRFGDLFGETEGFVCAIQDQVIKTNNYRRYILKDGTIDICRACRHPGESLRHVISGCSALSNSEYLHRHNLVARILHQELALKYGFVDRKLPYYKYLPEAVLENDRARLYWDRAIITDRTILANKPDIVLMDRAQSRIFLVDITIPCDENLVKAETDKQTKYLDLAHEVTDMWGGLPTEIIPVVVSANGLIPVSLSGHLRRLGLRGGPLQAQMQKAVLLDTARIVRRFLSLSP

SEQ ID NO: 14334 - protein, 884 aa, Parnassius apollo
MAFAGTNVSLSQPDIMQKLTERIDDLKQRIAAWGKRIRRYTERSTRFNQNRLFQSDQKRLYKSLERPMVSGTGPVPNQADTVAFWRSLWSEPVNHNEGPWTEVVASQCAGITPMDPVTITPDDVAEAVRRAPNWKSPGLDGLHHYWLKGFVVCHTVLARQFQEVLNQKSLPSLFTTGITHLVPKGQSTTDPSKYRPITCLPTIYKTLTSILSARITRHLDSNQVMSRAQNGCRGGGRGTKEPLLIDAVIGKVVKRNRRNFSAAWIDYRKAFDSVPHTWLKRVLELYKIDCTVRDFLEQCMGQWSTILCHLGERMMAAENHIRIRRGIFQGDCLSPIWFCLSLNPLSTLLEGSGRGFQLRKGGTKVTHLFYMDDLKLFASSRSHLMELLNITCEFSNSIGMELGTDKCAVLHVERGRVANSEGIDLSMPVNLRTLSEAETYRYLGMSQNIGIDEAGMKQSVCDVFYARLTKVLNSLLSGVNKTQAYNGWVIPVLMYTFGILRWTQTELNALDRKVRTTMTSHRMHHPRSSVMRLYLPRKHGGRGFLSALTMHNREVCSLRNYFLARSDDPFYKDVISCDKGLTPLSLANEQWQDQAVQTISDRETVWKEKELHGRFYKSLHGPFVDTVTSLHWLRFGDLFGETEGFVCAIQDQVIKTNNYRRYILKDGTIDICRACRHPGESLRHVISGCSALSNSEYLHRHNLVARILHQELALKYGFVDRKLPYYKYLPEAVLENDRARLYWDRAIITDRTILANKPDIVLMDRAQSRIFLVDITIPCDENLVKAETDKQTKYLDLAHEVVMRSGSEAAGTTWRTAPGSNAEGGAPRYRPHRPPVSFPFPLTLGRLVSPAEGFHLVGLLFIYVFSYLFYFIDIFVCLSFHFRL

SEQ ID NO: 14335 - protein, 1191 aa, Parnassius apollo
MMEETQKGTRIGPLPGGRRGASGAGAGRGSMRAASRARGAARTPSSPSHPSSPPEGLVSAGSSRTQQAAPAAGGARRMRWTKSMNENALRAYYRAKGEETVGIAYRSRMHCFFAELEPSIPVTEQNLADRVRYIMRSKILDDAELERLRREAIPSSNESAMAGDAAPHSTDQHPHVEAAMDLPVVVDSNDDEIVSHELEQMRSILEEAILETRSTPLENRPRLPRIPLSKRNRAVVRALNPILVTYLEASRDLCETDSILFGAAVAVCRIIGAKLPMAGRATTQSSAIPAWRKRIEDRIAKARALIGRLTSFRSGNNRPRIMRTVRMAFAGTNISLSQPDITQKLTERIDDLKQKIAAWGKRIRRFSEGSRRFNQNRLFQSDQKRLYKLLERPKVCGAGQGPDQADIIAFWRGLWSEPVNHSEGPWMEVVASQGASVTPMDPITITPEDVAEAVRRAPNWKSPGLDGLHHYWLKGFVVCHAVLARQFQEALDQKSLPSLFTTGITHLVPKDQDTTDPSKYRPITCLPTIYKTLTSILSARITRHLELNQVMSRAQNGCRGGGRGTKEPLLIDAVIGKVVKRNRRNFSAAWIDYRKAFDSVPHTWLKRVLELYKIDCTVRDFLEQCMGQWSTILCHLGERMTAAENHIRIRRGIFQGDCLSPIWFCLSLNPLSTLLEGSGRGFQLRKGGTKVTHLFYMDDLKLFASSRSHLKELLNITCEFSSSIGMELGTDKCAVLHVERGRVANSEGIDLSMPVNLRTLSEAETYRYLGMSQNIGIDEAGVKQSVCDVFYARLTKVLNSLLSGVNKTHAYNGWVMPVLMYTFGILRWTQTELYALDRKVRTTMTSHRMHHPRSSVMRLYLPRKYGGRGFLSALTMHNREVCSLRQYFLARSDDPFYNDVISSDKGLTPLSLANEQWQDPAVLSNSDRETVWKEKELHGRYYKALHEPFVDTVASLNWLRFGDLFGETEGFVCAIQDQVIKTNNYRRYILKDGTVDVCRACRHPGESLRHVISGCSALSNSEYLHRHNLVARILHQELALKYGLVDRKLPYYKYLPEAVLENDRARLYWDRAIITDRTILANKPDIVLMDRAQSRIFLVDITIPYDENLVRAETDKQSKYLDLAHEVTDMWGGLPAEIIPVVVSANGLIPVSLSGHLRRLGLRDGPLRAQMQKAVLLDTARIVRRFLSLSS

SEQ ID NO: 14336 - protein, 1189 aa, Parnassius apollo
MMDKIGKRIGPLPGGRRGASGAGAGRGSMRAASRARGAARSPNSPPHPSSPPDGLMSAGSSRTRQAASAAGGVRRMRWTRDMNANAMRAYYRAKGEETAGIAYRARMHCFFAELEPSIPVTEQNLADRVRYIMRSKIFDDAELERLRREAIPSSNELATAGDEAPQATDQLPRVEAAMDLPVVGDSDDDEMVSHELEQMRSILEEAILETRSMPLENRPRLPRIPLSKRNRAVVRALNPMLVTYLEASRDLCETDSVLFGAAVAACRIIGAKLPMAGRATKQSSAIPAWRKRIEDRIAKARALIGRLISFRSGNNRPRVVRTVRMAFAGTNISLSQPDITQKLTERIDDLKQKIAAWGKRIRRFTERSRRFNQNRLFQSDQKRLYKSLERPEVCGAGPGPDQANTVAFWRGLWSEPVNHSEGPWTEVVASQCASITPMDPVIITPDDVAEAVRRAPNWKSPGLDGLHHYWLKGFMVCHAVLARQFQEALNQKSLPSLFTTGITHLVPKDQVTTDPSKYRPITCLPTIYKTLTSILSARITRHLELNQVMSRAQNGCRGGGRGTKEPLLIDAVIGKVVKRNRRNFSAAWIDYRKAFDSVPHTWLKRVLELYKIDCTVRDFLELCMGQWSTILCHLGERMMAAENHIRIRRGIFQGDCLSPIWFCLSLNPLSTLLEGSGRGFQLRKGGTKVTHLFYMDDLKLFASSRSHLVELLKITCEFSSSIGMELGTDKCAVLHVERGRVANSEGIDLSMPVNLRTLSEAETYRYLGMSQNIGIDEAGVKQSVCDVFYARLTKVLNSLLSGVNKTHAYNGWVMPVLMYTFGILRWTQTELNALDRKVRTTMTSHRMHHPRSSVMRLYLPRKHGGRGFLSALTMHNREVCSLRHYFLARSDDPFYNDVISSDKGLTPLSLANEQWQDPAVLSISDRETVWKEKELHGRYYRALHEPFVDTVASLNWLRFGDLFGETEGFVCAIQDQVIKTNNYRRYILKDGTVDVCRACRHPGESLRHVISGCSALSNSEYLHRHNLVARILHQALALKYGLVDRKFPYYKYLPEAVLENDRARLYWDRAIITDRTILANKPDIVLMDRAQSRIFLVDITIPYDEKLVKAETDKQTKYLDLAHEVTDMWGGLPTEIIPVVVSANGLIPVSLSGHLRRLGLRDGPLRAQMQKAVVLDTARIVRRFLSLSP

SEQ ID NO: 14337 - protein, 1191 aa, Parnassius apollo
MMEETQKGTRIGPLPGGRRGASGAGAGRGSMRAASRARGAARSPSSPSHPSSPPEGLVSAGSSRTQQAAPAAGGARRMRWTKSMNENALRAYYRAKGEETVGIAYRSRMHCFFAELEPSIPVTEQNLADRVRYIMRSKIFDDAELERLRREAIPSSNESAMAGDAAPHSTDQHPHVEAAMDLPVVVDSNDDEIVSHELEQMRSILEEAILETRSTPLENRPRLPRIPLSKRNRAVVRALNPMLVTYLEASRDLCETDSILFGAAVAVCRIIGAKLPMAGRATTQSSAIPAWRKRIEDRIAKARALIGRLTSFRSGNNRPRIMRTVRMAFAGTNISLSQPDITQKLTERIDDLKQKIAAWGKRIRRFSEGSRRFNQNRLFQSDQKRLYKSLERPKVCGAGQGPDQADIIAFWRGLWSEPVNHSEGPWMEVVASQGASVTPMDPITITPEDVAEAVRRAPNWKSPGLDGLHHYWLKGFVVCHAVLARQFQEALDQKSLPSLFTTGITHLVPKDQDTTDPSKYRPITCLPTIYKTLTSILSARITRHLELNQVMSRAQNGCRGGGRGTKEPLLIDAVIGKVVKRNRRNFSAAWIDYRKAFDSVPHTWLKRVLELYKIDCTVRDFLEQCMGQWSTILCHLGERMTAAENHIRIRRGIFQGDCLSPIWFCLSLNPLSTLLEGSGRGFQLRKGGTKVTHLFYMDDLKLFASSRSHLMELLNITCEFSSSIGMELGTDKCAVLHVERGRVANSEGIDLSMPVNLRTLSEAETYRYLGMSQNIGIDEAGMKQSVCDVFYARLTKVLNSLLSGVNKTHAYNGWVMPVLMYTFGILRWTQTELNALDRKVRTTMTSHRMHHPRSSVMRLYLPRKYGGRGFLSALTMHNREVCSLRQYFLARSDDPFYNDVISSDKGLTPLSLANEQWQDPAVLSNSDRETVWKEKELHGRYYKALHEPFVDTVASLNWLRFGDLFGETEGFVCAIQDQVIKTNNYRRYILKDGTVDVCRACRHPGESLRHVISGCSALSNSEYLHRHNLVARILHQELALKYGLVDRKLPYYKYLPEAVLENDRARLYWDRAIITDRTILANKPDIVLMDRAQSRIFLVDITIPYDENLVRAETDKQSKYLDLAHEVTDMWGGLPAEIIPVVVSANGLIPVSLSGHLRRLGLRDGPLRAQMQKAVLLDTARIVRRFLSLSS

SEQ ID NO: 14338 - protein, 865 aa, Parnassius apollo
MAFAGTNISLSQPDIAQKLTERIDDLKQKIAAWGKRIRRFSEGSRRFNQNRLFQSDQKRLYKSLERPKVCGAGQGPDQADIIAFWRGLWSEPVNHSEGPWMEVVASQGASVTPMDPITITPEDVAEAVRRAPNWKSPGLDGLHHYWLKGFIVCHAVLARQFQEALDQKSLPSLFTTGITHLVPKDQDTTDPSEYRPITCLPTIYKTLTSILSARIIRHLELNQVMSRAQNGCRGGGRGTKEPLLIDAVIGKVVKRNRRNFSAAWIDYRKAFDSVPHTWLKRVLELYKIDCTVRDFLGQCMGQWSTILCHLGERMTAAENHIRIRRGIFQGDCLSPIWFCLSLNPLSALLEGSGRGFQLRKGGTKVTHLFYMDDLKLFASSRSHLMELLNITCEFSSSIGMELGTDKCAVLHVERGRVANSEGIDLSMPVNLRTLSEAETYRYLGMSQNIGIDEAGMKQSVCDVFYARLTKVLNSLLSGVNKSHAYNCWVMPVLMYTFGILRWTQTELNALDRKVRTTMKSHRMHHPRSSVMRLYLPRKYGGRGFLSALTMHNREVCSLRQYFLARSDDPFYNDVISSDKGLTPLSLANEQWQDPAVLSISDRETVWKEKELHGRYYKALHEPFVDTVASLNWLRFGDLFGETEGFVCAIQDQVIKTNNYRRYILKDGTIDVCRAFRHPGESLRHVISGCSALSNSEYLHRHNLVARILHQELALKYGLVDRKLPYYKYLPEAVLENDRARLYWDRAIITDKTILANKPDIVLMDRAQSRIFLVDITIPYDENLVRAETDKQSKYLDLAHEVTDMWGGLPAEIIPVVVSANGLIPVSLSGHLRRLGLRDGPLRAQMQKAVLLDTARIVRRFLSLSP

SEQ ID NO: 14339 - protein, 977 aa, Parnassius apollo
MPLENRPRLPRIPLSKRNRAVVRALNPMLVTYLEASRDLCETDSILFGAALAVCRIIGAKLPVAGRATQKSSAIPAWRKRIEDRIAKARALIGRLTSFRSGNNRPRIMRTVRMAFAGTNISLFQPDITQKLTERIDDLKQKIAAWGKRIRRFSERSRRFNQNRLFQSDQKRLYKSLERPKVCGAGPGPDQADTVAFWRGLWSEPVNHSEGPWMEVVASQSASVTPMDPVTITPEDVAEAVRRAPNWKSPGLDGLHHYWLKGFVVCHAVLARQFQEALDQKSLPSLFTTGITHLVPKDQDTTDPSKYRPITCLPTIYKTLTSILSARITRHLELNQVMSRAQNGCRGGGRGTKEPLLIDAVIGKVVKRNRRNFSAAWIDYRKAFDSVPHTWLKRVLQLYKIDCTVGDFLEQCMGQWSTILCYLGERMMAAENHIRIRRGIFQGDCLSPIWFCLSLNPLSTLLEGSGRGFQLRKGGTKVTHLFYMDDLKLFASSRSHLMELLNITCEFSNSIGMELGTDKCAVLHVERGRVANSEGIDLSMPVNLRTLSEAETYRYLGMSQNIGIDEAGMKQSVCDVFYARLTKVLNSLLSGVNKTHAYNGWVMPVLMYTFGILRWTQTELNALDRKVRTTMTSHRMHHPRSSVMRLYLPRKHGGRGFLSALTIHNREVCSLRNYFLARSDDPFYKDVIFCDKGLTPLSLANEQWQDPAVQTISDRENVWKEKELHGRFYKALHEPFVDTVASLHWLRFGDLFGETEGFVCAIQDQVIKTNNYRRYILKDGTVDICRACRHPGESLRHVISGCSALSNSEYLHRHNLVARILHQELALKYGLVDRKLPYYKYLPEAVLENDRARLYWDRAIITDRTILANKPDIVLMDRAQSRIFLVDITIPYDENLVKAETDKQTKYLDLAHEVTDMWGGLPTEIIPVVVSANGLIPVSLSGHLRRLGLRGGPLRAQMQKAVLLDTARIVRRFLSLSP

SEQ ID NO: 14340 - protein, 1085 aa, Parnassius apollo
MHRLFTELEPSITVTEQNLADRVRYILRSNIFDGAELERLRREAVPSSNENATTEGAVPQVAEQPAHVDAAENTPVVADSNDDGTFTQELEIEQMRSTLEEAIVETRSTPLENRPRLPRIALSKRNRAVVRALNPMLVTYLEASRDLCETDSILFGAALAVCRIIGAKLSTAGRTTGQSSAIPAWRTRIEERIAKARALIGRLICFRSGNTRPRIVRTVRMAFAGTNVSLSQPDIMQKLTERIDDLKQRIAAWGKRIRRYTERSTRFNQNRLFQSDQKRLYKSLERPMVSGTGPVPNQADTVAFWRSLWSEPVNHSEGPWTEVVASQCAGITPMDPVTITPDDVAEAVRRAPNWKSPGLDGLHHYWLKGFVVCHTVLARQFQEVLNQKSLPSLFTTGITHLVPKDQSTTDPSKYRPITCLPTIYKTLTSILSARITRHLDSNQVMSRAQNGCRGGGRGTKEPLLIDAVIGKVVKRNRRNFSAAWIDYRKAFDSVPHTWLKRVLELYKIDCTVRDFLEQCKGQWSTILCHLGERMMAAENHIRIRRGIFQGDCLSPIWFCLSLNPLSTLLEGSGRGFQLRKGGTKVTHLFYMDDLKLFASSRSHLMELLNITCEFSNSIGMELGTDKCAVLHVERGRVANSEGIDLSMPVNLRTLSEAETYRYLGMSQNIGIDEAGMKQSVCDVFYARLTKVLNSLLSGVNKTQAYNGWVIPVLMYTFGILRWTQTELNALDRKVRTTMTSHRMHHPRSSVMRLYLPRKHGGRGFLSALTMHNREVCSLRNYFLARSDDPFYKDVISCDKGLTPLSLANEQWQDPAVQTISDRETVWKEKELHGRFYKSLHGPFVDTVTSLHWLRFGDLFGETEGFVCAIQDQVIKTNNYRRYILKDGTIDICRACRHPGESLRHVISGCSALSNSEYLHRHNLVARILHQELALKYGFVDRKLPYYKYLPEAVLENDRARLYWDRAIITDRTILANKPDIVLMDRAQSRIFLVDITIPCDENLVKAETDKQTKYLDLAHEVTDMWGGLPTEIIPVVVSANGLIPVSLSGHLRRLGLRGGPLQVQMQKAVLLDTARIVRRFLSLSP

SEQ ID NO: 14341 - protein, 1189 aa, Parnassius apollo
MMVQRGTRIGPLPGGRRGASGAGAGRGSMRAASRARGAVRSPSSPPHPSSPPEGLVSAGSSRTQQAAPAAGGARRMRWSQTMNANALRAYFRAKGEETGCLAYRARMHRFFAELEPSLSVTEQNLADRVRYILRSNIFGDAELERLRREAVPSSDGNATAGNAAPLIAQQTANVDAAVNIPFVVDSDDDGIVPHELEKMRSILEESMLETRSMPLENRPRLPRIPLSKRNRAVVRALNPMLVTYLEASRDLCETDSILFGAALAVCRIIGAKLPMAGRATQQGSAIPAWRKRIEDRIAKARALIGRLTSFRSGNIRPRVVRTVRMAFAGTNISLSQPDITQKLTERIDDLKQKIAAWGKRIRRFSERSRRFNQNRLFQSDQKRLYKSLERPEVCGAGPGPDQADTVAFWRGLWSEPVNHSEGPWMEVVASRSASVTPMDPVTITPEDVAEAVRRAPNWKSPGLDGLHHYWLKGFVVCHAVLARQYQEALDQKSLPSLFTTGITHLVPKDQDTTDPSKYRPITCLPTIYKTLTSILSARITRHLELNKVMSRAQNGCRGGGRGTKEPLLIDAVIGKVVKRNRRNFSAAWIDYRKAFDSVPHAWLKRVLELYKIDCTVRDFLEQCMGQWSTILCYQGERMMAAENHIRIRRGIFQGDCLSPIWFCLSLNPLSTLLEGSGRGFQLRKGGTKVTHLFYMDDLKLFASSRSHLMELLNITCEFSNSIGMELGTDKCAVLHVERGRVANSEGIDLSMPVNLKTLSEAETYRYLGMSQNIGIDEAGVKQSVCDVFYARLTKVLNSLLSGVNKTHAYNGWVMPVLIYTFGILRWTQTELNALDRKVRTTMTSHRMHHPRSSVMRLYLPRKHGGRGFMSALTMHNREVCSLRDYFLARSDDPFYNDVISSDKGLTPLSLAHEQWQDPAVLSISDRETVWKEKELHGRYYRALHEPFVDTVASLNWLRFGDLFGETEGFVCAIQDQVIKTNNYRRYILKDGTVDVCRACRHPGESLRHVISGCSALSNSEYLHRHNLVARILHQELALKYGLVDRKLPYYKYLPEAVLENDRARLYWDRAIITDRTILANKPDIVLMDRAQSRIFLVDITIPYDENLVKAETDKQTKYLDLAHEVTDMWGGLPTEIIPVVVSANGLIPVSLSGHLRRLGLRGGPLRAQIQKAVLLDTARIVRRFLSLSP

SEQ ID NO: 14342 - protein, 1197 aa, Parnassius apollo
MTPTLWMMEYGRSRKGPLPGGRQGASGAGAGRGSMRTASRARGAARPPSSPSHPSSPPAGLVSAGSSRAQQSAPASGGVRRMRWTTQMNSNALRAYFRAKGGETGCLAYRARMHRLFAELEPSLTVTEQNLADRVRYILRSNIFDVAELERLRREAVPSSDENATAEDAAPQMAEQPANVDTAVNTPVVVDSSDDGTVAQELELEHMRSTLEEAIVETRSTPLENRPRLPRIALSKRNRAVVRALNPMPVTHLEASRDLCETDSILFGAALAVCRIIGAKVSTAGRATGHSSAIPAWRRRIEERIAKARALIGRLICFRSGNNRPRIVRTVRMAFAGTNVSLSQPDITQKLTERIDDLKQRIAAWGKRIRRYTERSTRFNQNRLFQSDQKRLYESLERPMVSGTGPAPNQADTVAFWRGLWSEPVNHSEGPWTEVVASQCAGITPMDPVIITPDDVVKAVRRAPNWKSPGLDGLHHYWLKGFMVCHSVLARQFQEALDQKSLPSLFTTGITHLVPKDQGTTDPSKYRPIMCLPTIYKTLTSILSARITCHLDSNQVMSRAQNGCRGGGRGTKEPLLIDAVIGKVVKRNRRNFSAAWIDYRKAFDSVPHTWLKRVLELYKIDCTVRYFLEQCMGQWSTILCHLGERMMAAENHIRIRRGIFQGDCLSPIWFCLSLNPLSTLLEGSGRGFQLRKGGTKVTHLFYMDDLKLFASSRSHLMELLNITCEFSNSIGMELGTDKCAVLHVERGRVANSEGVDLSMPVNLRTLSEAETYRYLGMSQNIGIDETGMKQSVCDVFYARLTKVLNSLLSGVYKAHAYNGWVMPVLMYTFGILRWTQTELNALGRKVRTTMTSHRMHHPRSSVMRLYLSRKHGGRGFLSALTMHNREVCSLRDYFLARSDDPFYKDVISCDKGLTPLSLANEQWQDPAVQSISDRETVWKEKELHGRFYKALHEPFVDTVASLHWLRFGDLFGETEGFVCAIQNQVIKTNNYRRYILKDGTVDICRACRHPGESLRHVISGCSALSNSEYLHRHNLVARILHQELAPKCGLVDRKLPYYKYLPEAVLENVRARLYWDRAVITDRTILANKPDIVLMDRAQSRIFLVDITIPYDENLVKAETDKQTKYLDLAHEVTDMWGTLPTEIIPVVVSANGLIPVSLSGHLRRLGLRGGPLQVQMQKAVLLDTARIVRRFLSLSP

SEQ ID NO: 14343 - protein, 1191 aa, Parnassius apollo
MMEYGRTRKGPLPGGRQGASGAGAGRGSMRTASRARGAARPPSSPSHPSSPPAGLVSAGSSRAQQSAPASGGVRRMRWTTQMNSNALRAYFGAKGGETGCLAYRARMHRLFAELEPSLTVTEQNLADRVRYILRSNIFDVAELERLRREAVPSSDENATAEDAAPQMVEQPANVDAAVNTPVVVDSNDDGTVAQELELEHMRSTLEEAIVETRSTPLENRPRLPRIALSKRNRAVVRALNPMLVTYLEASRDLCETDSILFGAALAVCRIIGAKVSTAGRATGHSSAIPAWRRRIEERIAKARALIGRLICFRSGNNRPRIVRTVRMAFAGTNVSLSQPDITQKLTERIDDLKQRIAAWGKRIRRYTERSTRFNQNRLFQSDQKRLYESLERPMVSGTGPAPNQADTVAFWRGLWSEPVNHSEGPWTEVVASQCAGITPMDPVIITPDDVAEAVRRAPNWKSPGLDGLHHYWLKGFMVCHSVLARQFQEALNQKSLPSLFTTGITHLVPKDQGTTDPSKYRPITCLPTIYKTLTSILSARITCHLDSNQVMSRAQNGCRGGGRGTKEPLLIDAVIGKVVKRNRRNFSAAWIDYRKAFDSVPHTWLKRVLELYKIDCTVRDFLEQCMGQWSTILCHLGERMMAAENHIRIRRGIFQGDCLSPIWFCLSLNPLSTLLEGSGRGFQLRRGGTKVTHLFYMDDLKLFASSRSHLMELLNITCEFSNSIGMELGTDKCAVLHVERGRVANSEGVDLSMPVNLRTLSEAETYRYLGMSQNIGIDETGMKQSVCDVFYARLTKVLNSLLSGVNKAHAYNGWVMPVLMYTFGILRWTQTELNALDRKVRTTMTSHRMHHPRSSVMRLYLSRKHGGRGFLSALTMHNREVCSLRDYFLARSDDPFYMDVISCDKGLTPLSLANEQWQDPAVQSISDRETVWKEKELHGRFYKALHEPFVDTVASLHWLRFGDLFGETEGFVCAIQDQVIKTNNYRRYILKDGTVDICRACRHPGESLRHVISGCSALSNSEYLHRHNLVARILHQELALKYGLVDRKLPYYKYLPEAVLENDRARLYWDRAIITDRTILANKPDIVLMDRAQSRIFLVDITIPYDENLVKAETDKQTKYLDLAHEVTDMWGGLPTEIIPVVVSANGLIPVSLSGHLRRLGLRGGPLQVQMQKAVLLDTARIVRRFLSLSP

SEQ ID NO: 14344 - protein, 1189 aa, Parnassius apollo
MMEKKIVRKGPLPGGRQDASGAGAGRDSMRAASRARGVARPPSSPPHPSSPPEGLVSAGSFRTQQAAPAAGGARRMRWSKSMNENALRAYFRAKGEETGCLAHRARMHRFFAELEPSLSVTEQNLADRVRYILRSNIFGDAELERLRREAIPSSNGNATAGNAAPLDAQQTAYEDAAVNIPFVANMDDDGIVSHELEKMRSILEESMLETRSMPLENRPRLPRIPLSKRNRAVVRALNPILVTYLEASRDLCETDSILFGAALAVCRIIGAKLPVAGRATQKSSAIPAWRKRIEDRIAKARALIGRLTSFRSGNNRPRIMRTVRMAFAGTNINLFQPDITQKLTERIDDLKQKIAAWGKRIRRLSERSRRFNQNRLFQSDQKRLYKTLERPKVCGAGPGPDQADTVAFWRGLWSEPVNHSEGPWMEVVASQSASVTPMDPVTITPEDVTEAVRRAPNWKSPGLDGLHHYWLKGFVVCHAVLARQFQEALDQKSLPSLFTTGITHLVPKDQDTTDPSKYRPITCLPTIYKTLTSILSARITRHLELNQVMSRAQNGCRGGGRGITEPLLIDAVIGKVVKRNRRNFSAAWIDYRKAFDSVPHTWLKRVLQLYKIDCTVGDFLEQCMGQWSTILCYLGERMMAAENHIRIRRGIFQGDCLSPIWFCLSLNPLSTLLEGSGRGFQLRKGGTKVTHLFYMNDLKLFASSRSHLMELLNITCEFSNSIGMELGTDKCAVLHVERGRVANSEGIDLSMPVNLRTLSEAETYRYLGMSQNIGIDEAGMKQSVCDVFYARLTKVLNSLLSGVNKTHAYNGWVMPVLMYTFGILRWTQTELNALDRKVRTTMTSQRMHHPRSSVMRLYLPRKHGGRGFLSALTMHNREVCSLRNYFLARSDDPFYKDVISSDKGLTPLSLANEQWQDPAVQTISDRENVWKEKELHGRFYKALHEPFVDTVASLYWLRFGDLFGETEGFVYAIQDQVIKTNNYRRYILKDGTVDICRACRHPGESLRHVISGCSALSNSEYLHRHNLVARILHQELAQKYGLVDRKLPYYKYLPEAVLENDRARLYWDRAIITDRTILANKPDIVLMDRAQSRIFLVDITIPYDENLVKAETDKQTKYLDLAHEVTDMWGGLPTEIIPVVVSANGLIPVSLSGHLRRLGLRGGPLRAQMQKAVLLDTARIVRWFLSLSP

SEQ ID NO: 14345 - protein, 1107 aa, Parnassius apollo
MKTHCGRILGQKGKKLDVWRIGLGCIAFFAELEPSLSVTEQNLADRVRYILRSNIFGDAELERLRREAIPSSNGNATAGNAAPLDAQQTAYVDAAVNIPFVANSDDDGIVFHELEKMRSILEESMLETRSMPLENRPRLPRIPLSKRNRAVVRALNPMLVTYLEASRDLCETDSILFGAALAVCRIIGAKLPVAGRATQKSSAIPAWRKRIEDRIAKARALIGRLTSFRSGNNRPRIMRTVRMAFAGTNISLFQPDIMQKLTERIDDLKRKIAAWGKRIRRFSERSRRFNQNRLFQSDQKRLYKSLERPEVCGAGPGPDQADTVAFWRGLWSEPVNHSEGPWMEVVASQSASVTPMDPVTITPEYVAEAVRRAPNWKSPGLDGLHHYWLKGFVVCHAVLARQFQEALDQKSLPSLFTTGITHLVPKDQDTTDPSKYRPITCLPTIYKTLTSILSARITRHLELNQVMSRAQNGCRGGGRGTKEPLLIDAVIGKVVKRIRRNFSAAWIDYRKAFDSVSHTWLKRVLQLYKIDCTVRDFLEQCMGQWSTILCYLGERMMAAENHIRIRRGIFKGDCLSPIWFCLSLNPLSTLLEGSGRGFQLWKGGTKLTHLFYMDDLKLFASSRSHLMELLNITCEFSSSIGMELGTDKCAVLHVERGRVANSEGIDLSMPVNLRTLSEAETYRYLGMSQNIGIDEAGMKQSVCDVFYARLTKVLNSLLSGVNKTHAYNAWVMPVLMYTFGIFRWTQTELNALDRKVRTTMTSHRMHHPRSSVMRLYLPRKHGGRGFLSALTMHNREVCSLRDYFLARSDDPFYNDVISSDKGLTPLSLANEQWQDPAVLSISDRETVWKEKELHGRFYKALHEPFVDTVASLHSLRFGDLFGETEGFVCAIQDQVIKTNNYRRYILKDGTVDICRACRHPGESLRHVISGCSALSNSEYLHRHNLVARILHQELALKYGLVDRKLPYYKYLPEAVLENDRARLYWDRAIITDRTILANKPDIVLMDRAQSRIFLVDITIPYDENLVKAETDKQTKYLDLAHEVTDMWGGLPTEIIPVVVSANGLIPVSLSGHLRRLGLRGGPLRAQMQKAVLLDTARIVRRFLSLSP

SEQ ID NO: 14346 - protein, 1189 aa, Parnassius apollo
MMEKKIVRKGPLPGGRQGASGAGAGRDSMRAASRARGVARPPSSPPHPSSPPEGLVSAGSSRTQQAAPAAGGARRMRWSKSMNENALRAYFRAKGEETGCLAYRARMHRFFAELEPSLSVTEQNLADRVRYILRSNIFGDAELERLRREAIPSSNGNATAGNAAPLDAQQTAYVDAAINIPFVANSDDDGIVSHELEKMRSILEESMLETRSMPLENRPRLPRIPLSKRNRAVVRALNPMLVTYLEASRDLCETDSILFGAALAVCRIIGAKLPVAGRATQKSSAIPAWRKRIEDRIAKARALIGRLTSFRSGNNRPRIMRTVRMAFAGTNISLFQPDITQKLTERIDDLKQKIAAWGKRIRRFSERSRRFNQNRLFQSDQKRLYKSLERPEVCGAGPGPDQADTVAFWRGLWSEPVNHSEGPWMEVVASQSASVTPMDPVTITPEDVAEAVRRAPNWKSPGLDGLHHYWLKGFVVCHAVLARQFQEALDQKSLPSLFTTGITHLVPKDQDTTDPSKYRPITCLPTIYKTLTSILSARITRHLELNQVMSRAQNGCRGGGRGTKEPLLIDAVIGKVVKRNRRNFSAAWIDYRKAFDSVPHTWLKRVLQLYKIDCTVGDFLEQCMGQWSTILCYLGERMMAAENHIRIRRGIFQGDCLSPIWFCLSLNPLSTLLEGSGRGFQLRKGGTKVTHLFYMDDLKLFASSRSHLMELLNITCEFSNSIGMELGTDKCAVLHVERGRVANSEGIDLSMPVNLRTLSEAETYRYLGMSQNIGIDEASMKQSVCDVFYARLTKVLNSLLSGVNKTHAYNSWVMPVLMYTFGILRWTQTELNALDRKVRTTMTSHRMHHPRSSVMRLYLPRKHGGRGFLSALTMHNREVCSLRNYFLARSDDPFYKDVISSDKGFTPLSLANEQWQDPAVQTISDRENVWKEKELHGRFYKALHEPFVDTVASLHWLRFGDLFGETEGFVCAIQDQVIKTNNYRRYILKDGTVDICRACRHPGESLRHVISGCSALSNSEYLHRHNLVARILHQELALKYGLVDRKLPYYKYLPEAVLENDRARLYWDRAIITDRTILANKPDIVLMDRAQSRIFLVDITIPYDENLVKAETDKQTKYLDLAHEVTDMWGGLPTEIIPVVVSANGLIPVSLSGHLRRLGLRGGPLRAQMQKAVLLDTARIVRRFLSLSP

SEQ ID NO: 14347 - protein, 994 aa, Parnassius apollo
MLVTYLEASRDLCETDSILFGAALAVCRIIGAKVSTAGRATGHSSAIPAWRRRIEERIAKARALIGRLICFRSGNNRPRIVRTVRMAFAGTNVSLSQPDITQKLTERIDDLKQRIAAWGKRIRRYIERSTRFNQNRLFQSDQKRLYESLERPMVSGTGPAPDQADTVAFWRGLWSEPVNHSEGPWTEVVASQCAGITPMDPVIITPDDVAEAVRRAPNWKSPGLDGLHHYWLKGFMVCHSVLARQFQEALNQKSLPSLFTTGITHLVPKDQGTTDPSKYRPITCLPTIYKTLTSILSARITCHLDSNQVMSRAQNGCRGGGRGTKEPLLIDAVIGKVVKRNRRNFSSAWIDYRKAFDSVPHTWLKRVLELYKIDCTVRDFLEQCMGQWSTILCHLGERMMAAENHIRIRRGIFQGDCLSPIWFCLSLNPLSTLLEGSGRGFQLRKGGTKVTHLFYMDDLKLFASSRSHLMELLNITCEFSNSIGMELGTDKCAVLHVERGRVANSEGVDLSMPVNLRTLSEAETYRYLGMSQNIGIDETGMKQSVCDVFYARLTKVLNSLLSGVNKAHAYNGWVMPVLMYTFGILRWTQTELNALDRKVRTTMTSHRMHHPRSSVMRLYLPRKHGGRGFLSALTMHNREVCSLRDYFLARSDDPFYKDVISCDKGLTPLSLANEQWQGPAVQSISDRETVWKEKELHGRFYKALHEPFVDTVASLHWLRFGDLFGETEGFVCAIQDQVIKTNNYRRYILKDGTVDICRACRHPGESLRHVISGCSALSNSEYLHRHNLVARILHQELALKYGLVDRKLPYYKYLPEAVLENDRARLYWDRAIITDRTILANKPDIVLMDRAQSRIFLVDITIPYDENLVKAETDKQTKYLDLAHEVTDMWGGLPTEIIPVVVSANGLIPVSQPLGSSEAAGTTWRTAPGSNAEGGAPRYRPHRPPVSFPFPLTLGRLVSPAEGLHLVGLLFIYVLLYLFYVIDIYVYLSFHFHL

SEQ ID NO: 14348 - protein, 870 aa, Parnassius apollo
MRTVRMAFAGTNISLSQPDITQKLTERIDDLKQKIAAWGKRIRRFSEGSRRFNQNRLFQSDQKRLYKLLERPKVCGAGQGPDQADIIAFWRGLWSEPVNHSEGPWMEVVASQGASVTPMDPITITPEDVAEAVRRAPNWKSPGLDGLHHYWLKGFVVCHAVLARQFQEALDQKSLPSLFTTGITHLVPKDQDTTDPSKYRPITCLPTIYKTLTSILSARITRHLELNQVMSRAQNGCRGGGRGTKEPLLIDAVIGKVVKRNRRNFSAAWIDYRKAFDSVPHTWLKRVLELYKIDCTVRDFLEQCMGQWSTILCHLGERMTATENHIRIRRGIFQGDCLSPIWFCLSLNPLSTLLEGSGRGFQLRKGGTKVTHLFYMDDLKLFASSCSHLMELLNITCEFSSSIGMELGTDKCAVLHVERGRVANSEGIDLSMPVNLRTLSEAETYRYLGMSQNIGIDEAGMKQSVCDVFYARLTKVLNSLLSGVNKTHAYNGWVMPVLMYTFGILRWTQTELNALDRKVRTTMTSHRMHHPRSSVMRLYLPRKYGGRGFLSALTMHNREVCSLRHYFLARSDDPFYNDVISSDKGLTPLSLANEQWQDPAVLSISDRETVWKAKELHGRYYRALHEPFVDTVASLNWLRFGDLFGETEGFVCAIQDQVIKTNNYRRYILKDGTVDVCRACRHPGESLRHVISGCSALSNSEYLHRHNLVARILHQELALKYGLVDRKLPYYKYLPEAVLENDRARLYWDRAIITDRTILANKPDIVLMDRAQSRIFLVDITIPYDENLVRAETDKQTKYLDLAYEVTDMWGGLPAEIIPVVVSANGLIPVSLSGHLRRLGLRDGPLRVQMQKAVLLDTARIVRRFLSLSP

SEQ ID NO: 14349 - protein, 1138 aa, Parnassius apollo
MKTHCGRILGQKGKKLDVWRIGLGCIAFFAELEPSLSVTEQNLADRVSYILRSNIFGDAELERLRREAIPSSNGNATAGNAAPLDAQQTAYVDAAVNIPFVANSDDDGIVSHELEKMRSILEESMLETRSMPLENRPRLPRIPLSKRNRAVVRALNPMLVTYLEASRDLCETDSILFGAALAVCRIIGAKLPVAGRATQKSSAIPAWRKRIEDRIAKARALIGRLTSFRSGNNRPRIMRTVRMAFAGTNINLFQPDITQKLTERIDDLKQKIAAWGKRIRRFSERSSRFNQNRLFQSDQKRLYKTLERPEVCGAGPGPDQADTVAFWRGLWSEPVNHSEGPWMEVVASQSASVTPMDPVTITPEDVAEAVRRAPNWKSPGLDGLHHYWLKGFVVCHAVLARQFQEALDQKSLPSLFTTGITHLVPKDQDTTDPSKYRPITCLPTIYKTLTSILSARITRHLELNQVISRAQNGCRGGGRGTKEPLLIDAVIGKVVKRNRRNFSAAWIDYRKAFDSVPHTWLKRVLQLYKIDCTVGDFLEQCMGQWSTILCYLGERMMAAENHIRIRRGIFQGDCLSPIWFCLSLNPLSTLLEGSGRGFQLRKGGTKVTHLFYMDDLKLFASSRSHLMELLNITCEFSNSIGMELGTDKCAVLHVERGRVANSEGIDLSMPVNLRTLSEAETYRYLGMSQNIGIDEAGMKQSVCDVFYARLTKVLNSLLSGVNKTHAYNGWVMPVLMYTFGILRWTQTELNALDRKVRTTMTSHRMHHPRSSVMRLYLPRKHGGRGFLSALTMHNREVCSLRNYFLARSDDPFYKDVISSDKGLTPLSLAKEQWQDPAEQTISDRENVWKEKEPHGRFYNALHEPFVDTVASLHWLRFGDLFGETEGFVCAIQDQVIKTNNYRRYILKDGTVDICRACRHPGESLRHVISGCSALSNSEYLHRHNLVARILHQELALKYGLVDRKLPYYKYLPEAVLENDRARLYWDRAIITDRTILANKPDIVLMDRAQSRIFLVDITIPYDENLVKAETDKQTKYLDLAHEVTDMWGGLPTEIIPVVVSANGLIPVSLSGHLRRLGLRGGPLRAQMQKAVLLDTARIVRRFLSLSPLTLGRLVSPCRGPPSGWAFIYLCIFIFILCY

SEQ ID NO: 14350 - protein, 1134 aa, Parnassius apollo
MSAGSSRTRQAASAAGGVRRMRWTRDMNANAMRAYYRAKGEETAGIAYRARMHCFFAELEPSIPVTEQNLADRVRYIMRSKIFDDAELERLRREAIPSSNELATAGDEAPQATDQLPRVEAAMDLPVVGDSDDDEMVSHELEQMRSILEEAILETRSMPLENRPRLPRIPLSKRNRAVVRALNPMLVTYLEASRDHCETDSVLFGAAVAACRIIGAKLPMAGRATKQSSAIPAWRKRIEDRIAKARALIGRLISFRSGNNRPRVVRTVRMAFAGTNISLSQPDITQKLTERIDDLKQKIAAWGKRIRRFTERSRRFNQNRLFQSDQKRLYKSLERPEVCGAGPGPDQANTVAFWRGLWSEPVNHSEGPWTEVVASQCASITPMDPVIITPDDVAEAVRRAPNWKSPGLDGLHHYWLKGFTVCHAVLARQFQEALNQKSLPSLFTTGITHLVPKDQVTTDPSKYRPITCLPTIYKTLTSILSARITRHLELNQVMSRAQNGCRGGGRGTKEPLLIDAVIGKVVKRNRRNFSAAWIDYRKAFDSVPHTWLKRVLELYKIDCTVRDFLEQCMGQWSTILCHLGERMMAAENHIRIRRGIFQGDCLSPIWFCLSLNPLSTLLEESGRGFQLRKGGTKVTHLFYMDDLKLFASSRSHLVELLKITCEFSSSIGMELGTDKCAVLHVERGRVANSEGIDLSMPVNLRTLSEAETYRYLGMSQNIGTDEAGVKQSVCDVFYARLTKVLNSLLSGVNKTHAYNGWVMPVLMYTFGILRWTQTELNALDRKVRTTMTSHRMHHPRSSVMRLYLPRKHGGRGFLSALTMHNREVCSLRHYFLARSDDPFYNDVISSDKGLTPLSLANEQWQDPAVLSISDRETVWKEKELHGRYYRVLHEPFVDTVASLNWLRFGDLFGETEGFVCSIQDQVIKTNNYRRYIQKDGTVDVCRACRHPGESLRHVISGCSALSNSEYLHRHNLVARILHQALALKYGLEDRKLPYYKYFPEAVLENDRARLYWDRAIITDRTILANKPDIVLMDRAQSRIFLVDITIPYDENLVKAETDKQTKYLDLAHEVTDMWGGLPTEIIPVVVSANGLIPVSLSGHLRRLGLRDGPLRAQMQKAFVLDTACIVRRFLSLSS

SEQ ID NO: 14351 - protein, 950 aa, Parnassius apollo
MLVTYLEASRDLCETDSVLFGAAVAACRIIGAKLPMAGRATKQSSAIPAWRKRIEDRIAKARALIGRLISFRSGNNRPRVVRTVRMAFAGTNISLSQPDITQKLTERIDDLKQKIAAWGKRIRRFTERSRRFNQNRLFQSDQKRLYKSLERPEVCGAGPGPDQANTVAFWRGLWSEPVNHSEGPWTEVVASQCASITPMDPVIITPDDVAEAVRRAPNWKSPGLDGLHHYWLKGFMVCHAVLARQFQEALNQKSLPSLFTTGITHLVPKDQVTTDPSKNRPITCLPTIYKTLTSILSARITRHLELNQVMSRAQNRCRGGGRGTMEPLLIDAVIGKVVKRNRRNFSAAWIDYRKAFDSVPHTWLKRVLELYKIDCTVRDFLGQCMGQWSTILCHLGERMMAAENHIRIRRGIFQGDCLSPIWFCLSLNPLSTLLEESGRGFQLRKGGTKVTHLFYMDDLKLFASSRSHLVELLKITCEFSSSIGMELGTDKCAVLHVERGRVANSEGIDLSMPVNLRTLSEAETYRYLGMSQNIGIDEAGVKQSVCDVFYARLTKVLNSLLSGVNKTHAYNGWVMPVLMYTFGILRWTQTELNALDRKVRTTMTSHRMHHPRSSVMRLYLPRKHGGRGFLSALTMHNREVCSLRHYFLARSDDPFYNDVISSDKGLTPLSLANEQWQDPAVLSISDRETVWKEKELHGRYYRVLHEPFVDTVASLNWLRFGDLFGETEGFVCAIQDQVIKTNNYRRYILKDGTVDVCRACRHPGESLRHVISGCSALSNSEYLHRHNLVARILHQALALKYGLVDRKLPYYKYLPEAVLENDRARLYWDRAIITDRTILANKPDIVLMDRAQSRIFLVDITIPYDENLVKAETDKQTKYLDLAHEVTDMWGGLPTEIIPVVVSANGLIPVSLSGHLRRLGLRDGPLRAQMQKAVVLDTARIVRRFLSLSS

SEQ ID NO: 14352 - protein, 1116 aa, Parnassius apollo
MRWTTQMNSNALRAYFRAKGGETGGFAYRARMHRLFAELEPSVTVTEQNLADRVRYILRSNTFDVTELERLRREAVPSSGENAAAEDAAPQLAEQTANVDAAVNTPVVVDSNDDGTVAQELELEQMRSTLEEAIVETRSTTLENRPRLPRLALSKRNRAVVRALNPMLVTYLEASRDLCDTDSILFGAALAVCRIIGAKLSTAGRATGQSSAIPAWRIRIEERIAKARALIGRLICFRSGNTRPRIVRTVRMAFAGTNVSLSQPDIMQKLTERIDDLKQRIAAWGKRIRRYTERSTRFNQNRLFQSDQKRLYKSLERPIVSGTGPAPNQADMVAFWRSLWSEPVNHNEGPWTEVVASQCASITPMDPVIITPDDVAEAVRRAPNWKSPGLDGLHHYWLKGFMVCHSVLARQFQEALNQKSLPSLFTTGITHLVPKDQGATDPSKYRPITCLPTIYKTLTSILSARIARHLDLNQVMSRAQNGCRGGGRGTKEPLLIDAVIGKVVKRNRRNFSAAWIDYRKAFDSVPHTWLKRVLELYKIDCTVRDFLEQCMGQWSTILCHLGERMTAAESRIRIRRGIFQGDCLSPIWFCLSLNPLSTLLEGSGKGFQLRKGGTKVTHLFYMDDLKLFASSRSHLMELLNITCEFSNSIRMELGTDKCAVLHVERGRVANSEGIDLSMPVNLRILSEAETYRYLGMSQNIGIDEAGMKQSVCDVFYARLTKVLNSLLSGVNKAHAYNGWVMPVLMYTFGILRWTQTELNALDRKVRTTMTSHRMHHPRSSVMRLYLPRKHGGRGFLSALTMHNREVCGLRDYFLARSDDPFYKDVISCDKGLTPLSLANEQWQDPAVQSISDWETVWKEKELHGRFYKALHEPFVDTVASLHWLRFGDLFGETEGFVCAIQDQVIKTNNYRRYILKDGTVDICRACRHPGESLRHVISGCSALSNSEYLHRHNLVARILHQELDLKYGLVDRKLPYYKYLPEAVLENDRARLYWDRAIITDRTILANKPDIVLMDRAQSRIFLVDITIPYDENLVKAETDKKTKYLDLAHEVTDMWGGLPTEIIPVVVSANGLIPVSLSGHLRRLGLRGGPLQVQMQKAVLLDTARIVRRFLSLSP

SEQ ID NO: 14353 - protein, 991 aa, Parnassius apollo
MRSTLEEAIVETRSTTLENRPRLPRLALSKRNRAVVRALNPMLVTYLEASRDLCDTDSILFGAALAVCRIIGAKLSTAGRATGQSSAIPAWRIRIEERIAKARALIGRLICFRSGNTRPRIVRTVRMAFAGINVSLSQPDIMQKLTERIDDLKQRIAAWGKRIRRYTERSTRFNQNRLFQSDQKRLYKSLERPIVSGTGPAPNQADMVAFWRSLWSEPVNHSEGPWTEVVASQCASITPMDPVIITPDDVAEAVRRAPNWKSPGLDGLHHYWLKGFMVCHSVLARQFQEALNQKSLPSLFTTGITHLVPKDQGATDPSKYRPITCLPTIYKTLTSILSARIARHLDLNQVMSRAQNGCRGGGRGTKEPLLIDAVIGKVVKRNRRNFSAAWIDYRKAFDSVPHTWLKRVLELYKIDCTVRDFLEQCMGQWSTILCHLGERMTAAESRIRIRRGIFQGDCLSPIWFCLSLNPLSTLLEGSGRGFQLRKGGTKVTHLFYMDDLKLFASSRSHLMELLNITCEFSNSIRMELGTDKCAVLHVERGRVANSEGIDLSMPVNLRTLSEAETYRYLGMSQNIGIDEAGMKQSVCDVFYARLTKVLNSLLSGVNKAHAYNGWVMPVLMYTFGILRWTQTELNALDRKVRTTMTSHRMHHPRSSVMRLYLPRKHGGRGFLSALTMHNREVCSLRDYFLSRSDDPFYKDVISRDKGLTPLSLANEQWQDPAVQSISDRETVWKEKELHGRFYKALHEPFVDTVASLHWLRFGDLFGETEGFVCAIQDQVIKTNNYRRYILKDGTVDICRACRHPGESLRHVISGCSALSNSEYLHRHNLVARILHQELALKYGLVDRKLPYYKYLPEAVLENDRARLYWDRAIITDRTILANKPDIVLMDRAQSRIFLVDITIPYDENLVKAETDKQTKYLDLAHEVTDMWGGLPTEIIPVVVSANGLIPVSLSGHLRRLGLRGGPLQVQMQKAVLLDTARIVRRFLSLSP

SEQ ID NO: 14354 - protein, 1205 aa, Parnassius apollo
MLIIIIIIINKIRMMEHRRLRKGPLPGGRQGASGAGAGRDSMRTASRARGAARPPSSPSHPSSPPACLVSAGSSQAQQSAPATGGVRRMRWTINMNSNALRAYFRAKGGEIGGFAYRARMHRLFTELEPSITVTEQNLADRVRYILRSNIFDGAELERLRREAVPSSNENATTEGAVPQVAEQPAHVDAAENTPVVADSNDDGTFTQELEIEQMRSTLEEAIMETRSTPLENRPRLPRIALSKRNRAVVRALNPMLVTYLEASRDLCETDSILFGAALAVCRIIGAKLSTAGRTTGQSSAIPAWRTRIEERIAKARALIGRLICFRSGNTRPRIVRTVRMAFAGTNVSLSQPDIMQKLTERIDDLKQRIAAWGKRIRRYTERSTRFNQNRLFQSDQKRLYKSLERPMVSGTGPVLSNQADTVAFWRSLWSEPVNHNEGPWTEVVASQCAGITPMDPVTITPDDVAEAVRRAPNWKSPGLDGLHHYWLKGFVVCHTVLARQFQEVLNQKSLPSLFTTGITHLVPKGQSTTDPSKYRPITCLPTIYKTLTSILSARITRHLDSNQVMSRAQNGCRGGGRGTKEPLLIDAVIGKVVKRNRRNFSAAWIDYRKAFDSVPHTWLKRVLELYKIDCTVRDFLEQCMGQWSTILCHLGERMMAAENHIRIRRGIFQGDCLSPIWFCLSLNPLSTLLEGSGRGFQLRKGGTKVTHLFYMDDLKLFASSRSHLMELLNITCEFSNSIGMELGTDKCAVLHVERGRVANSEGIDLSMPVNLRTLSEAETYRYLGMSQNIGIDEAGMRQSVCDVFYARLTKVLNSLLSGVNKTQAYNGWVIPVLMYTFGILRWTQTELNALDRKVRTTMTSHRMHHPRSSVMRLYLPRKHGGRGFLSALTMHNREVCSLRNYFLARSDDPFYKDVISCDKGLTPLSLANEQWQDPAVQTISDRETVWKEKELHGRFYKSLHGPFVDTVTSLHWLRFGDLFGETEGFVCAIQDQVIKTNNYRRYILKDGTIDICRACRHPGESLRHVISGCSALSNSEYLYRHNLVARILHQELALKYGFVDRKLPYYKYLPEAVLENDRARLYWDRAIIRDRTILANKPDIVLMDRAQSRIFLVDITIPCDENLVKAETDKQTKYLDLAHEVTDMWGGLPTEIIPVVVSANGLIPVSLSGHLRRLGLRGGPLQAQMQKAVLLDTARIVRRFLSLSP

SEQ ID NO: 14355 - protein, 950 aa, Calephelis perditalis
MLVTYLEASRDLCETDSILFGAALAVCRIIGAKVSTAGRATGQSSAIPAWRRRIEERIAKARALIGKLICFRSGNTRPRIVRTVRMAFAGTNVSLSQPDIMQKLTERIDDLKQRIAAWGKRIRRYTERSTRFNQNRLFQSDQKRLYKSLERPKVCGAGQGPDQADIIAFWRGLWSEPVNHSEGPWTEVVASQGASVTPMDPITVTPEDVAEAVRRAPNWKSPGLDGLHHYWLKGFMVCHAVLARQFQEALNQKSLPSLFTTGITHLVPKDQVTTDPSKYRPITCLPTIYKTLTSILSARITRHLDSNQVMSRAQNGCRGGGRGTKEPLLIDAVIGKVVKRNRRNFSAAWIDYRKAFDSVPHTWLKRVLELYKIDCTVRDFLEQCMGQWSTILCHLGERMMAAENHIRIRRGIFQGDCLSPIWFCLSLNPLSTLLEGSGRGFQLRKGGTKVTHLFYMDDLKLFASSRSHLMELLNITCEFSNSIRMELGTDKCAVLHVERGRVANSEGIDLSMPVNLRTLSEAETYRYLGMSQNIGIDEAGMKQSVCDVFYARLTKVLNSLLSGVNKTHAYNGWVMPVLMYTFGILRWTQTELNALDRKVRTTMTSHRMHHPRSSVMRLYLPRKHGGRGFLSALTMHNREVCSLRNYFLARSDDPFYKDVISCDKGLTPLSLANEQWQDPAVLSISDRETVWKEKELHGRFYKALHEPFVDTVASLHWLRFGDLFGETEGFVCAIQDQVIKTNNYRRYILKDGTVDICRACRHPGESLRHVISGCSALSNSEYLHRHNLVARILHQELALKYGLVDRKLPYYKYLPEAVLENDRARLYWDRAIITDRTILANKPDIVLMDRAQSRIFLVDITIPYDENLVKAETDKRTKYLDLAHEVTDMWGGLPTEIIPVVVSANGLIPVSLSGHLRRLGLRGGPLRAQMQKAVLLDTARIVRRFLSLSP

SEQ ID NO: 14356 - protein, 915 aa, Parnassius apollo
MAGRATQQGSAIPAWRKRIEDRIAKARALIGRLTSFRSGNIRPRVVRTVRMAFAGTNISLSQPDITQKLTERIDDLKQKIAAWGKRIRRFSERSRRFNQNRLFQSDQKRLYKSLERPEVCGAGPGPDQADTVAFWRGLWSEPVNHSEGPWMEVVASRSASVTPMDPVTITPEDVAEAVRRAPNWKSPGLDGLHHYWLKGFVVCHAVLARQYQEALDQKSLPSLFTTGITHLVPKDQDTTDPSKYRPITCLPTIYKTLTSILSARITRHLELNKVMSRAQNGCRGGGRGTKEPLLIDAVIGKVVKRNRRNFSAAWIDYRKAFDSVPHAWLKRVLELYKIDCTVRDFLEQCMGQWSTILCYQGERMMAAENHIRIRRGIFQGDCLSPIWFCLSLNPLSTLLEGSGRGFQLRKGGTKVTHLFYMDDLKLFASSRSHLMELLNITCEFSNSIGMELGTDKCAVLHVERGRVANSEGIDLSMPVNLKTLSEAETYRYLGMSQNIGIDEAGVKQSVCDVFYARLTKVLNSLLSGVNKTHAYNGWVMPVLIYTFGILRWTQTELNALDRKVRTTMTSHRMHHPRSSVMRLYLPRKHGGRGFMSALTMHNREVCSLRDYFLTRSDDPFYNDVISSDKGLTPLSLAHEQWQDPAVLSISDRETVWKEKELHGRYYRALHEPFVDTVASLNWLRFGDLFGETEGFVCAIQDQVIKTNNYRRYILKDGTVDVCRACRHPGESLRHVISGCSALSNSEYLHRHNLVARILHQELALKYGLVDRKLPYYKYLPEAVLENDRARLYWDRAIITDRTILANKPDIVLMDRAQSRIFLVDITIPYDENLVKAETDKQTKYLDLAHEVTDMWGGLPTEIIPVVVSANGLIPVSLSGHLRRLGLRGGPLRAQIQKAVLLDTARIVRRFLSLSP

SEQ ID NO: 14357 - protein, 1159 aa, Parnassius apollo
MRWTINMNSNALRAYFRAKGGEIGGFAYRARMHRLFTELEPSITVTEQNLADRVRYILRSNIFDGAELERLRREAVPSSNENATTEGAVPQVAEQPAHVDAAENTPVVADSNDDGTFTQELEIEQMRSTLEEAIMETRSTPLENRPRLPRIALSKRNRAVVRALNPMLVTYLEASRDLCETDSILFGAALAVCRIIGAKLSTAGRTTGQSSAIPAWRTRIEERIAKARALIGRLICFRSGNTRPRIVRTVRMAFAGTNVSLSQPDIMQKLTERIDDLKQRIAAWGKRIRRYTERSTRFNQNRLFQSDQKRLYKSLERPMVSGTGPVPNQADTVAFWRSLWSEPVNHNEGPWTEVVASQCAGITPMDPVTITPDDVAEAVRRAPNWKSPGLDGLHHYWLKGFMVCHSVLARQFQEALNQKSLPSLFTTGITHLVPKGQGTTDPSKYRPITCLPTIYKTLTSILSARITRHLDSNQVMSRAQNGCRGGGRGTKEPLLIDAVIGKVVKRNRRNFSAAWIDYRKAFDSVPHTWLKRVLELYKIDCTVRDFLEQCMGQWSTILCHLGERMMAAENHIRIRRGIFQGDCLSPIWFCLSLNPLSTLLEGSGRGFQLRKGGTKVTHLFYMDDLKLFASSRSHLMELLNITCEFSNSIGMELGTDKCAVLHVERGRVANSEGIDLSMPVNLRTLSEAETYRYLGMSQNIGIDEAGMKQSVCDVFYARLTKVLNSLLSGVNKTQAYNGWVIPVLMYTFGILRWTQTELNALDRKVRTTMTSHRMHHPRSSVMRLYLPRKHGGRGFLSALTMHNREVCSLRNYFLARSDDPFYKDVISCDKGLTPLSLANEQWQDPAVQTISDRETVWKEKELHGRFYKSLHGPFVDTVTSLHWLRFGDLFGETEGFVCAIQDQVIKTNNYRRYILKDGTIDICRACRHPGESLRHVISGCSALSNSEYLHRHNLVARILHQELALKYGFVDRKLPYYKYLPEAVLENDRARLYWDRAIITDRTILANKPDIVLMDRAQSRIFLVDITIPCDENLVKAETDKQTKYLDLAHEVTDMWGGLPTEIIPVVVSANGLIPVSLSGHLRRLGLRGGPLQAQMQKAVLLDTARIVRRFLSLSPLTLGRLVSPAEGFHLVGLLFIYVFSYLFYFIDIFVCLSFHFRL

SEQ ID NO: 14358 - protein, 950 aa, Parnassius apollo
MLVTYLEASRDLCETDSILFGAALAVCRIIGAKVSTAGRATGHSSAIPAWRRRIEERIAKARALIGRLICFRSGNNRPRIVRTVRMAFAGTNVSLSQPDITQKLTERIDDLKQRIAAWGKRIRRYTERSTRFNQNRLFQSDQKRLYESLERPMVSGTGPAPDQADTVAFWRGLWSEPVNHSEGPWTEVVASQCAGITPMDPVIITPDDVAEAVRRAPNWKSPGLDGLHHYWLKGFMVCHSVLARQFQEALNQKSLPSLFTTGITHLVPKDQGTTDPSKYRPITCLPTIYKTLTSILSARITCHLDSNQVMSRAQNGCRGGGRGTKEPLLIDAVIGKVVKRNRRNFSAAWIDYRKAFDSVPHTWLKRVLELYKIDCTVRDFLEQCMGQWSTILCHLGERMMAAENHIRIRRRIFQGDCLSPIWFCLSLNPLSTLLEGSGRGFQLRKGGTKVTHLFYMDDLKLFASSRSHLMELLNITCEFSNSIGMELGTDKCAVLHVERGRVANSEGVDLSMPVNLRTLSEAETYRYLGMSQNIGIDETGMKQSVCDVFYARLTKVLNSLLSGVNKAHAYNGWVMPVLMYTFGILRWTQTELNALDRKVRTTMTSHRMHHPRSSVMRLYLPRKHGGRGFLSALTMHNREVCSLRDYFLARSDDPFYKDVISCDKGLTPLSLANEQWQDPAVQSISDRETVWKEKELHGRFYKALHEPFVDTVASLHWLRFGDLFGETEGFVCAIQDQVIKTNNYRRYILKDGTVDICRACRHPGESLRHVISGCSALSNSEYLHRHNLVARILHQELALKYGLVDRKLPYYKYLPEAVLENDRARLYWDRAIITDRTILANKPDIVLMDRAQSRIFLVDITIPYDENLVKAETDKQTKYLDLAHEVTDMWGGLPTEIIPVVVSANGLIPVSLSGHLRRLGLRGGPLQVQMQKAVLLDTARIVRRFLSLSP

SEQ ID NO: 14359 - protein, 950 aa, Parnassius apollo
MLVTYLEASRDLCETDSILFGAALAVCRIIGAKVSTAGRATGHSSAIPAWRRRIEERIAKARALIGRLICFRSGNNRPRIVRTVRMAFAGTNVSLSQPDITQKLTERIDDLKQRIAAWGKRIRRYTERSTRFNQNRLFQSDQKRLYESLERPMVSGTGPAPNQADTVAFWRGLWSEPVNHSEGPWTEVVASQCAGITPMDPVIITPDDVAEAVRRAPNWKSPGLDGLHHYWLKGFMVCHSVLARQFQEAPNQKSLPSLFTTGITHLVPKDQGTTDPSKYRPITCLPTIYKTLTSILSARITCHLDSNQVMSRAQNGCRGGGRGTKEPLLIDAVIGKVVKRNRRNFSAAWIDYRKAFDSVPHTWLKRVLELYKIDCTVRDFLEQCMGQWSTILCHLGERMMAAENHIRIRRGIFQGDCLSPIWFCLSLNPLSTLLEGSERGFQLRKGGTKVTHLFYMDDLKLFASSRSHLMELLNITCEFSNSIGMELGTDKCAVLHVERGRVANSEGVDLSIPVNLRTLSEAETYRYLGMSQNIGIDETGMKQSVCDVFYARLTKVLNSLLSGVNKAHAYNGWVMPVLMYTFGILRWTQTELNALDRKVRTTMTSHRMHHPRSSVMRLYLPRKHGGRGFLSALTMHNREVCSLRDYFLARSDDPFYKDVISCDKGLTPLSLANEQWQDPAVQSISDRETVWKEKELHGRFYKALHEPFVDTVASLHWLRFGDLFGETEGFVCAIQDQVIKTNNYRRYILKDGTVDICRACRHPGESLRHVISGCSALSNSEYLHRHNLVARILHQELALKYGLVDRKLLYYKYLPEAVLENDRARLYWDRAIITDRTILANKPDIVLMDRAQSRIFLVDITIPYDENLVKAETDKQTKYLDLAHEVTDMWGGLPTEIIPVVVSANGLIPVSLSGHLRRLGLRGGPLQVQMQKAVLLDTARIVRRFLSLSP

SEQ ID NO: 14360 - protein, 915 aa, Parnassius apollo
MAGRATKQSSAIPAWRKRIEDRIAKARALIGRLISFRSGNNRPRVVRTVRMAFAGTNISLSQPDITQKLTERIDDLKQKIAAWGKRIRRFTERSRRFNQNRLFQSDQKRLYKSLERPEVCGAGPGPDQADTVAFWRGLWSEPVNHSEGPWMEVVASQCASITPMDPVTITPDDVAEAVRRAPNWKSPGLDGLHHYWLKGFVVCHAVLARQFQEALNQKSLPSLFTTGITHLVPKDQVTTDPSKYRPITCLPTIYKTLTSILSARITRHLELNQVMSRAQNGCRGGGRGTKEPLLIDAVIGKVVKRNRRNFSAAWIDYRKAFDSVPHTWLKRVLELYKIDCTVRDFLEQCMGQWSTILCHLGERMMAAENHIRIRRGIFQGDCLSPIWFCLSLNPLSTLLEGSGRGFQLRKGGTKVTHLFYMDDLKLFASSRSHLVELLKITCEFSNSIGMELGTDKCAVLHVERGRVANSEGIDLSMPVNLRTLSEAETYRYLGMSQNIGIDEAGVKQSVCDVFYARLTKVLNSLLSGVNKTHAYNGWVMPVLMYTFGILRWTQTELNALDRKVRTTMTSHRMHHPRSSVMRLYLPRKHGGRGFLSALTMHNREVCSLRHYFLARSDDPFYNDVISSDKGLTPLSLANEQWQDPAVLSISDRETVWKEKELHGRYYRALHEPFVDTVASLNWLRFGDLFGETEGFVCAIQDQVIKTNNYRRYILKDGTVDVCRACRHPGESLRHVISGCSALSNSEYLHRHNLVARILHQALALKYGLVDRKLPYYKYLPEAVLENDRARLYWDRAIITDRTILANKPDIVLMDRAQSRIFLVDITIPYDENLVKAETDKQTKYLDLAHEVTDMWGGLPTEIIPVVVSANGLIPVSLSGHLRRLGLRDGPLRAQMQKAVVLDTARIVRRFLSLSS

SEQ ID NO: 14361 - protein, 950 aa, Parnassius apollo
MLVTYLEASRDLCETDSVLFGAAVAACRIIGAKLPMAGRATKQSSAIPAWRKRIEDRIAKARALIGRLISFRSGNNRPRVVRTVRMAFAGTNISLSQPDITQKLTERIDDLKQKIAAWGKRIRRFTERSRRFNQNRLFQSDQKRLYKSLERPEVCGAGPGPDQANTVAFWRGLWSEPVNHSEGPWTEVVASQCASITPMDPVIITPDDVAEAVRRAPNWKSPGLDGLHHYWLKGFMVCHAVLARQFQEALNQKSLPSLFTTGITHLVPKDQVTTDPSKYRPITCLPTIYKTLTSILSARITRHLELNQVMSRAQNGCRGGGRGTKEPLLIDAVIGKVVKRNRRNFSAAWIDYRKAFDSVPHTWLKRVLELYKIDCTVRDFLELCMGQWSTILCHLGERMMAAENHIRIRRGIFQGDCLSPIWFCLSLNPLSTLLEGSGRGFQLRKGGTKVTHLFYMDDLKLFASSRSHLVELLKITCEFSSSIGMELGTDKCAVLHVERGRVANSEGIDLSMPVNLRTLSEAETYRYLGMSQNIGIDEAGVKQSVCDVFYARLTKVLNSLLSGVNKTHAYNGWVMPVLMYTFGILRWTQTELNALDRKVCTTMTSHRMHHPRSSVMRLYLPRKHGGRGFLSALTMHNREVCSLRHYFLARSDDPFYNDVISSDKGLTPLSLANEQWQDPAVLSISDRETVWKEKELHGRYYRVLHEPFVDTVASLNWLRFGDLFGETEGFVCAIQDQVIKTNNYRRYILKDGTVDVCRACRHPGESLRHVISGCSALSNSEYLHRHNLVARILHQALALKYGLVDRKLPYYKYLPEAVLENDRARLYWDRAIITDRTILANKPDIVLMDRAQSRIFLVDITIPYDENLVKAETDKQTKYLDLAHEVTDMWGGLPTEIIPVVVSANGLIPVSLSGHLRRLGLRDGPLRAQMQKAVVLDTARIVRRFLSLSP

SEQ ID NO: 14362 - protein, 1085 aa, Parnassius apollo
MHRLFAELEPSLTVTEQNLADRVRYILRSNIFDVAELERLRREAVPSSDENATAEDAAPQMVEQPANVDAAVNTPVVVDSNDDGTVAQELELEHMRSTLEEAIVETRSTPLENRPRLPRIALSKRNRAVVRALNPMLVTYLEASRDLCETDSILFGAALAVCRILGAKVSTAGRATGHSSAIPAWRRRIEERIAKARALIGRLICFRSGNNRPRIVRTVRMAFAGTNVSLSQPDITQKLTESIDDLKQRIAAWGKRIRRYTERSTRFNQNRLFQSDHKRLYESLERPMVSGTGPAPNQADTVAFWRGLWSEPVNHSEGPWTEVVASQCAGITPMDPVIITPDDVAEAVRRAPNWKSPGLDGLHHYWLKGFMVCHSVLARQFQEALNQKSLPSLFTTGITHLVPKDQGTTDPSKYRPITCLPTIYKTLTSILSARITCHLDSNQVMSRAQNGCRGGGRGTKEPLLIDAVIGKVVKRNRRNFFAAWIDYRKAFDSVPHTWLKRVLELYKIDCTVRDFLEQCMGQWSTILCHLGERMMAAENHIRIRRGIFQGDCLSPIWFCLSLNPLSTLLEGSGRGFQLRRGGTKVTHLFYMDDLKLFASSRSHLMELLNITCEFSNSIGMELGTDKCAVLHVERGRVANSEGVDLSMPVNLRTLSEAETYRYLGMSQNIGIDETGMKQSVCDVFYARLTKVLNSLLSGVNKAHAYNGWVMPVLMYTFGILRWTQTELNALDRKVRTTMTSHRMHHPRSSVMRLYLSRKHGGRGFLSALTMHNREVCSLRHYFLARSDDPFYMDVISCDKGLTPLSLANEQWQDPAVQSISDRETVWKEKELHGRFYKALHEPFVDTVASLHWLRFGDLFGETEGFVCAIQDQVIKTNNYRRYILKDGTVDICRAFRHPGESLRHVISGCSALSNSEYLHRHNLVARILHQELALKYGLVDRKFPYYKYLPEAVLENDRARLYWDRAIITDRTILANKPDIVLMDRAQSRIFLVDITIPYDENLVKAETDKQTKYLDLAREVTDMWGGLPTEIIPVVVSANGLIPVSLSGHLRRLGLRGGPLQVQMQKAVLLDTARIVRRFLSLSP

SEQ ID NO: 14363 - protein, 1191 aa, Parnassius apollo
MMEYGRTRKGPLPGGRQGASGAGAGRGSMRTASRARGAARPPSSPSHPSSPPAGLVSAGSSRAQQSAPASGGVRRMRWTTQMNSNALRAYFGAKGGETGCLAYRARMHRLFAELEPSLTVTEQNLADRVRYILRSNIFDVAELERLRREAVPSSDENATAEDAAPQMVEQPANVDAAVNTPVVVDSNDDGTVAQELELEHMRSTLEEAIVETRSTPLENRPRLPRIALSKRNRAVVRALNPMLVTYLEASRDLCETDSILFGAALAVCRIIGAKVSTAGRATGHSSAIPAWRRRIEERIAKARALIGRLICFRSGNNRLRIVRTVRMAFAGTNVSLSQPDITQKLTERIDDLKQRIAAWGKRIRRYTERSTRFNQNRLFQSDQKRLYESLERPMVSGTGPAPNQADTVAFWRGLWSEPVNHSEGPWTEVVASQCAGLTPMDPIIITPDDVAEAVRRAPNWKSPGLDGLHHYWLKGFMVCHSVLARQFQEALNQKSLPSLFTTGITHLVPKDQGTTDPSKYRPITCLPTIYKTLTSILSARITCHLDSNQVMSRAQNGCRGGGRGTKEPLLIDAVIGKVVKRNRRNFSAAWIDYRKAFDSVPHTWLKRVLELYKIDCTVRDFHEQCMGQWSTILCHLGERMMAAENHIRIRRGIFQGDCLSPIWFCLSLNPLSTLLEGSGRGFQLRRGGTKVTHLFYMDDLKLFASSRSHLMELLNITCEFSNSIGMELGTDKCAVLHVERGRVANSEGVDLSMPVNLRTLSEAETYRYLGMSQNIGIDETGMKQSVCDVFYARLTKVLNSLLSGVNKAHAYNGWVMPVLMYTFGILRWTQTELNALDRKVRTTMTSHRMHHPRSLVMRLYLSRKHGGRGFLSALTMHNREVCSLRDYFLARSDDPFYMDVISCDKGLTPLSLANEQWQDPVVQSISDRETVWKEKELHGRFYKALHEPFVDTVASLHWLRFGDLFGETEGFVCAIQDQVIKTNNYRRYILKDGTVDICRACRHPGESLRHVISGCSALSNSEYLHRHNLVARILHQELALKYGLVDRKLPYYKYLPEAVLENDRARLYWDRAIITDRTILANKPDIVLMDRAQSRIFLVDITIPYDENLVKAETDKQTKYLDLAHEVTDMWGGLPTEIIPVVVSANGLIPVSLSGHLRRLGLRGGPLQVQMQKAVLLDTARIVRRFLSLSP

SEQ ID NO: 14364 - protein, 1188 aa, Parnassius apollo
MMEYGRTRKGPLPGGRQGASGAGAGRGSMRTASRARGAARPPSSPSHPSSPPAGLVSAGSSRAQQSAPASGGVRRMRWTTQMNSNALRAYFGAKGGETGCLAYRARMHRLFAELEPSLTVTEQNLADRVRYILSSNIFDVAELERLRREAVPSSDENATAEDAAPQMVEQPANVDAAVNTPVVVDSNDDGTVAQELELEHMRSTLEEAIVETRSTPLENRPRLPRIALSKRNRAVVRALHPMLVTYLEASRDLCETDSILFGAALAVCRIIGAKVSTAGRATGHSSAIPAWRRRIEERIARARALIGRLICFRSGNNRPRIVRTVRMAFAGTNVSLSQPDITHTAIDDLKQRIAAWGKRIRRYTERSTRFNQNRLFQSDQKRLYESLERPMVSGTGPAPNQADTVAFWRGLWSEPVNHSEGPWTEVVASQCAGITPMDPVIITPDDVAEAVRRAPNWKSPGLDGLHHYWLKGFMVCHSVLARQFQEALNQKSLPSLFTTGITHLVPKDQGTTDPSKYRPITCLPTIYKTLTSILSARITCHLDSNQVMSRAQNGCRGGGRGTKEPLLIDAVIGKVVKRNRRNFSAAWIDYRKAFDSVPHTWLKRVLELYKIDCTVRDFLEQCMGQWSTILCHLGERMMAAENHIRIRRGIFQGDCLSPIWFCLSLNPLSTLLEGSGRGFQLRRGGTKVTHLFYMDDLKLFASSRSHLMELLNITCEFSNSIGMELGTDKCAVLHVERGRVANSEGVDLSMPVNLRTLSEAETYRYLGMSQNIGIDETGMKQSVCDVFYARLTKVLNSLLSGVNKAHAYNGWVMPVLMYTFGILRWTQTELNALDRKVRTTMTSHRMHHPRSSVMRLYLSRKHGGRGFLSALTMHNREVCSLRDYFLARSDDPFYMDVISCDKGLTPLSLANEQWQDPAVQSISDRETVWKEKELHGRFYKALHEPFVDTVASLHWLRFGDLFGETEGFVCAIQDQVIKTNNYRRYILKDGTVDICRACRHPGESLRHVISGCSALSNSEYLHRHNLVARILHQELALKYGLVDRKLPYYKYLPEAVLENDRARLYWDRAIITDRTILANKPDIVLMDRAQSRIFLVDITIPYDENLVKAETDKQTKYLDLAHEVTDMWGGLPTEIIPVVVSANGLIPVSLSGHLRRLGLRGGPLRAQMQKAVLLDTARIVRRFLSLSP

SEQ ID NO: 14365 - protein, 1187 aa, Parnassius apollo
MMDMIGKRIGPLPGGRRGASGAGAGRGSMRAASRARGAARTPNSPPHPSSPPDGLMSAGSSRTRQAASAAGGVRRMRWTRDMNANALRAYYRAKGEETAGIAYRARMHCFFAELEPSIPVTEQNLADRVRYIMRSKIFDDAELERLRREAIPSSNELATAGDAAPQATDQLPRVEAAMDLPVVVDSDDDEMVSHELEQMRSILEEAILETRSMPLENRPRLPRIPLSKRNRAVVRALNPMLVTYLEASRDLCETDSVLFGAAVAACRIIGARLPMAGRATKQSSAIPAWRKRIEDRIAKARALIGRLISFRSGNNRPRVVRTVRMAFAGTNISLSQPDITQKLTERIDDLKQKIAAWGKRIRRFTERSRRFNQNRLFQSDQKRLYKSLERPEVCGAGPGPDQANTVAFWRGLWSEPVNHSEGPWTEVVASQCASITPMDPVIITPDDVAEAVRRAPNWKSPGLDGLFPVQGFMVCHAVLARQFQEALNQKSLPSLFTTGITHLVPKDQVTTDPSKYRPITCLPTIYKTRTSILSARITRHLELNQMMSRAQNGCRGGGRGTKEPLLIDAVIGKVVKRNRRNFSAAWIDYRKAFDSVPHTWLKRVLELYKIDCTVRDFLEQCMGQWSTILCHLGERMMAAENHIRIRRGIFQGDCLSPIWFCLSLNPLSTLLEGSGRGFQLRKGGTKVTHLFYMDDLKLFASSRSHLMALLNITCEFSNSIGMELGTDKCAVLHVERGRVANSEGIDLSMPVNLRTLSEAETYRYLGMSQNIGIDEAGMKQSVCDVFYARLTKVLNSLLSGVNKTHAYNGWVIPVLMYTFGILRWTQTELNALDRKVRTTMTSHRMHHPRSSVMRLYLPRKHGGRGFLSALTMHNREVCSLRDYFLARSDDPFYNDVISSDKGLTPLSLANEQWQDPAVLSISYRETVWKEKELHGRYYRALHEPFVDTIASLNWLRFGDLFGETEGFVCAIQDQVIKTNNYRRYILKDGTVDVCRACRHPGESLRHVISGCSALSNSEYLHRHNLVARILHQELALKYDLIDRKLPYYKYLPEAVLENDRARLYWDRAIITDRTILANKPDIVLMDRAQSRIFLVDITIPYDENLVKAETDKRTKYLDLAHEVTDMWGGWPTEIIPVVVSANGLIPVSLSGHLRRLGLRDGPLLAQMQKAVVLDTARIVRRFLSLSP

SEQ ID NO: 14366 - protein, 915 aa, Parnassius apollo
MAGRATTQSNAIPAWRKRIEDRIAKARALIGRLTSFRSGNNRPRIMRTVRMAFAGTNISLFQPDITQKLTERIDDLKQKIAAWGKRIRRFSEGSRRFNQNRLFQSDQKRLYKLLERPKVCGAGQGPDQADIIAFWRGLWSEPVNHSEGPWMEVVASQGASVTPMDPITITPEDVAEAVRRAPNWKSPGLDGLHHYWLNEFVVRHAVLARQFQEALDQKSLPSLFTTGITHLVPKDQDTTDPSKYRPITCLPTIYKTLTSILSARITRHLELNQVMSCAQNGCRGGGRGTKEPLLIDAVIGKVVKRNRRNFSAAWIDYRKAFDSVPHTWLKRVLELYKIDCTVRDFLEQCMGQWSTILCHLGERMTAAENHIRIRRGIFQGDCLSPIWFCLSLNPLSTLLEGSGRGFQLRKGGTKVTHLFYMDDLKLFASSRSHLKELLNITCEFSSSIGMELGTDKCAVLHVERGRVANSEGIDLSMPVNLRTLSEAETYRYLGMSQNIGIDEAGVKQSVCDVFYARLTKVLNSLLSGVNKTHAYNGWVMPVLMYTFGILRWTQTELNALDRKVRTTMTSHRMHHPRSSVMGLYLPRKYGGRGFLSALTMHNREVCSLRQYFLARSDDPFYNDVISSDKGLTPLSLANEQWQDPAVLSNSDRETVWKEKELHGRYYKALHEPFVDTVASLNWLRFGDLFGETEGFVCAIQDQVIKTNNYRRYILKDGTVDVCRACRHPGESLRHVISGCSALSNSEYLHRHNLVARILHQELALKYGLVDRKLPYYKYLPEAVLENDRARLYWYRAIITDRTILANKPDIVLMDRAQSRIFLVDITIPYDENLVRAETDKQSKYLDLAHEVTDMWGGLPAEIIPVVVSANGLIPVSLSGHLRRLGLRDGPLRAQMQKAVLLDTARIVRRFLSLSS

SEQ ID NO: 14367 - protein, 1085 aa, Parnassius apollo
MHRLFAELEPSLTVTEQNLADRVRYILRSNIFDVAELERLRREAVPSSDENATAEDAAPQMVEQPANVDAAVNTPVVVDSNDDGTVAQELELEHMRSTLEEAIVETRSTTLENRPRLPRIALSKRNRAVVRALNPMLVTYLEASRDLCETDSILFGAALAVCRIIGAKVSTAGRATGHSSAIPAWRRRIEERIAKARALIGRLICFRSGNNRPRIVRTVRMAFAGTNVSLSQPDITQKLTERIDDLKQRVAAWGKRIRRYTERSTRLNQNRLFQSDQKRLYESLERPMVSGTGPAPNQADTVAFWRGLWSEPVNHSEGPWTEVVASQCAGITPMDPVIITPDDVAEAVRRAPNWKSPGLDGLHHYWLKGFMVCHSVLARQFQEALNQKSLPSLFTTGITHLVPKDQGTTDPSKYRPITCLPTIYKTLTSILSARIACHLDSNQVMSRAQNGCRGGGRGTKEPLLIDAVIGKVVKRNRRNFSAAWIDYRKAFDSVPHTWLKRVLELYKINCTVRNFLEQCMGQWSTILCHLDERMMAAENHIRIRRGIFQGDCLSPIWFCLSLNPLSTLLEGSGRGFQLRRGGTKVTHLFYMDDLKLFASSRSHLMELLNITCEFSNSIGMELGTDKCAVLHVERGRVANSEGVDLSMPVNLRTLSEAETYRYLGMSQNIGIDETGMKQSVCDVFYARLTKVLNSLLSGVNKAHAYNGWVMPVLMYTFGILRWTQTELNALDRKVRTTMTSHRMHHPRSSVMRLYLSRKHGGRGFLSALTMHNREVCSLRDYFLARSDDPFYMDVISCDKGLTPLSLANEQWQDPAVQSISDRETVWKEKELHGRFYKALHEPFVDTVASLHWLRFGDLFGETEGFVCAIQDQVIKTNNYRRYILKDGTVDICRACRHPGESLRHVISGCSALSNSEYLHRHNLVARILHQELALKYGLVDRKLPYYKYLPEAVLENDCARLYWDRAIITDRTILANKPDIVLMDRAQSRIFLVDITIPYDENLVKAETDKQTKYLDLAHEVTDMWGGLPTEIIPVVVSANALIPVSLSGHLRRLGLRGGPLQVQMQKAVLLDTARIVRRFLSLSP

SEQ ID NO: 14368 - protein, 1189 aa, Parnassius apollo
MMDKIGKRIGPLPGGRRGASGAGAGRGSMRAASRARGAARSPNSPPHPSSPPDGLMSAGSSRTRQAASAAGGVRRMRWTRDMNANAMRAYYRAKGEETAGIAYRARMHCFFAELEPSIPVTEQNLADRVRYIMRSKIFDDAELERLRREAIPSSNELATAGDEAPQATDQLPRVEAAMDLPVVGDSDDDEMVSHELEQMRSILEEAILETRSMPLENRPRLPPHTPKQAKSGCREALNPMLVTYLEASRDLCETDSVLFGAAVAACRIIGAKLPMAGRATKQSSAIPAWRKRIEDRIAKARALIGRLISFRSGNNRPRVVRTVRMAFAGTNISLSQPDITQKLTERIDDLKQKIAAWGKRIRRFTERSRRFNQNRLFQSDQKRLYKSLERPEVCGAGPGPDQANTVAFWRGLWSEPVNHSEGPWTEVVASQCASITPMDPVIITPDDVAEAVRRAPNWKSPGLDGLHHYWLKGFMVCHAVLARQFQEALNQKSLPSLFTTGITHLVPKDQVTTDPSKYRPITCLPTIYKTLTSILSARITRHLELNQVMSRAQNGCRGGGRGTKEPLLIDAVIGKVVKRNRRNFSAAWIDYRKAFDSVPHTWLKRVLELYKIDCTVRDFLEQCMGQWSTILCHLGERMMAAENHIRIRRGIFQGDCLSPIWFCLSLNPLSTLLEGSGRGFQLRKGGTKVTHLFYMDDLKLFASSRSHLVELLKITCEFSSSIGMELGTDKCAVLHVERGRVANSEGIDLSMPVNLRTLSEAETYRYLGMSQNIGIDEAGVKQSVCDVFYARLTKVLNSLLSGVNKTHAYNGWVMPVLMYTFGILRWTQTELNALDRKVRTTMTSHRMHHPRSSVMRLYLPRKHGGRGFLSALTMHNREVCSLRHYFLARSDDPFYNDVISSDKGLTPLSLANEQWQDPAVLSISDRETVWKEKELHGRYYRVLHEPFVDTVASLNWLRFGDLFGETEGFVCAIQDQVIKTNNYRRYILKDGTVDVCRACRHPGESLRHVISGCSALSNSEYLHRHNLVARILHQALALKYGLVDRKLPYYKYLPEAVLENDRARLYWDRAIITDRTILANKPDIVLMDRAQSRIFLVDITIPYDENLVKAETDKQTKYLDLAHEVTDMWGGLPTEIIPVVVSANGLIPVSLSGHLRRLGLRDGPLRAQMQKAVVLDTARIVRRFLSLSP

SEQ ID NO: 14369 - protein, 1161 aa, Parnassius apollo
MRAASRARGAARSPSSPPHPSSPPEGLVSAESSRTQQAAPAAGGARRIRWSQAMNANALQAYFRAKGEETGCLAYRARMHRLFAELEPSLTVTEQNLADRVRYILRSNIFDVAELERLRREAVPSSDENATTEDAAPQMVEQPANVDAAVNTPVVVDSNDDGTVAQELELEHMRSTLEEAIVETRSTPLENRPRLPRIALSKRNRAVVRALNPMLVTYLEASRDLCETDSILFGAALAVCRIIGAKVSTAGRATGHSSAIPAWRRRIEERIAKARALIGGLICFRSGNNRPMRTVRMAFAGTNVSLSQPDITQKLTVRIDDLKQRIAAWGKRIRRYTERSTRFNQNRLFQSDQKRLYESLERPMVSGTGPAPNQADTVAFWRGLWSEPVNHSEGPWTEVVASQCAGITPMDPVIITPDDVAEAVRRAPNWKSPGLDGLHHYWLKRFMVCHSVLARQFQEALNQKSLPSLFTTGITHLVPKDQGTTDPSKYRPITCLPTIYKTLTSILSARITCHLDSNQVMSRAQNGCRGGGRGTKEPLLIDAVTGKVVKRNRRNFSAAWIDYRKAFDSVPHTWLKRVLELYKIDCTVRDFLEQCMGQWSTILCHLGERMMAAENHIRIRRGIFQGDCLSPIWFCLSLNPLSTLLEGSGRGFQLRKGGTKVTHLFYMDDLKLFASSRSHLMELLNITCEFSNSIGMELGTDKCAVLHVERGRVANSEGVDLSMPVNLRTLSEAETYRYLGMSQNIGVDETGMKQSVCDVFYARLTKVLNSLLSGVNKAHAYNGWVMPVLMYTFGILRWTQTELNALDRKVRTTMTSHRMHHPRSSVMRPYLPRKHGGRGFLSALTMHNREVCSLRDYFLARSDDPFYKDVISCDKGLTPLSLANEQWQDPAVQSISDRETVWKEKELHGRFYKALHEPFVDTVASLHWLRFGDLFGETEGFVCAIQDQVIKTNNYRRYILKDGTVDICRACRHPGESLRHVISGCSALSNSEYLHRHNLVARILHQELALKYGLVDRKLPYYKYLPEAVLENDRARLYWDRAIITDRTILANKPDIVLMDRAQSRIFLVDITIPYDENLVKAETDKQTKYLDLAHEVTDMWGGLPTEIIPVVVSANGLIPVSLSGHLRRLGLRGGSLQVQMQKAVLLDTARIVRRFLSLSP

SEQ ID NO: 14370 - protein, 950 aa, Parnassius apollo
MLVTYLEASRDLCETDSILFGAAVAVCRIIGAKLPMAGRATTQSSAIPAWRKRIEDRIAKARALIGRLTSFRSGNNRPRIMRTVRMAFAGTNISLSQPDITQKLTERIDDLKQKIAAWGKRIRRFTDRSRRFNQNRLFQSDQKRLYKSLERPKVCGAGQGPDQADIIAFWRGLWSEPVNHSEGPWMEVVASQGASVTPMDPITVTPEDVAEAVRRAPNWKSPGLDGLHHYWLKGFIVCHAVLARQFQEALDQKSLPSLFTTGITHLVPKDQDTTDPSKYRPITCLPTIYKTLTSILSARITRHLELNQLMSRAQNGCRGGGRGTKEPLLIDAVIGKVVKRNRRNFSAAWIDYRKAFDSVPHTWLKRVLELYKIDCTVRDFLEQCMGQWSTILCHLGERMMAAENHIRIRRGIFQGDCLSPIWFCLSLNPLSTLLEGSGRGFQLRRGGTKVTHLFYMDDLKLFASSRSHLMELLNITCEFSSSIGMELGTDKCAVLHVERGRVANSEGIDLSMPVNLRTLSEAETYRYLGMSQNIGIDEAGMKQSVCDVFYARLTKVLNSLLSGVNKSHAYNCWVMPVLMYTFGILRWTQTELNALDRKVRTTMTSHRMHHPRSSVMRLYLPRKHGGRGFLSALTMHNREVCSLRQYFLTRSDDPFYNDVISSDKGLTPLSLANEQWQDPAVLSIPDRETVWKEKELHGRYYKALHEPFVDTVASLNWLRFGDLFGETEGFVCAIQDQVIKTNNYRRYILKDGTVDVCRACRHPGESLRHVISGCSALSNSEYLHRHNLVARILHQELALKYGLVDRKVPYYKYLPEAVLENDRARLYWDRAIITDRTILANKPDIVLMDRAQSRIFLVDITIPYDENLVKAETDKQSKYLDLAHEVTDMWGGMPTEIIPVVVSANGLIPVSLSGHLRRLGLRDGPLRAQMQKAVLLDTARIVRRFLSLSP

SEQ ID NO: 14371 - protein, 915 aa, Parnassius apollo
MAGRATTQSNAIPAWRKRIEDRIAKARALIGRLTSFRSGNNRPRIMRTVRMAFAGTNISLSQPDITQKLTERIDDLKQKIAAWGKRIRRFSEGSRRFNQNRLFQSDQKRLYKLLERPKVCGAGQGPDQADIIAFWRGLWSEPVNHSEGPWMEVVASQGASVTPMDPITITPEDVAEAVRRAPNWKSPGLDGLHHYWLKGFVVCHAVLARQFQEALDQKSLPSLFTTGITHLVPKDQDTTDPSKYRPIMCLPTIYKTLTSILSTRITRHLELNQVMSCAQNGCRGGGRGTKEPLLIDAVIGKVVKRNRRNFSAAWIDYRKAFDSVPHTWLKRVLELYKIDCTVRDFLEQGMGQWSTILCHLGERMTAAENHIRIRRGIFQGDCLSPIWFCLSLNPLSTLLEGSGRGFQLRKGGTKVTHLFYMDDLKLFASSRSHLKELLNITCEFSSSIGMELGTDKCAVLHVERGRVANSEGIDLSMPVNLRTLSEAETYRYLGMSQNIGIDEAGVKQSVCDVFYARLTKVLNSLLSGVNKTHAYNGWVMPVLMYTFGILRWTQTELNALDRKVRTTMTSHRMHHPRSSVMRLYLPRKYGGRGFLSALTMHNREVCSLRQYFLARSDDPFYNDVISSDKGLTPLSLANEQWQDPAVLSNSDRETVWKEKELHGRYYKALHEPFVDTVASLNWLRFGDLFGETEGFVCAIQDQVIKTNNYRRYILKDGTVDVCRACRHPGESLRHVISGCSALSNSEYLHRHNLVARILHQELALKYGLVDRKLPYYKYLPEAVLENDRARLYWDRAIITDRTILANKPDIVLMDRAQSRIFLVDITIPYDENLVRAETDKQSKYLDLAHEVTDMWGGLPAEIIPVVVSANGLIPVSLSGHLRRLGLRDGPLRAQMQKAVLLDTARIVRRFLSLSS

SEQ ID NO: 14372 - protein, 1191 aa, Parnassius apollo
MMDMIGKRIGPLPGGRRGASGAGAGRGRMQAASRARGAARTPNSPPHPSSPPDGLMSAGSSRTRQAASAAGGVRRMRWTRDMNANALRAYYRAKGEETAGIAYRARMHCFFAELEPSIPVTEQNLADRVRYILRSNIFDVAELERLRREAVPSSDENATAEDAAPQMVEQPANVDAAVNTPVVVDSNDDGTVAQELELEHMRSTLEEAIVETRSTPLENRPRLPRIALSKRNRAVVRALNPMLVTYLEASRDLCETDSILFGAALAVCRIIGAKVSTAGRATGHSSAIPAWRRRIEERIAKARALIGRLICFRSGNNRPRIVRTVRMAFAGTNVSLSQPDITQKLTERIDDLKQRIAAWGKRIRRYTERSTRFNQNRLFQSDQKRLYESLERPMVSGTGPAPNQADTVAFWRGLWSEPVNHSEGPWTEVVASQCAGITPMDPVIITPDDVAEAVRRAPNWKSPGLDGLHHYWLKGFMVCHSVLARQFQEALNQKSLPSLFTTGITHLVPKDQGTTDPSKYRPITCLPTIYKTLTSILSARIICHLDSNQVMSRAQNGCRGGGRGTKEPLLIDAVIGKVVKRNRRNFSAAWIDYRKAFDSVPHTWLKRVLELYKIDCTVRDFLEQCMGQWSTILCHLGERMMAAENHIRIRRGIFQGDCLSPIWFCLYLNPLSTLLEGSGRGFQLRRGGTKVTHLFYMDDLKLFASSRSHLMELLNITCEFSNSIGMELGTDKCAVLHVERGRVANSEGVDLSMPVNLRTLSEAETYRYLGMSQNIGIDETGMKQSVCDVFYARLTKVLNSLLSGVNKAHAYNGWVMPVLMYTFGILRWTQTELNALDRKVRTTMTSHRMHHPRSSVMRLYLSRKHGGRGFLSALTMHNREVCSLRDYFLARSDDPFYMDVISCDKGLTPLSLANEQWQDPAVQSISDRETVWKEKELHGRFYKALHEPFIDTVASLHWLRFGDLFGETEGFVCAIQDQVIKTNNYRRYILKDGTVDICRACRHPGESLRHVISGCSALSNSEYLHRHNLVARILHQELALKYGLVDRKLPYYKYLAEAVLENDRARVYWDGAIITDRTILANKPDIVLMDRAQSRIFLVDITIPYDENLVKAETDKQTKYLDLAHEVTDMWGGLPTEIIPVVVSANGLIPVSLSGHLRRLGLRGGPLQVQMQKAVLLDTARIVRRFLSLSP

SEQ ID NO: 14373 - protein, 1034 aa, Parnassius apollo
MRSKIFDDAELERLRREAIPSSNESAMAGDAAPHSTDQHPHVEAAMDLPVVVDSNDDEIVSHELEQMRSILEEAILETRGTPLENRPRLPRIPLSKRNRAVVRALNPMLVTYLEASRDLCEMDSILFGAAVAVCRIIGAKLPMAGRATTQSNAIPAWRKRIEDRIAKARALIGRLTSFRSGNNRPRIMRTVRMAFAGTNISLSQPDITQKLTERIDDLKQKIAAWGKRIRRFSEGSRRFNQNRLFQSDQKRLYKLLERPKVCVAGQGPDQADIIAFWRGLWSEPVNHSEGPWMEVVASQGASVTPMDPITITPEDVAEAVRRAPNWKSPGLDGLHHYWLKGFVVCHAVLARQFQEALDQKSLPSLFTTGITHLVPKDQDTTDPSKYRPITCLPTIYKTLTSILSARITRHLELNQVMSRAQNGCRGGGRGTKEPLLIDAVIGKVVKRNRRNFSAAWIDYRKAFDSVPHTWLKRVLELYKIDCTVRDFLEQCMGQWSTILCHLGERMTAAENHIRIRRGIFQGDCLSPIWFCLSLNPLSTLLEGSGRGFQLRRGGTKVTHLFYMDDLKLFASSRSHLMELLNITCEFSSSIGKELGTDKCAVLHIERGRVANSEGIDLSMPVNLRTLSEAETYRYLGMSQNIGIDEAGMKQSVCDVFYARLTKVLNSLLSGVNKTHAYNGWVMPVLMYTFGILRWTQTELNALDRKVRTTMTSHRMHHPRSSVMRLYLPRKYGGRGFLSALTMHNREVCSLRQYFLARSDDPFYNDVISSDRGLTPLSLANEQWQDPAVLSNSDRETVWKEKELHGRYYKALHEPFVDTVASLNWLRFGDLFGETEGFVCAIQDQVIKTNNYRRYILKDGTVDVCRACRHPGESLRHVISGCSALSNSEYLHRHNLVARILHQELALKYGLVDRKLPYYKYLPEAVLENDRARLYWDRAIITDRTILANKPDIVLMDRAQSRIFLVDITIPYDENLVKAETDKKTKYLDLAHEVTDMWGGLPTEIIPVVVSANGLIPVSLSGHLRRLGFYTRSSR

SEQ ID NO: 14374 - protein, 950 aa, Parnassius apollo
MLVTYLEASRDLCETDSILFGAALAVCRIIGAKVSTAGRATGHSSAIPAWRRRIEERIAKARALIGRLICFRSGNNGPRIVRTVRMAFAGTNVSLSQPDITQKLTERIDDLKQRIAAWGKRIRRYTERSTRFNQNRLFQSDQKRLYESLERPMVSGTGPAPNQADTVAFWRGLWSEPVNHSEGPWTEVVASQCAGITPMDPVIITPDDVAEAVRRVPNWKSPGLDGLHHYWLKGFMVCHSVLPRQFQEALNQKSLPSLFTTGITHLVPKDQGTTDPSKYRPITWLPTIYKTLTSILSARITCHLDSNQVMSRAQNGCRGGGRGTKEPLLIDAVIGKVVKRNRRNFSAAWIDYRKAFDSVPHTWLKRVLELYKIDCTVRDFLEQCMGQWSTILCHLRERMMAAENHIRIRKGIFQGDCLSPIWFCLSLNPLSTLLEGSGRGFQLRKGGTIVTHLFYMDDLKLFASSRSHLMELLNITCEFSNSIGMELGTDKCAVLHVERGRVANSEGVDLSMPVNLRTLSEAETYRYLGMSQNIGIDETGMKQSVCDVCLSVIVIVLNSLLSGVNKAHAYNGWVMPVLMYTFGILRWTQTELNALDRKVRTTMTSHRMHHPRSSVMRLYLSRKHGGRGFLSALTMHNREVCSLRDYFLARSDDPFYKDVISYDKGLTPLSLANEQWQDPAVQSISDRETVWKEKELHGRFYKALHEPFVDTVASLHWLRFGDLFGETEGFICAIQDQVIKTNNYRRYILKDGTVDICRACRHPGESLRHVISGCSALSNSEYLHRHNLVARILHQELALKYGLVDRKLPYYKYLPEAVLENDRARLYWDRAIITDRTILANKPDIVLMDRAQSRIFLVNITIPYDENLVKAETDKQTKYLDLAHEVTDMWGGLPTEIIPVVVSANGLIPVSLSGHLRRLGLRRGPLQVQMQKAVLLDTARIVRRFLSLSP

SEQ ID NO: 14375 - protein, 1189 aa, Parnassius apollo
MMDMIRKRIGPLPGGRRGASGAGAGRGSMRAASRARGAARSPSSPPHPSSPPDGLMSAGSSRTRQAASAAGGVRRMRWTRDMNANALRAYYRAKGEETKGIAYRARMHCFFAELEPSIPVTEQNLADRVRYIMRSKIFDDAELERLRREAIPSSNELATAGDAAPQATDQLPRVEAAMDLPVVVDSDDDEMVSHELEQMRSILEEAILETRTMPLENRPRLPRIPLSKRNRAVVRALNPMLVTYLEASRDLCETDSVLFGAAVAACRIIGAKLPLAGRATKQSSAIPAWRKRIEDRIAKARALIGRLISFRSGNNRPRVVRSVRMAFAGTKISLSQPDITQKLTERIDDLKQKIAAWGKRIRRFTERSRRFNQNRLFQSDQKRLYKSLERPEVCGAGPGPDQANTVAFWRGLWSEPVNHSEGSWTEVVASQCASITPMDPVIITPDDVAEAVRRAPNWKSPGLDGLHHYWLKGFMVCYAVLARQFQEALDQKSLPSLFTTGITHLVPKDQVTTDPSKYRPITCLPTIYKTLTSILSARITRHLELNQVMSRAQNGCRGGGRGTKEPLLIDAVIGKVVKRNRRNFSAAWIDYRKAFDSVPHTWLKRVLELYKIDCTVRDFLEQCMGQWSTILCHLGERMMAAENHIRIRRGIFQGDCLSPIWFCLSLNPLSTLLEGSGRGFQLRKGGAKVTHLFYMDDLKLFASSRSHLMELLNITCEFSNSIGMELGTDKCAVLHVERGRVANSEGIDLSMPVNLRTLSEAETYRYLGMSQNIGIDEAGMKQSVCDVFYARLTKVLNSLLSGVNKTHAYNGWVIPVLMYTFGILRWSQTELNALDRKVRTTMTSHRMHHPRSSVMRLYLPRKHGGRGFLSALTMHNREVCSLRHYFLARSDDPFYNDVISSDKGLTPLSLANEQWQDPAVLSISDRETVWKEKELHGRYYRALHEPFVDTVASLNWLRFGDLFGETEGFVCAIQDQVIKTNNYRRYILKDGTVDVCRACRHPGESLRHVISGCSALSNSEYLHRHNLVARILHQELALKYGLVDRKLPYYKYVPEAVLENDRARLYWDRAIITDRTILANKPDIVLMDRAQSRIFLVDITVPYDENLVKAETDKQSKYLDLAHEVTDMWGGMPTEIIPVVVSANGLIPVSLSDHLRRLGLRDGPLRAQMQKAVLLDTARIVRRFLSLSP

SEQ ID NO: 14376 - protein, 915 aa, Parnassius apollo
MAGRATTQSNAIPAWRKRIEDRIAKARALIGRLTSFRSGNNRPRIMRTVRMAFAGTNISLSQPDITQKLTERIDDLKQKIAAWGKRIRRFSEGSRRFNQNRLFQSDQKRLYKLLERPKVCGAGQGPDQADIIAFWRGLWSEPVNHSEGPWMEVVASQGASVTPMDPITITPEDVAEAVRRAPNWKSPGLDGLHHYWLKGFVVCHAVLARQFQEALDQKSLPSLFTTGITHLVPKDQDTTDPSKYRPITCLPTIYKTLTSILSARITRHLELNQVMSRAQNGCRGGGRGTKEPLLIDAVIGKVVKRNRRNFSAAWIDYRKAFDSVPHTWLKRVLELYKIDCTVRDFLEQCMGQWSTILCHLGERMTAAENHIRIRRGIFQGDCLSPIWFCLSLNPLSTLLEGSGRGFQLRKGGTKVTHLFYMDDLKLFASSRSHLMELLNITCEFSSSIGMELGTDKCAVLHVERGRVANSEGIDLSMPVNLRTLSEAETYRYLGMSQNIGIDEAGVKQSVCDVFYARLTKVLNSLLSGVNKTHAYNGWVMPVLMYTFGILRWTQTELNALDRKVRTTMTSHRMHHPRSSVMRLYLPRKYGGRGFLSALTMHNREVCSLRQYFLARSDDPFYNDVISSDKGLTPLSLANEQWQDPAVLSNSDRETVWKEKELHGRYYKALHEPFVDTVASLNWLRFGDLFGETEGFVCAIQDQVIKTNNYRRYILKDGTVDVCRACRHPGESLRHVISGCSALSNSEYLHRHNLVARILHQELALKYGLVDRKLPYYKYLPEAVLENDRARLYWDRAIITDRTTLANKPDIVLMDRAQSRIFLVDITIPYDENLVRAETDKQSKYLDLAHEVTDMWGGLPAEIIPVVVSANGLIPVSLSGHLRRLGLRDGPLRAQMQKAVLLDTARIVRRFLSLSS

SEQ ID NO: 14377 - protein, 945 aa, Parnassius apollo
MPYYWRQTSIAGRATQQGSAIPAWRKRIEDRIAKARALIGRLTSFRSGNIRPRVVRTVRMAFAGTNISLSQPDITQKLTERIDDLKQKIAAWGKRIRRFSERSRRFNQNRLFQSDQKRLYKSLERPEVCGAGPGPDQADTVAFWRGLWSEPVNHSEGPWMEVVASQSASVTPMDPVTITPEDVAEAVRRAPNWKSPGLDGLHHYWLKGFVVCHAVLARQYQEALDQKSLPSLFTTGITHLVPKDQDTTDPSKYRPITCLPTIYKTLTSILSARITRHLELNQVMSRAQNGCRGGGRGTKEPLLIDAVIGKVVKRNRRNFSAAWIDYRKAFDSVPHTWLKRVLELYKIDCTVRDFLEQCMGQWSTILCHQGERMMAAENHIRIRRGIFQGDCLSPIWFCLSLNPLSTLLEGSGRGFQLRKGGTKVTHLFYMDDLKLFASSRSHLMELLNITCEFSNSIGMELGTDKCAVLHVERGRVANSEGIDLSMPVNLKTLSEAETYRYLGMSQNIGIDEAGMKQSVCDVFYARLTKVLNSLLSGVNKTHAYNGWVMPVLMYTFGILRWTQTELNALDRKVRTTMTSHRMHHPRSSVMRLYLPRKHGGRGFMSALTMHNREVCSLRDYFLARSDDPFYNDVISSDKGLTPLSLAHEQWQDPAVLSISDRETVWKEKELHGRYYRALHEPFVDTVASLNWLRFGDLFGETEGFVCAIQDQVIKTNNYRRYILKDGTVDVYRACRHRGESLRHVISGCSALSNSEYLHRHNLVARILHQELALKYGLVDRKLPYYKYLPEAVLENDRARLYWDRAIITDRTILANKPDIVLMDRAQSRIFLVDITIPYDENLVKAETDKQTKYLDLAHEVTDMWGGLPTEIIPVVVSANGLIPVSLSGHLRRLGLRGGPLRAQMQKAVLLDTARIVRRFSFPFPLTLGRLVSPAEGLHLVGLLFI

SEQ ID NO: 14378 - protein, 1107 aa, Parnassius apollo
MKTHCGRILGQKGKKLDVWRIGLGCIAFFAELEPSLSVTEQNLADRVRYILRSNIFGDAELERLRREAIPSSNGNATAGNAAPLDAQQTAYVDAAVNIPFVANSDDDGIVSHELEKMRSILEESMLETRSMPLENRPRLPRIPLSKRNRAVVRALNPMLVTYLEASRDLCETDSILFGAALAVCRIIGAKLPVAGRATQKSSAIPAWRKRTEDRIAKARALIGRLTSFRSGNNRPRIMRTVRMAFAGTNINLFQPDITQKLTERIDDLKQKIAAWGKRIRRFSERSRRFNQNRLFQSDQKRLYKTLERPEVCGAGPGPDQADTVAFWRGLWSEPVNHSEGPWMEVVASQSASVTPMDPVTITPEDVAEAVRRAPNWKSPGLDGLHHYWLKGFVVCHAVLARQFQEALDQKSLPSLFTTGITHLVPKDQDTTDPSKYRPITCLPTIYKTLTSILSARITRHLELNQVMSRAQNGCRGGGRGTKEPLLIDAVIGKVVKRNRRNFSAAWIDYRKAFDSVPHTWLKRVLQLYKIDCTVGDFLEQCMGQWSTILCYLGERMMAAENHIRIRRGIFQGDCLSPIWFCLSLNPLSTLLEGSGRGFQLRKGGTKVTHLFYMDDLKLFASSRSHLMELLNITCEFSNSIGMELGTDKCAVLHVERGRVANSEGIDLSMPVNLRTLSEAETYRYLGLSQNIGIDEAGMKQSVCDVFYARLTKVLNSLLSGVNKTHAFNGWVMPVLMYTFGILRWTQTELNALDRKVRTTMTSHRMHHPRSSVMRLYLPRKHGGRGFLSALTMHNREVCSLRNYFLARSDDPFYKDVISSDKGLTPLSLANEQWQDPAVQTISDRENVWKEKELHGRFYKALHEPFVDTVASLHWLRFGDLFGETEGFVCAIQDQVIKTNNYRRYILKDGTVDICRACRHPGESLRHVISGCSALSNSEYLYRHNLVARILHQELALKYGLVDRKLPYYKYLPEAVLENDRARLYWDRAIITDRTILANKPDIVLMDRAQSRIFLVDITIPYDENLVKAETDKQTKYLDLAHEVTDMWGGLPTEIIPVVVSANGLIPVSLSGHLRRLGLRDGPLRAQMQKTVLIDTARIVRRFLSLSS

SEQ ID NO: 14379 - protein, 950 aa, Parnassius apollo
MLVTYLEASRDLCETDSVLFGAAVAACRIIGAKLPMAGRATKQSSAIPAWRKRIEDRIAKARALIGRLISFRSGNNRPRVVRTVRMAFAGTNISLSQPDITQKLTERIDDLKQKIAAWGKRIRRFTERSRRFNQNRLFQSDQKRLYKSLERPEVCGAGPGPDQANTVAFWRGLWSEPVNHSECPWTEVVASHCANITPMDPVIITPDDVAEAVRRAPNWKSPGLDGLHHYWLKGFMVCHAVLARQFQEALNQKSLPSLFTNGITHLVPKDQVTTDPSKYRPITCLPTIYKTLTSILSARITCHLELNQVMSRAQNGCRGGGRGTKEPLLIDAVIGKVVKRNRRNFSAAWIDYRKAFDSVPHTWLKRVLELYKIDCTVRDFLEQCMGQWSTILCHLGERMMAAENHIRIRRGIFQGDCLSPIWFCLSLNPLSTLLEGSGRGFQLRKGGTKVTHLFYMDDLKLFASSRSHLMELLKITCEFSSSIGMELGTDKCAVLHVERGRVANSEGIDLSMPVNLRTLSEAETYRYLGMSQNIGIDDAGVKQSVCDVFYARLTKVLNSLLSGVNKTHAYNGWVMPVLMYTFGILRWTQTELNALDRKVRTTMTSHRLHHPRSSVMRLYLPRKHGGRGFLSALTMHNSEVCSLRHYFLARSDDPFYNDVISSDKGLTPLSLANEQWQDPAVLSISDRETVWKEKELHGRYYRVLHEPFVDTVASLNWLRFGDLFVETEGFVCAIQDQVIKTNNYRRYILKDGTVDICRACRHPGESLRHVISGCSALSNSEYLHRHNLVARILHQELALKYGLVDRKLPYYKYLPEAVLENDRARLYWDRAIITDRTILANKPDIVLMDRAQSRIFLVDITIPYDENLVKAETDKQTKYLDLAHEVTDMWGGLPTEIIPVVVSANGLIPVSLSGHLRRLGLRGGPLQVQMQKAVLLDTARIVRRFLSLSP

SEQ ID NO: 14380 - protein, 1191 aa, Parnassius apollo
MMEYGRTRKGPLPGGRQGASGAGAGRGSMRTASRARGAARPPSSPSHPSSPPAGLVSAGSSRAQQSAPASGGVRRMRWTTQMNSNALRAYFGAKGGETGCLAYRARMHRLFAELEPSLTVTEQNLADRVRYILRSNIFNVAELERLRREAVPSSDENATAEDAAPQMVEQPANLDAAVNTPVVVDSNDDGTVAQELELEHMRSTLEEAIVETRSTPLENGPRLPRIALSKRNRAVVRALNPMLVTYLEASRELCKTDSILFGAALAVCRIIGAKVSTAGRATGHSSAIPAWRRRIEERIAKARALIGRLICFRSGNNRPRIVRTVRMAFAGTNVSLSQPDITQKLTERIDDLKQRIAAWGKRIRRYTERTTRFNQNRLFQSDQKRLYESLERPMVSGTGPAPNQADTVAFWRGLWSEPVNHSEGPWTEVVASHCAGITPMDPVIITPDDVAEAVRRAPNWKSPGLDGLHHYWLKGFMVCHSVLARQFQEALNQKSLPSLFTTEITHLVPKDQGTTDPSKYRPITCLPTIYKTLTSILSARITCHLDSNQVMSRAQNGCRGGGRGTKEPLLIDAVIGKVVKRNRRNFSAAWIDYRKAFDSVPHTWLKRVLELYKIDCTVRDFLEQCMGQWSTILCHLGERMMAAENHIRIRRGIFQGDCLSPIWFCLSLNPLSTLLEGSGRGFQLRRGGTKVTHLFYMDDLKLFASSRSHLMELLNITCEFSNSIGMELGTDKCAVLHVERGRVANSEGVDLSVPVNLRTLSEAETYRYLGMSQNIGIDETGMKQSVCDVFYARLTKVLNSLLSGVNKAHAYNGWVMPVLMYTFGILRWTQTELNALDRKVRTTMTSHRMHHPRSSVMRLYLSRKHGGRGFLSALTMHNREVCSLRDYFLARSDDPFYMDVISCDKGLTPLSLANEQWQDPAVQSISDRETVWKEKELHGRFYKALHEPFVDTVASLHWLRFGDLFGETEGFVCAIQDQVIKTNNYRRYILKDGTVDICRACRHPGESLRHVISGCSALSNSEYLHRHNLVARILHQELALKYGLVDRKLPYYKYLPEAVLENDRARLYWDRALITDRTILANKPDIVLMDRAQSRIFLVDITIPYDENLVKAETDKQTKYLDLAHEVTDMWGGLPTEIIPVVVSANGLIPASLSGHLRRLGLRGGPLQVQMQKAVLLDTARIVRRFLSLSP

SEQ ID NO: 14381 - protein, 1154 aa, Parnassius apollo
MRAPSRARGAARSSTSPPHPSSPPEGLVSAGSSRTQQAASAAGGARRMRWSQEMNANALRAYFRAKGEETGCLAYRARMHRLFAELEPSLIVTEQNLADRVRYILRSNIFDVAELERLRREAVPSSDENATAEDAAPQMVEQPANVDAAVNTPVVVDSNDDGTVAQELELEHMRSILEEAIVETRSTPLENRPRLPRIALSKRNRAVVRALNPMLVTYLEASRDLCETDSILFGAALAVCRIIGAKVSTAGRATGHSSAIPAWRRRIEERIAKARALIGRLICFRSGNNRPRIVRTVRMAFAGTNVSLSQPDITQKLTERIDDLKQRIAAWGKRIRRYTERSTRFNQNRLFQSDQKRLYESGPAPNQADTVAFWRGLWSEPVNHSEGPWTEVVASQCAGITPMDPVIITPDDVAEAVRRAPNWKSPGLDGLHHYWLKGFMVCHSVLARQFQEALNQKSLPSLFTTGITHLVPKDQGTTDPSKYRPITCLPTIYKTLTSILSARITCHLDSNQVMSRAQNGCRGGGRGTKEPLLIDAVIGKVVKRNRRNFSAAWIDYRKAFDSVPHTWLRRVLELCKIDCTVRDFLEQCMGQWSTILCHLGERMMAAENHIRIRRGIFQGDCLSPIWFCLSLNPLSTLLEGSGRGFQLRKGGTKVTHLFYMDDLKLFASSRSHLMELLNITCEFSNSIGMELGTDKCAVLHVERGRVANSEGVDLSMPVNLRTLSEAETYRYLGMSQNIGIDKTGMKQSVCDVFYARLTKVLNSLLSGVNKAHAYNGWVMPVLMYTFGILRWTQTELNALDRKVRTTMTSHRMHHPRSSVMRLYLPRKHGGRGFLSALTMHNREVCSLRDYFLARSDDPFYKDVISCDKGLTPLSLANEQWQDPAVQSISDQETVWKEKELHGRFYKALHEPFVDTVASLHWLRFGDLFGETESFVCAIQDQVIKTNNYRRYILKDGTVDICRACRHPGESLRHVISGCSALSNSEYLHRHNLVARILHQELALKYGLVDRKLPYYKYLPEAVLENDRARLYWDRAIITDRTILANKPDIVLMDRAQSRIFLVDITIPYDENLVKAETDKQTKYLDLAHEVTDMWGGLPTEIIPVVVSANGLIPVSLSGHLRRLGLRGGPLQAQMQKAVLLDTARIVRRFLYLSP

SEQ ID NO: 14382 - protein, 1191 aa, Parnassius apollo
MMESNGTRKGPLPGGRQGASGAGAGRDSMRTASRARGAARPPSSSSHPSSPPAGLVSAGSSRAQQSAPATGGVRRMRWTTQMNSNALRAYFRAKGGETGGFAYRARMHRLFAELEPSVTVTEQNLADRVRYILRSNTFDVTELERLRREAVPSSGENAAAEDAAPQLAEQTANVDAAVNTPVVVDSNDDGTVAQELELEQMRSTLEEAIVETRSTTLENRPRLPRLALSKRNRAVVRALNPMLVTYLEASRDLCDTDSILFGAALAVCRIIGAKLSTAGRATGQSSAIPAWRIRIEERIAKARALIGRLICFRSGNTRPRIVRTVRMAFAGTNVSLSQPDIMQKLTERIDDLKQRIAAWGKRIRRYTERSTRFNQNRLFQSDQKRLYKSLERPIVSGTGPAPNQADMVAFWRSLWSEPVNHNEGPWTEVVASQCASITPMDPVIITPDDVAEAVRRAPNWKSPGLDGLHHYWLKGFMVCHSVLARQFQEALNQKSLPSLFTTGITHLVPKDQGATDPSKYRPITCLPTIYKTLTSILSARIARHLDLNQVMSRAQNGCRGGGRGTKEPLLIDAVIGKVVKRNRRNFSAAWIDYRKAFDSVPHTWLKRVLELYKIDCTVRDFLEQCMGQWSTILCHLGERMTAAESRIRIRRGIFQGDCLSPIWFCLSLNPLSTLLEGSGKGFQLRKGGTKVTHLFYMDDLKLFASSRSHLMELLNITCEFSNSIRMELGTDKCAVLHVERGRVADSEGIDLSMPVNLRTLSEAETYRYLGMSQNIGIDEAGMKQSVCDVFYARLTKVLNSLLSGVNKAHAYNGWVMPVLMYTFGILRWTQTELNALDRKVRTTMTSHRMHHPRSSVMRLYLPRKHGGRGFLSALTMHNREVCSLRDYFLARSDDPFYKDVISCDKGLTPLSLANEQWQDPAVQSISDRETVWKEKELHGRFYKALHEPFVDTVASLHWLRFGDLFGETEGFVCAIQDQVIKTNNYRRYILKDGTVDICRACRHPGESLRHVISGCSALSNSEYLHRHNLVARILHQELALKYGLVDRKLPYYKYLPEAVLENDRARLYWDRAIITDRTILANKPDIVLMDRAQSRIFLVDITIPYDENLVKAETDKQTKYLDLAHEVTDMWGGLPTEIIPVVVSANGLIPVSLSGHLRRLGLRGGPLQVQMQKAVLLDTARIVRRFLSLSP

SEQ ID NO: 14383 - protein, 950 aa, Parnassius apollo
MLVTYLEASRDLCETDSVLFGAAVAACRIIGARLPMAGRATKQSSAIPAWRKRIEDRIAKARALIGRLISFRSGNNRPRVVRTVRMAFAGTNISLSQPDITQKLTERIDDLKQKIAAWGKRIRRFTERSRRFNQNRLFQSDQKRLYKSLERPEVCGAGPGPDQANTVAFWRGLWSEPVNHSEGPWTEVVASQCARITPMDPVIITPDDVAEAVRRAPNWKSPGLDGLHHYWLKGFMVCHAVLARQFQEALNQKSLPSLFTTGITHLVPKDQVTTDPSKYRPITCLPTIYNTLTSILSARITRHLELNQMMSRAQNGCRGGGRGTKEPLLIDAVIGKVVKRNRRNFSAAWIDYRKAFDSVPHTWLKRVLELYKIDCTVRDFLEQCMGQWSTILCHLGERMMAAENHIRIRRGIFQGDCLSPIWFCLSLNPLSTLLEGSGRGFQLRKGGTKVTHLFYMDDLKLFASSRSHLMELLNITCEFSNSIRMELGTDKCAVLHVERGRVANSEGIDLSMPVNLRTLSEAETYRYLGMSQNIGIDEAGMKQSVCDVFYARLTKVLNSLLSGVNKTHAYNGWVIPVLMYTFGILRWTQTELNALDRKVRTTMTSHRMHHPRSSVMRLYLPRKHGGRGFLSALTMHNREVCSLRDYFLARSDDPFYNDVISSDKGLTPLSLANEQWQDPAVLSISDRETVWKEKELHGRYYRALHEPFVDTVASLNWLRFGDLFGETEGFVCAIQDQVIKTNNYRRYILKDGTVDVCRACRHPGESLRHVISGCSALSNSEYLHRHNLVARILHQELALKYGLVDRKLPYYKYLPEAVLENDRARLYWDRAIITDRTILANKPDIVLMDRAQPRIFLVDITIPYDENLVKAETDKRTKYLDLAHEVTDMWGGWPTEIIPVVVSANGLIPVSLSGHLRRLGLRDGPLLAQMQKAVVLDTARIVRRFLSLSP

SEQ ID NO: 14384 - protein, 1189 aa, Parnassius apollo
MMDKIGKRIGPLPGGRRGASGAGAGRGSMRAASRARGAARSPNSPPHPSSPPDGLMSAGSSRTRQAASAAGGVRRMRWTRDMNANAMRAYYRAKGEETAGIAYRARMHCFFAELEPSIPVTEQNLADRVRYIMRSKIFDDAELERLRREAIPSSNELATAGDEAPQATDQLPRVEAAMDLPVVGDSDDDEMVSHELEQMRSILEEAILETRSMPLENRPRLPRIPLSKRNRAVVRALNPMLVTYLEASRDLCETDSVLFGAAVAACRIIGAKLPMAGRATKQSSAIPAWRKRIEDRIAKARALIGRLISFRSGNNRPRVVRTVRMAFAGTNISLSQPDITQKLTERIDDLKQKIAAWGKRIRRFTERSRRFNQNRLFQSDQKRLYKSLERPEVCGAGPGPDQANTVAFWRGLWSEPVNHSEGPWTEVVASQCASITPMDPVIITPDDVAEAVRRAPNWKSPGLDGLHHYWLKGFMVCHAVLARQFQEALNQKSLPSLFTTGITHLVPKDQVTTDPSKYRPITCLPTIYKTLTSILSARITRHLELNQVMSRAQNGCRGGGRGTKEPLLIDAVIGKVVKRNRRNFSAAWIDYRKAFDSVPHTWLKRVLELYKIDCTVRDFLELCMGQWSTILCHLGERMMAAENHIRIRRGIFQGDCLSPIWFCLSLNPLSTLLEGSGRGFQLRKGGTKVTHLFYMDDLKLFASSRSHLVELLKITCEFSSSIGMELGTDKCAVLHVERGRVANSEGIDLSMPVNLRTLSEAETYRYLGMSQNIGIDEAGVKQSVCDVFYARLTKVLNSLLSGVNKTHAYNGWVMPVLMYTFGILRWTQTELNALDRKVRTTMTSHRMHHPRSSVMRLYLPRKHGGRGFLSALTMHNREVCSLRHYFLARSDDPFYNDVISSDKGLTPLSLANEQWQDPAVLSISDRETVWKEKELHGRYYRVLHEPFVDTVASLNWLRFGDLFGETEGFVCAIQDQVIKTNNYRRYILKDGTVDVCRACRHPGESLRHVISGCSALSNSEYLHRHNLVAKILHQALALKYGLVDRKLPYYKYLPEAVLENDRARLYWDRAIITDRTILANKPDIVLMDRAQSRIFLVDITIPYDENLVKAETDKQTKYLDLAHEVTDMWGGLPTEIIPVVVSANGLIPVSLSGHLRRLGLRDGPLRAQMQKAVVLDTARIVRRFLSLSP

SEQ ID NO: 14385 - protein, 908 aa, Parnassius apollo
MAFAGTNVSLSQPDITQKLTERIDDLKQRIAAWGKRIRRYTERSTRFNQNRLFQSDQKRLYESLERPMVSGTGPAPNQADTVAFWRGLWSEPLNHSEGPWTEVVASQCAGITPMDPVIITPDDVAEAVRRAPNWKSPGLDGLHHYWLKGFMVCHSVLARQFQEALNQKSLPSLFTTGITHLVPKDQGTTDPSKYRPITCLPTIYKTLTSILSARITRHLDSNQVMSRAQNGCRGGGRGTKEPLLIDAVIGKVVKRNRRNFSAAWIDYRKAFDSVPHTWLKRVLELHKIDCTVRDFLEQCMGQWSTILCHLGERMMAAENHIRIRRGIFRGDCLSPIWFYLSLNPLSTLLEGSGRGFQLRKGGTKVTHLFYMDDLKLFASSRSHLMELLNITCEFSNSIGMELGTDKCAVLHVERGRVANSEGVDLSMPVNLRTLSEAETYRYLGMSQNIGIDETGMKQSVCDVFYARLTKVLNSLLSGVNKAHAYNGWVMPVLMYTFGILRWTQTELNALDRKVRTTMTSHRMHHPRSSVMRLYLPRKHGGRGFLSALTMHNREVCSLRDYFLARSDDPFYKDVISCVKGLTPLSLANEQWQDPAVQSISDRETVWKEKELHGRFYKALHEPFVDTVASLHWLRFGDLFGETEGFVCAIQDQVIKTNNYRRYILKDGTVDICRACRHPGESLRHVISGCSALSNSEYLHRHNLVARILHQELALKYGLVDRKLPYYKYLPEAVLENDRARLYWDRAIITDRTILANKPDIVLMDRAQSRIFLVDITIPYDENLVKAETDKQTKYLDLAHEVTDMWGGLPTEIIPVVVSANGLIPVSLSGHLRRLGLRGGPLQVQMQKAVLLDTARIVRRFLSLSPLTLGRLVSPAEGLHLVGLLFIYVLLYLFYVIDIYVYLSFHFHL

SEQ ID NO: 14386 - protein, 907 aa, Parnassius apollo
MLVTYLEASRDLCETDSILFGAAVAVCRIIGAKLPMAGRATTQSSAIPAWRKRIEDRIAKARALIGRLTSFRSGNNRPRIMRTVRMAFAGTNISLSQPDITQKLTERIDDLKQKIAAWGKRIRRFTDRSRRFNQNRLFQSDQKRLYKSLERPKVCGAGQGPDQADIIAFWRGLWSEPVNHSEGPWMEVVASQGASVTPMDPITVTPEDVAEAVRRAPNWKSPGLDGLHHYWLKGFIVCHAVLARQFQEALDQKSLPSLFTTGITHLVPKDQDTTDPSKYRPITCLPTIYKTLTSILSARITRHLELNQLMSRAQNGCRGGGRGTKEPLLIDAVIGKVVKRNRRNFSAAWIDYRKAFDSVPHTWLKRVLELYKIDCTVRDFLEQCMGQWSTILCHLGERMMAAENHIRIRRGIFQGDCLSPIWFCLSLNPLSTLLEGSGRGFQLRRGGTKVTHLFYMDDLKLFASSRSHLMELLNITCEFSSSIGMELGTDKCAVLHVERGRVANSEGIDLSMPVNLRTLSEAETYRYLGMSQNIGIDEAGMKQSVCDVFYARLTKVLNSLLSGVNKSHAYNCWVMPVLMYTFGILRWTQTELNALDRKVRTTMTSHRMHHPRSSVMRLYLPRKHGGRGFLSALTMHNREVCSLRQYFLTRSDDPFYNDVISSDKGLTPLSLANEQWQDPAVLSIPDRETVWKEKELHGRYYKALHEPFVDTVASLNWLRFGDLFGETEGFVCAIQDQVIKTNNYRRYILKDGTVDVCRACRHPGESLRHVISGCSALSNSEYLHRHNLVARILHQELALKYGLVDRKVPYYKYLPEAVLENDRARLYWDRAIITDRTILANKPDIVLMDRAQSRIFLVDITIPYDENLVKAETDKQSKYLDLAHEVTDMWGGMPTEIIPVIKKKTRD

SEQ ID NO: 14387 - protein, 1189 aa, Parnassius apollo
MMEKKIVRKGPLPGGRQGASGAGAGRDSMRAASRARGVARPPSSPPHPSSPPEGLVSAGSSRTQQAAPAAGGARRMRWSKSMNENALRAYFRAKGEETGCLAYRARMHRFFAELEPSLSVTEQNLADRVRYILRSNIFGDAELERLRREAIPSSNGNATAGNAAPLDAQQTAYVDAAVNIPFVANSDDDGIVSHELEKMRSILEESMLETRSMPLENRPRLPRIPLSKRNRAVVRALNPMLVTYLEASRDLCETDSILFGAALAVCRIIGAKLPVAGRATQKSSAIPAWRKRIEDRIAKARALIGRLTSFRSGNNRPRIMRTVRMAFAGTNISLFQPDITQKLTERIDDLKQKIAAWGKRIRRFSERSRRFNQNRLFQSDQKRLYKSLERPEVCGAGPGPDQADTVAFWRGLWSEPVNHSEGPWMEVVASQSASVTPMDPVTITPEDVAEAIRRAPNWKSPGLDGLHHYWLKGFVVCHAVLARQFQEALNQKSLPSLFTTGITHLVPKDQDTTDPSKYRPITCLPTIYKTLTSILSARITRHLELNQVMSRAQNGCRGGGRGTKEPLLIDAVIGKVVKRNRRNFSAAWIDYRKAFDSVPHTWLKRVLRLYKIDCTVGDFLEQCMGQWSTILCYLGERMMAAENHIRIRRGIFQGDCLSPIWFCLSLNPLSTLLEGSGRGFQLRKGGTKVTHLFYMDDLKLFASSRSHLMELLNITCEFSNSIGMELGTDKCAVLHVERGRVANSEGIDLSMPVNLRTLSEAETYRYLGMSQNIGIDEAGMKQSVCDVFYARLTKVLNSLLSGVNKTHAYNGWVMPVLMYTFGILRWTQTELNALDRKVRTTMTSHRMHHPRSSVMRLYLPRKHGGRGFLSALTMHNREVCSLRNYFLARSDDPFYKDVISSDKGLTPLSLANEQWQDPAVQTISDRENVWKEKELHGRFYKALHEPFVDTVASLHWLRFGDLFGETEGFVCAIQDQVIKTNNYRRYILKDGTVDICRACRHPGESLRHVISGCSALSNSEYLHRHNLVARILHQELALKYGLVDRKLPYYKYLPEAVLENDRARLYWDRAIITDRTILANKPDIVLMDRAQSRIFLVDITIPYDENLVKAETDKQTKYLDLAHEVTDMWGGLPTEIIPVVVSANGLIPVSLSGHLRRLGLRGGPLRAQMQKAVLLDTARIVRRFLSLSP

SEQ ID NO: 14388 - protein, 1191 aa, Parnassius apollo
MMEHRRLRKGPLPGGRQGASGAGAGRDSMRTASRARGAARPPSSPSHPSSPPACLVSAGSSQAQQSAPATGGVRRMRWTINMNSNALRAYFRAKGGEIGGFAYRARMHRLFTELEPSITVTEQNLADRVRYILRSNIFDGAELERLRREAVPSSNENATTEGAVPQVAEQPAHVDAAENTPVVADSNDDGTFTQELEIEQMRSTLEEAIMETRSTPLENRPRLPRIALSKRNRAVVRALNPMLVTYLEASRDLCETDSILFGAALAVCRIIGAKLSTAGRTTGQSSAIPAWRTRIEERIAKARALIGRLICFRSGNTRPRIVRTVRMAFAGTNVSLSQPDIMQKLTERIDDLKQRIAAWGKRIRRYTERSTRFNQNRLFQSDQKRLYKSLERPMVSGTGPVPNQADTVAFWRSLWSEPVNHNEGPWTEVVASQCAGITPMDPVTITPDDVAEAVRRAPNWKSPGLDGLHHYWLKGFVVCHTVLARQFQEVLNQKSLPSLFTTGITHLVPKGQGTTDPSKYRPITCLPTIYKTLTSILSARITRHLDSNQVMSRAQNGCRGGGRGTKEPLLIDAVIGKVVKRNRRNFSAAWIDYRKAFDSVPHTWLKRVLELYKIDCTVRDFLEQCMGQWSTILCHLGERMMAAENHIRIRRGIFQGDCLSPIWFCLSLNPLSTLLEGSGRGFQLRKGGTKVTHLFYMDDLKLFASSRSHLMEMLNITCEFSNSIGMELGTDKCAVLHVERGRVDNSEGIDLSMPVNLGTLSEAETYRYLGMSQNIGIDEAGMKQSVCDVFYARLTKVLNSLLSGVNKTQAYNGWVIPVLMYTFGILRWTQTELNALDRKVRTTMTSHRMHHPRSLVMRLYLPRKHGGRGFLSALTMHNREVCSLRNYFLARSDDPFYKDVISCDKGLTPLSLANEQWQDPAVQTISDRETVWKEKELHGRFYKSLHGPFVDTVTSLHWLRFGDLFGETEGFVCAIQDQVIKTNNYRRYILKDGTIDICRACRHPGESLRHVISGCSALSNSEYLHRHNLVARILHQELALKYGFVDRKLPYYKYLPEAVLENDRARLYWDRAIITDRTILANKPDIVLMDRAQSRIFLVDITIPCDENLVKAETDKQTKYLDLAHEVTDMWGGLPTEIIPVVVSANGLIPVSLSGHLRRLGLRGGPLQAQMQKAVLLDTARIVRRFLSLSP

SEQ ID NO: 14389 - protein, 1189 aa, Parnassius apollo
MMESNGTRKGPLPGGRQGASGAGAGRDSMRTASRARGAARPPSSSSHPSSPPAGLVSAGSSRAQQSAPATGGVRRMRWTTQMNSNALRAYFRAKGGETGGFAYRARMHRLFAELEPSVTVTEQNLADRVRYILRSNTFDVTELERLRREAVPSSGENAAAEDAAPQLAEQTANVDAAVNTPVAVDSNDDGTVAQELELEQMRSTLEEAIVETRTLENRPRLPRLALSKRNRAVVRALNPMLVTYLEASRDLCDTDSILFGAALAVCRIIGAKLSTAGRATGQSSAIPAWRIRIEERIAKARALIGRLICFRSGNTRPRIVRTVRMAFAGTNVSLSQPDIMQKLTERIDDLKQRIAAWGKRIRRYTERSTRFNQNRLFQSDQKRLYKSLERPIVSGTGPAPNQADMVAFWRSLWSEPVNHNEGPWTEVVASQCASITPMDPVIITPDDVAEAVRRAPNWKSPGLDGLHHYWLKGFMVCHSVLARQFQEALNQKSLPSLFTTGITHLVPKDQGATDPSKYRPITCLPTIYKTLTSILSARIARHLDLNQVMSRAQNGCRGGGRGTKEPLLIDAVIGKVVKRNRRNFSAAWIDYRKAFDSVPHTWLKRVLELYKIDCTVRDFLEQCMGQWSTILCHLGERMTAAESRIRIRRGIFQGDCLSPIWFCLSLNPLSTLLEGSGRGFQLRKGGTKVTHLFYMDDLKLFASSRSHLMELLNITCEFSNSIRMELGTDKCAVLHVERGRVANSEGIDLSMPVNLRTLSEAETYRYLGMSQNIGIDEAGMKQSVCDVFYARLTKVLNSLLSGVNKAHAYNGWVMPVLMYTFGILRWTQTELNALDRKVRTTMTSHRMHHPRSSVMRLYLPRKHGGRGFLSALTMHNREVCSLRDYFLARSDDPFYKDVISCDKGLTPLSLANEQWQDPAVQSIFDRETVWKEKELHGRFYKALHEPFVDTVASLHWLRFGDLFGETEGFVCAIQDQVIKTNNYRRYILKDGTVDICRACRHPGESLRHVISGCSALSNSEYLHRHNLVARILHQELALKYGLVDRKLPYYKYLPEAVLENDRARLYWDRAIITDRTILANKPDIVLMDRAQSRIFLVDITIPYDENLVKAETDKQTKYLDLAHEVTDMWGGLPTEIIPVVVSANGIIPVSLSGHLRRLGLRGGPLQVQMQKAVLLDTARIVRRFLSLSP

SEQ ID NO: 14390 - protein, 950 aa, Parnassius apollo
MLVTYLEASRDLCDTDSILFGAALAVCRIIGAKLSTAGRATGQSSAIPAWRIRIEERIAKARALIGRLICFRSGNTRPRIVRTVRMAFAGTNVSLSQPDIMQKLTERIDDLKQRIAAWGKRIRRYTERSTRFNQNRLFQSDQKRLYKSLERPIVSGTGPAPNQADMVAFWRSLWSEPVNHNEGPWTEVVASQCASITPMDPVIITPDDVAEAVRRAPNWKSPGLDGLHHYWLKGFMVCHSVLARQFQEALNQKSLPSLFTTGITHLVPKDQGATDPSKYRPITCLPTIYKTLTSILSARIARHLDLNQVMSRAQNGCRGGGRGTKEPLLIDAVIGKVVKRNRRNFSAAWIDYRKAFDSVPHTWLKRVLELYKIDCTVRDFLEQCMGQWSTILCHLGERMTAAESRIRIRRGIFQGDCLSPIWFCLSLNPLSTLLEGSRRGFQLRKGGTKVTHLFYMDDLKLFASSRSHLMELLNITCEFSNSIRMELGTDKCAVLHVERGRVANSEGIDLSMPVNLRTLSEAETYRYLGMSQNIGIDEAGMKQSVCDVFYARLTKVLNSLLFGVNKAHAYNGWVMPVLMYTFGILRWTQTELNALDRKGRTTMTSHRMHHPRASVMRLYLPWKHGGRGFLSALTMHNREVCSLRDYFLARSDDPFYKDVISCDKGLTPLSLANEQWQDPAVQSISDRETVWKEKELHGRFYKALHEPFVDTVASLHWLRFGDLFGETEGFVCAIQDQVIKTNNYRRYILKDGTVDICRACRHPGESLRHVISGCSALSNSEYLHRHNLVARILNQELALKYSLVDRKLPYYKYLPEAVLENDRARLYWDRAIITDRTILANKPDIVLMDRAQSRIFLVDITIPYDENLVKAETDKQTKYLDLAHEVTDMWSGLPTEIIPVVVSANGLIPVSLSYHLRRLGLRGGPLQAQMQKAVLLDTARIVRRFLSLSP

SEQ ID NO: 14391 - protein, 1108 aa, Parnassius apollo
MNENALRAYYRAKGEETVGIAYRSRMHCFFAELEPSTPVTEQNLADRVRYIMRSKIFDDAELGRLRREAIPSSNESAMAGDAAPHSTDQHPHVEAALDLPVVVDSNDDEIVSHELEKMRSILEEAILETRSTPLENRPRLPRIPLSKRNRAVVRALNPMLVTYLEASRDLCETDSILFGAAVAVCRIIGAKLPMAGRATTQSSAIPAWRKRIEDRIAKARALIGRLTSFRSGNNRPRIMRTVRMAFAGTNISLSQPDITQKLTERIDDLKQKIAAWGKRIRRFTDRSRRFNQNRLFQSDQKRLYKSLERPKVCGAGQGPDQADIIAFWRGLWSEPVNHSEGPWMEVVASQGASVTPMDPITVTPEDVAEAVRRAPNWKSPGLDGLHHYWLKGFVVCHAVLARQFQEALDQKSLPSLFTTGITHLVPKDQDTTDPSKYRPITCLPTIYKTLTSILSARITRHLELNQLMSRAQNGCRGGGRGTKEPLLIDAVIGKVVKRNRRNFSAAWIDYRKAFDSVPHTWLKRVLELYKIDCTVRDFLEQCMGQWSTILCHLGERMMAAENHIRIRRGIFQGDCLSPIWFCLSLNPLSTLLEGSGRGFQLRRGGTKVTHLFYMDDLKLFASSRSHLMELLNITCEFSSSIGMELGTDKCAVLHVERGRVANSEGIDLSMPVNLRTLSEAETYRYLGMSQNIGIDEAGMKQSVCDVFYARLTKVLNSLLSGVNKSHAYNGWVMPVLMYTFGILRWTQTELNALDRKVRTTMTSHRMHHPRSSVMRLYLPRKYGGRGFLSALTMHNREVCSLRQYFLARSGDPFYNDVISSDKGLTPLSLANEQWQDPAVLSIPDRETVWKEKELHGRYYKALHEPFVDTVASLNWLRFGDLFGETEGFVCAIQDQVIKTNNYRRYILKDGTVDVCRACRHPGESLRHVISGCSALSNSEYLHRHNLVARILHQELALKYGLVDRKVPYYKYLPEAVLENDRARLYWDRAIITDRTILANKPDIVLMDRAQSRIFLVDITIPYDENLVRAETDKQSKYLDLAHEVTDMWGGLPAEIIPVVLSANGLIPVSLSGHLRRLGLRDGPLRVQMQKAVLLDTARIVRRFLSLSP

SEQ ID NO: 14392 - protein, 1191 aa, Parnassius apollo
MMEYGRTRKGPLPGGRQGASGAGAGRGSMRTASRARGAARPPSSPSHPSSPPAGLVSAGSSRAQQSAPASGGVRRMRWTTQMNSNALRAYFGAKGGETGCLAYRARMHRLFAELEPSLTVTEQNLADRVRYILRSNIFDVAELERLRREAVPSSDENATAEDAAPQMVEQPANVDAAVNTPVVVDSNDDGTVAQELELEHMRSTLEEAIVETRSTPLENRPRLPRIALSKRNRAVVRALNPMLVTYLEASRDLCETDSILFGAALAVCRIIGAKISTVGRATGHSSAIPAWRRRIEERIAKTRALIGRLICFRSGNNRPRIVRTVRMAFAGTNVSLSQPDITQKLTERIDDLKQRIAAWGKRIRRYTERSTRFNQNRLFQSDQKRLYESLERPMVSGTGPAPNQADTVAFWRGLWSEPVNHSEGPWTEVVASQCAGITPMDPVIITPDDVAEAVRRAPNWKSPGLDGLHHYWLKGFMVCHSVLARQFQEALNQKSLPSLFTTGITHLVPKDQGTTDPSKYRPITCLPTIYKTLTSILSARITCHLDSNQVMSRAQNGCRGGGRGTKEPLLIDAVIGKVVKRNRRNFSAAWIDYRKAFDSVPHTWLKRVLELYKIDCTVRDFLEQCMGQWSTILCHLGERMMAAENHIRIRRGIFQGDCLSPIWFCLSLNPLSTLLEGSGRGFQLRRGGTKVTHLFYMDDLKLFASSRSHLMELLNITCEFSNSIGMELGTDKCAVLHVERGRVANSEGVDLSMPVNLRTLSEAETYRYLGMSQNIGIDETGMKQSVCDVFYARLTKVLNSLLTGVNKAHAYNGWVMPVLMYTFGILRWTQTELNALDRKVRTTMTSHRMHHPRSSVMRLYLSRKHGGRGFLSALTMHNREVCSLRDYFLARSDDPFYMDVISCDKGLTPLSLANEQWQDPAVQSISDRDTVWKEKELHGRFYKALHEPFVDTVASLHWLRFGDLFGETEGFVCAIQDQVIKTNNYRRYILKDGTVDICRACRHPGESLRHVISGCSALSNSEYLHRHNLVARILHQELALKYGLVDRKLPYYKYLPEAVLENDRARLYWDRAIITDRTILANIPDIVLMDRAQSRIFLVDITIPYDENLVKAETDKQTKYLDLAHEVTDMWGGLPTEIIPVVVSANGLIPVSLSGHLRRLGLRGGPLQVQMQKAVLLDTARIVRRFLSLSP

SEQ ID NO: 14393 - protein, 1130 aa, Parnassius apollo
MYFRIYFILLIFLYIYLFIFVYNYIFIQPNQMRKLYRYPTHNNNNKHRLFAELEPSLIVTEQNLADRVRYILRSNIFDVAELERLRREAVPSSDENATAEDAAPKMLEQPVNVDAAVNTPVVVDSNDDGTVAQELELEHMRSILEEAIVETRSTPLENRPRLPRIALSKRNRAVVRAVNLMLVTYLEASRDLCETDSILFGAALAVCRIIGAKVSTAGRATGHSSAIPAWRKRIEERIAKARALIGRLICFRSGNNRPRIVRTVRMAFAGTNVSLSQPDITQKLTERIDDLKQRIAAWGKRIRRYTERSTRFNQNRLFQSDQKRLYESLERPMVSGTGPAPNQADTVAFWRGLWSEPVNHSEGPWTEVVASQCAGITPMDPVIITPDDVAEAVRRAPNWKSPGLDGLHHYWLKGFMVCHSVLARQFQEALNQKSLPSLFTTGITHLVPKDQGTTDPSKYRPITCLPTIYKTLTSILSARITCHLDSNQVMSRAQNGCRGGGRGTKEPLLIDAVIGKVVKRNRRNFSAAWIDYRKAFDSVPHTWLKRVLELYKIDCTVRDFLEQCMGQWSTILCHLGERMMAAENHIRIRRGIFQGDCLSPIWFCLSLNPLSTLLEGSGRGFQLRKGGTKVTHLFYMDDLKLFASSRSHLMELLNITCEFSNSIGMELGTDKCAVLHVERGRVANSEGVDLSMPVNLRTLSEAETYRYLGMSQNIGIDETGMKQSVCDVFYARLTKVLNSLLSGVNKAHAYNGWVMPVLMYTFGILRWTQTELNALDRKVRTTMTSHRMHHPRSSVMRLYLPRNHGGRGFLSALTMHNREVCSLRDYFLARSDDPFYKDVISCDKGLTPLSLANEQWQDPAVQSISDRETVWKEKELHGRFYKALHEPFVDTVASLHWLRFGDLFGETEGFVCAIQDQVIKTNNYRRYILKDGTVDICRACRHPGESLRHVISGCSALSNSEYLHRHNLVARILHQELALKYGLVDRKLPYYKYLPEAVLENDRARLYWDRAIITDRTILANKPDIVLMDRARSRIFLVDITIPYDENLVKAETDKQTKYLDLAHEVTDMWGGLPTEIIPVVVSANGLIPVSLSGHLRRLGLRGGPLQVQMQKAVLLDTARIVRRFLSLSP

SEQ ID NO: 14394 - protein, 1189 aa, Parnassius apollo
MMAKRGTRIGPLPGGRRGASGAGAGRGSMRAASRARGAARSPSSPSHPSSPPEGLVSAGSSRTQQAAPAAGGARRMRWTKPMNENALRAYYRAKGEETVGIAYRSRMHCFFAELEPSTPVTEQNLADRVRYIMRSKIFDDAELGRLRREAIPSSNESAMAGDAAPHSTDQHPHVEAALDLPVVVDSNDDEIVSHELEKMRSILEEAILDTRSTPIENRPRLPRIPLSKRNRAVVRALNPMLVTYLEASRDLCETDSILFGAAVAVCRIIGAKLPMAGRATTQSSAIPAWRKRIEDRIAKARALIGRLTSFRSGNNRPRIMRTVRMAFAGTNISLSQPDITQKLTERIDDLKQKIAACGKRIRRFTDRSRRFNQNRLFQSDQKRLYKSLERPKVCGAGQGPDQADIIAFWRGLWSEPVNHSEGPWMEVVASQGASVTPMDPITVTPEDVAEAVRRAPNWKSPGLDGLHHYWLKGFIVCHAVLARQFQEALDQKSLPSLFTTGITHLVPKDQDTTDPSKYRPITCLPTIYKTLTSILSARITRHLELNQLMSRAQNGCRGGGRGTKEPLLIDAVIGKVVKRNRRNFSAAWIDYRKAFDSVPHTWLKRVLELYKIDCTVRDFLEQCMGQWSTILCHLGERMMAAENHIRIRRGIFQGDCLSPIWFCLSLNPLSTLLEGSGRGFQLRRGGTKVTHLFYMDDLKLFASSRSHLMELLNITCEFSSSIGMELGTDKCAVLHVERGRVANSEGIDLSMPVNLRTLSEAETYRYLGMSQNIGIDEAGMKQSVCDVFYARLTKVLNSLLSGVNKSHAYNCWVMPVLMYTFGILRWTQTELNALDRKVHTTMTSHRMHHPRSSVMRLYLPRKHGGRGFLSALTMHNREVCSLRQYFLTRSDDPFYNDVISSDKGLTPLSLANEQWQDPAVLSIPDRETVWKEKELHGRYYKALHEPFVDTVASLNWLRFGDLFGETEGFVCAIQDQVIKTNNYRRYILKDGTVDVCRACRHPGESLRHVISGCSALSNSEYLHRHNLVARILHQELALKYGLVDRKVPYYKYLPEAVLENDRARLYWDRAIITDRTILANKPDIVLMDRAQSRIFLVDITIPYDENLVKAETDKQSKYLDLAHEVTDMWGGMPTEIIPVVVSANGLIPVSLSGHLRRLGLRDGPLRAQMQKAVLLDTARIVRRFLSLSP

SEQ ID NO: 14395 - protein, 1189 aa, Luehdorfia chinensis
MMDTDRLRIGSLPGGRQGASGAGAGRGSMRVASRTRGAARPPSSPSHPSSPPEGLVSAGSSRTQQLTSAAGGLRRMRWTTDMNQNALRAYFRAKGGETGGFAYRARMHRVFAELEPSITVTEQNLADRVRYIIRSKIFDDAELERLRREAIPSLDENAAAGDAAPQVADQHADVDAATDLEVVVDSDDGGMVAQEIEQMRRTLEEAILEMRNTPLENRPRLPRITLSKRNRAVVRALNPMLTTYLETSRDLCETDSILFGAALAVCRVIGAKLPKTGRATGKSSAIPEWRRRIEDRIAKARVLIGRLISFRSGNNRPRIVHSVRIAFAGTNVSLSQPDIAQKLTERIDDLKQRIAAWGKRIRRYTERSRRFNQNRLFQSDQKRLYKSLERPRNCGTGQGPNQAETVAFWRSLWSEPINHNEGPWTETVASQCTTITPMDPVVISPDDVADAVRRAPNWKSPGLDGLHHYWLKGFIVCHAVLARQFQNALDQMSLPSLFTTGITHLVPKDQVTTDPSKYRPITCLTTIYKTLTSILSVRITRHLVLNRVISPAQSGCRGGGRGTKEPLLIDAVIGKVVKRNRRNFSAAWIDYRKAFDSVPHTWLKRVLELYKVDCTVRDFLGQCMRQWSTILCHLGERMTAAENRIWVRRGIFQGDCLSPVWFCLSLNPLSTLLEGSGRGFQLRRGGTKVTHLFYMDDLKLFASNRSHLVDLLKITCDFSKSIGMELGTDKCAVLHVERGRVGHSEGIDLSMPVNIRTLSEAETYRYLGMSQNIGIDEADMKQSVRDVFFARLTKVCNSLLSGVNKARAYNGWVMPVLIYTFGILRWTQTELNALDRKVRTIMTSHRAHHPRSSVMRLYLPRRHGGRGFLSALTMHNREVCNLRNYFLSKSGGALCADVITSDKGLTPLSLANEQWQDPAVQSISDREAVWKEKELHGRFYKALHEPFVDTVASLHWLRFGDLFGETEGFVCAIQDQVIKTNNYRRYILKDGTVDVCRACRRPGESLRHVISGCSALANSEYLHRHNLVARILHQELALKYGLVDRKLPYYKYLPEAVLENDRARLYWDRAIITDRTILANKPDIVLMDRAQSRIFLVDITIPYDENLVKAETDKKTKYLDLAHEVTDMWGGMPTEIIPVVVSANGLIPVSLSGHLRRLGLRDGLLRAQMQKAVLLDTARIVRRFLSLSP

SEQ ID NO: 14396 - protein, 950 aa, Parnassius apollo
MLVTYLEASRDLCETDSILFGAALAVCRIIGAKLPMAGRATQQGSAIPAWRKRIEDCITKARALIGRLTSFRSGNIRPRVVRTVRMAFAGTNISLSQPDITQKLTERIDDLKQKIAAWGKRIRRFSERSRRFNQNRLFQSDQKRLYKSLERPEVCGAGPGPDQADTVAFWRGLWSEPVNHSEGPWMEVVASQSASVTPMDPVTITPEDVAEAVRRAPNWKSPGLDGLHHYWLKGFVVCHAVLARQYQEALDQKSLPSLFTTGITHLVPKDQDTTDPSKYRPITCLPTIYKTLTSILSARITRHLELNQVMSRAQNGCRGGGRGTKEPLLIDAVIGKVVKRNRRNFSAAWIDYRKAFDSVPHAWLKRVLELYKIDCTVRDFLEQCMGQWSTILCYQGERMMAAENHIRIRRGIFQGDCLSPIWFCLSLNPLSTLLEGSGRGFQLRKGGTKVTHLFYMDDLKLFASSRSHLMELLNITCEFSNSIGMELGTDKCAVLHVERGRVANSEGIDLSMPVNLKTLSEAETYRYLGMSQNIGIDEAGMKQSVCDVFYARLTKVLNSLLSGVNKTHAYNGWVMPVLIYTFGILRWTQTELNALDRKVRTTMTSHRMHHPRSSVMRLYLPRKHGGRGFLSALTMHNREVCSLRDYFLARSDDPFYNDVISSDKGLTPLSLANEQWQDPAVLSISDRETVWKEKELHGRYYRALHEPFVDTVASLNWLRFGDLFGETEGFVCAIQDQVIKTNNYRRYILKDGTVDVCRACRHPGESLRHVISGCSALSNSEYLHRHNLVARILHQELALKYGLVDRKLPYYKYLPEAVLENDRARLYWDRAIITDRTILANKPDIVLMDRAQSRIFLVDITIPYDENLVKAETDKQTKYLDLAHEVTDMWGGLPTEIIPVVVSANGLIPVSLSGHLRRLGLRGGPLRAQMQKAVLLDTARIVRRFLSLSP

SEQ ID NO: 14397 - protein, 870 aa, Parnassius apollo
MRTVRMAFAETNINLFQPDITQKLTERIDDLKQKIAAWGKRIRRFSERSRRFNQNRLFQSDQKRLYKTLERPEVCGAGPGPDQADTVAFWRGLWSEPVNHSEGPWMEVVASQSASFTPMDPVTITPENVAEAVRRAPNWKSPGLDGLHHYWLKGFVVCHAVLARQFQEALDQKSLPSLFTTGITHLVPKDQDTTDPSKYRPITCLPTIYKTLTCILSARITRHLELNQVMSRAQNGCRGGGRGTKEPLLIDAVIGKVVKRNRRNFSAAWIDYRKAFDSVPHTWLKRVLQLYKIDYTVGDFLEHCMGQWSTILCYLGERMMAAENHIRIRRGIFQGDCLSPIWFCLSLNPLSTLLEGSGRGFQLRKGGTKVTHLFYMDDLKLFASSRSHLMELLNITCEFSNSIGMELGTDKCAVLHVERGRVANSEGIDLSMPVNLRTLSEAETYRYLGMSQNIGIDEAGMKQSVCDVFYARLTKVLNSLLSGVNKTHAYNGWIMPVLMYTFGILRRTRTELNALDRKVRTTMTSHRMHHLRSSVMRLYLPRKHGGRGFLSALTMHNREVCSLRNYFLARSDDPFYKDVISSDKGLTPLSLANEQWQDPAVQTISDRENVWKEKELHGRFYKALHEPFVDTVASLHWLRFGDLFGETEGFVCAIQDQVIKTNNYRRYILKDGTVDICRACRHPGESLRHVISGCSALSNSEYLHRHNLVARILNQELALKYGLVDRKLPYYKYLPEAVLENDRARLYWDRAIITNRTILANKPDIVLMDRAQSRIFLVDITIPYDENLVKAETDKKTKYLDLAHEVTDMWGGLPTEIIPVVVSANGLIPVSLSGHLRRLGLRGGPLQVQMQKAVLLDTARIVRRFLSLSP

SEQ ID NO: 14398 - protein, 991 aa, Parnassius apollo
MRSILEESMLETRSMPLENRPRLPRIPLSKRNRAVVRALNPMLVTYLEASRDLCETDSILFGAALAVCRIIGAKLPMAGRATQQGSAIPAWRKRIEDRIAKARALIGRLTSFRSGNIRPRVVRTVRMAFAGTNISLSQPDITQKLTERIDDLKQKIAAWGKRIRRFSERSRRFNQNRLFQSDQKRLYKSLERPEVCGAGPGPDQADTVAFWRGLWSEPVNHSEGPWMEVVASRSASVTPMDPVTITPEDVAEAVRRAPNWKSPGLDGLHHYWLKGFVVCHAVLARQYQEALDQKSLPSLFTTGITHLVPKDQDTTDPSKYRPITCLPTIYKTLTSILSARITRHLELNKVMSRAQNGCRGGGRGTKEPLLIDAVIGKVVKRNRRNFSAAWIDYRKAFDSVPHAWLKRVLELYKIDCTVRDFLEQCMGQWSTILCYQGERMMAAENHIRIRRGIFQGDCLSPIWFCLSLNPLSTLLEGSGRGFQLRKGGTKVTHLFYMDDLKLFASSRSHLMELLNITCEFSNSIGMELGTDKCAVLHVERGRVANSEGIDLSMPVNLKTLSEAETYRYLGMSQNIGIDEAGVKQSVCDVFYARLTKVLNSLLSGVNKTHAYNGWVMPVLIYTFGILRWTQTELNALDRKVRTTMTSHRMHHPRSSVMRLYLPRKHGGRGFMSALTMHNREVCSLRDYFLARSDDPFYNDVISSDKGLTPLSLAHEQWQDPAVLSISDRETVWKEKELHGRYYRALHEPFVDTVASLNWLRFGDLFGETEGFVCAIQDQVIKTNNYRRYILKDGTVDVCRACRHPGESLRHVISGCSALSNSEYLHRHNLVARILHQELALKYGLVDRKLPYYKYLPEAVLENDRARLYWDRAIITDRTILANKPDIVLMDRAQSRIFLVDITIPYDENLVKAETDKQTKYLDLAHEVTDMWGGLPTEIIPVVVSANGLIPVSLSGHLRRLGLRGGPLRAQIQKAVLLDTARIVRRFLSLSP

SEQ ID NO: 14399 - protein, 1191 aa, Parnassius apollo
MMELNRTRKVPLPGGRQGASGAGAGRGSMRTASRARGAAQPPSSPSHPSSPPAGLVSAGSSRAQQSAPASGGVRRMRWTTQMNSNALRAYFRAKGGETGGLAYRARMHRLFAELEPSLTVTEQNLADRVRYILRSNIFDVAELERLRREAVPSSGENAAAEDAAPQMVEQPANVDAAVNTPVVVDSSDDGTVAQELELEHMRSTLEEAIVETRSTPLENRPRLPRIALSKRNRAVVRALNPMLVTYLEASRDLCETDSILFGAALAVCRIIGAKVSTAGRATGHSSAIPAWRRRIEERIAKARALIGRLICFRSGNNRPRIVRTVRMAFAGTNVSLSQPDITQKLTERIDDLKQRIAAWGKRIRRYTERSTRFNQNRLFQSDQKRLYESLERPMVSGTGPAPNQADTVAFWRGLWSEPVNHSEGPWTEVMASQCAGITPMDPVIITPDDVAEAVRRAPNWKSPGLDGLHHYWLKGFMVCHSVLARQFQEALNQKSLPSLFTTGITHLVPIDQGTTDPSKYRPITCLPTIYKTLTSILSARITCHLDSNQVMSRAQNGCRGGGRGTKEPLLIDAVIGKVVKRNRRNFSAAWIDYRKAFDSVPHTWLKRVLELYKIDCTVRDFLEQCMGQWSTILCHLGERMMAAENHIRIRRGIFQGDCLSPIWFCLSLNPLSTLLEGSGRGFQLRKGGTKVTHLFYMDDLKLFASSRSHLMELLNITCEFSNSIGMELGTDKCAVLHVERGRVANSEGVDLSMPVNLRTLSEAETYRYLGMSQNIGIDETGMKQSVCDVFYARLTKVLNSLLSGVNKAHAYNGWVMPVLMYTFGILRWTQTELNALDRKVRTTMTSHRMHHPRSSVMRLYLSRKHGGRGFLSALTMHNREVCSLRDYFLARSDDPFYKYVISCDKGLTPLSLPNEQGQDPAVQSISDRETVWKEKELHGRYYRALHEPFVDTVASLNWLRFGDLFGETEGFVCAIQDQVIKTNNYRRYILKDGTVDICRACRHPGESLRHVISGCSALSNSEYLHRHNLVARILHQELALKYGLVDRKLLYYKYLPEAVLENDRARLYWDRAIIIDRTILANKPDIVLMDRAKSRIFLVDITIPYDENLVKAETDKQTKYLDLAHEVTDMWGGLPTEIIPVVVSANGLIPVSLSGHLRQLGLRGGPLQVQMQKVVLLDTARIVRRFLSLSP

SEQ ID NO: 14400 - protein, 950 aa, Parnassius apollo
MLVTYLEASRDLCETDSILFGAALAVCRIIGAKVSTAGRATGHSSAIPAWRRRIEERIAKARALIGRLICFRSGNNRPRIVRTVRMAFAGTNVSLSQPDITQKLTERIDDLKQRIAAWGKRIRRYTERSTRFNQNRLFQSDQKRLYESLERPMVSGTGPAPNQADTVAFWRGLWSEPVNHSEGPWTEVVASQCAGITPMDPVIITPDDVAEAVRRAPNWKSPGLDGLHHYWLKGFMVCHSVLARQFQEALNQKSLPSLFTTGITHLVPKDQGTTDPSKYRPITCLPTIYKTLTSILSARITCHLDSNQVMSRAQNGCRGGGRGTKEPLLIDAVIGKVVKRNRRNFSAAWIDYRKAFDSVPHTWLKRVLELYKIDCTVRDFLEQCMGQWSTILCHLGERMMAAENHIRIRRGIFQGDCLSPIWFCLSLNPLSTLLEGSGRGFQLRKGGTKVTHLFYMDDLKLFTSSRSHLMELLNITCEFSNSIGMELGTDKCAVLHVERGRVANSEGVDLSMPVNLRTLSEAETYRYLGMSQNIGIDETGMKQSVCDVFYARLTKVLNSLLSGVNKAHAYNGWVMPVLMYTFGILRWTQTELNALDRKVRTTMTSHRMHHPRASVMRLYLPRKHGGRGFLSALTMHNREVCSLRDYFLARSDDPFYKDVISCDKGLTPLSLANEQWQDPAVQSISDRETVWKEKELHGRFYKALHEPFVDTVASLHWLRFGDLFGETEGFVCAIQDQVIKTNNYRRYILKDGTVDICRACRHPGESLRHVISGCSALSNSEYLHRHNLVARILHQELALKYGLVDRKLPYYKYLPEAVLENDRARLYWDRAIITDRTILANKPDIVLMDRAQSRIFLVDITIPYDENLVKAETDKQTKYLDLAHEVTDMWGGLPTEIIPVVVSANGLIPVSLSGHLRRLGLRGGPLQVQMQKAVLLDTARIVRRFLSLSP

SEQ ID NO: 14401 - protein, 993 aa, Parnassius apollo
MLVTYLEASRDLCETDSILFGAALAVCRIIGAKLSTAGRTTGQSSAIPAWRTRIEERIAKARALIGRLICFRSGNTRPRIVRTVRMAFAGTNVSLSQPDIMQKLTERIDDLKQRIAAWGKRIRRYTERSTRFNQNRLFQSDQKRLYKSLERPMVSGTGPVPNQADTVAFWRSLWSEPVNHNEGPWTEVVASQCAGITPMDPVTITPDDVAEAVRRAPNWKSPGLDGLHHYWLKGFVVCHTVLARQFQEVLNQKSLPSLFTTGITHLVPKGQGTTDPSKYRPITCLPTIYKTLTSILSARITRHLDSNQVMSRAQNGCRGGGRGTKEPLLIDAVIGKVVKRNRRNFSAAWIDYRKAFDSVPHTWLKRVLELYKIDCTVRDFLEQCMGQWSTILCHLGERMMAAENHIRIRRGIFQGDCLSPIWFCLSLNPLSTLLEGSGRGFQLRKGGTKVTHLFYMDDLKLFASSRSHLMELLNITCEFSNSIGMELGTDKCAVLHVERGRVSNSEGIDLSMPVNLRTLSEAETYRYLGMSQNIGIDEAGMKQSVCDVFYARLTKVLNSLLSGVNKTQAYNGWVMPVLMYTFGILRWTQTELNALDRKVRTTMTSHRMHHPRSSVMRLYLPRKHGGRGFLSALTMHNREVCSLRNYFLARSDDPFYKDIISCDKGLTPLSLANEQWQDPAVQTISDRETVWKEKELHGRFYKSLHGPFVDTVTSLHWLRFGDLFGETEGFVCAIQDQVIKTNNYRRYILKDGTIDICRACRHPGESLRHVISGCSALSNSEYLHRHNLVARILHQELALKYGFVDRKLPYYKYLPEAVLENDRARLYWDRAIITDRTILANKPDIVLMDRAQSRIFLVDITIPCDENLVKAETDKQTKYLDLAHEVTDMWGGLPTEIIPVVVSANGLIPVSLSGHLRRLGLRGGPLQAQMQKAVLLDTARIVRRFLSLSPLTLGRLVSPAEGFHLVGLLFIYVFSYLFYFIDIFVYLSFHFRL

SEQ ID NO: 14402 - protein, 1126 aa, Parnassius apollo
MHRFFAELEPSLSVTEQNLADRVRYILRSNIFGDAELERLRREAVPSSDGNATAGNAAPLIAQQTANVDAAVNIPFVVDSDDDGIVPHELEKMRSILEESMLETRSMPLENRPRLPRIPLSKRNRAVVRALNPMLVTYLEASRDLCETDSILFGAALAVCRIIGAKLPMAGRATQQGSAIPAWRKRIEDRIAKARALIGRLTSFRSGNNRPRVVRTVRMAFAGTNISLSQPDITQKLTERIDDLKQKIAAWGKRIRRFSERSRRFNQNRLFQSDQKRLYKSLERPEVCGAGPGPDQADTVAFWRGLWSEPVNHSEGPWMEVVASQSASVTPMDPVTITPEDVAEAVRRAPNWKSPGLDGLHHYWLKGFVVCHAVLARQYQEALDQKSLPSLFTTGITHLVPKDQDTTDPSKYRPITCLPTIYKTLTSILSARITRHLELNKVMSRAQNGCRGGGRGTKEPLLIDAVIGKVVKRNRRNFSAAWIDYRKAFDSVPHAWLKRVLELYKIDCTVRDFLEQCMGQWSTILCYQGERMVAAENHIRIRRGIFQGDCLSPIWFCLSLNPLSTLLEGSGRGFQLRKGGTKVTHLFYMDDLKLFASSRSHLMEFLNITCEFSNSIGMELGTDKCAVLHVERGRVANSEGIDLSMPVNLKTLSEAETYRYLGMSQNIGIDEAGVKQSVCDVFYARLTKVLNSLLSGVNKTHAYNGWVMPVLIYTFGILRWTQTELNALDRKVRTTMTSHRMHHPRSSVMRLYLPRRHGGRGFMSALTMHNREVCSLRDYFLARSDDPFYNDVISSDKGLTPLSLAHEQWQDPAVLSISDRETVWKEKELHGRYYRALHEPFVDTVASLNWLRFGDLFGETEGFVCAIQDQVIKTNNYRRYILKDGTVDVCRACRHPGESLRHVISGCSALSNSEYLHRHNLVARILHQELALKYGLVDRKLPYYKYLPEAVLENDRARLYWDRAIITDRTILANKPDIVLMDRAQSRIFLVDITIPYDENLVKAETDKQTKYLDLAHEVTDMWGGLPTEIIPVVVSANGLIPVSLSGHLRRLGLRGGPLRAQMQKAVLLDTARIVRRFLSLSPLTLGRLVSPAEGLHLVGLLFIYVFLYLFYVIDIYVYLSFHSHL

SEQ ID NO: 14403 - protein, 1191 aa, Parnassius apollo
MMEETQKGTRIGPLPGGRRGASGAGAGRGSMRAASRARGAARSPSSPSHPSSPPEGLVSAGSSRTQQAAPAAGGARRMRWTKSMNENALRAYYRAKGKETVGIAYRSRMHCFFAELEPSIPVTEQNLADRVRYIMRSKIFDDAELERLRREAIPSSNESAMAGDAAPHSTDQHPHVEAAMDLPVVVDSNDDEIVSHELEQMRSILEEAILETRSTPLENRPRLPRIPLSKRNRAVVRALNPMLVTYLEASRDLCETDSILFGAAVAVCRIIGAKLPMAGRATTQSNAIPAWRKRIEDRIAKARALIGRLTSFRSGNNRPRIMRTVRMAFAGTNISLSQPDITQKLTERIDDLKQKIAAWGKRIRRFSEGSRRFNQNRLFQSDQKRLYKLLERPKVCGAGQGPDQADIIAFWRGLWSEPVNHSEGPWMEVVASQGASVTPMDPITITPEDVAEAVRRAPNWKSPGLDGLHHYWLKGFVVCHAVLARQFQEALDQKSLPSLFTTGITHLVPKDQDTTDPSKYRPITCLPTIYKTLTSILSARITRHLELNQVMSRAQNGCRGGGRGTKEPLLIDAVIGKVVKRNRRNFSAAWIDYRKAFDSVPHTWLKRVLELYKIDCTVRDFLEQCMGQWSTILCHLGERMTAAENHIRIRRGIFQGDCLSPIWFCLSLNPLSTLLEGSGRGFQLRKGGTKVTHLFYMDDLKLFASSRSHLMELLNITCEFSSSIGMELGTDKCAVLHVERGRVANSEGIDLSMPVNLRTLSEAETYRYLGMSQNIGIDEAGMKQSVCDVFYARLTKVLNSLLSGVNKTHAYNGWVMPVLMYTFGILRWTQTELNALDRKVRTTMTSHRMHHPRSSVMRLYLPRKYGGRGFLSALTMHNREVCSLRQYFLARSDDPFYNDVISSDKGLTPLSLANEQWQDPAVLSNSDRETVWKEKELHGRYYKALHEPFVDTVASLNWLRFGDLFGETEGFVCAIQDQVIKTNNYRRYILKDGTVDVCRACRHPGESLRHVISGCSALSNSEYLHRHNLVARILHQELALKYGLVDRKLPYYKYLPEAVLENDRARLYWDRAIITDRTILANKPDIVLMDRAQSRIFLVDITIPYDENLVRAETDKQSKYLDLAHEVTDMWGGLPAEIIPVVVSANGLIPVSLSGHLRRLGLRDGPLRAQMQKAVLLDTARIVRRFLSLSS

SEQ ID NO: 14404 - protein, 1234 aa, Parnassius apollo
MMEYGRTRKGPLPGGRQGASGAGAGRGSMRTASRARGAARPPSSPSHPSSPPAGLVSAGSSRAQQSAPASGGVRRMRWTTQMNSNALRAYFGAKGGETGCLAYRARMHRLFAELEPSLTVTEQNLADRVRYILRSNIFDVAELERLRREAVPSSDENATAEDAAPQMVEQPANVDAAVNTPVVVDSNDDGTVAQELELEHMRSTLEEAIVETRSTPLENRPRLPRIALSKRNRAVVRALNPMLVTYLEASRDLCETDSILFGAALAVCRIIGAKVSTAGRATGHSSAIPAWRRRIEERIAKARALIGRLICFRSGNNRPRIVRTVRMAFAGTNVSLSQPDITQKLTERIDDLKQRIAAWGKRIRRYTERSTRFNQNRLFQSDQKRLYESLERPMVSGTGPAPNQADTVAFWRGLWSEPVNHSEGPWTEVVASQCAGITPMDPVIITPDDVAEAVRRAPNWKSPGLDGLHHYWLKGFMVCHSVLARQFQEALNQKSLPSLFTTGITHLVPKDQGTTDPSKYRPITCLPTIYKTLTSILSARITCHLDSNQVMSRAQNGCRGGGRGTKEPLLIDAVIGKVVKRNRRNFSAAWIDYRKAFDSVPHTWLKRVLELYKIDCTVRDFLEQCMGQWSTILCHLGERMMAAENHIRIRRGIFQGDCLSPIWFCLSLNPLSTLLEGSGRGFQLRRGGTKVTHLFYMDDLKLFASSRSHLMELLNITCEFSNSIGMELGTDKCAVLHVERGRVANSEGVDLSMPVNLRTLSEAETYRYLGMSQNIGIDETGMKQSVCDVFYARLTKVLNSLLSGVNKAHAYNGWVMPVLMYTFGILRWTQTELNALDRKVRTTMTSHRMHHPRSSVMRLYLPRKHGGRGFLSALTMHNREVCSLRDYFLARSDDPFYMDVISCDKGLTPLSLANEQWQDPAVQSISDRETVWKEKELHGRFYKALHEPFVDTVASLHWLRFGDLFGETEGFVCAIQDQVIKTNNYRRYILKDGTVDICRACRHPGESLRHVISGCSALSNSEYLHRHNLVARILHQELALKYGLVDRKLPYYKYLPEAVLENDRARLYWDRAIITDRTILANKPDIVLMDRAQSRIFLVDITIPYDENLVKAETDKQTKYLDLAHEVTDMWGGLPTEIIPVVVSANGLIPVSLSGHLRRLGLRGGPLQVQMQKAVLLDTARIVRRFLSLSPLTLGRLVSPAEGLHLVGLLFIYVLLYLFYVIDIYVYLFFHFHL

SEQ ID NO: 14405 - protein, 1083 aa, Parnassius apollo
MHRLFAELEPSVTVTEQNLADRVRYILRSNTFDVTELERLRREAVPSSGENAAAEDAAPQLAEQTANVDAAVNTPVVVDSNDDGTVALELEQMRSTLEEAIVETRSTTLENRPRLPRLALSKRNRAVVRALNPMLVTYLEASRDLCDTDSILFGAALAVCRIIGAKLSTAGRAPGQSSAIPAWRIRIEERIAKARALIGRLICFRSDNTRPRIVRTVRMAFAGTNVSLSQPDIMQKLTERIDDLKQRIAAWGKRIRRYTERSTRFNQNRLFQSDQKRLYKSLERPIVSGTGPAPNQADMVAFWRSLWSEPVNHNEGPWTEVVASQCASITPMDPVIITPDDVAEAVRRAPNWKSPGLDGLHHYWLKGFMVCHSVLARQFQEALNQKSLPSLFTTGITHLVPKDQGATDPSKYRPITCLPTIYKTLTSILSARIARHLDLNQVMSRAQNGCRGGGRGTKEPLLIDAVIGKVVKRNRRNFSAAWIDYRKAFDSVPHTWLKRVLELYKIHYTVRDFLEQCMGQWSTILCHLGERMTAAESRIRIRRGIFQGDCLSPIWFCLSLNPLSTLLEGSGKGFQLRKGGTKVTHLFYMDDLKLFASSRSHLMELLNITCEFSNSIRMELGTDKCAVLHVERGRVANSEGIDLSMPVNLRTLSEAETYRYLGMSQNIGIDEAGMKQSVCDVFYARLTKVLNSLLSGVNKAHAYNGWVMPVLMYTFGILRWTQTELNALDRKVRTTMTSHRMHHPRSSVMRLYLPRKHGGRGFLSALTMHNREVCSLRDYFLARSDDPFYKDVISCDKGLIPLSLANEQWQDPAVQSISDRETVWKEKELHGRFYKALHEPFVDTVASLHWLRFGDLFGETEGFVCAIQDQVIKTNNYRRYIVKDGTVDICRACRHPGESLRHVISGCSALSNSEYLHRHNLVARILHQELALKYGLVDRKLPYYKYLPEAVLENDRARLYWDRAIITDRTILANKPDIVLMDRAQSRIFLVDITIPYDENLVKAETDKKTKYLDLAHEVTDMWGGLPTEIIPVVVSADGLIPVSLSGHLRRLGLRGGPLQVQMQKAVLLDTARIVRRFLSLSP

SEQ ID NO: 14406 - protein, 991 aa, Parnassius apollo
MRSTLEEAIVETRSTTLENRPRLPRLALSKRNRAVVRALNPMLVTYLEASRDLCETDSILFGAALAVCRIIGAKLSTAGRATGQSSAIPAWRIRIEERIAKARALIGRLICFRSGNTRPRIVRTVRMAFARTNVSFSQPDIMQKLTEHIDELKQRIAAWGKRIRRYTERSTRFNQNRLFQSDQKRLYKSLERPIVSGTGPAPNQADMVAFWRSLWSEPVNHNEGPWTEVVASQCASITPMDPVIITPDDVAEAVRRAPNWQSPGLDGLHHYWLKGFMVCHSVLARQFQEALNQKSLPSLFTTGITHLVPKDQGATDPSKYRPITCLPTIYKTLTYILSARIARHLDLNQVMSRAQNGCRGGGRGTKEPLLIDAVIGKVVKRNRRNFSAAWIDYRKAFDSVPHTWLKRVLELYKIDCTVRDFLVQCMGQWSTILCHRGERMTAAESRIRIRRGIFQGDCLSPIWFCLSLNPLSTLLEGSGRGFQLRKGGTKVTHLFYMDDLKLFASSRSHLMELLNITCEFSNSIRMELKTDKCAVLYVERGRVANSEGIDLSMPVNLRTLSEAETYRYLGMSHNIGIDEAGMKQSVCDVFYARLTKVLNSLLSGVNKAHAYNGWVMPVLMYTFGILRWTQTELNALDRKVRTTMTSHRMHHPRSSVMRLYLPRKHGGRGFLSALTMHNREVCSLRDYFLARSDDPFYKDVISCDKGLTPLSLANEQWQDPAVQSISDRETVWKEKELHGRFYKALHEPFVDTVASLHWLRFGDLFGETEGFVCAIQDQVIKTNNYRRYILKDGTVDICRACRHPGESLRHVISGCSALSNSEYLHRHNLVARILHQELALKYGLVDRKLPYYKYLPEAVLENDRARLYWDRAIITDRTILANKPDIVLMDRAQSRIFLVDITIPYDENLVKAETDKQTKYLDLAHEVTDMWGGLPTEIVPVVVSANGLIPVSLSGHLRRLGLRGGPLQVQMQKAVLLDTARIVRRFLSLSP

SEQ ID NO: 14407 - protein, 1191 aa, Parnassius apollo
MMESNGTRKGPLPGGRQGASGAGAGRDSMRTASRARGAARPPSSSSHPSSPPAGLVSAGSSRAQQSAPATGGVRRMRWTTQMNSNALRAYFRAKGGETGGFAYRARMHRLFAELEPSVTVTEQNLADRVRYILRSNTFDVTELERLRREAVPSSGENAAAEDAAPQLAEQTANVDAAVNTPVVVDSNDDGTVAQELELEQMRSTLEEAIVETRSTTLENRPRLPRLALSKRNRAVVRALNPMLVTYLEASRDLCDTDSILFGAALAVCRIIGAKLSTAGRATGQSSAIPAWRIRIEERIAKARALIGRLICFRSGNTRPRIVRTVRMAFAGTNVSLSQPDIMQKLTERIDDLKQRIAAWGKRIRRYTERSTRFNQNRLFQSDQKRLYKSLERPIVSGTGPAPNQADMVAFWRSLWSEPVNHSEGPWTEVVASQCASITPMDPVIITPDDVAEAVRRAPNWKSPGLDGLHHYWLKGFMVCHSVLARQFQEALNQKSLPSLFTTGITHLVPKDQGATDPSKYRPITCLPTIYKTLTSILSARIARHLDLNQVMSRAQNGCRGGGRGTKEPLLIDAVIGKVVKRNRRNFSAAWIDYRKAFDSVPHTWLKRVLELYKIDCTVRDFLEQCMGQWSTILCHLGERMTAAESRIRIRRGIFQGDCLSPIWFCLSLNPLSTLLEGSGRGFQLRKGGTKVTHLFYMDDLKLFASSRSHLMELLNITCEFSNSIRMELGTDKCAVLHVERGRVANSEGIDLSMPVNLRTLSEAETYRYLGMSQNIGIDEAGMKQSVCDVFYARLTKVLNSLLSGVNKAHAYNGWVMPVLMYTFGILRWTQTELNALDRKVRTTMTSHRMHHPRSSVMRLYLPRKHGGRGFLSALTMHNREVCSLRDYFLARSDDPFYKDVISCDKGLTPLSLANEQWQDPAVQSISDRETVWKEKELHGRFYKALHEPFVDTVASLHWLRFGDLFGETEGFVCAIQDQVIKTNNYRRYILKDGTVDICRACRHPGESLRHVISGCSALSNSEYLHRHNLVARILHQELALKYGLVDRKLPYYKYLPEAVLENDRARLYWDRAIITDRTILANKPDIVLMDRAQSRIFLVDITIPYDENLVKAETDKKTKYLDLAHEVTDMWGGLPTEIIPVVVSANGLIPVSLSGHLRRLGLRGGPLQVQMQKAVLLDTARIVRRFLSLSP

SEQ ID NO: 14408 - protein, 1022 aa, Parnassius apollo
MRSILEESMLETRSTPLENRPRLPRIPLSKRNRAVVRALNPMLVTYLEASRDLCETDSILFGAALAVCRIIGAKLLMAGRATRQSSAIPAWRKRIEDRIAKARALIGRLTSFRSGNNRPRIMRTVRMAFAGTNVSLSQPDITQKLTERIDDPKHRIAAWGKRMRRYIERSGRFNQNRLFQSDQKRLYKSLERPEVCGTGPGPDQADTVAFWRGLWSEPVNHSEGPWMEVVASQSASVTPMDPVTITPEDVAEAVRRAPNWKSPGLDGPHHYWLKGFVVCHAVLARQFQEALDQKSLPSLFTTGITHLVPKDQDTTDPSKCRPITCLPTIYKTLTSILSARITRHLELNQVMSRAQNGCRGGGRGTKEPLLIDAVIGKVVKRNRRNFSAAWIDYRKAFDSVPHTWLKRVLQLYKIDCTVGDFLEQCMGQWSTILCYLGERMMAAENHIRIRRGIFQGDCLSPIWFCLSLNPLSTLLEGSGRGFQLRKGGTKVTNLFYMDDLKLFASSRSHLMELLNITCEFSNSIGMELGTDKCAVLHVERGRVANSEGIDLSMPVNLRTLSEAETYRYLGMSQNIGIDEAGMKQSVCDVFYARLTKVLNSLLSGVNKTHAYNGWVMPVLMYTFGILRWTQTELNALDRKVRTTMTSHRMHHPRSSVMRLYLPRKHGGRGFLSALTMHNREVCSLRNYFLARSDDPFYKDVISGDKGPTPLSLANEQWQDPAVQTVSDRETVWKEKELHGRFYKSLHAPFVDTVASLHWLRFGDLFGETEGFVCAIQDQVIKTNNYRRYILKDGTVDICRACRHPGESLRHVISGCSALSNSEYLHRHNLVARILHQELALKYGFVDRKLPYYKYLPEAVLENDRARLYWDRAIITDRTILANKPDIVLMDRAQSRIFLVDITILCDENLVKAETDKQTKYLDLAHEVTDMWGGLPTEIIPVVVSANGLIPVSLSGHLRRGWDYVADRSGLKCRRRCSSIPPASSAGFFPFPPNPRPFGLPCRGPPSGWAFIYLCIFIFILCY

SEQ ID NO: 14409 - protein, 1012 aa, Parnassius apollo
MDLPVVGDSDDDEMVSHELEQMRSILEEAILETRSMPLENRPRLPRIPLSKRNRAVVRALNPMLVTYLEASRDLCETDSVLFGAAVAACRIIGAKLPMAGRATKQSSAIPAWRKRIEDRIAKARALIGRLISFRSGNNRPRVVRTVRMAFAGTNISLSQPDITQKLTERIDDLKQKIAAWGKRIRRFTERSRRFNQNRLFQSDQKRLYKSLERPEVCGAGPGPDQANTVAFWRGLWSEPVNHSEGPWTEVVASQCASITPMDPVIITPDDVAEAVRRAPNWKSPGLDGLHHYWLKGFMVCHAVLARQFQEALNQKSLPNLFTTGITHLVPKDQVTTDPSKYRPITCLPTIYKTLTSILSARITRHLELNQVMSRAQNGCRGGGRGTKEPLLIDAVIGKVVKRNRRNFSAAWIDYRKAFDSVPHTWLKRVLELYKIDCTVRDFLELCMGQWSTILCHLGERMMAAENHIRIRRGIFQGDCLSPIWFCLSLNPLSTLLEGSGRGFQLRKGGTKVTHLFYMDDLKLFASSRSHLVELLKITCEFSSSIGMELGTDKCAVLHVERGRVANSEGIDLSMPVNLRTLSEAETYRYLGMSQNIGIDEAGVKQSVCDVFYARLTKVLNSLLSGVNKTHAYNGWVMPVLMYTFGILRWTQTELNALDRKVRTTMTSHRMHHPRSSVMRLYLPRKHGGRGFLSALTMHNREVCSLRHYFLARSDDPFYNDVISSDKGLTPLSLANEQWQDPAVLSISDRETVWKEKELHGRYYRVLHEPFVDTVASLNWLRFGDLFGETEGFVCAIQDQVIKTNNYRRYILKDGTVDVCRACRHPGESLRHVISGCSALSNSEYLHRHNLVARILHQALALKYGLVDRKLPYYKYLPEAVLENDRARLYWDRAIITDRTILANKPDIVLMDRAQSRIFLVDITIPYDENLVKAETDKQTKYLDLAHEVTDMWGGLPTEIIPVVVSANGLIPVSLSGHLRRLGLRDGPLRAQMQKAVVLDTARIVRRFLSLSP

SEQ ID NO: 14410 - protein, 1114 aa, Parnassius apollo
MRWSKSMNENALRAYFRAKGEETGCLAYRARMHRFFAELEPSLSVTEQNLADRVRYILRSNIFGDAELERLRREAIPSSNGNATAGNAAPLDAQQTAYVDAVVNIPFVANSDDDGIVFHELEKMRSILEESMLETRSMPLENRPRLPRIPLSKRNRAVVRALNPMLVTYLEASRDLCETDSILFGAALAVCRIIGAKLPVAGRATQKSSAIPAWRKRIEDRIAKARALIGRLTSFRSGNNRPRIMRTVRMAFAGTNISLFQPDIMQKLTERIDDLKQKIAAWGKRIRRFSERSRRFNQNRLFQSDQKRLYKSLERPEVCGAGPGPDQADTVAFWRGLWSEPVNHSEGPWMEVVASQSASVTPMDPVTITPEDVAEAVRRAPNWKNPGLDGLHHYWLKGFVVCHAVLARQFQEALDQKSLPSLFTTGITHLVPKDQDTTDPSKYRPITCLPTIYKTLTSILSARITRHLELNQVMSRAQNGCRGGGRGTKEPLLIDAVIGKVVKRSRRNFSAAWIDYRKAFDSVPHTWLKRVLQLYKIDCTVGDFLEQCMGQWSTILCYLGERMMAAENHIRIRRGIFQGDCLSPIWFCLSLNPLSTLLEGSGRGFQLRKGGTKVTHLFYMDDLKLFASSRSHLMELLNITCEFSSSIGMELGTDKCAVLHVERGRVANSEGIDLSMPVNLRTLSEAETYRYLGMSQNIGIDEAGMKQSVCDVFYARLTKVLNSLLSGVNKTHAYNAWVMPVLMYTFGILRWTQTELNALDRKVRTTMTSHRMHHPRSSVMRLYLPRKHGGRGFLSTLTMHNREVCSLRDYFLARSDDLFYNDVISSDKGLTPLSLANEQWQDPAVLSISDRETVWMEKELHGRFYKALHEPFVDTVASLHWLRFGDLFGETEGFVCAIQDQVIKTNNYRRYILKDGTVDICRACRHPGESLRHVISGCSALSNSEYLHRHNLVARILHQELALKYGLVDRKLPYYKYLPEAVLENDRARLYWDRAIITDRTILANKPDIVLMDRAQSRIFLVDITIPYDENLVKAETDKQTKYLDLAHEVTDMWGGLPTEIIPVVVSANGLIPVSLSGHLRRLGLRGGPLRAQMQKAVLLDTARIVRRFLSLSP

SEQ ID NO: 14411 - protein, 1191 aa, Parnassius apollo
MMESNGTRKGPLPGGRQGASGAGAGRDSMRTASRARGAARPPSSSSHPSSPPAGLVPAGSSRAQQSAPATGGVRRMRWTTQMNSNALRAYFRAKGGETGGFAYRARMHRLFAELEPSVTVTEQNLADRVRYILRSNTFDVTELERLRREAVPSSGENAAAEDAAPQLAEQTANVDAAVNTPVVVDSNDDGTVAQELELEQMRSTLEEAIVETRSTTLENRPRLPRLALSKRNRAVVRALNPMLVTYLEASRDLCDTDSILFGAALAVCRIIGAKLSTAGRATGQSSAIPPWRIRIEERIAKARALIGRLICFRSGNTRPRIVRTVRMAFAGTNVSLSQPDIMQKLTERIDDLKQRIAAWGKRIRRYTERSTRFNQNRLFQSDQKRLYKSLERPIVSGTGPAPNQTDMVAFWRSLWSEPVNHNEGPWTEVVASQCASIMPMDPVIITPDDVAEAVRRAPNWKSPGLDGLHHYWLKGFMVCHSVLARQFQEALNQKSLPSLFTTGITHLVPKDQGATDPSKYRPITCLPTIYKTLTSILSTRIARHLDLNQVMSRAQNGCRGGGRGTKEPLLIDAVIGKVVKRNRRNFSAAWIDYRKAFDSVPHTWLKRVLELYKIDCTVRDFLEQCMGQWSTILCHLGERMTAAESRIRIRRGIFQGDCLSPIWFCLSLNPLSTLLEGSGRGFQLRKGGTKVTHLFYIDDLKLFASSRSHLMELLNITCEFSNSIRMELGTDKCAVLHVERGRVANSEGIDLSMPVNLRTLSEAETYRYLGMSQNIGIDEAGMKQSVCDVFYARLTKVLNSLLSGVNKAHAYNGWVMPVLMYNFGILRWTQTELNALDRKVRTTMTSHRMHHPRSSVMRLYLPRKHGGRGFLSALTMHNREVCSLRDYFLARSDDPFYKDVISCDKGLTPLSLANEQWQDPAVQSISDRETVWKEKELHGRFYKALHEPFVDTVASLHWLRFGDLFGETEGFVCAIQDQVIKTNNYRRYILKDGTVDICRACRHPGESLRHVISGCSALSNSEYLHRHNLVARILHQELALKYGLVDRKLPYYKYLPEAVLENDRARLYWDRTIITDRTILANKPDIVLMDRAQSRIFLVDITIPYDENLVKAETDKQTKYLDLAHEVTDMWGGLPTEIIPVVVSANGLIPVSLSGHLRRLGLRIGPLQVQMQKAVLLDTARIVRRFLSLSP

SEQ ID NO: 14412 - protein, 950 aa, Parnassius apollo
MLVTYLEASRDLCETDSVLFGAAVAACRIIGAKLPMAGRATKQSNAIPAWRKRIEDRIAKARALIGRLISFRSGNNRPRVVRTVRMAFAGTNISLSQPDITQKLTERIDDLKQKIAAWGKRIRRFTERSRRFNQNRLFQSDQKRLYKSLERPEVCGAGPGPDQANTVAFWRGLWSEPVNHSEGPWTEVVASQCASITPMDPVIITPDDVAEAVRKATNWKSPGLDGLHHYWLKGFMVCHAVLARQFQEALNQKSLPSLFTTGITHLVPKDQVTTDPSKYRPITCLPTIYKTLTSILSARITRHLELNQVMSRAQNGCRGGGRGTKEPLLIDAVIGKVVKRNRRNFSAAWIDYRKAFDSVPHTWLKRVLELYKIDCTVRDFLEQCMGQWSTILCHLGERMMAAENHIRIRRGIFQGDCLSPIWFCLSLNPLSTLLEESGRGFQLRKGGTKVTHLFYMDDLKLFASSRSHLVELLKITCEFSSSIGMELGTDKCAVLHVERGRVANSEGINLSMPVNLRTLSEAETYRYLGMSQNIGIDEAGVKQSVCDVFYARLTKVLNSLLSGVNKTHAYNGWIMPVLMYTFGILRWTQTELNALDRKVRTTMTSHRMHHPRSSVMRLYLPRKHGGRGFLSALTMHNREVCSLRHYFLARSDDPFYNDVISSDKGLTPLSLANEQWQDPAVLSISDRETVWKEKELHGRYYRVLHEPFVDTVASLNWLRFGDLFGETEGFVCAIQDQVIKTNNYRRYILKDGTVDVCRACRHPGESLRHVISGCSALSNSEYLHRHNLVARILHQALALKYGLVDRKLPYYKYLPEAVLENDRARLYWDRAIITDRTILANKPDIVLMDRAQSRIFLVDITIPYDENLVKAETDKQTKYLDLAHEVTDMWGGLPTEIIPVVVSANGLIPVSLSGHLRRLGLRDGPLRAQMQKAVVLDTARIVRRFLSLSS

SEQ ID NO: 14413 - protein, 865 aa, Parnassius apollo
MAFAGTNISLSQPDITQKLTERIDDLKQKIAAWGKRIRRFTERSRRFNQNRLFQSDQKRLYKSLERPEVCGAGPGPDQANTVAFWRGLWSEPVNHSEGPWTEVVASQCASITPMDPVIITPDDVADAVRRAPNWKSPGLDGLHHYWLKGFMVCHAVLARQFQKALSQKSLPSLFTTGITHLVPKDQVTTDPSKYRPITCLPTIYKTLTSILSARITRHLELNQVRSRAQNGCRGGGRGTKEPLLIDTVIGKVVKRNRRNFSAAWINYRKVFDSVLHTWLKRVLELYKIDCTVRDFLEQCMGQWSTILCHLGERMMAAENHIRIRRGIFQGDCLSPIWFCLSLNPLSTLLEGSGRGFQLRKGGTKVTHLFYMDDLKLFASSRSHLVELLKITCEYSSSIGMELGTDKCAVLHAERGRVANSEGIDLSMPVNLRTFSEAETYRYLGMSQNIGIDEADVNKSVCDVFYARLTKVLNSLLSGVNKTHAYNGWVMPVLMYTFGIIRWTQTELNALDRKVRTTMTSHRMHHPRSSVMRLYLPRKHGGRGFLSALTMHNREVCSIRHYFLVRSDDPFYNDVIFSDKGLTPLSLANEQWQNPAVLSISDRETVWKEKELHGRYYRALHEPFVDTVASLNWLRFGDLFGETEGFVCAIQNQVIKTNNYRRYILKDGTVDVCRACRHPGESLRHVISGCSALSNSEYLHRHNLVARILHQALALKYGLVDRKLPYYKYLSEAVLENDRARLYWDRAIITDRTILANKPDIVLMDRSQSRIFLVDITNPYDENLVKAETYKQTKYLDLAHEVTDMWGGLPTEIISVVVSANGLIPVSLSGHLRRLGLRDRPLRAQMQKAVVLDTARIVRRFLSLSP

SEQ ID NO: 14414 - protein, 1090 aa, Parnassius apollo
MFGISGSMHRFFAELEPSLSVTEQNLADRVRYILRSNIFGDAELERLRREAIPSSNGNATAGNAAPLDAQQTANVDAAVNIPFVANSDDDGIVSHELEKMRSILEESMLETRSMPLENRPRLPRIPLSKRNRAVVRALNPMLVTYLEASRDLCETDSILFGAALAVCRIIGAKFPVAGRATQKSSAIPAWRKRIEDRIAKARALIGRLTSFRSGNNRPRIMRTVRMAFAGTNISLSQPDITQKLTERIDDLKQKIAAWGKRIRRFSERSRRFNQNRLFQSDQKRLYKTLERPEVCGAGPGPDQADTVAFWRGLWSEPVNNSKGPWTEVVASQSASVTPMDPVTITPEDVAEAVRRAPNWKSPGLDGLHHYWLKGFVVCHAVLARQFQEALDQKSLPSLFTTGITHLVPKDQDTTDPSKYRPITCLPTIYKTLTSILSARITRHLELNQVMSRAQNGCRGGGRGTKEPLLIDAVIGKVVKRNRRNFSAAWIDYRKAFDSVPHTWLKRVLQLYKIDCTVGDFLEQCMGQWSTILCYLGERMMAAENHIRIRRGIFQGDCLSPIWFCLSLNHLSTLLEGSGRGFQLRKGGTKVTHLFYMDDLKLFASSRSHLMELLNITCEFSNSIGMELGTDKCAVLHVERGRVANSEGIDLSMPVNLRTLSEAETYRYLGMSQNIGIDEAGMKQSVCDVFYARLTKVLNSLLSGVNKTHAYNGWVMPVLMYTFGILRWTQTELNALDRKVRTTMTSHRMHHPRSSVMRLYLPRKHGGRGFLSALTMHNREVCSLRDYFLARSDDPFYKDVISSDKGLTPLSLANEQWQDPAVQTISDRETVWKEKELHGRFYKALHEPFVDTVASLYWLRFGDLFGETEGFVCAIQDQVIKTNNYRRYILKDGTVDICRACRHPGESLRHVISGCSALSNSEYLHRHNLVARILHQELALKYGLVDRKLPYYKYLPEAVLENDRARLYWDRAIITDRTILANKPDIVLMDRAQSRIFLVDITIPYDENLVKAETDKQTKYLDLAHEVTDMWGGLPTEIIPVVVSANGLIPVSLSGHLRRLGLRGGPLRAQMQKAVLLDTARIVRRFLSLSP

SEQ ID NO: 14415 - protein, 991 aa, Parnassius apollo
MRSTLEEAIMETRSTPLENRPRLPRIALSKRNRAVVRALNPMLVTYLEASRDLCETDSILFGAALAVCRIIGAKLSTAGRTTGQSSAIPAWRTRIEERIAKARALIGRLTCFRSGNTRPRIVRTVRMAFAGTNVSLSQPDIMQKLTERIDDLKQRIAAWGKRIRRYTESSTRFNQNRFFQSDQKRLYKSLERPMVSGTGPVPNQADTVAFWRSLWSEPVNHNEGPWTEVVASQCAGITPMDPVTITPDDVAEAVRRAPNWKSPGLDGLHHYWLKGFVVCHTVLARQFQEVLNQKSLPSLFTTGITHLVPKGQSTTDPSKYRPITCLPTIYKTLTSILSARITRHLDSNQVMSRAQNGCRGGGRGTKEPLLIDAVIGKVVKRNRRNFSAAWIDYRKAFDSVPHTWLKRVLELYKIDCTVRDFLEQCMGQWSTILCHLGERMMAAENHIRIRRGIFQGDCLSPIWFCLSLNPLSTLLEGSGRGFQLRKGGTKVTHLFYMDDLKLFASSRSHLMELLNITCEFSNSIGMELGTDKCAVLHVERGRVANSEGIDLSMPVNLRTLSEAETYRYLGMSQNIGIDEAGMKQSVCDVFYARLTKVLNSLLSGVNKTQAYNGWVIPVLMYTFGILRWTQTELNALDRKVRTTMTSHRMHHPRSSVMRLYLPRKHGGRGFLSALTMHNREVCSLRNYFLARSDDPFYKDVISCDKGLTPLSLANEQWQDPAVQTISDRETVWKEKELHGRFYKSLHGPFVDTVTSLHWLRFGDLFGETEGFVCAIQDQVIKTNNYRRYILKDGTIDICRACRHPGESLRHVISGCSALSNSEYLHRHNLVARILHQELALKYGFVDRKLPYYKYLPEAVLENDRARLYWDRAIITDRTILANKPDIVLMDRAQSRIFLVDITIPCDENLVKAETDKQTKYLDLAHEVTDMWGGLPTEIIPVVVSANGLIPVSLSGHLRRLGLRGGPLQAQMQKAVLLDTARIVRRFLSLSP

SEQ ID NO: 14416 - protein, 1143 aa, Parnassius apollo
MTEPRNGAGLGRLPLFGAHKWMMVQRGTRIGPLPGGRRGASGAGAGRGSMRAASRARGAVRSPSSPPHPSSPPEGLVSAGSSRTQQAAPAAGGARRMRWSQTMNANALRAYFRAKGEETGCLAYRARMHRFFAELEPSLSVTEQNLADRVRYILRSNIFGDAELERLRREAVPSSDGNATAGNAAPLIAQQTANVDAAVNIPFVVDSDDDGIVPHELEKMRSILEESMLETRSLPLENRPRLPRIPLSKRNRAVVRALNPMLVTYLEASRDLCETDSILFGAALAVCRIIGAKLPMAGRATQQGSAIPAWRKRIEDRIAKARALIGRLTSFRSGNIRPRVVRTVRMAFAGTNISLSQPDITQKLTERIDDLKQKIAAWGKRIRRFSERSRRFNQNRLFQSDQKRLYKSLERPEVCGAGPGPDQADTVAFWRGLWSEPVNHSEGPWMEVVASRSASVTPMDPVTITPEDVAEAVRRAPNWKSPGLDGLHHYWLKGFVVCHAVLARQYQEALDQKSLPSLFTTGITHLVPKDQDTTDPSKYRPITCLPTIYKTLTSILSARITRHLELNQVMSRAQNGCRGGGRGTKEPLLIDAVIGKVVKRNRRNFSAAWIDYRKAFDSVPHAWLKRVLELYKIDCTVRDFLEQCMGQWSTILCYQGERMMAAENHIRIRRGIFQGDCLSPIWFCLSLNPLSTLLEGSGRGFQLRKGGTKVTHLFYMDDLKLFASSRSHLMELLNITCEFSNSIGMELGTDKCAVLHVERGRVANSEGIDLSMPVNLRTLSEAETYRYLGMSQNIGIDEAGVKQSVCDVFYARLTKVLNSLLSGVNKTHAYNGWVMPVLIYTFGILRWTQTELNALDRKVRTTMTSHRMHHPRSSVMRLYLPRKHGGRGFMSALTMHNREVCSLRDYFLARSDDPFYNDVISSDKGLTPLSLAHEQWQDPAVLSISDRETVWKEKELHGRYYRALHEPFVDTVASLNWLRFGDLFGETEGFVCAIQDQVIKTNNYRRYILKDGTVDVCRACRHPGESLRHVISGCSALSNSEYLHRHNLVARILHQELALKYGLVDRKLPYYKYLPEAVLENDRARLYWDRAIITDRTILANKPDIVLMDRAQSRIFLVDITIPYDENLVGRGGGGLPLGGGVV

SEQ ID NO: 14417 - protein, 865 aa, Parnassius apollo
MAFAGTNVSLSQPDITQKLTERIDDLKQRIAAWGKRIRPYTERSTRFNQNRLFQSDQKRLYESLERPMVSETGPAPNQADTVAFWRGLWSEPVNHSEGPWTEVVASQCAGITPMDPVIITPDDVAEAVRRAPNWKSPGLDGLHHYWLKGFMVCHSVLARQFQEALNQKSLPSLFTTGITHLVPKDQGTTDPSKYRPITCLPTIYKTLTSILSARITCHLDSNQVMSRAQNGCRGGGRGTKEPLLIDAVIGKVVKRNRRNFSAAWIDYRKAFDSVPHTWLKRVLELYKIDCTVRDFLEQCMGQWSTILCHLGERMMAAENHIRIRRGIFQGDCLSPIWFCLSLNPLSTLLEGSGRGFQLRRGGTKVTHLFYMDDLKLFASSRSHLMELLNITCEFSNSIGMELGTDKCAVLHVERGRVANSEGVDLSMPVNLRTLSEAETYRYLGMSQNIGIDETGMKQSVCDVFYARLTKVLNSLLSGVNKAHAYNGWVMPVLMYTFGILRWTQTELNALDRKVRTTMASHRMHHPRSSVMRLYLSRKHGGRGFLSALTMHNREVCSLRDYFLARSDDPFYMDVISCDKGLTPLSLANEQWQDPAVQSISDRETVRKEKELHGRFYKALHEPFVDTVASLHWLRFGDLFGETGGFVCAIQDQVIKTNNYRRYILKDGTVDICRACRHPGESLRHVISGCSALSNSEYLHRHNLVARILHQELALKYGLVDRKLPYYKYLPEAVLENDRARLYWDRAIITDRTILANKPDIVLMDRAQSRIFLVDITIPYDENLVKAETDKQTKYLDLAHEVTDMWGGLPTEIIPVVVSANGLILVSLSGHLRRLGLRGGPLQVQMQKAVLLDTARIVRRFLSLSP

SEQ ID NO: 14418 - protein, 993 aa, Parnassius apollo
MLVTYLEASRDLCETDSILFGAALAVCRIIGAKVSTAGRATGQSSAIPAWRRRIEERIAKASALIGRLICFRSGNNRPRIVRTVRMAFTGTCQFVPARYNAKTKTERIDDLKQRIAAWGKRIRRYTERSTRFNQNRLFQSDQKRLYESLERPMVSGTGPAPNQADTVAFWRGLWSEPVNHSEGPWTEVVASQCAGITPMDPVIITPDDVAEAVLRAPNWKSPGLDGLHHYWLKGFMVCHSVLARQFQEALNQKSLPSLFTTGITHLVPKDQGTTDPSKYRPITCLPTIYKTLTSILSARITCHLDSNQVMSRAQNGCRGGGRGTKEPLLIDAVIGKVVKRNRRNFSAAWIDYRKAFDSVPHTWLKRVLELYKIDCTVRDFLEQCMGQWSTILCHLGERMMAAENHIRIRRGIFQGDCLSPIWFCLSLNPFSTLLEGSGRGFQLRRGGTKVTHLFYMDDLKLFASSRSHLMELLNITCEFSNSIGMELGTDKCAVLHVERGRVANSEGVDLSMPVNLRTLSEAETYRYLGMSQNIGIDETGMKQSVCDVFYARLTKVLNSLLSGVNKAHAYNGWVMPVLMYTFGILRWTQTELNALDRKVRTTMTSHRMHHPRSSVMRLYLSRKHGGRGFLSALTMHNREVCSVRDYFLERSDDPFYTDVISCDKGLTPLSLANEQRQDPAVQSISDRETVWKEKELHGWFYKALHEPFVDTVASLHWLRFGDLFGETEGFVCAIQDQVIKTNNYRRYILKDGTVDICRACRHPGESLRHVISGCSALSNSEYLHRHNLVARIIHQELALKYGLVDRKLPYYKYLPEAVLENDRARLYWDRDIITDRTILANKPDIVLMDRAQSRIFLVDITIPYDENLVKAETDKQTKYLDLAHEVTDMWGGLPTEIIPVVVSANGLIPVSLSGHLRRLGLRGGPLQVQMQKAVLLDTARIVRRFLSLSPLTLGRLVSPAEGLHLVGLLFIYVLLYLFYVIDIYVYLFFHSHL

SEQ ID NO: 14419 - protein, 1191 aa, Parnassius apollo
MMESNGTRKGPLPGGRQGASGAGAGRDSIRTASRARGAARPPSSSSHPSSPPAGLVSAGSSRAQQSAPATGGVRRMRWTTQMNSNALRAYFRAKGGETGGFAYRARMHRLFAELEPSVTVTEQNLADRVRYILRSNTFDVTELERLRREAVPSSGENAAAEDAAPQLAEQTANVDAAVNTPVVVDSNDDGTVAQELELEQMRSTLEEAIVETRSTTLENRPRLPRLALSKRNRAVVRALNPMLVIYLEASRDLCDTDSILFGAALAVCRIIGAKLSTAGRATGQSSAIPAWRIRIEERIAKARALIGRLICFRSGNTRPRIVRTVRMAFAGTNVSLSQPDIMQKLTERIDDLKQRIAAWGKRIRRYTERSTRFNQNRLFQSDQKRLYKSVERPIVSGTGPAPNQADMVAFWRSLWSEPVNHNEGPWTEVVASQCASITPMDPVIITPDDVAEAVRRAPNWKSPGLDGLHHYWLKGFMVCHSVLARQFQEALNQKSLPSLFTTGITHLVPKDQGATDPSKYRPITCLPTIYKTLTSILSTRIARHLDLNQVMSRAQNGCRGGGRGTKEPLLIDAVIGKVVKRNRRNFSAAWIDYRKAFDSVPHTWLKRVLELYKIDCTVRDFLEQCMGQWSTILCHLGERMTAAESRIRIRRGIFQGDCLSPIWFCLSLNPLSTLLEGSGRGFQLRKGGTKVTHLFYIDDLKLFASSRSHLMELLNITCEFSNSIRMELGTDKCAVLHVERGRVANSEGIDLSMPVNLRTLSEAETYRYLGMSQNIGIDEAGMKQSVCDVFYARLTKVLNSLLSGVNKAHAYNGWVMPVLMYTFGILRWTQTELNALDRKVRTTMTSHRMHHPRSSVMRLYLPRKHGGRGFLSALTMHNREVCSLRDYFLARSDDPFYKDVISCDKGLTPLSLANEQWQDPAVQSISDRETVWKEKELHGRFYKALHEPFVDTVASLHWLRFGDLFGETEGFVCAIQDQVIKTNNYRRYILKDGTVDICRACRHPGESLRHVISGCSALSNSEYLHRHNLVARILHQELALKYGLVDRKLPYYKYLPEAVLENDRARLYWDRTIITDRTILANKPDIVLMDRAQSRIFLVDITIPYDENLVKAETDKQTKYLDLAHEVTDMWGGLPTEIIPVVVSANGLIPVSLSGHLRRLGLRGGPLQVQMQKAVLLDTARIVRRFLSLSP

SEQ ID NO: 14420 - protein, 1189 aa, Parnassius apollo
MMESNGTRKGPLPGGRQGASGAGAGRDSMRTASRARGAARPPSSSSHPSSPPAGLVSAGSSRAQQSAPATGGVRRMRWTTQMNSNALRAYFRAKGGETGGFAYRARMHRLFAELEPSVTVTEQNLADRVRYILRSNTFDVTELERLRREAVPSSGENAAAEDAAPQLAEQTANVDAAVNTPVVVDSNDDGTVALELEQMRSTLEEAIVETRSTTLENRPRLPRLALSKRNRAVVRALNPMLVTYLEASRDLCDTDSILFGAALAVCRIIGAKLSTAGRATGQSSAIPAWRIRIEERIAKARALIGRLICFRSGNTRPRIVRTVRMAFAGPNLSLSQPDIMQKLTERIDDLKQRIAAWGKRIRRYTERSTRFNQNRLFQSDQKRLYKSLERPIVSGTGPAPNQADMVAFWRSLWSEPVNHNEGPWTEVVASQCASITPMDPVIITPDDVAEAVRRAPNWKSPGLDGLHHYWLKGFMVCHSVLARQFQEALNQKSLPSLFTTGITHLVPKDQGATDPSKYRPITCLPTIYKTLTSILSARIARHLDLNQVMSRAQNGCRGGGRGTSEPLLIDAVIGKVVKRNCRNFSAAWIDYRKAFDSVPHTWLKRVLELYKIHYTVRDFLEQCMGQWSTILCHLGERMTAAESRIRIRRGIFQGDCLSPIWFCLSLNPLSTLLEGSGKGFQLRKGGTKVTHLFYMDDLKLFASSRSHLMELLNITCEFSNSIRMELGTDKCAVLHVERGRVANSEGIDLSMPVNLRTLSEAETYRYLGMSQNIGIDEAGMKQSVCDVFYARLTKVLNSLLSGVNKAHAYNGWVMPVLMYTFGILRWTQTELNALDRKVRTTMTSHRMHHPRSSVMRLYLPRKHGGRGFLSALTMHNREVCSLRDYFLARSHDPFYRDVISCDKGLTPLSLANEQWQDPAVQSISDRETVWKEKELHGRFYKALHEPFVDTVASLHWLRFGDLFGETEGFVCAIQDQVIKTNNYRRYILKDGTVDICRACRHPGESLRHVISGCSALSNSEYLHRHNLVARILHQELALKYGLVDRKLPYYKYLPEAVLENDRARLYWDRAIITDRTILANKPDIVLMDRAQSRIFLVDITIPYDENLVKAETDKKTKYLDLAHEVTDMWGGLPTEIIPVVVSANGLIPVSLSGHLRRLGLRGGPLQVQMQKAVLLDTARIVRRFLSLSP

SEQ ID NO: 14421 - protein, 1062 aa, Parnassius apollo
MVEQPANVDAAVNTPVVVDSNDDGAVAQELELEHMRSILEEAIVETRSTPLENRPRLPRIALSKRNRAIVRALNPMLVTYLEASRDLCETDSILFGAALAVCRIIGAKVSTAGRATGHSSAIPAWRRRIEERIAKARALIGRLICFRSGNNRPRMAFAGTNVSLSQPDITQKLTERIDDLKQRIAAWGKRIRRYTERSTRFNQNRLFQSDQKRLYESLERPMVSGTGPAPNQADTVAFWRGLWSEPVNHSEGPWTEVVASQCAGITPMDPVIITPDDVAEAVRRAPNWKSPGLDGLHHYWLKGFMVCHSVLARQFQEALNQKSLPSLFTTGITHLVPKDQGTTDPSKYRPITCLPTIYKTLTSILSARITCHLDSNQVMSRAQNGCRGGGRGTKEPLLIDAVIGKVVKRNRRNFSATWIDYRKAFDSVPHTWLKRVLELYKIDCTVRDFLEQCMGQWSTILCHLGERMMAAENHIRIRRGIFQGDCLSPIWFCLSLNPLSTLLEGSGRGFQLRKGGTKVTHLFYMDDLKLFASSRSHLMELLNITCEFSNSIGMDLGTDKCAVLHVERGRVANSEGVDLSMPVNLRTLSEAETYRYLGMSQNIGIDETGMKQSVCDVFYARLTKVLNSLLSGVNKAHAYNGWVMPVLMYTFGILRWTQTELNALDRKVRTTMTSHRMHHPRSSVMRLYLPRKHGGRGFLSALTMHNREVCSLRDYFLARSDDPFYKDVISCDKGLTPLSLANEQWQYPAVQSISERETVWKEKELHGRFYKALHEPFVDTVASLHWLRFRDLFGESEGFVCAVQDQVIKTNNYRRYILKDGTVDICRACRHPGESLRHVISGCSALSNSEYLHRHNLVARILHQELALKYGLVDRKLPYYKYLPEAVLENDRARLYWDRAIITDRTILANKPDIVLMDRAQSRIFLVDITIPYDENLVKAETDKQTKYLDLAHEVTDMWGGLPTEIIPVVISANGLIPVSLSGHLRRLGLRGGPLQVQMQKAVLLDTARIVRRFLSLSPLTLGRLVSPAEGLHLVGLLFIYVLLYLFYVIDIYVYLSFHFHL

SEQ ID NO: 14422 - protein, 1152 aa, Parnassius apollo
MQTHCGRTLGQKGEETGCLAYRARMHRLFAELEPSLIVTEQNLADRVRYILRSNIFDVAELERLRREAVPSSDENATAEDAAPQMVEQPANVDAAVNTPVVVDSNDDGTVAQELELEHMRSILEEAIVETRSTPLENRPRLPRIALSKRNRAVVRALNPMLVTYLEASRDLCETDSILFGAALAVCRIIGAKVSTAGRATGHSSAIPAWRRRIEERIAKARALIGRLICFRSGNNRPRIVRTVRMAFAGTNVSLSQPHITQKLTERIDDLKQRIAAWGKRIRRYTERSTRFNQNRLFQSDQKRLYESLERPMVSGTGPAPDQADTVAFWRGLWSEPVNHSEGPWTEVVASQCAGITPMDPVIITPDDVAEAVRRAPNWKSPGLDGLHHYWLKGFMVCHSVLARQFQEALNQKSLPSLFTTGITHLVPKDQGTTDPSKYRPITCLPTIYKTLTSILSARITCHLDSNQVMSRAQNGCRGGGRGTKEPLLIDAVIGKVVKRNRRNFSAAWIDYRKAFDSVPHTWLERVLELYKIDCTVRDFLEQCMGQWSTILCHLGERMMAAENHIRIRRGIFQGDCLSPIWFCLSLNPLSTLLEGSGRGFQLRKGGTKVTHLFYMDDLKLFASSRSHLMELLNITCEFSNSIGMELGTDKCAVLHVERGRVANSEGVDLSMPVNLRTLSEAETYRYLGMSQNIGIDETGMKQSVCDVFYARLTKVLNSLLSGVNKAHAYNGWVMPVLMYTFGILRWTQTELNALDRKVRTTMTSHRMHHPRSSVMRLYLPRKHGGRGFLSALTMHNREVCSLRDYFLARSDDPFYKDVISCDKGLTPLSLANEQWQDPAVQSISDRETVWKEKELHGRFYKALHEPFVDTVASLHWLRFGDLFGETEGFVCAIQDQVIKTNNYRRYILKDGTVDICRACRHPGESLRHVISGCSALSNSEYLHRHNLVARILHQELALKYGLVDRKLPYYKYLPEAVLENDRARLYWDRAIITDRTILANKPDIVLMDRAQSRIFLVDITIPYDENLVKAETDKQTKYLDLAHEVTDMWGGLPTEIIPVVVSANGLIPVSLSGHLRRLGLRGGPLQVQMQKAVLLDTARIVRRFLSLFPLTLGRLVSPAEGLHLVGLLFIYVLLYLFYVIDIYVYLSFHFHL

SEQ ID NO: 14423 - protein, 915 aa, Parnassius apollo
MAGRATKQSSAIPAWRKRIEDRIAKARALIGRLISFRSGNNRPRVVRTVRMAFAGTNISLSQPDITQKLTERIDDLKQKIAAWGKRIRRFTERSRRFNQNRLFQSDQKRLYKSLERPEVCGAGPGPDQANTVAFWRGLWSEPVNHSEGPWTEVVASQCASITPMDPVIITPDDVAEAVRRAPNWKSPGLDGLHHYWLKGFMVCHAVLARQFQEALNQKSLPSLFTTGITHLVPKDQVTTDPSKYRPITCLPTIYKTLTSILSARITRHLELNQVMSRAQNGCRGGGRGTKEPLLIDAVIGKVVKRNRRNFSAAWIDYRKAFDSVPHTWLKRVLELYKIDCTVRDFLEQCMGQWSTILCHLGERMMAAENHIRIRKGIFQGDCLSPIWFCLSLNPLSTLLEESGRGFQLRKGGTKVTHLFYMDDLKLFASSRSHLVELLKITCEFSSSIGMELGTDKCAVLHVERGRVANSEGIDLSMPVNLRTLSEAETYRYLGMSQNIGIDEAGVKQSVCDVFYARLTKVLNSLLSGVNKTHAYNGWVMPVLMYTFGILRWTQTELNALDRKVRTTMTSHRMHHPRSSVMRLYLPRKHGGRGFLSALTMHNREVCSLRHYFLARSDDPFYNDVISSDKGLTPLSLANEQWQDPAVLSISDRETVWKEKELHGRYYRVLHESFVDTVASLNWLRFGDLFGETEGFVCAIQDQVIKTNNYRRYILKDGTVDVCRACRHPGESLRHVISGCSALSNSEYLHRHNLVARILHQALALKYGLVDRKLPYYKYLPEAVLENDRARLYWDRAIITDRTILANKPDIVLMDRAQSRIFLVDITIPYDENLVKAETDKQTKYLDLAHEVTDMWGGLPTEIIPVVVSANGLIPVSLSGHLRRLGLRDGPLRAQMQKAVVLDTARIVRRFLSLSS

SEQ ID NO: 14424 - protein, 1114 aa, Parnassius apollo
MRWSKSMNENALRAYFRAKGEETGCLAYRARMHRFFAELEPSLSVTEQNLADRVRYILRSNIFGDAELERLRREAIPSSNGNATAGNAAPLDAQQTAYVDAAVNIPFVANSDDDGIVSHELEKMRSILEESMLETRSMPLENRPRLPRIPLSKRNRAVVRALNPMLVTYLEASRNLCETDSILFGAALAVCRIIGAKLPVAGRATQKSSAIPAWRKRIEDRIAKARALIGRLTSFRSGNNRPRIMRTVRMAFAGTNISLFQPDITQKLTERIDDLKQKIAAWGKRIRRFSERSRRFNQNRLFQSDQKRLYKSLERPEVCGAGPGPDQADTVAFWRGLWSEPVNHSEGPWMEVVASQSASVTPMDPVTITPEDVAEAIRRAPNWKSPGLDGLHHYWLKGFVVCHAVLARQFQEALDQKSLPSLFTTGITHLVPKDQDTTDPSKYRPITCLPTIYKTLTSILSARITRHLELNQVMSRAQNGCRGGGRGTKEPLLIDAVIGKVVKRNRRNFSAAWIDYRKAFDSVPHTWLKRVLQLYKIDCTVGDFLEQCMGQWSTILCYLGERMMAAENHIRIRRGIFQGDCLSPIWFCLSLNPLSTLLEGSGRGFQLRKGGTKVTHLFYMDDLKLFASSRSHLMELLNITCEFSNSIGMELGTDKCAVLHVERGRVANSEGIDLSMPVNLRTLSEAETYRYLGMSQNIGIDEAGMKQSVCDVFYARLTKVLNSLLSGVNKTHAYNGWVMPVLMYTFGILRWTQTELNALDRKVRTTMTSHRMHHPRSSVMRLYLPRKHGGRGFLSALTMHNREVCSLRNYFLARSDDPFFKDVISSDKGLTPLSLANEQWQDPAVQTISDRENVWKEKELHGRFYKALHEPFVDTVASLHWLRFGDLFGETEGFVCAIQDQVIKTNNYRRYILKDGTVDICRACRHPGESLRHVISGCSALSNSEYLHRHNLVARILHQELALKYGLVERKLPYYKYLPEAVLENDRARLYWDRAIITDRTILANKPDIVLMDRAQSRIFLVDITIPYDENLVKAETDKQTKYLDLAHEVTDMWGGLPTEIIPVVVSANGLIPVSLSGHLRRLGLRGGPLRAQMQKAVLLDTARIVRRFLSLSP

SEQ ID NO: 14425 - protein, 993 aa, Parnassius apollo
MLVTYLEASRDLCETDSILFGAALATCRIIGAKVSTAERATGHSSAIPEWRRRIEERIAKARALIGRLICFRSGNNRPRIVRTVRMAFAGTNVSLSQPDITQKLTERIDDLKQRIAAWGKRIRRYTERSTRFNQNRLFQSDQKRLYESLERPMVSGTGPAPNQADTVAFWRGLWSEPVNHSEGPWTEVAASQCAGITPMDPVIITPDDVAEAVRRAPNWKSPGLDGLHHYWLKGFMVCHSVLARQFQEALNQKSLPSLFTTGITHLVPKDQGTTDPSKYRPITCLPTIYKTLTSILSARITCHLDSNQVMSRAQNGCRGGGRGTKEPLLIDAVIGKVVKRNRRNFSAAWIDYRKAFDSVPHTWLKRVLELYKIDCTVRDFLEQCMGQWSTILCHLGERMMAAENHIRIRRGIFQGDCLSPIWFCLSLNPLSTLLEGSGRGFQLRKGGTKVTHLFYMDDLKLFASSRSHLMELLNITCEFSNSIGMELGTDKCAVLHVERGRVANSEGVDLSMPVNLRTLSEAETYRYLGMSQNIGIDETGMKQSVCDVFYARLTKVLNSLLSGVNKAHAYNGWVMPVLMYTFGILRWTQTELNALDRKVRTTMTSHRMHHPRSSVMRLYLPRKHGGRGFLSALTMHNREVCSLRDYFLARSDDPFYKDVISCDKGLTPLSLANEQWQDPAVQSISDRETVWKEKELHGRFYKALHEPFVDTVASLHWLRFGDLFGETEGFVCAIQDQVIKTNSYRRYILKDGTVDICRACRHPGESHRHVISGCSALSNSEYLHRHNLVARILHQELALKYGLVDRKLPYYKYLPEAVLENDRARLYWDRAIITDRTILANKPDIVLMDRAQSRIFLVDITIPYDENLVKAETDKQTKYLDLAHEVTDMWGGLPTEIIPVVVSANGLIPVSLSGHLRRLGLRGGPLQVQMQKAVLLDTARIVRRFLSLSPLTLGRLVSPAEGLHLVGLLFIYVLLYLFYVIDIYVYLSFHFHL

SEQ ID NO: 14426 - protein, 1189 aa, Luehdorfia chinensis
MMDTDRLRIGSLPGGRQGASGAGAGRGSMRVASRTRGAARPPSSPSHPSSPPEGLVSAGSSRTQQLTSAAGGLRRMRWTTDMNQNALRAYFRAKGGETGGFAYRARMHRVFAELEPSITVTEQNLADRVRYIIRSKIFDDAELERLRREAIPSLDENAAAGDAAPQVADQHADVDAATDLEVVVDSDDGGMVAQEIEQMRRTLEEAILEMRNTPLENRPRLPRITLSKRNRAVVRALNPMLSTYLETSRDLCETDSILFGAALAVCRVIGAKLPKTGRATGKSSAIPEWRRRIEDRIAKARVLIGRLISFRSGNNRPRIVHSVRIAFAGTNVSLSQPDIAQKLTERIDDLKQRIAAWGKRIRRYTERSRRFNQNRLFQSDQKRLYKSLERPRNCGTGQGPNQAETVAFWRSLWSEPINHNEGPWTETVASQCTTITPMDPVVISPDDVADAVRRAPNWKSPGLDGLHHYWLKGFIVCHAVLARQFQNALDQMSLPSLFTTGITHLVPKDQVTTDPSKYRPITCLTTIYKTLTSILSVRITRHLVLNRVISPAQSGCRGGGRGTKEPLLIDAVIGKVVKRNRRNFSAAWIDYRKAFDSVPHTWLKRVLELYKVDCTVRDFLGQCMRQWSTILCHLGERMTAAENRIWVRRGIFQGDCLSPVWFCLSLNPLSTLLEGSGRGFQLRRGGTKVTHLFYMDDLKLFASNRSHLVDLLKITCDFSKSIGMELGTDKCAVLHVERGRVGHSEGIDLSMPVNIRTLSEAETYRYLGMSQNIGIDEADMKQSVRDVFFARLTKVCNSLLSSVNKARAYNGWVMPVLIYTFGILRWTQTELNALDRKVRTIMTSHRAHHPRSSVMRLYLPRRHGGRGFLSALTMHNREVCNLRNYFLSKSGEALCADVITSDKGLTPLSLANEQWQDPAVQSISDREAVWKEKELHERFYKALHEPFVDTVASLHWLRLGDLFGETEGFVCAIQDQVIKTNNYRRYILKDGTVDVCRACRRPGESLRHVISGCSALANSEYLHRHNLVARILHQELALKYGLVDRKLPYYKYLPEAVLENDRARLYWDRAIITDRTILANKPDIVLMDRAQSRIFLVDITIPYDENLVKAETDKKTKYLDLAHEVTDMWGGMPTEIIPVVVSANGLIPVSLSGHLRRLGLRDGLLRAQMQKAVLLDTARIVRRFLSLSP

SEQ ID NO: 14427 - protein, 922 aa, Parnassius apollo
METRSTPLENRPRLPRIALSKRNRAVVRALNPMLVTYLEASRDLCETDSILFGAALAMAFAGTNVSLSQPDTMQKLTERKDDLKQRIAAWGKRIRRYTERSTRFNQNRLFQSDQKRLYKSLERPMVSGTGPVPNQADTVAFWRSLWSEPVNHNEGPWTEVVASMCAGITPMDPVTITPDDVAEAVRRAPNWKSPGLDGLHHYWLKGFVVCHTVLARQFQEVLNQKSLPSLFTTGITHLVPKGQGTKDPSKYRPITCLPTIYKTLTSILSARITRHLDSNQVMSRAQNGCRGGGRGTKEPLLIDAVIGKVVKRNRRNFSAAWIDYRNAFDSVPHTWLKRVLELYKIDCTVRDFLEQCMGQWSTILCHLGERMMAAENHISIRRGIFQGDCLSPIWFCLSLNPLSTLLDGSGRGFQLRKGGTKVTHLFYMNDLKLFASIRSHLMELLNITCEFSNSIGMELGKDKCAVLYVERGRVANSEGIDLSMPVNLRTLSEAETYRYLGMSQNIGIDEAGMKQSVCDVFYARLIKVLNSLLSGVNKSHAYNCWVMPVLMYTFGILRWTQTELNALDRKVRTTMTSHRMHHPRSSVMRLYLPRKHGGRSFLSALTMHNREVCSLRNYFLARSDDPFYKDVISCDKGLTPLSLANEQWQDPAVQTISDRETVWKKKELHGRFYKSLHGPFVDTVTSLHWLRFGDLFGETEGFVCAIQDQVIKTNNYRRYILKYGTIDICRACRHPGQSLRHVISGYSALSNSEYLHRHNLVARILHQELALKYGFVDRKLPYYKYLPEAVLENDRARLYWDRAIITERTILATKPDIVLMVRAQSRIFLVDITIPCDENLVKAETDKQTKYLDLAHEVTDMWGSLPTEIIPAVVSANGLIPVSLSGHLRRLGLRGGPLQAQIQKAVLLDTARIVRRFLSLSP

SEQ ID NO: 14428 - protein, 1057 aa, Parnassius apollo
MRSKIFDDTELERLRREAIPSSNESAMAGDAAPHSTDQHPHVEAAMDLPVVVDSNDDEIVSHELEQMRSILEEAILETRSTPLENRPRLPRIPLSKRNRAVVRALNPMLVTYLEASRDLCETDSILFGAAVAVCRIIGAKLPMAGRATTQSNAIPAWRKRIEDRIAKARALIGRLTSFRSGNNRPRIMRTVRMAFAGTNISLSQPDITQKLTERIDDLKQKIAAWGKRIRRFSEGSRRFNQNRLFQSDQKRLYKLLERPKVCGAGQGPDQADIIAFWRGLWSEPVNHSEGPWMEVVASQGASVTPMDPITITPEDVAEAVRRAPNWKSPGLDGLHHYWLKGFVVCHAVLARQFQEALDQKSLPSLFTTGITHLVPKDQDTTDPSKYRPITCLPTIYKTLTSILSARITRHLELNQVMSRAQNGCRGGGRGTKEPLLIDAVIGKVVKRNRRNFSAAWIDYRKAFDSVPHTWLKRVLELYKIDCTVRDFLEQCMGQWSTILCHLGERMTAAENHIRIRRGIFQGDCLSPIWFCLSLNPLSTLLEGSGRGFQLRKGGTKVTHLFYMDDLKLFASSRSHLMELLNITCEFSSSIGMELGTDKCAVLHVERGRVANSEGIDLSMPVNLRTLSEAETYRYLGMSQNIGIDEAGMKQSVCDVFYARLTKVLNSLLSGVNKTHAYNGWVMPVLMYTFGILRWTQTELNALDRKVRTTMTSHRMHHPRSSVMRLYLPRKYGGRGFLSALTMHNREVCSLRQYFLARSDDPFYNDVISSDKGLTPLSLANEQWQDPAVLSNSDRETVWKEKELHGRYYKALHEPFVDTVASLNWLRFGDLFGETEGFVCAIQDQVIKTNNYRRYILKDGTVDVCRACRHPGESLRHVISGCSVLSNSEYLHRHNLVARILHQELALKYGLVDRKLPYYKYLPEAVLENDRARLCWDRAIITDRTILANKPDIVLMDRAQSRIFLVDITIPYDENLVRAETDKQSKYLDLAHEVTDMWGGLPAEIIPVVVSANGLIPVSLSGHLRRLGLRDGPLRAQMQKAVLLDTARIVRRFLSLSS

SEQ ID NO: 14429 - protein, 1191 aa, Parnassius apollo
MMEYGRTRKGPLPGGRQGASGAGAGRGSMRTASRARGAARPPSSPSHPSSPPAGLVSAGSSRAQQSAPASGGVRRMRWTTQMNSNALRAYFGAKGGETGCLAYRARMHRLFAELEPSLTVTEQNLADRVRYILRSNIFDVAELERLRREAVPSSDENATAEDAAPQMVEQPANVDAAVNTPVVVDSNDDGTVAQELELEHMRSTLEEAIVETRSTPLENRPRLPRIALSKRNRAVVRALNPMLVTYLEASRDLCETDSILFGAALAVCRIIGAKVSTAGRATGHSSAIPAWRRRIEERIAKARALIGRLICFRSGNNRPRIVRTVRMAFAGTNVSLSQPDITQKLTERIDDLKQRIAAWGKRIRRYTERSTRFNQNRLFQSDQKRLYESLERPMVSGTGPAPNQADTVAFWRGLWSEPVNHSEGPWTEVVASQCAGITPMDPVIITPDDVAEAVRRAPNWKSPGLDGLHHYWLKGFMVCHSVLARQFQEALNQKSLPSLFTTGITHLVPKDQGTTDPSKYRPITCLPTIYKTLTSILSARITCHLDSNQVMSRAQNGCRGGGRGTKEPLLIDAVIGKVVKRNRRNFSAAWIDYRKAFDSVPHTWLKRVLELYKIDCTVRDFLEQCMGQWSTILCHLGERMMAAENHIRIRRGIFQGDCLSPIWFCLSLNPLSTLLEGSGRGFQLRRGGTKVTHLFYMDDLKLFASSRSHLMELLNITCEFSNSIGMELGTDKCAVLHVERGRVANSEGVDLSMPVNLRTLSEAETYRYLGMSQNIGIDETGMKQSVCDVFYARLTKVLNSLLSGVNKAHAYNGWVMPVLMYTFGILRWTQTELNALDRKVRTTMTSHRMHHPRSSVMRLYLSRKHGGRGFLSALTMHNREVCSLRDYFLARSDDPFYMDVISCDKGLTPLSLANEQWQDPAVQSISDRETVWKEKELHGRFYKALHEPFVDTVASLHWLRFGDLFGETEGFVCAIQDQVIKTNNYRRYILKDGTVDICRACRHPGESLRHVISGCSALSNSEYLHRHNLVARILHQELALKYGLVDRKLPYYKYLPEAVLENDRARLYWDRAIITDRTILANKPDIVLMDRAQSRIFLVDITIPYDENLVKAETDKQTKYLDLAHEVTDMWGGLPTEIIPVVVSANGLIPVSLSGHLRRLGLRGGPLRVQMQKAVLLDTARIVRRFLSLSP

SEQ ID NO: 14430 - protein, 1189 aa, Parnassius apollo
MMEKKIVRKGPLPGGRQGASGAGAGRDSMRAASRARGVARPPSSPPHPSSPPEGLVSAGSSRTQQAAPAAGGARRIRWSKSMNENALRAYFRAKGEETGCLAYRARMHRFFAELEPSLSVTEQNLADRVRYILRSNIFGDAELERLRREAIPSSNGNATAGNAAPLDAQQTACVDAAVNIPFVANSDDDGIVSHELEKMRSILEESMLETRSMPLENRPRLPRIPLSKRNRAVVRALNPMLVTYLEASRDLCETDSILFGAALAVCRIIGAKLPVAGRATQKSSAIPAWRKRIEDRIAKARALIGRLTSFRSGNNRPRIMRTVRMAFAGTNINLFQPDITQKLTERIDDLKQKIAAWGKRIRRFSERSRWFNQNRLFQSDQKRLYKTLERPEVCGAGPGPDQADTVAFWRGLWSEPVNHSEGPWMEVVASQSASVTPMDPVTITPEDVAEAVRRAPNWKSPGLDGLHHYWLKGFVVCHAVLARQFQEALDQKSLPSLFTTGITHLVPKDQDTTDPSKYRPITCLPTIYKTLTSILSARITRHLELNQVMSRAQNGCRGGGRGTKEPLLIDAVIGKVVKRNRRNFSAAWIDYRKAFDSVPHTWLKRVLQLYKIDCTVGDFLEQCMGQWSTILCYLGERMMAAENHIRIRRGIFQGDCLSPIWFCLSLNPLSTLLEGSGRGFQLRKGGTKVTHLFYMDDLKLFASSRSHLMELLNITCEFSNSIGMELGTDKCAVLHVERGRVANSEGIDLSMPVNLRTLSEAETYRYLGMSQNIGIDEAGMKQSVCDVFYARLTKVLNSLLSGVNNTHAYNGWVMPVLMYTFGILRWTQTELNALDRKVRTTMTSHRMHHPRSSVMRLYLPRKHGGRGFLSALTMHNREVCSLRNYFLARSDDPFYKDVISSDKGLTPLSLANEQWQDPAVQTISDRENVWKEKELHGRFYKALHEPFVDTVASLHWLRFGDLFGETEGFVCAIQDQVIKTNNYRRYILKDGTVDICRACRHPGESLRHVISSCSALSNSEYLYRHNLVARILHQELALKYGLVDRKLPYYKYLPEAVLENDCARLYWDRAIITDRTILANKPDIVLMDRAQSRIFLVDITIPYDENLVKAETDKQTKYLDLAHEVTDMWGGLPTEIIPVVVSANGLIPVSLSGHLRRLGLRDGPLRAQMQKAVLIDTARIVRRFLSLSS

SEQ ID NO: 14431 - protein, 1191 aa, Parnassius apollo
MMEHRRLRKGPLPGGRQGASGAGAGRDSMRTASRARGAARPPSSPSHPSSPPACLVSAGSSQAQQSAPATGGVRRMRWTINMNSNALRAYFRAKGGEIGGFAYRARMHRLFTELEPSITVTEQNLADRVRYILRSNIFDGAELERLRREAVPSSNENATTEGAVPQVAEQPAHVDAAENTPVVADSNDDGTFTQELEIEQMRCTLEEAIMETRSTPLENRPRLPRIALSKRNRAVVRALNPMLVTYLEASRDLCETDSILFGAALAVCRIIGAKLSTAGRTTGQSSAIPAWRTRIEERIAKARALIGRLICFRSGNTRPRIVRTVRMAFAGTNVSLSQPDIMQKLTERIDDLKQRIAAWGKRIRRYTERSTRFNQNRLFQSDQKRLYKSLERPMVSGTGPVPNQADTVAFWRSLWSEPVNHNEGPWTEVVASQCAGITPMDPVTITPDDVAEAVRRAPNWKSPGLDGLHHYWLKGFVVCHTVLARQFQEVLNQKSLPSLFTTGITHLVPKGQNTTDPSKYRPITCLPTIYKTLTSILSARIARHLDSNQVMSRAQNGCRGGGRGTKEPLLIDAVIGKVVKRNRRNFSAAWIDYRKAFDSVPHTWLKRVLELYKIDCTVRDFLEQCMGQWSTILCHLGERMMAAENHIRIRWGIFQGDCLSPIWFCLSLNPLSTLLEGSGRGFQLRKGGTKVTHLFYMDDLKLFASSRSHLMELLNITCEFSSSIGMELGTDKCAVLHVERGRVANSEGIDLSMPVNLRTLSEAETYRYLGMSQNIGIDEAGMKQSVCDVFYARLTKVLNSLLSGVNKTQAYNGWVIPVLMYTFGILRWTQTELNALDRKVRTTMTSHRMHHPRSSVMRLYLPRKHGGRGFLSALTMHNREVCSLRNYFLARSDDPFYKDVISCDKGLTPLSLANEQWQDPAVQTISDRETVWKEKELHGRFYKSLHGPFVDTVTSLHWLRFGDLFGETEGFVCAIQDQVIKTNNYRRYILKDGTIDICRACRHPGESLRHVISGCSALSNSEYLHRHNLVARILHQELALKYGFVDRKLPYYKYLPEAVLENDRARLYWDRAIITDRTILANKPDIVLMDRAQSRIFLVDITIPCDENLVKAETDKQTKYLDLAHEVTDMWGGLPTEIIPVVVSANGLIPVSLSGHLRRLGLRGGPLQAQMQKAVLLDTARIVRRFLSLSP

SEQ ID NO: 14432 - protein, 1241 aa, Parnassius apollo
MRGDLCSTMAATYICMSKCTSLIIIIIIIIIIILAASAASRARGAARSSTSPPHPSSPPEGLVSAGSSRTQQAAPAAGGARRMRWSQEMNANALRAYFRAKGEETGCLAYRARMHRLFAELEPSLIVTEQNLADRVRYILRSNIFDVAELERLRREAVPSSDENATAEDAAPQMVEQPANVDAAVNTPVVVDSNDDGTVAQELELEHMRSTLEEVIVETRSTPLENRPRLPRIALSKRNRAVVRILNPMLVTYLEASRDLCETDSILFGSALAVCRIIGAKVSTAGRATGHSSAIPAWRRRIEERIAKARALIGRLICFRSGNNRPRIVRTVRMAFAGTNVSLSQPDITQKLTERIDDLKQRIAAWGKRIRRYTERSTRFNQNRLFQSDQKRLYESLERPMVSGTGPAPDQADTVAFWRGLWSELVNHSEGPWTEVVASQCAGITPMDPVIITPDDVAEAVRRAPNWKSPGLDGLHHYWLKGFMVCHSVLARQFQEALNQKSLPSLFTTGITHLVPKDQGTTDPSKYRPITCLPTIYKTLTSILSARITCHLDSNQVMSRAQNGCRGGGRGTKEPLLIDAVIGKVVKRNRRNFSAAWIDYRKAFDSVPHTWLKRVLELYKIDCTVRDFLEQCMGQWSTILCHLGERMMAAENHIRIRRGIFQGDCLSPIWFCLSLNPLSTLLEGSGRGFQLRKGGTKVTHLFYMDDLKLFASSRSHLMELLNITCEFSNSIGMELGTDKCAVLHVERGRVANSEGVDLSMPVNLRTLSEAETYRYLGMSQNIGIDETGMKQSVCDVFYARLTKVLNSLLSGVNKAHAYNGWVMPVLMYTFGILRWTQTELNALDRKVRTTMTSHRMHHPRSSVMRLYLPRKHGGRGFLSALTMHNREVCSLRDYFLARSDDPFYKDVISCDKGLTPLSLANEQWQDPAVQSISDRETVWKEKELHGRFYKALHEPFVDTVASLHWLRFGDLFGETEGFVCAIQDQVIKTNNYRRYILKDGTVDICRACRHPGESLRHVISGCSALSNSEYLHRHNLVARILHQELALKYGLVDRKLPYYKYLPEAVLENDRARLYWDRAIITDRTILANKPDIVLMDRAQSRIFLVDITIPYDENLVKAETDKQTKYLDLAHEVTDMWGGLPTEIIPVVVSANGLIPVSLSGHLRRLGLRGGPLQVQMQKAVLLDTARIVRRFLSLSPLTLGRLVSPAEGLHLVGLLFIYVLLYLFYVIDIYVYLSFHFHL

SEQ ID NO: 14433 - protein, 752 aa, Luehdorfia chinensis
MDPVVISPDDVADAVRRAPNWKSPGLDGLHHYWLKGFIVCHAVLARQFQNALDQMSLPSLFTTGITHLVPKDQVTTDPSKYRPITCLTTIYKTLTSILSVRITRHLVLNRVISPAQSGCRGGGRGTKEPLLIDAVIGKVVKRNRRNFSAAWIDYRKAFDSVPHTWLKRVLELYKVDCTVRDFLGQCMRQWSTILCHLGERMTAAENRIWVRRGIFQGDCLSPVWFCLSLNPLSTLLEGSGRGFQLRRGGTKVTHLFYMDDLKLFASNRSHLVDLLKITCDFSKSIGMELGTDKCAVLHVERGRVGHSEGIDLSMPVNIRTLSEAETYRYLGMSQNMGIDEADMKQSVRDVFFARLTKVCNSLLSGVNKARAYNGWVMPVLIYTFGILRWTQTELNALDRKVRTIMTSHRAHHPRSSVMRLYLPRRHGGRGFLSALTMHNREVCNLRNYFLSKSGEALCADVITSDNGLTPLSLANEQWQDPAVQSISDREAVWKEKELHGRFYKALHEPFVDTVASLHWLRFGDLFGETEGFVCAIQDQVIKTNNYRRYILKDGTVDVCRACRRPGESLRHVISGCSALANSEYLHRHNLVARILHQELALKYGLVDRKLPYYKYLPEAVLENDRARLYWDRAIITDRTILANKPDIVLMDRAQSRIFLVDITIPYDENLVKADTDKKTKYLDLAHEVTDMWGGMPTEIIPVVVSANGLIPVSLSGHLRRLGLRDGLLRAQMQKAVLLDTARIVRRFLSLSP

SEQ ID NO: 14434 - protein, 865 aa, Parnassius apollo
MAFAGTNVSLSQPDIMQKLTERIDDLKQRIAAWGKRIRRYTERSTRFNQNRLFQSDQKRLYKSLERPIVSGTGPAPNQADMVAFWRSLWSEPVNHNEGPWTEVVASQCASITPMDPVIITPDDVAEAVRRAPNWKSPGLDGLHHYWLKGFMVCHSVLARQFQEALYQKSLPSLFTTGITHLVPKDQGATDPSKYRPITCLPTIYKTLTSILSARIARHLDLNQVMSRAQNGCRGGGRGTKEPLLIDAVIGKVVKRNRRNFSAAWIDYRKAFDSVPHTWLKRVLELYKIDCTVRDFLEQCMGQWSTILCHLGERMTAAENRIRIRRGIFQGDCLSPIWFCLSLNPLSTLLEGSGRGFQLRKGGTKVTHLFYMDDLKLFASSRSHLMELLNITCEFSNSIRMELGTDKCAVLHVERGRVANSEGIDLSMPVNLRTLSEAEIYRYLGMSQNIGIDEAGMKQSVCDVFYARLTKVLNSLLSGVNKAHAYNGWVMPVLMYTFGILRWTQTELNALDRKVRTAMTSHRMHHPRSSVMRLYLPRKHGGRGFLSALTMHNREECSLRDYFLARSDDPFYKDVISCDKGLTPLSLANEQWQDPAVQSISDWETVWKEKELHGRFYKALHEPFVDTVASLHWLRFGDLFGETEGFVCAIQDQVIKTNNYRRYILKDGTVDICRACRHPGESLRHVISCCSALSNSEYLHRHNLVARILHQELALKYGLVDRKLPYYKYLPEAVLENDRARLYWDRAIITDRTILANKPDIVLMDRAQSRIFLVDITIPYDENLVKAETDKQTKYLDLAHEVTDMWGGLPTEIIPVVVSANGLIPVSLSGHLRRLGLRGGPLQVQMQKAVLLDTARIVRRFLSLSP

SEQ ID NO: 14435 - protein, 950 aa, Parnassius apollo
MLVTYLEASRDLCETDSILFGAALAVCRIIGAKVSTAGRATGHSSAIPAWRRRIEERIAKARALIGRLICFRSGNNRPRIVRTVRMAFAGTNVSLSQPDITQKLTERIDDLKQRIAAWGKRIRRYTERSTRFNQNRLFQSDQKRLYESLERPMVSGTGPAPNQADTVAFWRGLWSEPVNHSEGPWTEVVASQCAGITPMDPVIITPDDVAEAVRRAPNWKSPGLDGLHHYWLKGFMVCHSVLARQFQEALNQKSLPSLFTTGITHLVPKDQGTTDPSKYRPITCLPTIYKTLTSILSARITCHLDSNQVMSRAQNGCRGGGRGTKEPLLIDAVIGKVVKRNRRNFSAAWIDYRKAFDSVPHTWLKRVLELYRIDCTVRDFLEQCMGQWSTILCHLGERMMAAENHIRIRRGIFQGDCLSPIWFCLSLNPLSTLLEGSGRGFQLRRGGTKVTHLFYMDDLKLFASSRSHLMELLNITCEFSNSIGMELGTDKCAVLHVERGRVANSEGVDLSMPVNLRTLSEAETYRYLGMSQNIGIDETGMKQSVCDVFYARLTKVLNSLLSDVNKAHAYNGWVMPVLMYTFGILRWTQTELNALDRKVRTTMTSHRMHHPRSSVMRLYLSRKHGGRGFLSALTMHNREVCSLRDYFLARSDDPFYKDVISCDKGLTPLSLANEQWQDPVVPSISHRETVWKEKELHGRFYKALHEPFVDTVASLHWLRFGDLFGETEGFVCAIQDQVIKTNNYRRYILKDGTVDICRACRHPGESLRHVISGCSALSNSEYLHRHNLVARILHQELALKYGLVDRKLPYYKYLPEAVLENDRARLYWDRAIITDRTILANKPDIVLMDRAQSRIFLVDITIPYDENLVKAETDKQTKYLDLAHVVTDMWGGLPTEIIPVVVSANGLIPVSLSGHLKRLGLRDGPFQVQMQKAVLLDTARIVRRFLFLSP

SEQ ID NO: 14436 - protein, 861 aa, Parnassius apollo
MAFAGTNVSLSQPDITQKLTESEAENRCLRKQIRRYTERSTRFNQNRLFQSDQKRLYESLERPMVSGTGPAPNQADTVAFWRGLWSEPVNHSEGPWTEVVASQCAGITPMDPVIITPDDVAEAVRSAPNWKSPGLDGLHHYWLKGFMVCHSVLARQFQEALNQKSLPSLFTTGIIHLVPKDQGTTDPSKYRPITCLQTIYKTLISILSARITCHLDSNQVMSRAQNGCRGGGRGTKEPLLIDAVIGKVVKRNRRNFSAAWIDYRKAFDSVPHTWLKRVLELYKIDCTVRDFLEQCMGQWSTILCHLGERMMAAENHIRIRRGIFQGDCLSPIWFCLSLNPLSTLLEGSGRGFQLRKGGTKVTHLFYMDDLKLFASSRSHLMELLNITCEFSNSIGMELGTDKCAVLNVERGRVANSEGVDLSMPVNLRTLSEAETYRYLGMSQNIGIDETGMKQSVCDVFYARLTKVLKSLLSGVNKAHAYNGWVMPVLMYTFGILRWTQTELNALDRKVRTTMTSHGMHHPRSSVMRLYLPRKHGGRGFLSALTMHNREVCSLRDYFLARSDDPFYKDVISCDKGLTPLSLANEQWQDPAVQSISDRETVWKEKELHGRFYKALHEPFVDTVASLHWLRFGDLFGETEGFVCAIQDQVIKTNNYRRYILKDGTVDICRACRHPGESLRHVISGCSALSNSEYLHRHNLVARILHQELALKYGLVDRKLPYYKYLPEAVLENDRARLYWDRAIITDRTILANKPDIVLMDRALSRIFLVDITIPYDENLVKAETDKQTKYLDLAHEVTDMWGGLPTEIIPVVVSANGLIPVSLSGHLRRLGLRGGPLQVQMQKAVLLDTARIVRRFLSLSP

SEQ ID NO: 14437 - protein, 1191 aa, Parnassius apollo
MMEHRRLRKGPLPGGRQGASGAGAGRDSMRTASRARGAARPPSSPSHPSSPPACLVSAGSSQAQQSAPATGGVRRMRWTINMNSNALRAYFRAKGGEIGGFAYRARMHRLFTELEPSITVTEQNLADRVRYILRSNIFDGAELERLRREAVPSSNENATTEGAVPQVAEQPAHVDAAENTPVVADSNDDGTFTQELEIEQMRSTLEEAIMETRSTPLENRPRLPRIALSKRNRAVVRALNPMLVTYLEASRDLCETDSILFGAALAVCRIIGAKLSTAGRTTGQSSAIPAWRTRIEERIAKARALIGRLICFRSGNTRPRIVRTVRMAFAGTNVSLSQPDIMQKLTERIDDLKQRIAAWGKRIRRYTERSTRFNQNRLFQSDQKRLYKSLERPMVSGTGPVPNQADTVAFWRSLWSEPVNHNEGPWTEVVASQCAGITPMDPVTITPDDVAEAVRRAPNWKSPGLDGLHHYWLKGFVVCHTVLARQFQEVLNQKSLPSLFTTGITHLVPKGQSTTDPSKYRPITCLPTIYKTLTSILSARITRHLDSNQVMSRAQNGCRGGGRGTKEPLLIDAVIGKVVKRNRRNFSAAWIDYRKAFDSVPHTWLKRVLELYKIDCTVRDFLEQCMGQWSTILCHLGERMMAAENHIRIRRGIFQGDCLSPIWFCLSLNPLSTLLEGSGRGFQLRKGGTKVTHLFYMDDLKLFASSRSHLMELLNITCDFSNSIGMELGTDKCAVLHVERGRVANSEGIDLSMPVNLRTLSEAETYRYLGMTQNIGIDEAGMKQSVCDVFYARLTKVLNSLLSGVNKTQAYNGWVIPVLMYTFGILRWTQTELNALDRKVRTTMTSHRMHHPRSSVMRLYLPRKHGGRGFLSALTMHNREVCSLRNYFLARSDDPFYKDVISCDKGLTPLSLANEQWQGPAVQTISDRETVWKEKELHGRFYKSLHGPFVDTVTSLHWLRFGDLFGETEGFVCAIQDQVIKTNNYRRYILKDGTIDICRACRHPGESLRHVISGCSALSNSEYLHRHNLVARILHQELALKYGFVDRKLPYYKYLPEAVLENDRARLYWDRAIITDRTILANKPDIVLMDRAQSRIFLVDITIPCDENLVKAETDKQTKYLDLAHEVTDMWGGLPTEIIPVVVSANGLIPVSLSGHLRRLGLRGGPLQAQMQKAVLLDTARIVRRFLSLST

SEQ ID NO: 14438 - protein, 950 aa, Parnassius apollo
MLVTYLEASRDLCETDSVLFGAAVAACRIIGAKLPMAGRATKQSSAIPAWRKRIEDRTAKARTLIGRLISFRSGNNRPRVVRTVRMAFAGTNISLSQPDITQKLTERIDDLKQKIAAWGKRIRRFTERSRRFNQNRLFQSDQKRLYKSLERPEVCGAGPGPDQANTVAFRRGLWSEPVNHSEGPWTEVVASQCASITPMDPVIITPDDVAEAVRRAPNWKSPGLDGLHHYWLKGFMVCHAVLARQFQEALNQKSLPSLFTTGITHLVPKDQVTTDPSKYRPITCLPTIYKTLTSILSARITRHLELNQVMSRAQNGCRGGGRGTKEPLLIDAVIGKVVKRNRRNFSAAWIDYRKAFDSVPHTWLKRVLELYKIDCTVRDFLEQCMGQWSTILCHLGERMMAAENHIRIRRGIFQGDCLSPIWFCLSLNPLSTLLEGSGRGFQLRKGGTKVTHLFYMDDLKLFASSRSHLVELLKITCEFSSSIGMELGTDKCAVLHVERGRVANSEGIDLSMPVNLRTLSEAETYRYLGMSQNIGIDEAGVKQSVCDVFYARLTKVLNSLLSGVNKTHAYNGWVMPVLMYTFGILRWTQTELNALDRKVRTTMTSHRMHHPRSSVMRLYLPRKHGGRGFLSALTMHNREVCSLRHYFLARSDDPFYNDVISSDKGLTPLSLANEQWQDPAVLSISDRETVWKEKELHGRYYRVLHEPFVDTVASLNWLRFGDLFGETEGFVCAIQDQVIKTNNYRRYILKDGTVDVCRACRHPGESLRHVISGCSALSNSEYLHRHNLVARILHQALALKYGLVDRKLPYYKYLPEAVLENDRARLYWDRAIITDRTILANKPDIVLMDRAQSRIFLVDITIPYDENLVKAETDKQTKYLDLAHEVTDMWGGLPTEIIPVVVSANGLIPVSLSGHLRRLGLRDGPLRAQMQKAVVLDTARIVRRFLSLSP

SEQ ID NO: 14439 - protein, 752 aa, Luehdorfia chinensis
MDPVVISPDDVADAVRRAPNWKSPGLDGLHHYWLKGFIVCHAVLARQFQNALDQMSLPSLFTTGITHLVPKDQVTTDPSKYRPITCLTTIYKTLTSILSVRITRHLVLNRVISPAQSGCRGGGRGTKEPLLIDAVIGKVVKRNRRNFSAAWIDYRKAFDSVPHTWLKRVLELYNVDCTVRDFLGQCMRQWSTILCHLGERMTAAENRIRVRRGIFQGDCLSPVWFCLSPNPLSTLLEGSGRGFQLRRGGTKVTHLFYMDDLKLFASNRSHLVDLLKITCDFSKSIGMELETDKCAVLHVERGRVGHSEGIDLSMPVNIRTLSEAETYRYLGMSQNIGTDEADMKQSVRDVFFARLTKVSNSLLSGVNKARAYNGWVMPVLIYTFGILRWTQTELNALDRKVRTIMTSHRAHHPRSSVMRLYLPRRHGGRGFLSALTMHNREVCNLRNYFLSKSGEALCADVITSDKGLTPLSLANEQWQDPAVQSISDREAVWKEKELHGRFYKALHEPFVDTVASLHWLRLGDLFGETEGFVCAIQDQVIKTNNYRRYILKDGTVDVCRACRRPGESLRHVISGCSALANSEYLHRHNLVARILHQELALKYGLVDRKLPYYKYLPEAVLENDRARLYWDRAIITDRTILANKPDIVLMDRAQSRIFLVDITIPYDENLVKAETDKKTKYLDLAHEVTDMWGGMPTEIIPVVVSANGLIPVSLSGHLRRLGLRDGLRRAQMQKAVLLDTARIVRRFLSLSP

SEQ ID NO: 14440 - protein, 1189 aa, Boloria selene
MMENNNKNARLGPLPGGRQGAPGAGAGRDSIRAASTTNRPALPPSRPTHPSPPPEGLVPTGSSRTQTSGPAAGGVRRMRWTSQMNENVMRAYYRATGGETGRTGYRAAMYREFLLLEPTLTVTEQNLADRARYIQRSNILNATELERLRREAVPEVRTLTTEQIVPPAATGEDVLTNFHDLPIEGGTQETAALDTERMKRILEEAVSEIRSAPLENRPRLSRLTLNVATREVIEAINQLLPQHLESSIGLDDTASILFGAALAVHRFVGVRTPGPERDTAARRKAQPAWKKRIERRINHARGLIGRLQSFRSGNTRPRIVRSVRIAFNGLGVRLDQPDIAQKLTERIDDLKQRIAAWESRIRRYSERVERFQQNRLFSSDQKRFYRALECPAVCSTSQKPSPADLVAFWRNVWSKEVQHEEGPWIAAVEEACAVIKPMSPVAISAEDVVDAVRRAPNWKSPGPDGLHHYWLKGFSVCHVTLARQFQEALEQRTLPNLFTTGITHLAPKSTDAADPAKYRPITCLTTIYKTLTSVLSSKISRHVDENNIISGAQNGCRGRSRGTKELLLIDSVAGQLVKRNRRNFSAAWIDYKKAFDSVPHSWLSRVLELYKVDSTVRNFLGKCMGQWSTILSLHGERITAADDRIRIRRGIFQGDCLSPLWFCLSLNPLSSLLESSGTGFQFRRGGTRVPHLLYMDDLKLLAPNANRLQELLKITSEFSNSIRMKLGLDKCAVLHVVRGQVTHSAEINLEPSRVLMTLSEAESYRYLGMSQSIGVNETDMKQSVCEAFFGRLTKVCKSFLSGANKVRAYNGWVMPVLMYTFGVLRWTQTELDTLDRRVRTTMTLYRMHHPKSSVMRLYIPRKCGGRGLLSVKTMHNREIANLRTYFETKGESPMHREVVECDKGLTPLSLAKTEWQAPVVLSTSDRETVWKEKELHGRFFKALNEPNVDKKASVQWLRFGDLFGETEGFVCVIQDQVVKTRNYRKYVLKDGTHDICRACGHPGESLRHVLSGCSALANTEYLHRHNQAAKILHQELALKFGLLDERLPYYKYTPMPVLERDGVRLYWDRSIITDRTILANKPDIALMDRAQSRVFLVDITVPYDENLVRAETEKKRKYLDLAHEVSTMWHVGSTETIPIVISANGLIPVSLAHYLRRLGFRDSSLAARMQKAVLLDSARIVRRFLNLSP

SEQ ID NO: 14441 - protein, 1188 aa, Ypsolopha scabrella
MMERINRMRIVPLPGGDRQGTSGAGAGRGSMRSASRNRRLARPPGQSTNPPSPPVGLVSAGSSQAQHTAPAAGERVRRMRWSSQMNANAMRAYFRATGGNTGATGYRAIMFREFLLLEPSITIAEQNLADRVRYIQRSNVFSAAELEQLRRETVFVMDDAPHVEDVSPQPDSIQETEHNPQNVAEENITVTVSQDLEQLRSILEETMEEYRQVPLELRPRLPRVPLSIKVRDVVGAINQLLPPFLESSIDLWDTDTVLFSAAMAVCRIVGVRMPGTGSTTPRSSRIPAWQRRINRRITRARILIGKLTSFRSGNTRPRVMRFVAEAFAGQDIDMSQPDFAQNIMERIDYLKQKIAAWGKRLRRYSEMVKRHHHNRLFESDQKKFYRILERPETRPTGDRPEQADVVAFWRSLWSQPVTHQEGPWIGAVERRCASITPMNAVRISEEDVTTAVRKAPNWKSPGPDGLQHYWLKGFWRSHATLAKQFQQALDVGTLPNFLTTGVTHLAPKSEDTADPSKYRPITCLCTLYKTLTSVLSSKISQHVVENHIISDAQNGCRGGSRGSKELLLIDAVASKLVTRNRRNFSAAWIDYKKAFDSVPHSWLLRVLELYKVDGSVRHFLGACMGQWSTILSLAGERMTAADDRIRIKRGIFQGDCLSPLWFCLSLNPLSQLLEESATGFQFRRGGMRMPHLLYMDDLKLFGPTAERLRELLKITDDFSKSIRMELGVEKCAVLHVERGHVVRSNGVDVGSNRLKSLSETETYRYLGMSQTIGVNEADVKQAVCEVFYGRLTKVLESFLSGGNKARAYNAWVMPVLMYTFGVLRWSQTELDALDRKVRTTMTFHRMHHPRSSVMRLYLPRKCGGQGLLSAKTMHNREICSLRNYFLTKTDDGIHSEVVACDKGLTPLSLASEEWREPVVLSTAERESVWRGKELHGRFYKALHEPHVDKKASLHWLRFGDLFGETEGFVCAIQDQVIKTRNYRKYIIKDGTQDICRACAHPGESLRHVISGCSALANTEYLHRHNQVAKILHQELAYKYGLVDQRVPYYKYSPAPVLENDRAKLYWDRSVITDRTILANKPDIVLMDRTQSRVFLVDITIPHDENLVKAETEKKRKYLDLAHEVTDMWGVASTEIIPIVLSANGLIPTSLENNLRRLGFRGSSLPARMQKAVLLDTARIVRRFLSLGL

SEQ ID NO: 14442 - protein, 1188 aa, Ypsolopha scabrella
MMERINRMRIVPLPGGDRQGTSGAGAGRGSMRSASRNRRLARPPGQSTNPPSPPVGLVSAGSSQAQHTAPAAGERVRRMRWSSQMNANAMRAYFRATGGNTGATGYRAVMFREFLLLEPSITIAEQNLADRVRYIQRSNVFSAAELEQLRRETVFVMDDAPHVEDVSPQPDSIQETEHNPQNVAEENITVTVSQDLEQLRSILEETMEEYRQVPLELRPRLPRVPLSIKVRDVVGAINQLLPPFLESSIDLWDTDTVLFSAAMAVCRIVGVRMPGTGSTTPRTSRIPAWQRRINHRITRARILIGKLTSFRSGNTRPRVMRFVAEAFAGQDIDMSQPDFAQNIMERIDYLKQKIAAWGKRLRRYSEMVKRHHHNRLFESDQKKFYRILERPETRPTGDRPEQADVVAFWRSLWSQPVTHQEGPWIGAVERRCASITPMNAVRISEEDVTTAVRKAPNWKSPGPDGLQHYWLKGFWRSHATLAKQFQQALDVGTLPNFLTTGVTHLAPKSEDTADPSKYRPITCLCTLYKTLTSVLSSKISQHVVENHIISDAQNGCRGGSRGSKELLLIDAVASKLVTRNRRNFSAAWIDYKKAFDSVPHSWLLRVLELYKVDGSVRHFLGACMGQWSTILSLAGERMTAADDRIRIKRGIFQGDCLSPLWFCLSLNPLSQLLEESATGFQFRRGGMRMPHLLYMDDLKLFGPTAERLRELLKITDDFSKSIRMELGVEKCAVLHLERGHVVRSNGVDVGSNRLKSLSETETYRYLGMSQTIGVNEADVKQAVCEVFYGRLTKVLESFLSGGNKARAYNAWVMPVLMYTFGVLRWSQTELDALDRKVRTTMTFHRMHHPRSSVMRLYLPRKCGGQGLLSAKTMHNREICSLRNYFLTKTDDGIHSEVVACDKGLTPLSLASEEWREPVVLSTAERESVWRGKELHGRFYKALHEPHVDKKASLHWLRFGDLFGETEGFVCAIQDQVIKTRNYRKYIIKDGTQDICRACAHPGESLRHVISGCSALANTEYLHRHNQVAKILHQELAYKYGLVDQRVPYYKYSPAPVLENDRAKLYWDRSVITDRTILANKPDIVLMDRTQSRVFLVDITIPHDENLVKAETEKKRKYLDLAHEVTDMWGVASTEIIPIVLSANGLIPTSLENNLRRLGFRGSSLPARMQKAVLLDTARIVRRFLSLGL

SEQ ID NO: 14443 - protein, 1032 aa, Ypsolopha scabrella
MDDAPHVEDVSPQPDSIQETEHNPQNVAEENITVTVSQDLEQLRSILEETMEEYRQVPLELRPRLPRVPLSIKVRDVVGAINQLLPPFLESSIDLWDTDTVLFSAAMAVCRIVGVRMPGTGSTTPRSSRIPAWQRRINRRITRARILIGKLTSFRSGNTRPRVMRFVAEAFAGQDIDMSQPDFAQNITERIDYLKQKIAAWGKRLRRYSEMVKRHHHNRLFESDQKKFYRILERPETRPTGDRPEQADVVAFWRSLWSQPVTHQEGPWIGAVERRCASITPMNAVRISEEDVTTAVRKAPNWKSPGPDGLQHYWLKGFWRSHATLAKQFQQALDVGTLPNFLTTGVTHLAPKSEDTADPSKYRPITCLCTLYKTLTSVLSSKISQHVVENHIISDAQNGCRGGSRGSKELLLIDAVASKLVRRNRRNFSAAWIDYKKAFDSVPHSWLLRVLELYKVDGSVRHFLGACMGQWSTILSLAGERMTAADDRIRIKRGIFQGDCLSPLWFCLSLNPLSQLLEESATGFQFRRGGMRMPHLLYMDDLKLFGPTAERLRELLKITDDFSKSIRMELGVEKCAVLHVERGHVVRSNGVDVGSNRLKSLSETETYRYLGMSQTIGVNEADVKQAVCEVFYGRLTKVLESFLSGGNKARAYNAWVMPVLMYTFGVLRWSQTELDALDRKVRTTMTFHRMHHPRSSVMRLYLPRKCGGQGLLSAKTMHNREICSLRNYFLTKTDDGIHSEVVACDKGLTPLSLASEEWREPVVLSTAERESVWRGKELHGRFYKALHEPHVDKKASLHWLRFGDLFGETEGFVCAIQDQVIKTRNYRKYIIKDGTQDICRACAHPGESLRHVISGCSALANTEYLHRHNQVAKILHQELAYKYGLVDQRVPYYKYSPAPVLENDRAKLYWDRSVITDRTILANKPDIVLMDRTQSRVFLVDITIPHDENLVKAETEKKRKYLDLAHEVTDMWGVASTEIIPIVLSANGLIPTSLENNLRRLGFRGSSLPARMQKAVLLDTARIVRRFLSLGL

SEQ ID NO: 14444 - protein, 926 aa, Ypsolopha scabrella
MAVCRIVGVRMPGTGSTTPRSSRIPAWQRRINRRITRARILIGKLTSFRSGNTRPRVMRFVAEAFAGQDIDMSQPDFAQNITERIDYLKQKIAAWGKRLRRYSEMVKRHHHNRLFESDQKKFYRILERPETRPTGDRPEQADVVAFWRSLWSQPVTHQEGPWIGAVERRCASITPMNAVRISDENVTTAVRKAPNWKSPGPDGLQHYWLKGFWRSHATLAKQFQQALDVGTLPNFLTTGFTHLAPKSEDTADPSKYRPITCLCTLYKTLTSVLSSKISQHVVENHIISDAQNGCRGGSHGSKELLLIDAVASKLVRRNRRNFSAAWIDYKKAFDSVPHSWLLRVLELYKVDGSVRHFLGACMGQWSTILSLAGERMTAADDRIRIKRGIFQGDCLSPLWFCLSLNPLSQLLEESATGFQFRRGGMRMPHLLYMDDLKLFGPTAERLRELLKITDDFSKSIRMELGVEKCAVLHVERGHVVRSNGVDVGSNRLKSLSETETYRYLGMSQTIGVNEADVKQAVCEVFYGRLTKVLESFLSGGNEARAYNAWVMPVLMYTFGVLRWSQTELDALDRKVRTTMTFHRMHHPRSSVMRLYLPRKCGGQGLLSAKTMHNREICSLRNYFLTKTDDGIHSEVVACDKGLTPLSLASEEWREPVVLSTAERESVWRGKELHGRFYKALHEPHVDKKASLHWLRFGDLFGETEGFVCAIQDQVIKTRNYRKYIIKDGTQDICRACAHPGESLRHVISGCSALANTEYLHRHNQVAKILHQELAYKYGLVDQRVPYNKYSPAPVLENDRAKLYWDRSVITDRTILANKPDIVLMDRTQSRVFLVDITIPHDENLVKAETEKKRKYLDLAHEVTDMWGVASTEIIPIVLSANGLIPTSLENNLRRLGFRGSSLPARMQKAVLLDTARIVRRFLSLGL

SEQ ID NO: 14445 - protein, 1188 aa, Ypsolopha scabrella
MMERINRMRIVPLPGGDRQGTSGAGAGRGSMRSASRNRRLARPPGQSTNPPSPPVGLVSAGSSQAQHTAPAAGERVRRMRWSSQMNANAMRAYFRATGGNTGATGYRAVMFREFLLLEPSITIAEQNLADRVRYIQRSNVFSAAELEQLRRETVFVMDDAPHVEDVSPQPDSIQETEHNPQNVAEENITVTVSQDLEQLRSILEETMEEYRQVPLELRPRLPRVPLSIKVRDVVGAINQLLPPFLESSIDLWDTDTVLFSAAMAVCRIVGVRMPGTGSTTPRSSRIPAWQRRINRRITRARILIGKLTSFRSGNTRPRVMRFVAEAFAGQDIDMSQPDFAQNITERIDYLKQKIAAWGKRLRRYSEMVKRHHHNRLFESDQKKFYRILERPETRPTGDRPEQADVVAFWRSLWSQPVTHQEGPWIGAVERRCASITPMNAVRISEEDVTTAVRKAPNWKSPGPDGLQHYWLKGFWRSHATLAKQFQQALDVGTLPNFLTTGVTHLAPKSEDTADPSKYRPITCLCTLYKTLTSVLSSKISQHVVENHIISDAQNGCRGGSRGSKELLLIDAVASKLVRRNRRNFSAAWIDYKKAFDSVPHSWLLRVLELYKVDGSVRHFLGACMGQWSTILSLAGERMTAADDRIRIKRGIFQGDCLSPLWFCLSLNPLSQLLEESAAGFQFRRGGMRMPHLLYMDDLKLFGPTAERLRELLKITDDFSKSIRMELGVEKCAVLHVERGHVVRSDGVDVGSNRLKSLSETETYRYLGMSQTIGVNEADVKQAVCEVFYGRLTKVLESFLSGGNKARAYNAWVMPVLMYTFGVLRWSQTELDALDRKVRTTMTFHRMHHPRSSVMRLYLPRKCGGQGLLSAKTLHNREICSLRNYFLTKTDDGIHSEVVACDKGLTPLSLASEEWREPVVLSTAERESVWRGKELHGRFYKALHEPHVDKKASLHWLRFGDLFGETEGFVCAIQDQVIKTRNYRKYIIKDGTQDICRACAHPGESLRHVISGCSALANTEYLHRHNQVAKILHQELAYKYGLVDQRVPYYKYSPAPVLENDRAKLYWDRSVITDRTILANKPDIVLMDRTQSRVFLVDITIPHDENLVKAETEKKRKYLDLAHEVTDMWGVASTEIIPIVLSANGLIPTSLENNLRRLGFRGSSLPARMQKAVLLDTARIVRRFLSLGL

SEQ ID NO: 14446 - protein, 1147 aa, Ypsolopha scabrella
MSYNNNNNNNNNNNSNNNNNNNMAQHTAPAAGERVRRMRWSSQMNANAMRAYFRATGGNTGATGYRAVMFREFLLLEPSITIAEQNLADRVRYIQRSNVFSAAELEQLRHETVFVMDDAPHVEDVSPQPDSIQETEHNPQNVAEENITVTVSQDLEQLRSILEETMEEYRQVPLELRPRLPRVPLSIKVRDVVGAINQLLPPFLESSIDLWDTDTVLFSAAMAVCRIVGVRMPGTGSTTPRSSRIPAWQRRINRRITRARILIGKLTSFRSGNTRPRVMRFVAEAFAGQDIDMSQPDFAQNIMERIDYLKQKIAAWGKRLRRYSEMVKRHHHNRLFESDQKKFYRILERPETRPTGDRPEQADVVAFWRSLWSQPVTHQEGPWIGAVERRCASITPMNAVRISEEDVTTAVRKAPNWKSPGPDGLQHYWLKGFWRSHATLAKQFQQALDVGTLPNFLTTGVTHLAPKSEDTADPSKYRPITCLCTLYKTLASVLSSKISQHVVENHIISDAQYGCRGGSRGSKELLLIDAVASKLVTRNRRNFSAAWIDYKKAFDSVPHSWLLRVLELYKVDGSVRHFLGACMGQWSTILSLAGERMTAADDRIRIKRGIFQGDCLSPLWFCLSLNPLSQLLEESATGFQFRRGGMRMPHLLYMDDLKLFGPTAERLRELLKITDDFSKSIRMELGVEKCAVLHVERGHVVRSNGVDVGSNRLKSLSETETYRYLGMSQTIGVNEADVKQAVCEVFYGRLTKVLESFLSGGNKARAYNAWVMPVLMYTFGVLRWSQTELDALDRKVRTTMTFHRMHHPRSSVMRLYLPRKCGGQGLLSAKTMHNREICSLRNYFLTKTDDGIHSEVVACDKGLTPLSLASEEWREPVVLSTAERESVWRGKELHGRFYKALHEPHVDKKASLHWLRFGDLFGETEGFVCAIQDQVIKTRNYRKYIIKDGTQDICRACAHPGESLRHVISGCSALANTEYLHRHNQVAKILHQELAYKYGLVDQRVPYYKYSPAPVLENDRAKLYWDRSVITDRTILANKPDIVLMDRTQSRVFLVDITIPHDENLVKAETEKKRKYLDLAHEVTDMWGVASTEIIPIVLSANGLIPTSLENNLRRLGFRGSSLPARMQKAVLLDTARIVRRFLSLGL

SEQ ID NO: 14447 - protein, 1188 aa, Ypsolopha scabrella
MMERINRMRIVPLPGGDRQGTSGAGAGRGSMRSASRNRRLARPPGQSTNPPSPPVGLVSAGSSQAQHTAPAAGERVRRMRWSSQMNANAMRAYFRATGGNTGATGYRAVMFREFLLLEPSITIAEQNLADRVRYIQRSNVFSAAELEQLRRETVFVMDDAPHVEDVSPQPDSIQETEHNPQNVAEENITVTVSQDLEQLRSILEETMEEYRQVPLELRPRLPRVPLSIKVRDVVGAINQLLPPFLESSIDLWDTDTVLFSAAMAVCRIVGVRMPGTGSTTPRSSRIPAWQRRINRRITRARILIGKLTSFRSGNTRPRVMRFVAEAFAGQDIDMSQPDFAQNITERIDYLKQKIAAWGKRLRRYSEMVKRHHHNRLFESDQKKFYRILERPETRPTGDQPEQADVVAFWRSLWSQPVTHQEGPWIGAVERRCASITPMNAVRISEEDVTTAVRKAPNWKSPGPDGLQHYWLKGFWRSHATLAKQFQQALDVGTLPSFLTTGVTHLAPKSEDTADPSKYRPITCLCTLYKTLTSVLSSKISQHVVENHIISDAQNGCRGGSRGSKELLLIDAVASKLVRRNRRNFSAAWIDYKKAFDSVPHSWLLRVLELYKVDGSVRHFLGACMGQWSTILSLAGERMTAADDRIRIKRGIFQGDCLSPLWFCLSLNPLSQLLEESATGFQFRRGGMRMPHLLYMDDLKLFGPTAERLRELLKITDDFSKSIRMELGVEKCAVLHVERGHVVRSDGVDVGSNRLKSLSETETYRYLGMSQTIGVNEADVKQAVCEVFYGRLTKVLESFLSGGNKARAYNAWVMPVLMYTFGVLRWSQTELDALDRKVRTTMTFHRMHHPRSSVMRLYLPRKCGGQGLLSAKTLHNREICSLRNYFLTKTDDGIHSEVVACDKGLTPLSLASEEWREPVVLSTAERESVWRGKELHGRFYKALHEPHVDKKASLHWLRFGDLFGETEGFVCAIQDQVIKTRNYRKYIIKDGTQDICRACAHPGESLRHVISGCSALANTEYLHRHNQVAKILHQELAYKYGLVDQRVPYYKYSPAPVLENDRAKLYWDRSVITDRTILANKPDIVLMDRTQSRVFLVDITIPHDENLVKAETEKKRKYLDLAHEVTDMWGVASTEIIPIVLSANGLIPTSLENNLRRLGFRGSSLPARMQKAVLLDTARIVRRFLSLGL

SEQ ID NO: 14448 - protein, 1188 aa, Ypsolopha scabrella
MMERINRMRIVPLPGGDRQGTSGAGAGRGSMRSASRNRRLARPPGQSTNPPSPPVGLVSAGSSQAQHTAPAAGERVRRMRWSSQMNANAMRAYFRATGGNTGATGYRAVMFREFLLLEPSITIAEQNLADRVRYIQRSNVFSAAELEQLRRETVFVMDDAPHVEDVSPQPDSIQETEHNPQNVAEENITVTVSQDLEQLRSILEETMEEYRQVPLELRPRLPRVPLSIKVRDVVGAINQLLPPFLESSIDLWDTDTVLFSAAMAVCRIVGVRMPGTGSTTPRSSRIPAWQRRINRRITRARILIGKLTSFRSGNTRPRVMRFVAEAFAGQDIDMSQPDFAQNITERIDYLKQKIAAWGKRLRRYSEMVKRHHHNRLLESDQKKFYRILERPETRPTGDRPEQADVVAFWRSLWSQPVTHQEGPWIGAVERRCASITPMNAVRISQEDVTTAVRKAPNWKSPGPDGLQHYWLKGFWRSHATLAKQFQQALDVGPLPNFLTTGVTHLAPKSEDTADPSKYRPITCLCTLYKTLTSVLSSKISQHVVENHIISDAQNGCRGGSRGSKELLLIDAVASKLVRRNRRNFSAAWIDYKKAFDSVPHSWLLRVLELYKVDGSVRHFLGACMGQWSTILSLAGERMTAADDRIRIKRGIFQGDCLSPLWFCLSLNPLSQLLEESATGFQFRRGGMRMPHLLYMDDLKLFGPTAERLRELLKITDDFSKSIRMELGVEKCAVLHVERGHVVRSNGVDVGSNRLKSLSETETYRYLGMSQTIGVNEADVKQAVCEVFYGRLTKVLESFLSGGNKARAYNAWVMPVLMYTFGVLRWSQTELDALDRKVRTTMTFHRMHHPRSSVMRLYLPRKCGGQGLLSAKTMHNREICSLRNYFLTKTDDGIHSEVVACDKGLTPLSLASEEWREPVVLSTAERESVWRGKELHGRFYKALHEPHVDKKASLHWLRFGDLFGETEGFVCAIQDQVIKTRNYRKYIIKDGTQDICRACAHPGESLRHVISSCSALANTEYLHRHNQVAKILHQELAYKYGLVDQRVPYYKYSPAPVLENDRAKLYWDRSVITDRTILANKPDIVLMDRTQSRVFLVDITIPHDENLVKAETEKKRKYLDLAHEVTDMWGVASTKIIPIVLSANGLIPTSLENNLRRLGFRGSSLPARMQKAVLLDTARIVRRFLSLGL

SEQ ID NO: 14449 - protein, 1032 aa, Ypsolopha scabrella
MDDAPHVEDVSPQPDSIQETEHNPQNVAEENITVTVSQDLEQLRSILEETMEEYRQVPLELRPRLPRVPLSIKVRDVVGAINQLLPPFLESSIDLWDTDTVLFSAAMAVCRIVGVRMPGTGSTTPRSSRIPAWQRRINRRITRARILIGKLTSFRSGNTRPRVMRFVAEAFAGQDIDMSQPDFAQNIMERIDYLKQKIAAWGKRLRRYSEMVKRHHHNRLFESDQKKFYRILERPETRPTGDRPEQADVVAFWRSLWSQPVTHQEGPWIGAVERRCASVTPMNAVRISEEDVTTAVRKAPNWKSPGPDGLQHYWLKGFWRSHATLAKQFQQALDVGTLPNFLTTGVTHLAPKSEDTADPSKYRPITCLCTLYKTLTSVLSSKISQHVVENHIISDAQNGCRGGSHGSKELLLIDAVASKLVTRNRRNFSAAWIDYKKAFDSVPHSWLLRVLELYKVDGSVRHFLGACMGQWSTILSLAGERMTAADDRIRIKRGIFQGDCLSPLWFCFSLNPLSQLLEESATGFQFRRGGMRMPHLLYMDDLKLFGPTAERLRELLKITDDFSKSIRMELGVEKCAVLHVERGHVVRSNGVDVGSNRLKSLSETETYRYLGMSQTIGVNEADVKQAVCEVFYGRLTKVLESFLSGGNKAQAYNAWVMPVLMYTFGVLRWSQTELDALDRKVRTTMTFHRMHHPRSSVMRLYLPRKCGGQGLLSAKTMHNREICSLRNYFLTKTDDGIHSEVVACDKGLTPLSLASEEWREPVVLSTAERESVWRGKELHGRFYKALHEPHVDKKASLHWLRFGDLFGETEGFVCAIQDQVIKTRNYRKYIIKDGTQDICRACAHPGESLRHVISGCSALANTEYLHRHNQVAKILHQELAYKYGLVDLRVPYYKYSPAPVLENDRAKLYWDRSVITDRTILANKPDIVLMDRTQSRVFLVDITIPHDENLVKAETEKKRKYLDLAHEVTDMWGVASTEIIPIVLSANGLIPTSLENNLRRLGFRGSSLPARMQKAVLLDTARIVRRFLSLGL

SEQ ID NO: 14450 - protein, 1188 aa, Ypsolopha scabrella
MMERINRMRIVPLPGGDRQGTSGAGAGRGSMRSASRNRRLARPPGQSTNPPSPPVGLVSAGSSQAQHTAPAAGERVRRMRWSSQMNANAMRAYFRATGGNTGATGYRAVMFREFLLLEPSITIAEQNLADRVRYIQRSNVFSAAELEQLRRETVFVMDDAPHVEDVSPQPDSIQETEHNPQNVAEENITVTVSQDLEQLRSILEETMEEYRQVPLELRPRLPRVPLSIKVRDVVGAINQLLPPFLESSIDLWDTDTVLFSAAMAVCRIVGVRMPGTGSTTPRSSRIPAWQRRINRRITRARILIGKLTSFRSGNTRPRVMRFVAEAFAGQDIDMSQPDFAQNIMERIDYLKQKIAAWGKRLRRYSEMVKRHHHNRLFESDQKKFYRILERPETRPTGDRPEQADVVAFWRSLWSQPVTHQEGPWIGAVERRCASITPMNAVRISEEDVTTAVSKAPNWKSPGPDGLQHYWLKGFWRSHATLAKQFQQALDVGTLPNFLTTGVTHLAPKSEDTADPSKYRPITCLCTLYKTLTSVLSSKISQHVVENHIISDAQNGCRGGSRGSKELLLIDAVASKLVTRNRRNFSAAWIDYKKAFDSVPHSWLLRVLELYKVDGSVRHFLGACMGQWSTILSLAGERMTAADDRIRIKRGIFQGDCLSPLWFCFSLNPLSQLLEESGTGFQFRRGGMRMPHLLYMDDLKLFGPTAERLRELLKITDDFSKSIRMELGVERCAVLHVERGHVVRSNGVDVGSNRLKSLSETETYRYLGMSQTIGVNEADVKQAVCEVFYGRLTKVLESFLSGGNKARAYNAWVMPVLMYTFGVLRWSQTELDALDRKVRTTMTFHRMHHPRSSVMRLYLPRKCGGQGLLSAKTMHNREICSLRNYFLTKTDDGIHSEVVACDKGLTPLSLASEEWREPVVLSTAERESVWRGKELHGRFYKALHEPHVDKKASLHWLRFGDLFGETEGFVCAIQDQVIKTRNYRKYIIKDGTQDICRACAHPGESLRHVISGCSALANTEYLHRHNQVAKILHQELAYKYGLVDQRVPYYKYSPAPVLENDRAKLYWDRSVITDRTILANKPDIVLMDRTQSRVFLVDITIPHDENLVKAETEKKRKYLDLAHEVTDMWGVASTEIIPIVLSANGLIPTSLENNLRRLGFRGSSLPARMQKAVLLDTARIVRRFLSLGL

SEQ ID NO: 14451 - protein, 1188 aa, Ypsolopha scabrella
MMERINRMRIVPLPGGDRQGTSGAGAGRGSMRSASRNRRLARPPGQSTNPPSPPVGLVSAGSSQAQHTAPAAGERVRRMRWSSQMNANAMRAYFRATGGNTGATGYRAVMFREFLLLEPSITIAEQNLADRVRYIQRSNVFSAAELEQLRRETVFVMDDAPHVEHVSPQPDSIQETEHNPQNVAEENITVTVSQDLEQLRSILEETMEEYRQVPLELRPRLPRVPLSIKVRDVVGAINQLLPPFLESSIDLWDTDTVLFSAAMAVCRIVGVRMPGTGSTTPRSSRIPAWQRRINRRITRARILIGKLTSFRSGNTRPRVMRFVAEAFAGQDIDMSQPDFAQNIMERIDYLKQKIAAWGKRLRRYSEMVKRHHHNRLFESDQKKFYRILERPETRPTGDRPEQADVVAFWRSLWSQPVTHQEGPWIGAVERKCASITPMNAVRISEEDVTTAVRKAPNWKSPGPDGLQHYWLKGFWRSHATLAKQFQQALDVGTLPNFLTTGVTHLAPKSEDTADPSKYRPITCLCTLYKTLTSVLSSKISQHVVENHIISDAQNGCRGGSRGSKELLLIDAVASKLVTRSRRNFSAAWIDYKKAFDSVPHSWLLRVLELYKVDGSVRHFLGACMGQWSTILSLAGERMTAADDRIRKKRGIFQGDCLSPLWFCLSLNPLSQLLEESATGFQFRRGGMRMPHLLYMDDLKLFGPTAERLRELLKITDDFSKSIRMELGVEKCAVLHVERGHVVRSNGVDVGSNRLKSLSETETYRYLGMSQTIGVNEADVKQAVCEVFYGRLTKVLESFLSGGNKARAYNAWVMPVLMYTFGVLRWSQTELDALDRKVRTTMTFHRMHHPRSSVMRLYLPRKCGGQGLLSAKTMHNREICSLRNYFLTKTDDGIHSEVVACDKGLTPLSLASEEWREPVVLSTAERESVWRGKELHGRFYKALHEPHVDKKASLHWLRFGDLFGETEGFVCAIQDQVIKTRNYRKYIIKDGTQDICRACAHPGESLRHVISGCSALANTEYLHRHNQVAKILHQELAYKYGLVDQRVPYYKYSPAPVLENDRAKLYWDRSVITDRTILANKPDIVLMDRTQSRVFLVDITIPHDENLVKAETEKKRKYLDLAHEVTDMWGVASTEIIPIVLSANGLIPTSLENNLRRLGFRGSSLPARMQKAVLLDTARIVRRFLSLGL

SEQ ID NO: 14452 - protein, 1188 aa, Ypsolopha scabrella
MMERINRMRIVPLPGGDRQGTSGAGAGRGSMRSASRNRRLARPPGQSTNPPSPPVGLVSAGSSQAQHTAPAAGERVRRMRWSSQMNANAMRAYFRATGGNTGATGYRAVMFREFLLLEPSITIAEQNLADRVRYIQRSNVFSAAELEQLRRETVFVMDDAPHVEDVSPQPDSIQETEHNPQNVAEENITVTVSQDLEQLRSILEETMEEYRQVPLELRPRLPRVPLSIKVRDVVGAINQLLPPFLESSIDLWDTDTVLFSAAMAVCRIVGVRMPGTGSTTPRSSRIPAWQRRINRRITRARILIGKLTSFRSGNTRPRVMRFVAEAFAGQDIDMSQPDFAQNITERIDYLKQKIAAWGKRLRRYSEMVKRHHHNRLFESDQKKFYRILERPETRPTGDRPEQADVVAFWRSLWSQPVTHQEGPWIGAVERRCASITPMNAVRISEEDVTTAVRKAPNWKSPGPDGLQHYWLKGFWRSHATLAKQFQQALDVGTLPNFLTTGVTHLAPKSEDTADPSKYRPITCLCTLYKTLTSVLSSKISQHVVENHIISDAQNGCRGGSRGSKELLLIDAVASKLVRRNRRNFSAAWIDYKKAFDSVPHSWLLRVLELYKVDGSVRHFLGACMGQWSTILSLAGERMTAADDRIRIKRGIFQGDCLSPLWFCLSLNPLSQLLEESATGFQFRRGGMRMPHLLYMDDLKLFGPTAERLRELLKITDDFSKSIRMELGVEKCAVLHVERGHVVRSNGVDVGSNRLKSLSETETYRYLGMSQTIGVNEADVKQAVCEVFYGRLTKVLESFLSGGNKARAYNAWVMPVLMYTFGVLRWSQTELDALDRKVRTTMTFHRMHHPRSSVMRLYLPRKCGGQGLLSAKTMHNREICSLRNYFLTKTDDGIHSEVVACDKGLTPLSLASEEWREPVVLSTAERESVWRGKELHGRFYKALHEPHVDKKASLHWLRFGDLFGETEGFVCAIQDQVIKTRNYRKYIIKDGTQDICRACAHPGESLRHVISGCSALANTEYLHRHNQVAKILHQELAYKYGLVDQRVPYYKYSPAPVLENDRAKLYWDRSVITDRTILANKPDIVLMDRTQSRVFLVDITIPHDENLVKAETEKKRKYLDLAHEVTDMWGVASTEIIPIVLSANGLIPTSLENNLRRLGFRGSSLPARMQKAVLLDTARIVRRFLSLGL

SEQ ID NO: 14453 - protein, 1188 aa, Ypsolopha scabrella
MMERINRMRIVPLPGGDRQGTSGAGAGRGSMRSASRNRRLARPPGQSTNPPSPPVSLVSAGSSQAQHTAPAAGERVRRMRWSSQMNANAMRAYFRATGGNTGATGYRVVMFREFLLLEPSITIAEQNLADRVRYIQRSNVFSAAELEQLRRETVFVMDDAPHVEDVSPQPDSIQETEHNPQNVAEENITVTVSQDLEQLRSVLEETMAEYRQVPLELRPLLPRVPLSIKVRDVVGAINQLLPPFLESSIDLWDTDTVLFSAAMAVCRIVGVRMPGTGSTTPRSSRIPAWQRRINRRITRARILIGKLTSFRSGNTRPRVMRFVAEAFAGQDIDMSQPDFAQNITERIDYLKQKIAAWGKRLRRYSEMVKRHHHNRLFESDQKKFYRILERPETRPTGDRPEQADVVAFWRSLWSQPVTHQEGPWIGAVEGRCASITPMNAVRISEEDVTTAVRKAPNWKSPGPDGLQHYWLKGFWRSHATLAKQFQQALDVGTLPNFLTTGVTHLAPKSEDTADPSKYRPITCLCTLYKTLTSVLSSKISQHVVENHIISDAQNGCRGGSRGSKELLLIDAVASKLVRGNRRNFSAAWIDYKKAFDSVPHSWLLRVLELYKVDGSVRHFLGACMGQWSTILSLAGERMTAADDRIRIKRGIFQGDCLSPLWFCLSLNPLSQLLEESAMGFQFRRGGMRMPHLLYMDDLKLFGPTAERLRELLKITDDFSKSIRMELGVEKCAVLHVERGHVVCSNGVDVSSNRLKSLSETETYRYLGMSQTIGVNEADVKQAVCEVFYGRLTKVLESFLSGGNKARAYNASVMPVLMYTFGVLRWSQTELDALDRKVRTTMTFHRMHHPRSSVMRLYLPRKCGGQGLLSAKTMHNREICSLRNYFLAKTDDGIHSEVVACDKGLTPLSLASEEWREPVVLSTAERESVWRGKELHGRFYKALHEPHVDKKASLHWLRFGDLFGETEGFVCAIQDQVIKTRNYRKYIIKDGTQDICRACAHPGESLRHVISGCSALANTEYLHRHNQVAKILHQELAYKYGLVDQRVPYYKYSPAPVLENDRAKLYWDRSVITDMTILANKPDIVLMDRTQSWVFLVDITIPHDENLVKAETEKKRKYLDLAHEVTDMWGVASTEIIPIVLSANGLIPTSLENNLRLLGFRSSSLPARMQKAVLLDTARIVRRFLSLGL

SEQ ID NO: 14454 - protein, 1194 aa, Parnassius apollo
MMEYAKTRKGPLPGGRQGASGAGAGRDSMRTASRARGAARPPISPSHPSSPPAGLVSAGSSRAQQSAPATGGVRRMRWTTEMNTNALRAYFRAKGGEVGGLAYRARMHRLFAELEPSLTVSEQNLADRVRYILRSNIFDVAELARLRREAVPSSDENATAEDAAPQIAEQPANVNAAVNTPVVVDSNDDGTVAQELELEHMRSTLEEAIVETRSTPFENRPRLPRIALSKRNRAVVRALNPMLVTYLEASRDLCETDSILFGAALAVCRIIGAKLSTAGRATGQSSAIPAWRIRIEERIAKARALIGRLIRFRSGNNRPRIVRTVRMAFAGTNVSLSQPNIMQKLTERINDLKQRIAAWGKRIRRYTERSTRFNQNRLFQSDQKRLYKSLERPMVSGTGPAPNQADTVAFWRGLWSEPINHSEGPWTEVVASQCASITPLDPVIITPDYVAEAVRRGPNWKSPGLDGLHHYWLKGFVVCHTVLARQFQEALNQKSLPSLFTTGITHLVPKDQVTTDPSKYRPITYLPTIYKTLTSILSARITRHLESNQVMSRAQNGCRGGGCGTKEPLLIDAVIGKVVKRNRRNFSAAWIDYRKAFDSVPHTWLKRVLELYKIDCTVRDFLEQCMGQWSTILCHLGERVTAAESRIRIRRGIFQGDCLSPIWFCLSLNPLSTLLQGSGRGFQLRKGGTKVTHLFYMDDLKLFASSRSHLMELLNITCEFSNSIGMELGTDKRAVFHVERGRVANSEGIDLSMPVNLRTLSEAETYRYLGMSQNIGIDEAGMKQSVCDTFYARLTKVLNSLLSSVNKAHAYNGWVMPVLMYTFGILRWTQTELNALDRKVRTTMTSHRMHHPRSSVMRLYLPRKHGGRGFLSALTMHNREVCASYSLRNYFLVRSDDPFYNDVISSDKGLTPLSLANEQWQDPAVQSISDRETVWKEKELHGRYYRVLHDPFVDTVASLNWLRFGDLFGETEGFVCAIQDQVIKTNNYRRYILKDGTIDVCRACRHPGESLRHVISGCSALSNSEYLHRNNLVARILHQELALKYGLVDRKLPYYKYLPEAVLENDRARLYWDRAIITDRTILANKPDIVLMDRAQSRIFLVDITIPYDENLVKAETDKRTKYLDLAHEVTDMWGGLPAEIIPVVVSANGLIPVSLSGHLRRLGLRDGPLRAQMQKAVLLDTARIVRRFLSLSS

SEQ ID NO: 14455 - protein, 1115 aa, Parnassius apollo
MRWTTQMNSNALRAYFRAKGGETGCLAYWARMHRLFAELEPSLTVTEQNLADRVRYILRSNIFDVAELERLRREAVPSSDENATAEDAVPQMVEQPANVDAAVNTPVVVDSNDDGTVAQELELEHMRSTLEEAIVETRSTPLENRPRLPRIALSKRNRAVVRALNPMLVTYLEASRDLCETDSILFGAALAVCRIIGAKVSTAGRATGHSSAIPAWRRRIEERIAKARALIGRLICFRSGNNRPRIVRTVRMAFAGTNVSLSQPDITQKLTERIDDLKQRIAAWGKRIRRYTERSTRFNQNRLFQSDQKRLYESLERPMVSGTGPAPNQADTVAFWRGLWSEPVNHSEGPWTEVVASQCAGITPMDPVIITPDDVAEAVRRAPNWKSPGLDGLHHYWLKGFMVCHSVLARQFQEALNQKSLPSLFTTGITHLVLKDQGTTDPSKYRPITCLPTIYKTLTSILSARITCHLDSNQVMSRAQNGCRGGGRGTKEPLLIDAVIGKVVKRNRRNFSAAWIDYRKAFDSVPHTWLKRVLELYKIDCTVRDFLEQCMGQWSTILCHLGERMMAAENHIRIRRGIFQGDCLSPIWFCLSLNPLSTLLEGSGRGFQLRKGGTKVTHLFYMDDLKLFASSRLHLMELLNITCEFSNSIGMELGTDKCAVLHVERGRVANSEGVDLSMPVNLRTLSEAETYRYLGMSQNIGIDETGMKQSVCYVFYARLTKVLNSLLSGVNKAHAYNGWVMPVLMYTFGILRWTQTELNALDRKVRTTMTSHRMHHPRSSVMRLYLSRKHGGRGFLSALTMHNREVCSLRDYFLARSDNPLYKDVISCDKDLTLLTLANEQWQEAVQSISDRETVWKEKERHGRFYKDLHEPFVDTVASLHWLRFGDLFGETEGFVCAIQDQVIKTNNYRRYILKDGTVDICRACRHPGESLRHVISGCSALSNSEYLHRHNLVARILHQELALKYGLVDRKLPYYKYLPEAVLENDRARLYWDRAIITDRTILANKPDIVLMDRAQSRIFLVDITIPYDENLVKAETDKQTKYLDLAHEVTDMWGGLPTEIIPVVVSANGLIPVSLSGHLRRLGLRGGPLQVQMQKAVLLDTARIVRRFLSLSP

SEQ ID NO: 14456 - protein, 862 aa, Parnassius apollo
MAFAGTNVSLSQPDIMQKLTERIDDLKQRIAAWGKRIRRYTERSTRFNQNRLFQSDQKRLYKSLERPMVSGTAPVPNQADTVAFWRSLWSEPVNHNEGPWTEVVASQCAGITPMDPVTITPDDIAEAVRRAPNWKSPGLDGLHHYWLKGFVVCHTVLARQFQEVLNQKSLPSLFTTGITHLVPKSQGTTDPSKYHPITCLPTIYKTLTTILSARITRYLDSNQVMSRAQNGCRGGGRGTKEPLLIDAVIGKVVKRNRRNFSAAWIDYRKAFDSVPHTWLKRVLELYKIDCTVRDFLEQCMGQWSTILCHLGERMMAAENHIRIRRGIFQGDCLSPIWFCLSLNPLSTLLEGSGRGFQLRKGGTKVTHLFYMDDLKLFASHLMELLNITCEFSNSIGMELGTDKCAVLHVERGRVANSEGIDLSMPVNLRTLSEAETYRYLGMSLNIGIDEAGMKQSVCDVFYARLTKVLNSLLSGVNKTQAYNGWVMPVLMYTFGILRWTQTELNALDREVRTTMTYHRMHHPRSSVMRLYLPRKHGGRGFLSALTMHNREVCSLRNYFLARSDDPFYKDVISCDKGLTPLSLANEQWQDPAVQTISDRETVWKEKELHGRFYKSLHGPFVDTVTSLHWLRFGDLFGETEGFVCAIQDQVIKTNNYRRYILKDGSIDIYRACRHPGESLRHVISGCSALSNSEYLHRHNLVARILHQELALKYGFVDRKLPYYKYLPEAVLENDRARLYWDRAIITDRTILANKPDIVLMDRAQSRIFLVDITIPCDENLVKAETDKQTKYLDLAHEVTDMWGGLPTEIIPVVVSANGLMPVSLSGHLRRLGLRGGPLQAQMQKAVLLDTARIVRQFLSLSP

SEQ ID NO: 14457 - protein, 1015 aa, Parnassius apollo
MDAAVNIPFVVDSDDDGIVPHELEKMRSILEESMLETRSMPLENRQRLPRIPLSMRNRAVVLALNPMLVTYLEASRDLCETDSILFGAAMAVCRIIGAKLPIAGRATHQGSAIPAWRKRIEDRIAKAGALIGRLTSFRSGNIRPRVVRTVRMAFAGTNISLSQPDIAQKLTERIDDLKQKIAAWGKRIRRFSERSRRFNQNRLFQSDQKRLYKSLERPEVCGAGPGPDQADTVAFWRGLWSEPVNHSEGPWMEVVASQSASVTPMDIVTITPEDVAEAVRRAPNWKSPGLDGLHHYWLKGFEVCHAVVARQYLEALDQKSLPSLFTTGITHLVPKDQDTTDPSKYRPITCLPTIYKTLTSILSARIARHLELNQVMSRAQNGCRGGGRGTKEPLLIDAVIVKVVKRNHRNFSAAWIDYIKAFDSVPHAWLKRVLELYKIDCTIRDFLGQCMGQWSTILCYQGERMMAAENHIRIRRGIFQGDCLSPIWFCLSLNLLSTLLEGSRRGFQLRKGGTKVTHLFYMDDLKLFASSRSHLMELLNITCEFSNSIGMELGTDKCAVLHVERGRVANSEGIDLSMPVNLKTLSEAETYRYLGMSQNIGIDEAGMKQSVCDVFYARLTKVLNSLLSGVNKTHAYNGWVMPVLIYTFGILRWTQTELNALDRKVRITMTSHRMHHPRSSVMRLCLPRKHGGRFLSVLTMHNREVCSLRDYFLARSDDPFYNDVISGDKGLTPLSLAHEQWQDPAVLSISDRETVWKEKELHGRYYRALHEPFVDTVAPLNWLRFGDLFGETEGFVCAIQDQVIKTNNYRRYILKDGTVDVCRACRHPGESLRHVVSGCSALSNSEYLHRHNLVARILHQELALKYGLVDRKLPYYKYLPEAVLENDRARLYWDRAIITDRTILANKPDIVLMDRAQSRIFLVDITIPYDENLVKAETDKQTKYLDLAHEVTDMWGGLPTEIIPVVVSANGLIPVSLSGHLRRLGLRGEPLRAQMQKAVLLDTARIVRRFLSLSP

SEQ ID NO: 14458 - protein, 1187 aa, Parnassius apollo
MLESNGTRKGPLPGGRQGASGAGAGRDSMRTASRARGAARPPSSSSHPSSPPAGLVSAGSSRAQQSAPATGGVRRMRWTTQMNSNALRAYFRAKGGETGGFAYRARMHRLFAELEPSVTVTEQNLADRVRYILRSNTFDVTELERLRREAVPSSGENAAAEDAAPQLAEQTANVDAAVNTPVVIDSNDDGTVAQELELEQMRSTLEEAIVETRSTTLENRPRLPRLALSKRNRAVVRALNPMLVTYLEASRDLCETDPILFGAALAVCRIIGAKLSTAGRATGQSSAIPAWRIRIEERIEKARALIGRLICFRSGNTRPRIVRTVRMAFAGTNVSFSQPDIMQKLTERIDDLKQRIAAWGKRIRRYTERSTRFNQNRLFQSYQKRIYKSLERPIVSGTGPAPNQADMVRWSEPVNHNEGPWTEVVASQCASITPMDPVIITPDDVAEAVRRASNWKSPGLDGLHHYWLKGFMVCHFVLARQFQDALNQKSLPSLFTTGITHLVPKDQGATDIQKYRPITCLPTIYKTLTSILSARIARHLDLNQVMSRAQNGCRGGGRGTKEPLLIDAVIGKVVKRNRRNFSAAWIDYRKAFDSVPHTWLKRVLELYKIDCTVRDFLEQCMGQWSTILCHLGERMTAAESRIRIRRGIFQGDCLSPIWFCLSLNPLSTLLEGSGRGFQLRKGGTKVTHLFYMDDLKLFASSRSHLMELLNITCEFSNSIRMELGTDKCAVLHVERGRVANSEGIDLSMPVNLRTLSVAETYRYLGMSQNIGIDEAGMKQSVCDVFYARLTKVLNSLLSGVNKAHAYNGWVMPVLMYTFGILRWTQTELNALDRKVRTTMTSHRMHHPRSSVMRLYLPRKHGGRGFLSALTMHNREVCSLRDYFLARLDDPFYKDVISCDKGLTPLSLANEQWQDPAVQSISDREMEVWKEKELHGRFYKALHEPFVDTVASLHWLCFGDLFGETEGFVCAIQDQVIKTNNYRRYILKDGTVDICRACRHPGESLRHVISGCSALSNSEYLHRHNLVARILHQELALKYGLVDRKLPYYKYLPEAVLENDRARLYWDRAIITDRTILANKPDIVLMDRAQSRIFLVDITIPYDENLVKAETDKQTKYLDLAHEVTDMWGGLPTEIIPVVVSANGLIPVSLSGHLRRLGLRGGPLQVQMQKALLLDTARIVRRFLSLSP

SEQ ID NO: 14459 - protein, 1185 aa, Papilio machaon
MMDLRGTRIGPLPGGRRGASGAGAGRGSMRVASQGVDRPSVNPSHPSSPPAGLVLAGPSRAQPSAPAARGLRRMRWTMDANQNALRAYFRAKGGETGGIAYRARMHRFFSELEPSITVTEQNLADRVRYILRSNLFEGAELERLKHEAVSASDAPTSARRTVPQTTVQPPAVEPAECLAGVGDEEEEMAAQDIEQMRRILEEAIVETRRMPFENRPRLPRIPLSKRNRNVVRALNPMLNVYLADSRDLCDTDSILFGAAKAVCRYIGAKLPKTGGSTNHRSVVPAWRKRIEDRIAKARALIGRLISFRSGNNRPRIVRSVRMALGGTEVSLSHPDIERKLMERIDDLKQRIAAWGKRIRRYNERTKRFNQNRLFQSDQKRFYKQLERQESTRGTGAGPDQTATVAFWRNIWSVPVDHSEGSWMQVVEGTCSKITPMDPVAITAADVAHALRRTPNWKSPGLDGLHCYWLKGFVSCHAVLAQQFQEALDSKSLPDLFTMGVTHLVPKDQITADPAKYRPITCLSTVYKTLTSILCEKITRHLNANQVISDAQNGCRGGSRGAKEPLLIDAVIGKLVKRNRRNLDAAWVDYKKAFDSVPHSWLKRVLELYKVDCTVRDFLGHCMGQWSTTLCLLGERMTAAEDRIRIRRGIFQGDCLSPIWFCLALNPLSTLLEDSGRGFQLRRGGAKVTHLFYMDDLKLFAPNYTQLLELLQITSDFSNAIRMEFGTDKCAAVHVEKGRITSSEGTDNPLNFRTLSEAETYRYLGMSQNVGVDEGSVKQSVRDVFFDRLTKVLNSLLSGANKARAYNCWVMPVLTYTFGILRWTQTELDALDRKVRTVMTSHRMHHPRSSIMRLYLPRKHGGRGLLSALTMHNREVCSLRSYYLAKSGDGIHTDVISCDKGLTPLSLANEQWQDPAVQSVSDREAIWKEKELHGRFYKALHEPFVDTVSSHHWLRFGDLFGETEGFVCAIQDQVIKTNNYRRYILKDGTVDICRACRRPGESLRHVISGCSALSNTEYLHRHNLVARIVHQELALKYGLLDVRLPYYKYVPEAVLENNRARLYWDRSIITDRTIPANKPDIVLMDRAQSGIFLVDIAIPHDENLENAATEKKRKYLDLAHEVSDMWGSLSTEIIPIVVSANGLIPVSLSGYLRRLGLRDGVLRAQMQKAVLLDTARIVRRFLSLSP

SEQ ID NO: 14460 - protein, 1047 aa, Boloria selene
MENNNKNARLGPLPGGRQGAPGAGAGRDSIRAASTTNRPALPPSRPTHPSPPPVGLVPTGSSRTQTSGPAAGGVRRMRWTSQMNENVMRAYYRATGGETGRTGYRAAMYREFLLLEPTLTVTEQNLADRARYIQRSNILNATELERLRREAVPEVRTLKTEQIVPPAATGEDVLTNFHDLPIEGGTQETVALDTERMRRILEEAVSEIRSAPLENRPRLSRLTLNVATREVIEAINQLLPQHLESSIGLDDTASILFGAALAVHRFVGARTPGPERDTAARCKAQPAWKKRIERRINHARGLIGRLQSFRSGNTRPRIVRSVRIAFNGLGVRLDQPDIAQKLTERIDDLKQRIAAWGSRIRRYSERVERFQQNRLFSSDQKRFYRTLECPAVCSTSQKPSPADLVAFWRNVWSKEVQHEEGPWIAAVEEACAVIKPMSPVAISAEDVVDAVRRAPNWKSLGPDGLHHYWLKGFSVCHVTLARQFQEALEQRTLPNLFTTGITHLAPKSTDAADPAKYRPITCLTTIYKTLTSVLSSKISRHVDENNIISGAQNGCRGRSRGTKELLLIDSVAGQLVKRNRRNFSAAWIDYKKAFDSVPHSWLSRVLELYKVDSTVRNFLGKCMGQWSTILSLHGERITAADDRIRIRRGIFQGDCLSPLWFCLSLNPFSSLLESSGTGFQFRRGGTRVPHLLYMDDLKLLAPNANRLQELLKITSEFSNSIRMKLGLDKCAVLHVVRGQVTHSAEINLEPSSIRTLSESESYRYLGMSQSIGVNEADMKQSVCEAFFDRLTKVCKSFLSGANKVRAYNGWVMPVLMYTFGVLRWTQTELDTLDRRVRTTMTLYRIHHPKSSVMRLYIPRKCGGRGLLSVKTMHNREIANLRTYFETKGESPMHREVVECDKGLTPLSLAKTEWQAPVVLSTSDRETVWKEKEFHGRFFKALNEPNVDKKASVQWLRFGDLFGETEGFVCAIQDQVVKTRNYRKYILKDGTHDICRACGHPGESLRHVLSGCSALANTEYLHRHNQAAKILHQELALKHGLLDERLPY

SEQ ID NO: 14461 - protein, 1047 aa, Boloria selene
MENNNKNARLGPLPGGRQGAPGAGAGRDSIRAASTTNRPALPPSRPTHPSPPPVGLVPTGSSRTQTSGPAAGGVRRMRWTSQMNENVMRAYYRATGGETGRTGYRAAMYREFLLLEPTLTVTEQNLADRARYIQRSNILNATELERLRREAVPEVRTLKTEQIVPLAATGEDVLTNFHDLPIEGGTQETVALDTERMRRILEEAVSEIRSAPLENRPRLSRLTLNVATREVIEAINQLLPQHLESSIGLDDTASILFGAALAVHRFVGARTPGPERDTAARCKAQPAWKKRIERRINHARGLIGRLQSFRSGNTRPRIVRSVRIAFNGLGVRLDQPDIAQKLTERIDDLKQRIAAWGSRIRRYSERVERFQQNRLFSSDQKRFYRTLECPAVCSTSQKPSPADLVAFWRNVWSKEVQHEEGPWIAAVEEACAVIKPMSPVAISAEDVVDAVRRAPNWKSLGPDGLHHYWLKGFSVCHVTLARQFQEALEQRTLPNLFTTGITHLAPKSTDAADPAKYRPITCLTTIYKTLTSVLSSKISRHVDENNIISGAQNGCRGRSRGTKELLLIDSVAGQLVKRNRRNFSAAWIDYKKAFDSVPHSWLSRVLELYKVDSTVRNFLGKCMGQWSTILSLHGERITAADDRIRIRRGIFQGDCLSPLWFCLSLNPFSSLLESSGTGFQFRRGGTRVPHLLYMDDLKLLAPNANRLQELLKITSEFSNSIRMKLGLDKCAVLHVVRGQVTHSAEINLEPSSIRTLSESESYRYLGMSQSIGVNEADMKQSVCEAFFDRLTKVCKSFLSGANKVRAYNGWVMPVLMYTFGVLRWTQTELDTLDRRVRTTMTLYRIHHPKSSVMRLYIPRKCGGRGLLSVKTMHNREIANLRTYFETKGESPMHREVVECDKGLTPLSLAKTEWQAPVVLSTSDRETVWKEKELHGRFFKALNEPNVDKKASVQWLRFGDLFGETEGFVCAIQDQVVKTRNYRKYILKDGTHDICRACGHPGESLRHVLSGCSALANTEYLHRHNQAAKILHQELALKHGLLDERLPY

SEQ ID NO: 14462 - protein, 1191 aa, Bicyclus anynana
MMMEQQRARLGPLPGGRQGASGAGAGRGSMRAASQHSRPALPPDRSTLPSSPSEGLVSTGSPRAQSSEPAAGGVRRMKWTCDMNKNVMRAYYRATGGETGRTGYRAAMYREFLLLEPHLTVTEQNLADRARFIQRSNIFNATELERLRREAVPEVPTSSAEQIVSPAAPVREETEPMSQDLHAEEEDTEGTVSLDLERMRRILEETIAEIRNAPLENRPRLSRIPLNIATRDVIEAVNKMLPQHLAGSTGLDDTASILFGAALTVHRFIGIKTKEPGRPGRSVNNIRAEPAWKRRIERRITLARGLIGRLLCFRLGNRRPRIVRSVRIAFNGLGVRLDQPDITLKLTERIDELKQKIAAWGNRIRRYSERVERFQQNRLFSSDQKRFYNRLECPAVCSTSPQPNPADLIAFWRNIWSREVEHDEGPWISAIEETCAAIRPMNPVAISTEDVVGAVRRAANWKSPGPDGLHHYWLKAFSTCHVTLARQFQEALEQGTLPNLFTTGITHLAPKTTDTVDPSKYRPITCLTTIYKTLTSVLSSKITRHVDDNNIMSGAQNGCRGGSRGTKELLLIDSVAGQLVKRNRRNFAAAWIDYKKAFDSVPHSWLLRVLELYKIDCTVQDFLRSCMGQWSTILCLHGERLAAADDRIRIRRGIFQGDCLSPLWFCLALNPLSTLLEGSGTGFQFRRGGTKVPHLLYMDDLKLLAPNATRLQELLNLTTGFSNSIRMELGLDKCAVLHVERGQVTHTVGINPDLLNIKTLSETESYRYLGMSQSIGVQEADMKQSVCEGFYRRLTKICKSYLSGANKIRAYNGWVMPVLMYTFGVLRWTQTELDVLDRRVRTTMTLYRMHHPKSSVMRLYVPRKCGGRGLLSAKTMHNREICSLRTYFETKRESPMHTEVIACDKGLTPLSLANSEWQKPVVQSISDRETVWKGKELHGRFFKALHEPHVSKKASVQWLRFGDLFGETEGFVFAIQDQVVKTRNYRKYILKDGTHDICRACHHPGESLRHVLSGCSALANTEYLHRHNQAAKILHQELALTYGLLDQRLPYYKYTPVPVLERDGVRLYWDRSIITDRTILANKPDIVVLDRAQSRVFLVDITIPYDENLVRAETEKKRKYLDLAHEVTAMWHVESTEIIPIVISANGLIPVSLAHHLRRLGFCGSSLAGKMQKAVLLDSARIVRRFLHLSP

SEQ ID NO: 14463 - protein, 1126 aa, Parnassius apollo
MMAQRGTRIGPLPGGRRGASGAGAGRGSMRAASRARGAARSPSSPSHPSSPPEGLVSAGSSRTQQAAPAAGGARRMRWTKPMNENALRAYYRAKGEETVGIAYRSRMHCFFAELEPSTPVTEQNLADRVRYIMRSKIFDDAELGRLRREAIPSSNESAMAGDAAPHSTDQHPHVEAALDLPVVVDSNDDGIVSHELEKMRSILEEAILETRSTPIENRPRLPRIPLSKRNRAVVRALNPMLVTYLEASRDLCETDSILFGAAVAVCRIIGAKLPMAGRATTQSSAIPAWRKRIEDRIAKARALIGRLTSFRSGNNRPRIMRTVRMAFAGTNISLSQPDITQKLTERIDDLKQKIAAWGKRIRRFTDRSRRFNQNRLFQSDQKRLYKSLERPKVCGAGQGPDQADIIAFWRGLWSEPVNHSEGPWMEVVASQGASVTPMDPITVTPEDVAEAVRRAPNWKSLPTIYKTLTSILSARITRHLELNQLMSRAQNGCRGGGRGTKEPLLIDAVIGKVVKRNRRNFSAAWIDYRKAFDSVPHTWLKRVLELYKIDCTVRDFLEQCMGQWSTILCHLGERMMAAENHIRIRRGIFQGDCLSPIWFCLSLNPLSTLLEGSGRGFQLRRGGTKVTHLFYMDDLKLFASSRSHLMELLNITCEFSSSIGMELGTDKCAVLHVERGRVANSERIDLSMPVNLRTLSEAETYRYLGMSQNIGIDEAGMKQSVCDVFYARLTKVLNSLLSGVNKSHAYNCWVMPVLMYTFGILRWTQTELNALDRKVRTTMTSHRMHHPRSSVMRLYLPRKHGGRGFLSALTMHNREVCSLRQYFLTRSDDPFYNDVISSDKGLTPLSLANEQWQDPAVLSIPDRETVWKEKELHGRYYKALHEPFVDTVASLNWLRFGDLFGETEGFVCAIQDQVIKTNNYRRYILKDGTVDVCRACRHPGESLRHVISGCSALSNSEYLHRHNLVARILHQELALKYGLVDRKVPYYKYLPEAVLENDRARLYWDRAIITDRTILANKPDIVLMDRAQSRIFLVDITIPYDENLVKAETDKQSKYLDLAHEVTDMWGGMPTEIIPVVVSANGLIPVSLSGHLRRLGLRDGPLRAQMQKAVLLDTARIVRRFLSLSP

SEQ ID NO: 14464 - protein, 1193 aa, Parnassius apollo
MRAASRARGAARSSTSPPHPSSPPEGLVSAGSSRTQQAAPAAGGARRMRWSQEMNANALRAYFRAKGEETGCLAYRARMHRLFAELEPSLIVTEQNLADRVRYILRSNIFDVAELERLRREAVPSSDENATAEDAAPQMVEQPANVDAAVNTPVVVDSNDDGTVAQELELEHMRSILEEAIVETRSTPLENRPRLPRIALSKRNRAVVRALNPMLVTYLEASRDLCETDSILFGAALAVCRIIGAKVSTAGRATGHSSAIPAWRRRIEERIAKARALIGRLICFRSGNNRPRIVRTVRMAFAGTNVSLSQPDITQKLTERIDDLKQRIAAWGKRIRRYTERSTRFNQNRLFQSDQKRLYESLERPMVSGTGPAPDQADTVAFWRGLWSEPVNHSEGPWTEVVASQCAGITPMDPVIITPDDVAEAVRRAPNWKSPGLDGLHHYWLKGFMVCHSVLARQFQEALNQKSLPSLFTTGITHLVPKDQGTTDPSKYRPITCLPTIYKTLTSILSARITCHLDSNQVMSRAQNGCRGGGRGTKEPLLIDAVIGKVVKRNRRNFSAAWIDYRKAFDSVPHTWLKRVLELYKIDCTVRDFLEQCMGQWSTILCHLGERMMAAENHIRIRRGIFQGDCLSPIWFCLSLNPLSTLLEGSGRGFQLRKGGTKVTHLFYMDDLKLFASSRSHLMELLNITCEFSNSIGMELGTDKCAVLHVERGRVANSEGVDLSMPVNLRTLSEAETYRYLGMSQNIGIDETGMKQSVCDVFYARLTKVLNSLLSGVNKAHAYNGWVMPVLMYTFGILRWTQTEHNALDRKVRTTMTSHRMHHPRSSVMRLYLPRKHGGRGFLSALTMHNREVCSLRDYFLARSDDPFYKDVISCDKGLTPLSLANEQWQDPAVQSISDRETVWKEKELHGRFYKALHEPFVDTVASLHWLRFGDLFGETEGFVCAIQDQVIKTNNYRRYILKDGTVDICRACRHPGESLRHVISGCSALSNSEYLHRHNLVARILHQELALKYGLVDRKLPYYKYLPEAVLENDRARLYWDRAIITDRTILANKPDIVLMDRAQSRIFLVDITIPYDENLVKAETDKQTKYLDLAHEVTDMWGGLPTEIIPVVVSANGLIPVSLSGHLRRLGLRGGPLQFQMQKAVLLDTARIVRRFLSLCPNPRPFGLPCRGPPSGWAFIYLCTFIFILCY

SEQ ID NO: 14465 - protein, 1181 aa, Bembecia ichneumoniformis
MMMSSNRVRIWPLPGGRRGTSRTNAGTGRGRGRASVIRGAGSPPSLPSNSSSPPGGLVPTGPSAAHNSASAAGGPRRRMAWTNAMNTNAMRAFYMATTTETGGTGYRARMHREFLQLEPGLTITEQNLSDRVRYIQRSGLFSAAELEQLRQEVTPDPNAASVVDASAPRRGGADYPVDPVQPRSDAETNSRPQYMQGEDEGVTTQEIERMRSTLEEAILEYRQTPLEVRQRLPRVPLSVKVRDVVEAINNMLPSYLESSTGLSDTDSILFGAAMAVCRIVGAKVHLPGRATHCNEVPAWQRRIESRITAARVLIGKLTSFRSGNTRPRVMRFVREAFPGERVNLSNPDMHRKLTERIDDLKQKIAAWGKRIRRYSERVKRYRQNRLFMSDQKKFYKGLGRPDDRVTGLGPNQAETIGFWRNLWSEPVTHEEGPWMETVEEACATISPMNPISITEDDVVAAVRKAPNWKSPGPDGLHGYWLKGFWRSHATLAVQFQEALESGALPNFLTTGVTHLTPKDGATADPSKYRPITCLCTIYKILTSILSSKIYRHVADNNILSEAQNGCKGGSRGSKELLLIDTAVCRLVKRNRRNFSAAWIDYKKAFDSVPHTWLLRVLELYKVDSTTRHFLETCMGQWSTMLSLSGERMTDAADRIRISRGIFQGDCLSPLWFCLALNPLSTVLEDSAIGFQFRRGGHQMSHLLYMDDLKLFAPNAHRLEELLKITENFSRSIRMEFGLDKCAVIHVERGRIIRSTNVEAGPRQMRSLSETETYRYLGMSESLGVRETVVKQSVGEEFWERLTKVLRSYLSGANKIRAFNGWVMPVLLYTFGVLRWSQTELDILDRRVRTTMISHRVRHPKSSVERLYIPRKCGGRGLLSAKTMHNREMCNLRNFFLTDSGGGLRRAIIECDNGLTPLSLSDQQWRELHGRFYKALHEPHVDRKASVHWLRFGDLFGETEGFVCAIQDQVVKTRNYRRYIIKDGTEDICRACRHPGETLRHVTSGCSALANTEYLHRHNQAARILHQELALKYGFLERRIPYYRYSPEPVLENSRAKLYWDRPIITDRTILANRPDIVLMDREQSRVFLVDVTIPHDDGLVKAETEKRRKYLDLAHEIVDMWAVASVEIIPVVLSVNGLIPVSLRDNLGRLGFRGGSLPGQMQRAVLLDTARIVRRFLSLSP

SEQ ID NO: 14466 - protein, 865 aa, Bembecia ichneumoniformis
MRFVREAFSGERINLSHPDVHRKLTERIDDLKQKIAAWGKRIWRYSERVKRYRQNRLFMSDQKKFYKSLERPDGRVTGPGPNQAETISFWRSLWSEPVTHEEGPWIEMVEEACATISPMNPISITEDDVVAAVRKAPNWKSPGPDGLHGYWLKGFWRSHATLAVQFQEALESGALPNFLTTGVTHLTPKDGATADPSRYRPITCLCTIYKILTSILSFKIYRHVADNNILSEAQNGCKGGSRGSKELLLIDTAVCRLVKRNRRNFSAAWIDYKKAFDSVPHTWLLRVLELYKVDSTTQHFLGTCMGQWSTMLSLSGERMTDAADRIRICRGIFQGDCLSPLWFCLALNPLSTILEDSAMGFQFRRGGHRMSHLLYMDDLKLFAPNAHRLEDLLQITENFSRSIRMEFGLEKCAVIHVERGRIIRSTNVEAGPRQMRSLSGTETYRYLGMSESLGVREAVVKQSVGEEFWERLTKVLRSYLSGANKIRAFNGWVMPVLLYTFGVLRWSQTELDTLDRRVRTTMISLRVRHPKSSVERMYIPRKCGGRGLLSAKTMHNREMCNLRNFFLTDSGGGLRRAIVECDNGLTPLSLSDQQWREPEVLSPSAREAVWKEKQLHGRFYKALHEPHVDRKASVHWLRFGETEGFVCEIQDQVVKTRNYRRYIIKDGTEDICRACRHPGETLRHVTSGCSALANTEYLHRHNQAARILHQELALKCGFLERRIPYYRYSPEPVLENSRAKLYWDRPIITDRTILANRPDIVLMDREESRVFLVDVTIPHDDGLVKAETEKRRKYLDLAHEIVDMWAVASVEIIPVVLSVNGLIPVSLRHNLGRLGFRGGSLPGQMQRAVLLDTARIVRRFLSLSP

SEQ ID NO: 14467 - protein, 991 aa, Bembecia ichneumoniformis
MSGMLEEAILEYRRTPLEMRPRLPRVPLSVKVQDVVGAINNMLPSYLESSIDLCDTDSILFGAAIAVCRIVGAKVHVPGRVARYNEIPAWQRRIESRIAWARVLIGKLTSFRSGNTRGRVVRFVRKAFPGETVNLSHPDMPRRLTERIDDLKQKIAAWGGRIRRYSERVKRYRQNRLFVSDQKKFYKSLECSDGRVTGPIPNQAEAVAFWRDLWSQPVTHAEGPWIETVEGACATIRPMNPITIVEDDVVAAVRKASNWKSPGPDGLHNYWLKGFWRSHATLARQFQRALENGTLPEFLTTGVTHLAPKDGATADPSKYRPITCLCTIYKTLTSILSSKIYRHIAENNIMSGAQNGCRGGSRGSKELLLIDTAVSRLVKRNRRNFSAAWIDYKKAFDSVPHTWLLRVLELYKVDGATREFLRACMGQWSTMLSLSGQRMTDAADRIRISRGIFQGDCLSPLWFCLALNPLSTILENSKLGFQFRRGGHRMSHLLYMDDLKLFAPNAHHLEELLQLTTDFSSSIGMEFGFDKCGVLHVERGRVLRSTDVEVGPGQMRSLSETETYRYLGMSESLGVMEKVVKQSVCEEFWERLTKVLRSYLSGANKVRAFNGWVMPILLYTFGVLRWSQTELDALDRRVRTSMISHRMRHPKSSVERMYVSRKCGGRGLLCAKTMHNREICNLRNFFLADSGGVLRRAVVECDNGLTPLFLADQQWRDPVIPSTSVREAVWKEKELHGRFYKALHESHIDRKASVHWLRFGDLFGETEGFVCAIQDGVVKTRNYQKYIIKDGTEDICRACRHPGETLRHITSGCSALANTEYLHRHNQAAKILHQELALKYGFIEERIPYYRYSPEPVFENSRAKLYWDRPIITDRTILANRPDIVLMDREQSRVFLVDVTIPHDDGLVKAETEKKRKYLDLAHEIVDMWAVASTEIMPVVISVNGLIPTSLKPEAVGIPWRFPPGPNAEGGAARYGQDRASVSVFVVLNPD

SEQ ID NO: 14468 - protein, 1197 aa, Bembecia ichneumoniformis
MMMNLNNKRIWPLPGGRRGTSRTNAGTGRGRGRASVRGAGSPPSLPSNSSSPPGGLVPIGPSAAQNSASAAGGTRRRMAWTNAMNMNAMRAFYMATMTETGGTGYRARMHREFLQLEPEVTVTEQNLSDRVRYIQRSGLFSAAELEQLRQEVAPDPNAAFIVDASAPRSGSTDHSVDPVQPRSDAETNSRPQYVQGEDEGVTAQEIERMRSILEEAILEYRQTPLEMRQRLPRVPLSVKVRDVVEAINNMLPSYLESSTGLSDTDSILFGAAMAVCRIVGAKVRVPGRATHCNEVPSWQRRIESRITAARVLIGKLTSFRSGNTRPRVMRFVREAFSGERVNLSHPDVHRKLTERIDDLKQKIAAWGKRIRRYSERVKRYRQNRLFMSDQKKFYKGLGRPDGRVTGPGPNQTETIAFWRNLWSEPVTHGEGPWMETVEEACATISPMNPITITEDDVVAAVRKAPNWKSPGPDGLHGYWLKGFWRSHATLAVQFQEALENGALPDFLTTGVTHLTPKDGATADPSKYRPITCLCTIYKILTSILSSKIYRHVADNNILSEAQNGCKGGSRGSKELLLIDTAVCRLVKRNRRNFSAAWIDYKKAFDSVPHTWLLRVLELYKVDSTTRHFLETCMGQWSTMLSLSGKRMTDAADRIRICRGIFQGDCLSPLWFCLALNPLSTVLEDSAIGFQFRRGGHQMSHLLYMDDLKLFAPNAHRLEELLQITENFSSSIRMEFGLEKCAVIHVERGRIIRSTNVEAGPRQMRSLSETETYRYLGMSESLGVRETVVKQAVGEEFWERLTKVLRSYLSGANKVRAFNGWVMPVLLYTFGVLRWSQTELDTLDRRVRTTMISHRVRHPKSSVERMYIPRKCGGRGLLSAKTMHNREMCNLRNFFLTDSGGGLRRAIVECDNGLTPLSLSDQQWRDPVVLSPSAREAVWKEKELHGRFYKALHEPHVDRKASVHWLRFGDLFGETEGFVCAIQDQVVKTRNYRRYIIKDGTEDICRACRHPGETLRHVTSGCSALANTEYLHRHNQAARILHQELALKYGFLERRIPYYRYSPEPVLENSRAKLYWDRPIITDRTILANRPDIVLMDREQSRVFLVDVTIPHDDGLVKAETEKRRKYLDLAHEIVDMWAVASVEIIPVVLSVNGLVPISLRDNLRRLGFRGGSLPGQMQRAVLLDTARIVRRFLSLSP

SEQ ID NO: 14469 - protein, 1169 aa, Bembecia ichneumoniformis
MVMDINGISIGPLPGGRQGTSRSRAGTGRGRGRASVPYPSPPAGLVPTGSSTTLHSASATGGTRRRMAWSTQMNSNAMRAFYRATSAVTGGTGYRAQMHQQFLQLEPGVNVTEQNLSDRVRFIQRSGLFSATELERLRREAVPELNSVQTREVSPQPSLNEEANVVRNDEEGTATQDLERMSGILEEAILEYRRTPLEMRPRLPRVPLNVKVRDVVGAINNMLPSYLESSIDLWDTDSILFGAAIAVCRIVGAKVHVPGRVSRYNEIPAWQRRIESRIAWARVLIGKLTSFRSGNTRTRVVRFVRKAFSGETVNLSHPDMPRRLTERIDDLKQKIAAWGGRIRRYSERVKRYRQNRLFVSDQKKFYKSLECSDGRVTGPIPNQAETVAFWRDLWSQPVTHAEGPWIETVEGACATIRPMNPITIIEDDVVAAVRKASNWKSPGPDGLHNYWLKRFWRSHATLARQFQGALENGTLPEFLTTGVTHLAPKDGATADPSKYRPITCLCTIYKTLTSILSSKIYRHIAENNIMSGAQNGCRGGSRGSKELLLIDTAVSRLVKRNRRNFSAAWIDYKKAFDSVPHTWLLRVLELYKVDGTTREFLRACMGQWSTMLSLSGQRMTDATDRIRISRGIFQGDCLSPLWFCLALNPLSTILENSRLGFQFRRGGHRMSHLLYMDDLKLFAPNAHHLEELLQLTTDFSSSIRMEFGFDKCGILHVERGRVIRSTDVEVGPGQMRSLSETETYRYLGMSESLGVMEKVVKQSVCEEFWERLTKVLRSYLSGVNKVRAFNGWVMPILLYTFGVLRWSQTELDALDRRVRTTMISHRMRHPKSSVERMYVSRKCGGRGLLCAKTMHNREICNLRNFFLADSGGVLRRAVVECDNGLTPLFLADQQWRDPVTPSTSVREAVWKEKELHGRFYKALHEPHIDRKASVHWLRFGDLFGETEGFVCAIQDGVVKTRNYQRYIIKDGTEDICRACRHPGETLRHITSGCSALANTEYLHRHNQAAKILHQELSLKYGFIEERIPYYRYSPEPVFENSRAKLYWDRPIITDRTILANRPDIVLMDREQSRVFLVDVTIPHDDGLVKAETEKKRKYLDLAHEIVDMWAVASTEIIPVVISVNGLIPTSLNSNLKRLGFRGGSLPAQMQKAVLLDTARIVRRFLSLSS

SEQ ID NO: 14470 - protein, 1167 aa, Bembecia ichneumoniformis
MVMDINGISIGPLPGGRQGTSRSRAGTGRGRGRASVPYPSPPAGLVPTGSSTTLHSASATGGTRRRMAWSTQMNSNAMRAFYRATSAVTGGTGYRAQMHQQFLQLEPGVNVTEQNLSDRVRFIQRSGLFSATELERLRREAVPELNSVQTREVSPQPSLNEEANVVRNDEEGTATQDLERMSGILEEAILEYRRTPLEMRPRLPRVPLSVKVRDVVGAINNMLPSYLEGSIDLCDTDSILFGAAIAVCRIVGAKVHVPGRVSRYNEIPAWQRRIESRIAWARVLIGKLTSFRSGNTRSRVVRFVRKAFSGETLSHPDMPRKLTERIDDLKQKIAAWGRRIRRYSERVKRYRQNRLFVSDQKKFYKSLECSDGRVTGPIPNPAETVAFWRDLWSQPVTHAEGPWIETVEGACATIRPMNPITIIEDDVVAAVRKASNWKSPGPDGLHNYWLKGFWRSHATLARQFQGALENGTLPEFLTTGVTHLAPKDGATANPSKYRPITCLCTIYKTLTSILSSKIYRHIAENNIMSGAQNGCRGGSRGSKELLLIDTAVSRLVKRNRRNFSAAWIDYKKAFDSVPHTWLLRVLELYKVDGTTREFLRACMGQWSTMLSLSGRRMTDAADKIRISRGIFQGDCLSPLWFCLALNPLSTILENSRLGFQFRRGGHRMSHLLYMDDLKLFAPNAHHLEELLQLTTDFSSSIGMEFGFDKCGVLHVERGRVIRSTGVEVGPGQMRSLSETETYRYLGMSESLGVVEKVVKQSVCEEFWERLTKVLRSYLSGANKVRAFNGWVMPILLYTFGVLRWSQTELDALDRRVRTTMISHRMRHPKSSVERMYVSRKCGGRGLLCAKTMHNREICNLRNFFLADSGGVLRRAVVECDNGLTPLFLADQQWRDPVIPSTSVREAVWKEKELHGRFYKALHEPHIDRKASVHWLRFGDLFGETEGFVCAIQDGVVKTRNYQKYIIKDGTEDICRACRHPGETLRHITSGCSALANTEYLHRHNQAAKILHQELSLKYGFIEERIPYYRYSPEPVFENSRAKLYWDRPIITDRTILANRPDIVLMDREQSRVFLVDVTIPHDDGLVKAETEKKRKYLDLAHEIVDMWAVASTEIIPLVISVNGLIPTSLNSNLKRLGFRGGSLPAQMQKAVLLDTARIVRRFLSLSS

SEQ ID NO: 14471 - protein, 1169 aa, Bembecia ichneumoniformis
MKMDNDDMSIGPLPGGRQGTSRSRAGTGRGRGRASVPYPSPPAGLVPTGSSTTQNSASATGGTRRRMAWSTQMNSNVMRAFYRATSAVTGGTGYRALMHQQFLQLEPGVNVTEQNLSDRVRFIQRSGLFSATELERLRREAVPELDSVQTREVSPQPSLNEEANVVRNDEEGTATQDLERMSGILEEAILEYRRTPLEMRPRLPRVPLNVKVRDVVGALNNMLPSYLESSIDLWDTDSILFGAAIAVCRIVGAKVHVPGRVSRYNEIPAWQRRIESRIAWARVLIGKLTSFRSGNTRSRVVRFVRKAFSGETVNLSHPDMPRKLTERIDDLKQKIAAWGRRIRRYSERVKRYRQNRLFVSDQKKFYKSLECSDGRVTGPIPNQAETVAFWRDLWSQPVTHAEGPWIETVVGTCATIRPMNPITIIEDDVVAAVRKASNWKSPGPDGLHNYWLKGFWRSHATLARQFQRALENGTLPEFLTTGVTHLAPKDGATADPSKYRPITCLCTIYKTLTSILSSKIYRHIAENNIMSGAQNGCRGGSRGSKELLLIDTAVSRLVKRNRRNFSAAWIDYKKAFDSVPHTWLLRVLELYKVDGTTREFLRACMGQWSTMLSLSGQRMTDATDRIRISRGIFQGDCLSPLWFCLALNPLSTILENSRLGFQFRRGGHRMSHLLYMDDLKLFAPNAHHLEELLQLTSDFSSSIGMEFGFDKCGVLHVERGRVLRSTDVEVGPGQMRSLSETETYRYLGMSESLGVMERVVKQSVCEEFWERLTKVLRSYLSGANKVRAFNGWVMPILLYTFGVLRWSQTELDALDRRVRTTMISHRMRHPKSSVERMYVSRKCGGRGLLCAKTMHNREICNLRNFFLADSGGVLRRAVVECDNGLTPLFLADQQWRDPVIPSTSVREAVWKEKELHGRFYKALHEPHIDRKASVHWLCFGDLFGETEGFVCAIQDGVVKTRNYQKYIIKDGTEDICRACRHPGETLRHITSGCSALANTEYLHRHNQAAKILHQELALKYGFIEERIPYYRYSPEPVFENSRAKLYWDRPIITDRTILANRPDIVLMDREQSRVFLVDVTIPHDDGLVKAETEKKRKYLDLAHEIVDMWAVASTEIIPVVISVNGLIPTSLNSNLKRLGFRGGSLPAQMQKVVLLDTARIVRRFLSLSS

SEQ ID NO: 14472 - protein, 1198 aa, Bembecia ichneumoniformis
MMMNLNGKRIWPLPGGRRGTSRTNAGTGRGRGRASVIRGAGSPPSLPSNSSSPPGGLVPIGPSAAQNSASAAGGPRRRMAWTNAMNTNAMRAFYMATTTETGGTGYRARMHREFLQLEPGLTITEQNLSDRVRYIQRSGLFSAAELEQLRQEVAPDPNAASVVDASAPRRGGADYPVDPVQPRSDAETNSRPQYMQGEDEGVTTQEIERMRSTLEEAILEYRQIPLEMRQRLPRVPLSVKVRDVVEAINNMLPSYLESSTGLSDTDSILFGAAMAVCRIVGAKVHLPGRATHCNEVPAWQRRIESRITAARVLIGKLTSFRSGNTRPRVMRFVREAFPGERVNLSNPDMHRKLTERIDDLKQKIAAWGKRIRRYSERVKRYRQNRLFMSDQKKFYKGLGRPDDRVTGLGPNQAETIDFWRNLWSEPVTHEEGPWMETVEEACATISPMNPISITEDDVVAAVRKAPNWKSPGPDGLHGYWLKGFWRSHATLAVQFQEALESGALPNFLTTGVTHLTPKDGATADPSKYRPITCLCTIYKILTSILSSKIYRHVADNNILSEAQNGCKGGSRGSKELLLIDTAVCRLVKRNRRNFSAAWIDYKKAFDSVPHTWLLRVLELYKVDSTTRHFLETCMGQWSTMLSLSGERMTDAADRIRISRGIFQGDCLSPLWFCLALNPLSTVLEDSAIGFQFRRGGHQMSHLLYMDDLKLFAPNAHRLEELLKITENFSRSIRMEFGLDKCAVIHVERGRIIRSTNVEAGPRQMRSLSETETYRYLGMSESLGVRETVVKQSVGEEFWERLTKVLRSYLSGANKIRAFNGWVMPVLLYTFGVLRWSQTELDTLDRRVRTTMISHRVRHPKSSVERLYIPRKCGGRGLLSAKTMHNREMCNLRNFFLTDSGGGLRRAIVECDNGLTPLSLSDQQWREPVVLSPSAREAVWKEKELHGRFYKALHEPHVDRKASVHWLRFGDLFGETEGFVCAIQDQVVKTRNYRRYIIKDGTEDICRACRHPGETLRHVTSGCSALANTEYLHRHNQAARILHQELALKYGFLERRIPYYRYSPEPVLENSRAKLYWDRPIITDRTILANRPDIVLMDREQSRVFLVDVTIPHDDGLVKAETEKRRKYLDLAHEIVDMWAVASVEVIPVVLSVNGLIPVSLRDNLGRLGFRGGSLPGQMQRAVLLDTARIVRRFLSLSP

SEQ ID NO: 14473 - protein, 1102 aa, Bembecia ichneumoniformis
MKMDHDELSIGPLPGGRQGTSRSRAGTGRGRGRASVPYPSPPAGLVPTGSSTTQNSASATGGTRRRMAWSTQMNANAMRAFYRATSAVTGGTGYRAQMHQQFLQLEPGVNVTEQNLSDRVRFIQRSGLFSATELERLRREAVPELDSVQTREVSPQPSLNEEANIVRNDEEGTVTQDLERMSGMLEEAILEYRRTPLEMRPRLPRVPLSVKVQDVVGAINNMLPSYLESSIDLCDTDSILFGAAIAVCRIVGAKVHVPGRVARYNEIPAWQRRIEGRIAWARVLIGKLTSFRSGNTRGRVVRFVRKAFPGETVNLSHPDMPRRLTERIDDLKQKIAAWGGRIRRYSERVKRYRQNRLFVSDQKKFYKSLECSNGRVTGSIPNQAETVAFWRDLSSQPVTHAEGPWIETVEGACATIRPMNPITIIEDDVVAAVRKASNWKSPGPDGLHNYWLKGFWRSHATLARQFQRALENGTLPEFLTTGVTHLAPKDGATADPSKYRPITCLCTIYKTITSILSSKIYRHIAENNIMSGAQNGCRGGSRGSKELLLIDTAVSRLVKRNRRNFSAAWIDYKKAFDSVPHTWLLRVLELYKVDGTTREFLRACMGQWSTMLSLSGQRMTDAADRIRISRGIFQGDCLSPLWFCLALNPLSTILENSRLGFQFRRGGHRMSHLLYMDDLKLFAPNAHHLEELLQLTTDFSSSIGMEFGFDKCGVLHVERGRVIRSTDVEVGPGQMRSLSETETYRYLGMSESLGIMEKVVKQSVCEEFWERLTKVLRSYLSGANKVRAFNGWVMPILLYTFGVLRWSQTELDALDRRVRTTMISHRMRHPKSSVERMYVSRKCGGRGLLCAKTMHNREICNLRNFFLADSGGVLRRAVVECDNGLTPLFLADQQWRDSVIPSTSVREAVWKEKELHGRFYKALHEPHIDRKAVHWLRFGDLFGETEGFVCAIQDGVVKTRNYQRYIIKDGTEDICRACRHPGETLRHITSGCSALANTEYLHRHNQAAKILHQELALKYGFIEERMPYYRYSPEPVFENSRAKLYWDRPIITDRTILANRPDIVLMDREQSRVFLVDVTIPHDDGLVKAEIEKKRKYLDLAL

SEQ ID NO: 14474 - protein, 1196 aa, Bembecia ichneumoniformis
MMMNLENDLRIWPLPGGRRGTSRTNAGTGRGRGRASVIRGAGSPPNLPSNSSSPPGGLVPIEPSVAQNSASAAGGPRRRMAWSNAMNINAMRAFYRATMIETGGTGYRARMHREFRQLEPEVTVTEQNLSDRVRYIQRSGLFSASELEQLRQEVVPDPNAASVVEASAQLRSGTDPHVQPRDCAETNSRPQHMQGEDEGITAQEIERMRSTLEEAILEYRQTPLEMRQRLPRVPLSVKVRDVVETINNMLPSYLESSTGLSDTDSILFGAAMAVCRIVGVKVRLPGRATHCNEVPAWQRRIESRITAARVLIGKLISFRSGNTRPRVMRFVREAFSGERVNLSHPDVHRKLTERIDDLKQKIAAWGKRIRRYSERVKRYRQNRLFMSDQKKFYKGLERPNGRVTGPGPSQAETISFWRSLWSEPVTHEEGPWMEVVEEACATISPMNPITITEDDVVVAVRKAPNWKSPGPDGLHGYWLKGFWRSHATLAIQFQEALETGALPNFLTTGVTHLAPKDGATADPSRYRPITCLCTIYKILTSILSSKIYRHVTDNNILSEAQNGCKGGSRGSKELLLIDTAVCRLVKRSRRNFSAAWIDYKKAFDSVPHTWLLRVLELYKVDSTTRHFLETCMGQWSTMLSLSGKRMTDAADRIGICRGIFQGDCLSPLWFCLALNPLSTVLEDSAIGFQFRRGGHRMSHLLYMDDLKLFAPNAHRLEELLQITENFSRSIRMEFGLDKCAVIHVERGRIIRSTNVEAGPRQMRSLSGTETYRYLGMSESLGVRETVMKQTVGEEFWERLTKVLRSYLSGANKIRAFNGWVMPVLLYTFGVLRWSQTELDTLDRRVRTTMISHRMRHPKSSVERMYIPRKCGGRGLLSAKTMHNREMCNLRNFFLTDSGGGLRRAIVECDNGLTPLSLSDQQWRDPVVLSPSAREAVWKEKELHGRFYKALHEPHVDRKASVHWLRFGDLFGETDGFVCAIQDQVVKTRNYRRYIIKDGTEDICRACRHPGETLRHVTSGCSALANTEYLHRHNQAARILHQELALKYGFLERRIPYYRYSPEPVLENSRAKLYWDRPIITDRTILANRPDIVLMDREQSRVFLVDVTIPHDDGLVKAETEKRRKYLDLAHEIVDMWAVASAEIIPVVLSVNGLIPISLRDNLRRLGFRGGSLPGQMQRAVLLDTARIVRRFLSLSP

SEQ ID NO: 14475 - protein, 1198 aa, Bembecia ichneumoniformis
MMMSSNRVRIWPLPGGRRGTSRTNAGTGRGRGRASVIRGAGSPPSLPSNSSSPPGGLVPTGPSAAHNSASAAGGPRRRMAWTNAMNTNAMRAFYMATTTETGGTGYRARMHREFLQLEPGLTITEQNLSDRVRYIQRSGLFSAAELEQLRQEVTPDPNAASVVDASAPRRGGADYPVDPVQPRSGAETNSRPQYMQGEDEGVTTQEIERMRSTLEEAILEYRQTPLEMRQRLPRVPLSVKVRDVVEAINNMLPSYLESSTGLSHTDSILFGAAMAVCRIVGAKVRLPGRATHCNEVPAWQRRIESRITAARVLIGKLTSFRSGNTRPRVMRFVREAFPGERVNLSNPDMHRKLTERIDDLKQKIAAWGKRIRRYSERVKRYRQNRLFMSDQKKFYKGLGRPDDRVTGLGPNQAETIGFWRNLWSKPVTHEEGPWMETVEEACATISPMNPISITEDDVVAAVRKAPNWKSPGPDGLHGYWLKGFWRSHATLAVQFQEALESGALPDFLTTGVTHLTPKDGATADPSKYRPITCLCTIYKILTSILSSKIYRHVADNNILSEAQNGCKGGSRGSKELLLIDTAVCRLVKRNRRNFSAAWIDYKKAFDSVPHTWLLRVLELYKVDSTTRHFLETCMGQWSTMLSLSGERMTDAADRIRISRGIFQGDCLSPLWFCLALNPLSTVLEDSAIGFQFRRGGHQMSHLLYMDDLKLFAPNAHCLEELLKITENFSRSIRMEFGLDKCAVIHVERGRIIRSTNVEAGPTQMRSLSETETYRYLGMSESLGVRETVVKQSVGEEFWERLTKVLRSYLSGANKIRAFNGWVMPVLLYTFGVLRWSQTELDTLDRRVRTTMISHRVRHPKSSVERLYIPRKCGGRGLLSAKTMHNREMCNLRNFFLTDSGGGLRRAIVECDNGLTPLSLSDQQWREPVVLSPSAREAVWKEKELHGRFYKALHEPHVDRKASVHWLRFGDLFGETEGFVCAIQDQVVKTRNYRRYIIKDGTEDICRACRHPGETLRHVTSGCSALANTEYLHRHNQAARILHQELALKYGFLERRIPYYRYSPEPVLENSRAKLYWDRPIITDRTILANRPDIVLMDREQSRVFLVDVTIPHDDGLVKAETEKRRKYLDLAHEIVDMWAVASVEIIPVVLSVNGLIPVSLRDNLGRLGFRGGSLPGQMQRAVLLDTARIVRRFLSLSP

SEQ ID NO: 14476 - protein, 1109 aa, Bembecia ichneumoniformis
MRAFYMATMTETGGTGYRARMHREFLQLEPEVTVTEQNLSDRVRYIQRSGLFGATELEQLRQEVTPDPNAAFVVDASAPRRGSTDYPVDPVQPRSGAETNNRPQHVQGEDEGITTQEIEQMRSTLEEAILEYRQTPLEMRQRLPRVPLSVKVRDVVEAINNMLPSYLESSTGLSDTDSILFGAAMAVCRIVGVKVRLPGRATHCNEVPAWQRRIESRIRETRVLIGKLTSFRSGNTRPRVMRFVREAFSGERVNLSHPDVHRKLTERIDDLKQKIAAWGKRIRRYSERVKRYRQNRLFMSDQKKFYKGLGRPDDRVTGPGPNQVETIAFWRNLWSEPVTHEEGPWMRTVEEACATISPMNPITITEDDVVAAVRKAPNWKSPGPDGLHGYWLKGFWRSHATLAVQFQEALENGALPDFLTTGVTHLTPKDGATADPSKYRPITCLCTLYKILTSILSFKIYRHVTDNNILSEAQNGCKGGSRGSKELLLIDTAVCRLVKRNRRNFSAAWIDYKKAFDSVPHTWLLRVLELYKVDSTTRHFLETCMGQWSTMLSLSGERMTDAADRIRISRGIFQGDCLSPLWFCLALNPLSTVLEDSAIGFQFRRGGHRMSHLLYMDDLKLFAPNAHRLEELLQITENFSRSIRMEFGLDKCAVIHVERGRIIRSTNVEVGPRQMRSLSGTESYRYLGMSESLGVRETVVKQSVGDEFWERLTKVLRSYLSGANKIRAFNSWVMPVLLYTFGVLRWSQTELDALDRRVRTTMISHRMRHPKSSVERMYIPRKCGGRGLLSAKTMHNREMCNLRNFFLTDSGGGLRRAIVECDTGLTPLSLSDQQWREPVVLSTSAREAVWKEKELHGRFYKALHEPHVDRKASVHWLRFGDLFGETEGFVCAIQDQVVKTRNYRRYIIKDDTEDICRACRHPGETLRHVTSGCSALANTEYLHRHNQAARILHQELALKYGFVEQRIPYYRYSPEPVLENSRAKLYWDRPIITDRTILANRPDIVLMDREQSRVFLVDVTIPHDDGLVKAETEKRRKYLDLAHEIVDMWAVASVEIIPVVLSVNGLIPVSLRDNLGRLGFRGGSLPGQMQRAVLLDTARIVRRFLSLSP

SEQ ID NO: 14477 - protein, 1169 aa, Bembecia ichneumoniformis
MKMDNDDMSIGPLPGGRQGTSRSRAGTGRGRGRASVPYPSPPAGLVPTGSSTTQNSASATGGTRRRMAWSTQMNSNVMRAFYRATSAVTGGTGYRALMHQQFLQLEPGVNVTEQNLSDRVRFIQRSGLFSATELERLRREAVPELDSVQTREVSPQPSLNEEANVVRNDEEGTATQDLERMSGILEEAILEYRRTPLEMRPRLPRVPLNVKVRDVVGAINNMLPSYLESSIDLWDTDSILFGAAIAVCRIVGAKVHVPGRVSRYNEIPAWQRRIESRIAWARVLIGKLTSFRSGNTRSRVVRFVRKAFSGETVNLSHPDMPRKLTERIDDLKQKIAAWGRRIRRYSERVKRYRQNRLFVSDQKKFYKSLECSDGRVTGPIPNQAETVAFWRDLWSQPVTHAEGPWIETVVGACATIKPMNPIAIIEDDVVAAVRKASNWKSPGPDGLHNYWLKGFWRSHATLARQFQRALENGTLPEFLTTGVTHLAPKDGATADPSKYRPITCLCTIYKTLTSILSSKIYRHIAENNIMSGAQNGCRGGSRGSKELLLIDTAVSRLVKRNRRNFSAAWIDYKKAFDSVPHTWLLRVLELYKVDGTTREFLRACMGQWSTMLSLSGQRMTDATDRIRISRGIFQGDCLSPLWFCLALNPLSTILENSRLGFQFRRGGHRMSHLLYMDDLKLFAPNAHHLEELLQLTSDFSSSIGMEFGFDKCGVLHVERGRVLRSTDVEVGPGQMRSLSETETYRYLGMSESLGVMERVVKQSVCEEFWERLTKVLRSYLSGANKVRAFNGWVMPILLYTFGVLRWSQTELDALDRRVRTTMISHRMRHPKSSVERMYVSRKCGGRGLLCAKTMHNREICNLRNFFLADSGGVLRRAVVECDNGLTPLFLADQQWRDPVIPSTSVREAVWKEKELHGRFYKALHEPHIDRKASVHWLRFGDLFGETEGFVCAIQDGVVKTRNYQKYIIKDGTEDICRACRHPGETLRHITSGCSALANTEYLHRHNQAAKILHQELALKYGFIEERIPYYRYSPEPVFENSRAKLYWDRPIITDRTILANRPDIVLMDREQSRVFLVDVTIPHDDGLVKAETEKKRKYLDLAHEIVDMWAVASTEIIPVVISVNGLIPTSLNSNLKRLGFRGGSLPAQMQKAVLLDTARIVRRFLSLSS

SEQ ID NO: 14478 - protein, 1208 aa, Bembecia ichneumoniformis
MGAPRCTQPTKMMMDLNEARIWPLPGGRRGTSRTSAGTGRGRGRASVRGAGSPPSLPSNSSSPPGGLVPIGPPAAQNSASAVGGPRRRMAWTNAMNMNAMRAFYMATMTETGGTGYRARMHREFLQLEPEVTVTEQNLSDRVRYIQRSGLFGATELEQLRQEVTPDPNAAFVVDASAPRRGSTDYPVDPVQPRSGAETNNRPQHVQGEDEGITTQEIEQMRSTLEEAILEYRQTPLEMRQRLPRVPLSVKVRDVVEAINNMLPSYLESSTGLSDTDSILFGAAMAVCRIVGVKVRLPGRATHCNEVPAWQRRIESRIRETRVLIGKLTSFRSGNTRPRVMRFVREAFSGERVNLSHPDVHRKLTERIDDLKQKIAAWGKRIRRYSERVKRYRQNRLFMSDQKKFYKGLGRPDDRVTGPGPNQVETIAFWRNLWSEPVTHEEGPWMRTVEEACATISPMNPITITEDDVVAAVRKAPNWKSPGPDGLHGYWLKGFWRSHATLAVQFQEALENGALPDFLTTGVTHLTPKDGATADPSKYRPITCLCTLYKILTSILSFKIYRHVTDNNILSEAQNGCKGGSRGSKELLLIDTAVCRLVKRNRRNFSAAWIDYKKAFDSVPHTWLLRVLELYKVDSTTRHFLETCMGQWSTMLSLSGERMTDAADRIRISRGIFQGDCLSPLWFCLALNPLSTVLEDSAIGFQFRRGGHRMSHLLYMDDLKLFAPNAHRLEELLQITENFSRSIRMEFGLDKCAVIHVERGRIIRSTNVEVGPRQMRSLSGTESYRYLGMSESLGVRETVVKQSVGDEFWERLTKVLRSYLSGANKIRAFNSWVMPVLLYTFGVLRWSQTELDALDRRVRTTMISHRMRHPKSSVERMYIPRKCGGRGLLSAKTMHNREMCNLRNFFLTDSGGGLRRAIVECDNGLTPLSLSDQQWREPVVLSPSAREAVWKEKELHGRFYKALHEPHVDRKASVHWLRFGDLFGETEGFVCAIQDRVVKTRNYRRYIIKDGTEDICRACRHPGETLRHVTSGCSALANTEYLHRHNQAARILHQELALKYGFLERRIPYYRYSPEPVLENSRAKLYWDRPIITDRTILANRPDIVLMDREQSRVFLVDVTIPHDDGLVKAETEKRRKYLDLAHEIVDMWAVASVEIIPVVLSVNGLIPVSLRDNLGRLGFHGGSLPGQMQRAVLLDTARIVRRFLSLSP

SEQ ID NO: 14479 - protein, 1169 aa, Bembecia ichneumoniformis
MKMDNSVIRIGPLPGGRQGTSRSRAGTGRGRGRASVLYPSPPAGLVPTGSSMTQHSASATGGTRRRMAWTTEMNSNAMRAFYRATSAVTGGTGYRALMHQQFLQLEPGVNVTEQNLSDRVRFIQRSGLFSATELERLRREAVPELDSVQTREVSPQPSLNEEANVVRNDEEGTATQDLERMSGILEEAILEYRRTPLEMRPRLPRVPLSVKVRDVVGAINNMLPSYLEGSIDLCDTDSILFGAAIAVCRIVGAKVHVPGRVSRYNEIPAWQRRIESRIAWARVLIGKLTSFRSGNTRSRVVRFVRKAFSGETVNLSHPDMPRKLTERIDDLKQKIAAWGRRIRRYSERVKRYRQNRLFVSDQKKFYKSLECSDGRVTGPIPNQAETVAFWRDLWSQPVTHAEGPWIETVEGACATIRPMNPITIIEDDVVAAVRKASNWKSPGPDGLHNYWLKGFWRSHATLARQFQGALENGTLPEFLTTGVTHLAPKDGATADPSKYRPITCLCTIYKTLTSILSSKIYRHIAENNIMSGAQNGCRGGSRGSKELLLIDTAVSRLVKRNRRNFSAAWIDYKKAFDSVPHTWLLRVLELYKVDGTTREFLRACMRQWSTMLSLSGRRMTDAADKIRISRGIFQGDCLSPLWFCLALNPLSTILENSRLGFQFRRGGHRMSHLLYMDDLKLFAPNAHHLEELLQLTTDFSSSIGMEFGFDKCGVLHVERGRVIRSTGVEVGPGQMRSLSETETYRYLGMSESLGVVEKVVKQSVCEEFWERLTKVLRSYLSGANKVRAFNGWVMPILLYTFGVLRWSQTELDALDRRVRTTMISHGMRHPKSSVERMYVSRKCGGRGLLCAKTMHNREICNLRNFFLADSGGVLRRAVVECDNGLTPLFLADQQWRDPVISSTSVREAVWKEKELHGRFYKALHEPHIDRKASVHWLRFGDLFGETEGFVCAIQDGVVKTRNYQKYIIKDGTEDICRACRHPGETLRHITSGCSALANTEYLHRHNQAAKILHQELSLKYGFIEERIPYYRYSPEPVFENSRAKLYWDRPIITDRTILANRPDIVLMDREQSRVFLVDVTIPHDDGLVKAETEKKRKYLDLAHEIVDMWAVASTEIIPVVISVNGLIPTSLNSNLKRLGFRGGSLPAQMQKAVLLDTARIVRRFLSLSS

SEQ ID NO: 14480 - protein, 1169 aa, Bembecia ichneumoniformis
MQMDNDESSIGPLPGGRQGTSRSRAGTGRGRGRASVPYPSPPAGLVPTGSSTTQNSASATGGTRRRMAWSTQMNANAMRAFYRATSAVTGGTGYRAQMHQQFLQLEPGVNVTEQNLSDRVRFIQRSGLFSATELERLRREAVPELDSVQTREVSPQPSLNEEANVVRNDEEGTATQDLERMSGMLEEAILEYRRTPLEMRPRLPRVPLSVKVQDVVGAINNMLPSYLESSIDLCDTDSILFGAAIAVCRIVGAKVHVPGRVSRYNEIPAWQRRIEGRIAWARVLIGKLTSFRSGNTRTRVVRFVRKAFSGETVNLSHPDMPRRLTERIDDLKQKIAAWGRRIRRYSERVKRCRQNRLFVSDQKKFYKSLECSEGRVTGPIPNQAETVAFWRDLWSQPVTHAEGPWIETVEGACAIIRPMNPITIIEDDVVAAVRKASNWKSPGPDGLHNYWLKGFWRSHATLARQFQRALENGTLPEFLTTGVTHLAPKDGATADPSKYRPITCLCTIYKTLTSILSSKIYRHIAENNIMSGAQNGCRGGSRGSKELLLIDTAVSRLVKRNRRNFSAAWIDYKKAFDSVPHTWLLRVLELYKVDDTTREFLRACMGQWSTMLSLSGQRMTDAADRIRISRGIFQGDCLSPLWFCLALNPLSTILENSRLGFQFRRGGHRMSHLLYMDDLKLFAPNAHHLEELLQLTTDFSSSIGMEFGFDKCGILHVERGRVIRSTNVEVGPGQMRSLSETETYRYLGMSESLGIMEKVVKQSVCEEFWERLTKVLRSYLSGVNKVRAFNGWVMPILLYTFGVLRWSQTELDALDRRVRTTMISHRMRHPKSSVERMYVSRKCGGRGLLCAKTMHNREICNLRNFFLADSGGVLRRAVVECDNGLTPLFLADQQWRDPVIPSTSVREAVWKEKELHGRFYKALHEPHIDRKASVHWLRFGDLFGETEGFVCAIQDGVVKTRNYQRYIIKDGTEDICRACRHPGETLRHITSGCSALANTEYLHRHNQAAKILHQELALKYGFIEERIPYYRYSPEPVFENSRAKLYWDRPIITDRTILANRPDIVLMDREQSRVFLVDVTIPHDDGLVKAETEKKRKYLDLAHEIVDMWAVASTEIIPVVISVNGLIPTSLNSNLKRLGFRGGSLPAQMQKAVLLDTARIVRRFLSLSS

SEQ ID NO: 14481 - protein, 1206 aa, Bembecia ichneumoniformis
MGAPRCTQPFNMMMNSKDIRIGPLPGGRRGTSRTNAGTGRGRGRASVLRGAGSPPRLPSNSSSPPDGLVPTEPPVAQNSASAAGGTRRRMAWTNAMNINAMRAFYRATMIETGGTGYRARMHREFRQLEPEVTVTEQNLSDRVRYIQRSGLFSASELEQLRQEVVPDPNAASVVEASARSRSGTDPHVQPRDCAETNSRPQHMQGEDEGITAQEIERMRSTLEEAILEYRQTPLEMRQRLPRVPLSVKVRDVVETINNMLPSYLESSTGLSDTDSILFGAAMAVCRIVGVKVRLPGRATHCNEVPAWQRRIESRITAARVLIGKLISFRSGNTRPRVMRFVREAFSGERVNLSHPDVHRKLTERIDDLKQKIAAWGKRIRRYSERVKRYRQNRLFMSDQKKFYKSLERPNGRVTGPGPSQAETISFWRSLWSEPVTHEEGPWMEVVEEACATISPMNPITITEDDVVVAIRKAPNWKSPGPDGLHGYWLKGFWRSHATLAIQFQEALETGALPNFLTTGVTHLAPKDGATADPSRYRPITCLCTIYKILTSILSSKIFRHVTDNNILSEAQNGCKGGSRGSKELLLIDTAVCRLVKRNRRNFSAAWIDYKKAFDSVPHTWLLRVLELYKVDSTTRHFLETCMGQWSTMLSLSGKRMTDAADRIRICRGIFQGDCLSPLWFCLALNPLSTVLEDSAIGFQFRRGGHQMSHLLYMDDLKLFAPNAHRLEELLKITENFSRSIRMEFGLDKCAVIHVERGRIIRSTNVEAGPRQMRSLSETETYRYLGMSESLGVRETVVKQSVGEEFWERLTKVLRSYLSGANKIRAFNGWVMPVLLYTFGVLRWSQTELDTLDRRVRTTMVSHRVRHPKSSVERLYIPRKCGGRGLLSAKTMHNREMCNLRNFFLTNSGGGLRRAIVECDNGLTPLSLSDQQWREPVVLSPSAREAVWKEKELHGRFYKALHEPHVDRKASVHWLRFGDLFGETEGFVCAIQDQVVKTRNYRRYIIKDGTEDICRACRHPGETLRHVTSGCSALANTEYLHRHNQAARILHQELALKYGFLERRIPYYRYSPEPVLENSRAKLYWDRPIITDMTILANRPDIVLMDREQSRVFLVDVTIPHDDGLVKAETEKRRKYLDLAHEIVDMWAVASVEIIPVVLSVNGLIPVSLRDNLGRLGFRGGSLPGQMQRAVLLDTARIVRRFLSLSP

SEQ ID NO: 14482 - protein, 1169 aa, Bembecia ichneumoniformis
MKMDNDDMSIGPLPGGRQGTSRSRAGTGRGRGRASVPYPSPPAGLVPTGSSTTQNSASATGGTRRRMAWSTQMNSNVMRAFYRATSAVTGGTGYRALMHQQFLQLEPGVNVTEQNLSDRVRFIQRSGLFSATELERLRREAVPELDSVQTREVSPQPSLNEEANVVRNDEEGTATQDLERMSGILEEAILEYRRTPLEMRPRLPRVPLNVKVRDVVGAINNMLPSYLESSIDLWDTDSILFGAAIAVCRIVGAKVHVPGRVSRYNEIPAWQRRIESRIAWARVLIGKLTSFRSGNTRSRVVRFVRKAFSGETVNLSHPDMPRKLTERIDDLKQKIAAWGRRIRRYSERVKRYRQNRLFVSDQKKFYKSLECSDGRVTGPIPNQAETVAFWRDLWSQPVTHAEGPWIETVVGACATIRPMNPITIIEDDVVAAVRKASNWKSPGPDGLHNYWLKGFWRSHATLARQFQRALENGTLPEFLTTGVTHLAPKDGATADPSKYRPITCLCTIYKTLTSILSSKIYRHIAENNIMSGAQNGCRGGSRGSKELLLIDTAVSRLVKRNRRNFSAAWIDYKKAFDSVPHTWLLRVLELYKVDGTTREFLRACMGQWSTMLSLSGQRMTDATDRIRISRGIFQGDCLSPLWFCLALNPLSTILENSRLGFQFRRGGHRMSHLLYMDDLKLFAPNAHHLEELLQLTSDFSSSIGMEFGFDKCGVLHVERGRVLRSTDVEVGPGQMRSLSETETYRYLGMSESLGVMERVVKQSVCEEFWERLTKVLRSYLSGANKVRAFNGWVMPILLYTFGVLRWSQTELDALDRRVRTTMISHRMRHPKSSVERMYVSRKCGGRGLLCAKTMHNREICNLRNFFLADSGGVLRRAVVECDNGLTPLFLADQQWRDPVIPSTSVREAVWKEKELHGRFYKALHEPHIDRKASVHWLRFGDLFGETEGFVCAIQDGVVKTRNYQKYIIKDGTEDICRACRHPGETLRHITSGCSALANTEYLHRHNQAAKILHQELALKYGFIEERIPYYRYSPEPVFENSRAKLYWDRPIITDRTILANRPDIVLMDREQSRVFLVDVTIPHDDGLVKAETEKKRKYLDLAHEIVDMWAVASTEIIPVVISVNGLIPTSLNSNLKRLGFRGGSLPAQMQKAVLLDTARIVRRFLSLSS

SEQ ID NO: 14483 - protein, 967 aa, Bembecia ichneumoniformis
MRPRLPRVPLSVKVQDVVGAINNMLPSYLESSIDLCDTDSILFGAAIAVCRIVGAKVHVPGRVSRYNEIPAWQRRIEGRIAWARVLIGKLTSFRSGNTRTRVVRFVRKAFSGETVNLSHPDMPRRLTERIDDLKQKIAAWGRRIRRYSERVKRCRQNRLFVSDQKKFYKSLECSEGRVTGPIPNQAETVAFWRDLWSQPVIHAEGPWIETVEGACATIRPMNPITIIEDDVVAAVRKASNWKSPGPDGLHNYWLKGFWRSHATLARQFQRALENGTLPEFLTTGVTHLAPKDGATADPSKYRPITCLCTIYKTLTSILSSKIYRHIAENNIMSGAQNGCRGGSRGSKELLLIDTAVSRLVKRNRRNFSAAWIDYKKAFDSVPHTWLLRVLELYKVNDTTREFLRACMGQWSTMLSLSGQRMTDATDRIRISRGIFQGDCLSPLWFCLALNPLSTILENSKLGFQFRRGGHRMSHLLYMDDLKLFAPNAHHLEELLQLTSDFSSSIGMEFGFDKCGVLHVERGRVLRSTDVEVGPGQMRSLFETETYRYLGMSESLGVMERVVKQSVCEEFWERLTKVLRSYLSGANKVRAFNGWVMPILLYTFGVLRWSQTELDALDRRVRTTMISHRMRHPKSSVERMYVSRKCGGRGLLCAKTMHNREICNLRNFFLADSGGILRRAVVECDNGLTPLFLADQQWRDPVIPSTSVREAVWKEKELHGRFYKALHEPHIDRKASVHWLRFGDLFGETEGFVCAIQDGVVKTRNYQKYIIKDGTEDICRACRHPGETLRHITSGCSALANTEYLHRHNQAAKILHQELGFIEERIPYYRYSPEPVFENSRAKLYWDRPIITDRTILANRPDIVLMDREQSRVFLVDVTIPHDDGLVKAETEKKRKYLDLAHEIVDMWAVASTEIIPVVISVNGLIPTSLNSNLKRLGFRGGSLPAQMQKAVLLDTARIVRRFLSLSS

SEQ ID NO: 14484 - protein, 1169 aa, Bembecia ichneumoniformis
MQMDHDELSIGPLPGGRQGTSRSRAGTGRGRGRASVPYPSPPAGLVPTGSSTTQNSASATGGTRRRMAWSTQMNANAMRAFYRATSAVTGGTGYRALMHQQFVQLEPGVNVTEQNLSDRVRFIQRSGLFSATELERLRREAVPELDSVQTREVSPQPSLNEEANVVRNDEEGTTTQDLERMSGMLEEAILEYRRTPLEMRPRLPRVPLSVKVRDVVGAINNMLPSYLESSIDLCDTDSILFGAAIAVCRIVGAKMHVPGRVSRYNEIPAWQRRIESRIAWARVLIGKLTSFRSGNTRTRVVRFVRKAFLGETVNLSHPDMPRKLTERIDDLKQKIAAWGRRIRRYSERVKRYRQNRLFVSDQKKFYKSLECSDGRVTGPIPNQAETVAFWRDLWSQPVTHAEGPWIETVEGACATIRPMNPITIIEDDVVAAVRKASNWKSPGPDGLHNYWLKGFWRSHATLARQFQGALENGTLPEFLTTGVTHLAPKDGATADPSKYRPITCLCTIYKTLTSILSSKIYRHIAENNIMSGAQNGCRGGSRGSKELLLIDTAVSRLVKRNRRNFSAAWIDYKKAFDSVPHTWLLRVLELYKVDGTTREFLRACMGQWSTMLSLSVQRMTDAADRIRISRGIFQGDCLSPLWFCLALNPLSTILENSRLGFQFRRGGYRMSHLLYMDDLKLFAPNAHHLEELLQLTTDFSSSIGMEFGFDKCGVLHVERGRVLRSTDVEVGPGQMRSLSETETYRYLGMSESLGVMEKVVKQSVCEEFWERLTKVLRSYLSGANKVRAFNGWVMPILLYTFGVLRWSQTELDALDRRVRTTMISHRMRHPKSSVERMYVSRKCGGRGLLCAKAMHNREICNLRNFFLNDSGGVLRRAVVECDNGLTPLFLADQQWRDPVIPSTSVREAVWKEKELHGRFYKALHEPHIDRKASVHWLRFGDLFGETEGFVCAIQDGVVKTRNYQKYIIKDGTEDICRACRHPGETLRHITSGCSALANTEYLHRHNQAAKILHQELALKYGFIEERIPYYRYSPEPVFENSRAKLYWDRPIITDRTILANRPDIVLMDREQSRVFLVDVTIPHDDGLVKAETEKKRKYLDLAHEIVDMWAVASTEIIPVVISVNGLIPTSLNSNLKRLGFRGGSLPAQMQKAVLLDTARIVRRFLSLSS

SEQ ID NO: 14485 - protein, 1071 aa, Bembecia ichneumoniformis
MNNNNNNNNNNNVTEQNLSDRVRFIQRSGLFSATELERLRREAVPELDSVQTREVSPQPSLNEEANVVRNDEEGIVTHDLERMSGILEEAILEYRQTPLEMRPRLPRVPLNVKVRDVVGAINNMLPSYLESSIDLWDTDSILFGAAIAVCRIVGAKVHMPGRVARYNEAPAWQRRIESRIAWARVLIGKLTSFRSGNTRTRVVRFVRKAFSGETVNLSHPDMPRKLTERIDDLKQKIAAWGRRIRRYSERVKRYRQNRLFMSDQKKFYKSLECSDGRVTGPIPNQAETVAFWRDLWSQPVTHAEGPWIETVEGACATIRPMNPITIIEDDVVAAVRKASNWKSPGPDGLHNYWLKGFWRSHATLARQFQGALENGTLPEFLTTGVTHLAPKDGATADPSKYRPITCLCTIYKTLTSILSSKIYRHIAENNIMSGAQNGCRGGSRGSKELLLIDTAVSRLVKRNRRNFSAAWIDYKKAFDSVPHTWLLRVLELYKVDGTTREFLRACMGQWSTILSLSGQRMTDAADRIRISRGIFQGDCLSPLWFCLALNPLSTILENSRLGFQFRRGGHRMSHLLYMDDLKLFAPNARHLEELLQLTTDFSSSIGMEFGFDKCGVLHVERGRVIRSTDVEVGPGQMRSLSETETYRYLGMSESLGVMEKVVKQSVCEEFWERLTKVLRSYLSGANKVRAFNGWVMPILLYTFGVLRWSQTELDALDRKVRTTMISHRMRHPKSSVERMYVSRKCGGRGLLCAKTMHNREICNLRNFFLADSGGVLRRAVVECDNGLTPLFLADQQWRDPVIPSTSVREAVWKEKELHGRFYKALHEPHIDRKASVHWLRFGDLFGETEGFVCGIQDGVVKTRNYQRYIIKDGTEDICRACRHPGETLRHITSGCSALANTEYLHRHNQVAKILHQELALKYGFIEERMPYYRYSPEPVFENGRAKLYWDRPIITDRTILANRPDIVLIDREQSRVFLVDVTIPHDDGLVKAETEKKRKYLDLAHEIVDMWAVASTEIIPVVISVNGLIPTSLNSNLKRLGFRGGSLPAQMQKAVLLDTARIVRRFLSLSS

SEQ ID NO: 14486 - protein, 1169 aa, Bembecia ichneumoniformis
MQMDNDESSIGPLPGGRQGTSRSRAGTGRGRGRASVPYPSPPAGLVPTGSSTTQNSASATGGTRRRMAWSTQMNANAMRAFYRATSAVTSGTGYRAQMQQQFLQLEPGVNVTEQNLSDRVRFIQRSGLFSATELERLRREAVPELDSVQTREVSPQPSLNEEANVVRNDEEGTATQDLERMSGMLEEAILEYRRTPLEMRPRLPRVPLSVKVQDVVGAINNMLPSYLESSIDLCDTDSILFGAAIAVCRIVGAKVHVPGRVSRYNEIPAWQRRIEGRIAWARVLIGKLTSFRSGNTRTRVVRFVRKAFSGETVNLSHPDMPRRLTERIDDLKQKIAAWGRRIRRYSERVKRCRQNRLFVSDQKKFYKSLECSEGRVTGPIPNQAETVAFWRDLWSQPVTHAEGPWIETVEGACATIRPMNPITIIEDDVVAAVRKASNWKSPGPDGLHNYWLKGFWRIHATLARQFQRALENGTLPEFLTTGVTHLAPKDGATADPSKYRPITCLCTIYKTLTSILSSKIYRHIAENNIMSGAQNGCRGGSRGSKELLLIDTAVSRLVKRNRRNFSAAWIDYKKAFDSVPHTWLLRVLELYKVDDTTREFLRACMGQWSTMLSLSGQRMTDAADRIRISRGIFQGDCLSPLWFCLALNPLSTILENSRLGFQFRRGGHRMSHLLYMDDLKLFAPNAHHLEELLQLTTDFSSSIGMEFGFDKCGILHVERGRVIRSTNVEVGPGQMRSLSETETYRYLGMSESLGIMEKVVKQSVCEEFWERLTKVLRSYLSGVNKVRAFNGWVMPILLYTFGVLRWSQTELDALDRRVRTTMISHRMRHSKSSVERMYVSRKCGGRGLLCAKTMHNREICNLRNFFLADSGGVLRRAVVECDNGLTPLFLADQQWRDPVIPSTSVREAVWKEKELHGRFYKALYEPHIDRKASVHWLRFGDLFGETEGFVCAIQDGVVKTRNYQRYIIKDGTEDIYRACRHPGETLRHITSGCSALANTEYLHRHNQAAKILHQELALKYGFIEERIPYYRYSPEPVFENSRAKLYWDRPIITDRTILANRPDIVLMDREQSRVFLVDVTIPHDDGLVKAETEKKRKYLDLAHEIVDMWAVASTEIIPVVISVNGLIPTSLNSNLKRLGFRGGSLPAQMQKAVLLDTARIVRRFLSLSS

SEQ ID NO: 14487 - protein, 1197 aa, Bembecia ichneumoniformis
MVMNLNGIRIWPLPGGRRGTSRTNAGTGRGRGRASVRGAGSPPSLPSNSSSPPGGLVPIGPSAAQNSASAAGGPRRRMAWTNAMNTNAMRAFYMATMTETGGTGYRARMHREFLQLEPEVTVTEQNLSDRVRYIQRSGLFSAAELKQLRQEVAPDPNAAFVVDASAPRRGSADYSVDPVQPRSGAETYSRPQYVRGEDEGVTTQEIERMRSTLEEAILEYRQTPLEMRQRLPRVPLSVKVRDVVEAINNMLPSYLESSTGLSDTDSILFGAAMAVCRIVGVKVRLPGRATHCNEVPAWQRRIESRITAARVLIGKLTSFRSGNTRPRVMRFVREAFSGERVNLSHPDLHRKLTERIDDLKQKIAAWGKRIRRYSERVKRYRQNRLFMSDQKKFYKGLGRPDDRVTGPGPNQAETIAFWRNLWSEPVTHEEGPWMRTVEEACATISPMNPITITEDDVVAAVRKAPNWKSPGPDGLHGYWLKGFWRSHATLAVQFQEALESGTLPDFLTTGVTHLTPKDGATADPSKYRPITCLCTIYKILTSILSSKIYRHIADNNILSEAQNGCKGGSRGSKELLLIDTAVCRLVKRNRRNFSAAWIDYKKAFDSVPHTWLLRVLELYKVDSTTRHFLGTCMGQWSTMLSLSGERMTDAVDRIRISRGIFQGDCLSPLWFCLALNPLSTVLEDSTIGFRFRRGGHQMSHLLYMDDLKLFAPNAHRLGELLQITENFSRSIRMEFALDKCAVVHVERGRIIRSTNVEAGPRQMRSLSGTETYRYLGMSESLGVRETVVKQSVGEEFWERLTKVLRSYLSGANKIRAFNGWVMPVLLYTFGVLRWSQTELDTLDRRVRTTMISHRVRHPKSSVERMYIPRKCGGRGLLSAKTMHNREMCNLRNFFLTDSGGGLRRAIVECDNGLTPLSLSDQQWREPVVLSPSAREAVWKEKELHGRFYKALHEPHVDRKASVHWLRFGDLFGETEGFVCAIQDQVVKTRNYRRYIIKDGTEDICRACRHPGETLRHVTSGCSALANTEYLHRHNQAARILHQELALKYGFLERRIPHYRYSPEPVLENSRAKLYWDRPIITDRTILTNRPDIVLMDREQSRVFLVDVTIPHDDGLVKAETEKRRKYLDLAHEIVDMWAVASAEIIPVVLSVNGLIPISLRDNLRRLGFRGGSLPGQMQRAVLLDTARIVRRFLSLSP

SEQ ID NO: 14488 - protein, 1184 aa, Bembecia ichneumoniformis
MMMNLNNKRIWPLPGGRRGTSRTNAGTGRGRGRASVRGAGSPPSLPSNSSSPPGGLVPIGPSAAQNSASAAGGTRRRMAWTNAMNMNAMRAFYMATMTETGGTGYRARMHREFLQLEPEVTVTEQNLSDRVRYIQRSGLFSAAELEQLRQEVAPDPNAAFIVDASVQPRSDAETNSRPQYVQGEDEGVTAQEIERMRSILEEAILEYRQTPLEMRQRLPRVPLSVKVRDVVEAINNMLPSYLESSTGLSDTDSILFGAAMAVCRIVGAKMRVPGRATHCNEVPSWQRRIESRITAARVLIGKLTSFRSGNTRPRVMRFVREAFSGERVNLSHPDVHRKLTERIDDLKQKIAAWGKRIRRYSERVKRYRQNRLFMSDQKKFYKGLGRPDGRVTGPGPNQTETIAFWRNLWSEPVTHGEGPWMETVEEACATISPMNPITITEDDVVAAVRKAPNWKSPGPDGLHGYWLKGFWRSHATLAVQFQEALENGALPDFLTTGVTHLTPKDGATADPSKYRPITCLCTIYKILTSILSSKIYRHVADNNILSEAQNGCKGGSRGSKELLLIDTTVCRLVKRNRRNFSAAWIDYKKAFDSVPHTWLLRVLELYKVDSTTRHFLETCMGQWSTMLSLSGKRMTDAADRIRICRGIFQGNCLSPLWFCLALNPLSTVLEDSAIGFQFRRGGHQMSHLLYMDDLKLFAPNAHRLEELLQITENFSSSIRMEFGLEKCAVIHVERGRIIRSTNVEAGPRQMRSLSETETYRYLGMSESLGVRETVVKQAVGEEFWERLTKVLRSYLSGVNKVRAFNGWVMPVLLYTFGVLRWSQTELDTLDRRVRTTMISHRVRHPKSSVERMYIPRKCGGRGLLSAKTMHNREMCNLRNFFLTDSGGGLHRAIVECDNGLTPLSLSDQQWRDPVVLSPSAREAVWKEKELHGRFYKALHEPHVDRKASVHWLRFGDLFGETEGFVCAIQDQVVKTRNYRRYIIKDGTEDICRACRHPGETLRHVTSGCSALANTEYLHRHNQAARILHQELALKYGFHERRIPYYRYSPEPVLENSRAKLYWDRPIITDRTILANRPDIVLMDREQSRVFLVDVTIPHDDGLVKAETEKRRKYLDLAHEIVDMWAVTSVEIIPVVLSVNGLIPISLRDNLRRLGFRGGSLPGQMQRAVLLDTARIVRRFLSLSP

SEQ ID NO: 14489 - protein, 1109 aa, Bembecia ichneumoniformis
MRAFYMATTTETGGTGYRARMHREFLQLEPGLTITEQNLSDRVRYIQRSGLFSAAELEQLRQEVAPDPNAASVVDASAPRRGGADYPVDPVQPRSDAETNSRPQYMQGEDEGVTTQEIERMRSTLEEAILEYRQTPLEMRQRLPRVPLSVKVRDVVEAINNMLPSYLESSTGLSDTDSILFGAAMAVCRIVGAKVHLPGRATHCNEVPAWQRRIESRITAARVLIGKLTSFRSGNTRHRVMRFVREAFPGERVNLSNPDMHRKLTERIDDLKQKIAAWGKRIRRYSERVKRYRQNRLFMSDQKKFYKGLGRPDDRVTGLGPNQAETIDFWRNLWSEPVTHEEGPWMETVEEACATISPMNPISITEDDVVAAVRKAPNWKSPGPDGLHGYWLKGFWRSHATLAVQFQEALESGVLPNFLTTGVTHLTPKDGATADPSKYRPITCLCTIYKILTSILSSKIYRHVADNNILSEAQNGCKGGSRGSKELLLIDTAVCRLVKRNRRNFSAAWIDYKKAFDSVPHTWLLRVLELYKVDSTTRHFLETCMGQWSTMLSLSGERMTDAADRIRISRGIFQGDCLSPLWFCLALNPLSTVLEDSAIGFQFRRGGHQMSHLLYMDDLKLFAPNAHRLEELLKITENFSRSIRMEFGLDKCAVIHVERGRIIHSTNVEAGPRQMRSLSETETYRYLGMSESLGVRETVVKQSVGEEFWERLTKVLRSYLSGANKIRAFNGWVMPVLLYTFGVLRWSQTELDTLDRRVRTTMISHRVRHPKSSVERMYVPRKCGGRGLLSAKTMHNREMCNLRNFFLTDSGGGLRRAIVECDNGLTPLSLSDQQWREPVALSPSVREAVWKEKELHGRFYKALYEPHVDRKASVHWLRFGDLFGETEGFVCAIQDQVVKTRNYRRYIIKDGTEDICRACRHPGETLRHVTSGCSALANTEYLHRHNQAARILHQELALKYGFLERRIPYYRYSPEPVFENSRAKLYWDRPIITDRTILANRPDIVLMDREQSRVFLVDVTIPHDDGLVKAETEKRRKYLDLAHDIVDMWAVASVEIIPVVLSVNGLIPVSLRDNLGRLGFRGGSLPGQMQRAVLLDTARIVRRFLSLSP

SEQ ID NO: 14490 - protein, 1197 aa, Bembecia ichneumoniformis
MMMNLNNKRIWPLPGGRRGTSRTNAGTGRGRGRASVRGAGSPPSLPSNSSSPPGGLVPIGPSAAQNSASAAGGTRRRMAWTNAMNMNAMRAFYMATMTETGGTGYRARMHREFLQLEPEVTVTEQNLSDRVRYIQRSGLFSAAELEQLRQEVTPDPNAAFIVDASAPRRGSTDHSVDPVQPRSDAETNSRPQYVQDEDEGVTAQEIERMRSILEEAILEYRQTPLEMRQRLPRVPLSVKVRDVVEAINNMLPSYLESSTGLSDTDSILFGAAMAVCRIVGAKVRVPGRATHCNEVPSWQRRIESRITAARVLIGKLTSFRSGNTRPRVMRFVREAFSGERVNLSHPDVHRKLTERIDDLKQKIAAWGKRIRRYSERVKRYRQNRLFMSDQKKFYKGLGRPDGRVTGPGPNQTETIAFWRNLWSEPVTHGEGPWMETVEEACATISPMNPITITEDDVVAAVRKAPNWKSPGPDGLHGYWLKGFWRSHATLAVQFQEALENGALPDFLTTGVTHLTPKDGATADPSKYRPITCLCTIYKILTSILSSKIYRHVADNNILSEAQNGCKGGSRGSKELLLIDTAVCRLVKRNRRNFSAAWIDYKKAFDSVPHTWLLRVLELYKVDSTTRHFLETCMGQWSTMLSLSGKRMTDAADRIRICRGIFQGDCLSPLWFCLALNPLSTVLEDSAIGFQFRRGGHQMSHLLYMDDLKVFAPNAHRLEELLQITENFSSSIGMEFGLEKCAVIHVERGRIIRSTNVEAGPRQMRSLSETETYRYLGMSESLGVRETVVKQAVGEEFWERLTKVLRSYLSGANKVRAFNGWVMPVLLYTFGVLRWSQTELDTLDRRVRTTMISHRVRHPKSSIERMYIPRKCGGRGLLSAKTMHNREMCNLRSFFLTDSGGGLRRAIVECDNGLTPLSLSDQQWRDPVVLSPSAREAVWKEKELHGRFYKALHEPHVDRKASVHWLRFGDLFGETEGFVCAIQDQVVKTRNYRRYIIKDGTEDICRACRHPGETLRHVTSGCSALANTEYLHRHNQAARILHQELALKYGFLERRIPYYRYSPEPVLENSRAKLYWDRPIITDRTILANRPDIVLMDREQSRVFLVDVTIPHDDGLVKAETEKRRKYLDLAHEIVDMWAVTSAEIIPVVLSVNGLIPISLRDNLRRLGFRGGSLPGQMQRAVLLDTARIVRRFLSLSP

SEQ ID NO: 14491 - protein, 1167 aa, Bembecia ichneumoniformis
MDNYDISIGPLPGGRQGTSRSRAGTGRGRGRASVQYPSPPAGLVPTGSSTTQNSASATGGTRRRMAWSTQMNSNAMRAFYRATSAVTGGTGYRALMHQQFLQLEPGVNVTEQNLSDRVRFIQRSGLFSATELERLRREAVPELDSVQTREVSPQPSLNEEANVVRNDEEGTVTQDLERMSGMLEEAILEYRRTPLEMRPRLPRVPLSVKVRDVVGAINNMLPSYLESSIDLCDTDSILFGAAIAVCRIVGAKVHVPGRVSRYNEIPAWQRRIESRIAWARVLIGKLTSFRSGNTRSRVVRFVRKAFSGETVNLSHPDMPRKLTERIDDLKQKIAAWGRRIRRYSERVKRYRQNRLFVSDQKKFYKSLECSDGRVTGPTPNQAETVAFWRDLWSQPVTHAEGPWIETVEGACATIRPMNPITIIEDDVVAAVRKASNWKSPGPDGLHNYWLKGFWRSHATLARQFQGALENGTLPEFLTTWVTHLAPKDGATADPSKYRPITCLCTIYKTLTSILSSKIYRHIAENNIMSGAQNGCRGGSRGSKELLLIDTAVSRLVKRNRRNFSAAWIDYKKAFDSVPHTWLLRVLELYKVDGTTREFLRACMGQWSTILSLSGQRMTDAADRIRISRGIFQGDCLSPLWFCLALNPLSAILENSRLGFQFRRGGHRMSHLLYMDDLKLFAPNAHHLEELLQLTTDFSSSIGMEFGFDKCGILHVERGRVIRSTDVEVGPRQMRSLSETETYRYLGMSESLGVMEKVVKQSVCEEFWERLTKVLRSYLSGANKVRAFNGWVMPILLYTFGVLRWSQTELDALDRRVRTSMISHRMRHPKSSVERMYVSRKCGGRGLLCAKTMHNREICNLRNFFLADSGGVLRRAVVECDNGLTPLFLADQQWRDPVIPSTSVREAVWKEKELHGRFYKALHEPHIDRKASVHWLRFGDLFGETEGFVCAIQDGVVKTRNYQKYIIKDGTEDICRACRHPGETLRHITSGCSALANTEYLHRHNQAAKILHQELALKYGFIEERMPYYRYSPEPVFENSRAKLYWDRPIITDRTILANRPDIVLMDREQSRVFLVDVTIPHDDGLVKAETEKKRKYLDLAHEIVDMWAVASTEIIPVVISVNGLIPTSLNGNLKRLGFRGGSLPAQMQKAVLLDTARIVRRFLSLSS

SEQ ID NO: 14492 - protein, 1208 aa, Bembecia ichneumoniformis
MGAPRCTQPTKMMMDLNEARIWPLPGGRRGTSRTSAGTGRGRGRASVRGAGSPPSLPSNSSSPPGGLVPIGPPAAQNSASAVGGPRRRMAWTNAMNMNAMRAFYMATMTETGGTGYRARMHREFLQLEPEVTVTEQNLSDRVRYIQRSGLFGATELEQLRQEVTPDPNAAFVVDASAPRRGSTDYPVDPVQPRSGAETNNRPQHVQGEDEGITTQEIEQMRSTLEEAILEYRQTPLEMRQRLPRVPLSVKVRDVVEAINNMLPSYLESSTGLSDTDSILFGAAMAVCRIVGVKVRLPGRATHCNEVPAWQRRIESRIRETRVLIGKLTSFRSGNTRPRVMRFVREAFSGERVNLSHPDVHRKLTERIDDLKQKIAAWGKRIRRYSERVKRYRQNRLFMSDQKKFYKGLGRPDDRVTGPGPNQVETIAFWRNLWSEPVTHEEGPWMRTVEEACATISPMNPITITEDDVVAAVRKAPNWKSPGPDGLHGYWLKGFWRSHATLAVQFQEALENGALPDFLTTGVTHLTPKDGATADPSKYRPITCLCTLYKILTSILSFKIYRHVTDNNILSEAQNGCKGGSRGSKELLLIDTAVCRLVKRNRRNFSAAWIDYKKAFDSVPHTWLLRVLELYKVDSTTRHFLETCMGQWSTMLSLSGERMTDAADRIRISRGIFQGDCLSPLWFCLALNPLSTVLEDSAIGFQFRRGGHRMSHLLYMDDLKLFAPNAHRLEELLQITENFSRSIRMEFGLDKCAVIHVERGRIIRSTNVEVGPRQMRSLSGTESYRYLGMSESLGVRETVVKQSVGDEFWERLTKVLRSYLSGANKIRAFNSWVMPVLLYTFGVLRWSQTELDALDRRVRTTMISHRMRHPKSSVERMYIPRKCGGRGLLSAKTMHNREMCNLRNFFLTDSGGGLRRAIVECDNGLTPLSLSDQQWREPVVLSTSAREAVWKEKELHGRFYKALHEPHVDRKASVHWLRFGDLFGETEGFVCAIQDQVVKTRNYRRYIIKDDTEDICRACRHPGETLRHVTSGCSALANTEYLHRHNQAARILHQELALKYGFVEQRIPYYRYSPEPVLENSRAKLYWDRPIITDRTILANRPDIVLMDREQSRVFLVDVTIPHDDGLVKAETEKRRKYLDLAHEIVDMWAVASVEIIPVVLSVNGLIPVSLRDNLGRLGFRGGSLPGQMQRAVLLDTARIVRRFLSLSP

SEQ ID NO: 14493 - protein, 1198 aa, Bembecia ichneumoniformis
MMMMNLENDLRIWPLPGGRRGTSRTNAGTGRGRGRASVIRGAGSPSNLPSNSSSPPGGLVPIEPSVAQSSASAAGGPRRRMAWSNAMNINAMRAFYRATMIETGGTGYRARMHREFRQLEPEVTVTEQNLSDRVRYIQRSGLFSASELEQLRQEVVPDPNAASVVEAPAQLRSGTDPHVQPRDCAETNNRPQHMQGEDEGITAQEIERMRSTLEEAILEYRQNEPLEMRQRLPRVPLSVKVRDVVETINNMLPSYLESSTGLSDTDSILFGAAMAVCRIVGVKVRLPGRATHCNEVPAWQRRIESRITAARVLIGKLISFRSGNTRPRVMRFVREAFSGERVNLSHPDVHRKLTERIDDLKQKIAAWGKRIRRYSERVKRYRQNRLFMSDQKKFYKSLERLNGRVTGPGPSQAETISFWRSLWSEPVTHEEGTWMEVVEEACATISPMNPITITEDDVVVAVRKAPNWKSPGPDGLHGYWLKGFWRSHATLAIQFQEALETGALPNFLTTGVTHLAPKDGATADPSRYRPITCLCTIYKILTSILSSKIYRHVTDNNILSEAQNGCKGGSRGSKELLLIDTAVCRLVKRSRRNFSAAWIDYKKAFDSVPHTWLLRVLELYKVDSTTRHFLGTCMGQWSTMLSLSGKRMTDAADRIGICRGIFQGDCLSPLWFCLALNPLSTVLEDSAIGFQFRRGGHRMSHLLYMDDLKLFAPNAHRLEELLQITENFSRSIRMEFGLDKCAVIHVERGRIIRSTNVEAGPRQMRSLSGTETYRYLGMSESLGVRETVVKQTVGEEFWERLTKVLRSYLSGANKIRAFNGWVMPVLLYTFGVLRWSQTELDTLDRRVRTTMISHRVRHPKSSVERMYIPRKCGGRGLLSAKTMHNREMCNLRNFFLTDSGGGLRRAIVECDNGLTPLSLSDQQWRDPVVLSPSAREAVWKEKELHGRFYKALHEPHVDRKASVHWLRFGDLFGETEGFVCAIQDQVIKTRNYRRYIIKDGTEDICRACRHPGETLRHVTSGCSALANTEYLHRHNQAARILHQELALKYGFLERRIPYYRYSPEPVLENSRAKLYWDRPIITDRTILANRPDIVLMDREQSRVFLVDVTIPHDDGLVKAETEKRRKYLDLAHEIVDMWAVASAEIIPVVLSVNGLIPISLRDNLRRMGFRGGSLPGQMQRAVLLDTARIVRRFLSLSP

SEQ ID NO: 14494 - protein, 1197 aa, Bembecia ichneumoniformis
MMMNLNNKRIWPLPGGRRGTSRTNAGTGRGRGRASVRGAGSPPSLPSNSSSPPGGLVPIGPSAAQNSASAAGGTRRRMAWTNAMNMNAMRAFYMATMTETGGTGYRARMHREFLQLEPEVTVTEQNLSDRVRYIQRSGLFSAAELEQLRQEVVPDPNAAFIVDASAPRRGSTDHSVDPVQPRSDAETNSRPQYVQDEDEGVTAQEIERMRSILEEAILEYRQTPLEMRQRLPRVPLSVKVRDVVEAINNMLPSYLESSTGLSDTDSILFGAAMAVCRIVGAKVRVPGRATHCNEVPSWQRRIESRITAARVLIGKLTSFRSGNTRPRVMRFVREAFSGERVNLSHPDVHRKLTERIDDLKQKIAAWGKRIRRYSERVKRYRQNRLFMSDQKKFYKGLGRPDGRVTGPGPNQTETIAFWRNLWSEPVTHGEGPWMETVEEACATISPMNPITITEDDVVVAVRKAPNWKSPGPDGLHGYWLKGFWRSHATLAVQFQEALENGALPDFLTTGVTHLTPKDGATADPSKYRPITCLCTIYKILASILSSKIYRHVADNNILSEAQNGCKGGSRGSKELLLIDTAVCRLVKRNRRNFSAAWIDYKKAFDSVPHTWLLRVLELYKVDSTTRHFLETCMGQWSTMLSLSGKRMTDAADRIRICRGIFQGDCLSPLWFCLALNPLSTVLEDSAIGFQFRRGGHQMSHLLYMDDLKLFAPNAHRLEELLQITENFSSSIRMEFGLEKCAVIHVERGRIIRSTNVEAGPRQMRSLSETETYRYLGMSESLGVRETVVKQAVGEEFWERLTKVLRSYLSGANKVRAFNGWVMPVLLYTFGVLRWSQTELDTLDRRVRTTMISHRVRHPKSSVERMYIPRKCGGRGLLSAKTMHNREMCNLRNFFLTDSGGGLRRAIVECDNGLTPLSLSDQQWRDPVVLSPSAREAVWKEKELHGRFYKALHEPHVDRKASVHWLRFGDLFGETEGFVCAIQDQVVKTRNYRRYIIKDGTEDICRACRHPGETLRHVTSGCSALANTEYLHRHNQAARILHQELALKYGFLEQRIPYYRYSPEPVLENSRAKLYWDRPIITDRTILANRPDIVLMDREQSRVFLVDVTIPHDDGLVKAETEKRRKYLDLAHEIVDMWAVASAEIIPVVLSVNGLIPISLRDNLRRLGFRGGFLPGQMQRAVLLDTARIVRRFLSLSP

SEQ ID NO: 14495 - protein, 1208 aa, Bembecia ichneumoniformis
MGAPRCTQPTKMMMDLNEARIWPLPGGRRGTSRTSAGTGRGRGRASVRGAGSPPSLPSNSSSPPGGLVPIGPSAAQNSASAAGGPRRRMAWTNAMNMNAMRAFYMATMTETGGTGYRARMHREFLQLEPEVTVTEQNLSDRVRYIQRSGLFGATELEQLRQEVTPDPNAAFVVDASAPRRGSTDYPVDPVQPRSGAETNNRPQYVQGEDEGITTQEIEQMRSTLEEAILEYRQTPLEMRQRLPRVPLSVKVRDVVEAINNMLPSYLESSTGLSDTDSILFGAAMAVCRIVGVKVRLPGRATHCNEVPAWQRRIESRIRETRVLIGKLTSFRSGNTRPRVMRFVREAFSGERVNLSHPDVHRKLTERIDDLKQKIAAWGKRIRRYSERVKRYRQNRLFMSDQKKFYKGLGRPDDRVTGPGPNQVETIAFWRNLWSEPVTHEEGPWMRTVEEACATISPMNPITITEDDVVAAVRKASNWKSPGPDGLHGYWLKGFWRSHATLAVQFQEALENGALPDFLTTGVTHLTPKDGATADPSKYRPITCLCTLYKILTSILSFKIYRHVTDNNILSEAQNGCKGGSRGSKELLLIDTAVCRLVKRNRRNFSAAWIDYKKAFDSVPHTWLLRVLELYKVDSTTRHFLETCMGQWSTMLSLSGERMTDAADRIRISRGIFQGDCLSPLWFCLALNPLSTVLEDSAIGFQFRRGGHRMSHLLYMDDLKLFAPNAHRLEELLQITENFSRSIRMEFGLDKCAVIHVERGRIIRSTNVEVGPRQMRSLSGTETYRYLGMSESLGVRETVVKQSVGDEFWERLTKVLRSYLSGANKIRAFNSWVMPVLLYTFGVLRWSQTELDALDRRVRTTMISHRVRHPKSSVERMYIPRKCGGRGLLSAKTMHNREMCNLRNFFLTDSGGGLRRAIVECDNGLTPLSLSDQQWREPVVLSTSAREAVWKEKELHGRFYKALHEPHVDCKASVHWLRFGDLFGETEGFVCAIQDQVVKTRNYRRYIIKDDTEDICRACRHPGETLRHVTSGCSALANTEYLHRHNQAARILHQELALKYGFVEQRIPYYRYSPEPVLENSRAKLYWDRPIITDRTILANRPDIVLMDREQSRVFLVDVTIPHDDGLVKAETEKRRKYLDLAHEIVDMWAVASVEIIPVVLSVNGLIPVSLRDNLGQLGFRGGSLPGQMQRAVLLDTARIVRRFLSLSP

SEQ ID NO: 14496 - protein, 1197 aa, Bembecia ichneumoniformis
MMMNLNNKRIWPLPGGRRGTSRTNAGTGRGRGRASVRGAGSPPSLPSNSSSPPGGLVPIGPSAAQNSASAAGGTRRRMAWTNAMNMNAMRAFYMATMTETGGTGYRARMHREFLQLEPEVTVTEQNLSDRVRYIQRSGLFSAAELEQLRQEVTPDPNAAFIVDASAPRRGGTDHSVDPVQPRSDAETNSRPQYVQDEDEGVTAQEIERMRSILEEAILEYRQTPLEMRQRLPRVPLSVKVRDVVEAINNMLPSYLESSTGLSDTDSILFGAAMAVCRIVGAKVRVPGRATHCNEVPSWQRRIESRITAARVLIGKLTSFRSGNTRPRVMRFVREAFSGERVNLSHPDVHRKLTERIDDLKQKIAAWGKRIRRYSERVKRYRQNRLFMSDQKKFYKGLGRPDGRVTGPGPNQTETIAFWRNLWSEPVTHGEGPWMETVEEACATISPMNPITITEDDVVAAVRKAPNWKSPGPDGLHGYWLKGFWRSHATLAVQFQEALENGALPDFLTTGVTHLTPKDGATADPSKYRPITCLCTIYKILTSILSSKIYRHVADNNILSEAQNGCKGGSRGSKELLLIDTAVCRLVKRNRRNFSAAWIDYKKAFDSVPHTWLLRVLELYKVDSTTRHFLETCMGQWSTMLSLSGKRMTDAADRIRICRGIFQGDCLSPLWFCLALNPLSTVLEDSAIGFQFRRGGHQMSHLLYMDDLKLFAPNAHRLEELLQITENFSSSIGMEFGLEKCAVIHVERGRIIRSTNVEAGPRQMRSLSETETYRYLGMSESLGVRETVVKQAVGEEFWERLTKVLRSYLSGANKVRAFNGWVMPVLLYTFGVLRWSQTELDTLDRRVRTTMISHRVRHPKSSVERMYIPRKCGGRGLLSAKTMHNREMCNLRSFFLTDSGGGLRRAIVECDNGLTPLSLSDQQWRDPVVLSPSAREAVWKEKELHGRFYKALHEPHVDRKASVHWLRFGDLFGETEGFVCAIQDQVVKTRNYRRYIIKDGTEDICRACRHPGETLRHVTSGCSALANTEYLHRHNQAARILHQELALKYGFLERRIPYYRYSPEPVLENSRAKLYWDRPIITDRTILANRPDIVLMDREQSRVFLVDVTIPHDDGLVKAETEKRRKYLDLAHEIVDMWAVTSAEIIPVVLSVNGLIPISLRDNLRRLGFRGGSLPGQMQRAVLLDTARIVRRFLSLSP

SEQ ID NO: 14497 - protein, 1198 aa, Bembecia ichneumoniformis
MMMNLNGKRIWPLPGGRRGTSRTNAGTGRGRGRASVIRGAGSPPSLPSNSSSPPGGLVPIGPSAAQNSASAAGGPRRRMAWTNAMNTNAMRAFYMATTTETGGTGYRARMHREFLQLEPGLTITEQNLSDRVRYIQRSGLFSAAELEQLRQEVAPDPNAASVVDASAPRRGGADYPVDPVQPRSDAETNSRPQYMQGEDEGVTTQEIERMRSTLEEAILEYRQIPLEMRQRLPRVPLSVKVRDVVEAINNMLPSYLESSTGLSDTDSILFGAAMAVCRIVGAKVHLPGRATHCNEVPAWQRRIESRITAARVLIGKLTSFRSGNTRPRVMRFVREAFPGERVNLSNPDMHRKLTERIDDLKQKIAAWGKRIRRYSERVKRYRQNRLFMSDQKKFYKGLGRPDDRVTGLGPNQAETIDFWRNLWSEPVTHEEGPWMETVEEACATISPMNPISITEDDVVAAVRKAPNWKSPGPDGLHGYWLKGFWRSHATLAVQFQEALESGALPNFLTTGVTHLTPKDGATADPSKYRPITCLCTIYKILTSILSSKIYRHVADNNILSEAQNGCKGGSRGSKELLLIDTAVCRLVKRNRRNFSAAWIDYKKAFDSVPHTWLLRVLELYKVDSTTRHFLETCMGQWSTMLSLSGERMTDAADRIRISRGIFQGDCLSPLWFCLALNPLSTVLEDSAIGFQFRRGGHQMSHLLYMDDLKLFAPNAHRLEELLKITENFSRSIRMEFGLDKCAVIHVERGRIIRSTNVEAGPRQMRSLSGTETYRYLGMSESLGVRETVVKQSVGEEFWERLTKVLRSYLSGANKIRAFNGWVMPVLLYTFGVLRWSQTELDTLDRRVRTTMISHRVRHPKSSVERLYIPRKCGGRGLLSAKTMHNREMCNLRNFFLTDSGGGLRRAIVECDNGLTPLSLSDQQWREPVVLSPSAREAVWKEKELHGRFYKALHEPHVDRKASVHWLRFGDLFGETEGFVCAIQDQVVKTRNYRRYIIKDGTEDICRACRHPGETLRHVTSGCSALANTEYLHRHNQAARILHQELALKYGFLERRIPYYRYSPEPVLENSRAKLYWDRPIITDRTILANRPDIVLMDREQSRVFLVDVTIPHDDGLVKAETEKRRKYLDLAHEIVDMWAVASVEVIPVVLSVNGLIPVSLRDNLGRLGFRGGSLPGQMQRAVLLDTARIVRRFLSLSP

SEQ ID NO: 14498 - protein, 1169 aa, Bembecia ichneumoniformis
MVTDINGISIGPLPGGRQGTSRSRAGTGRGRGRASVPYPSPPAGLVPTGSSTTQNSASATGGTRRRMAWSTQMNSNAMRAFYRATSAVTGCTGYRALMHQQFLQLEPGVNVTEQNLSDRVRFIQRSGLFSATELERLRREAVPELDSVQTREVSPQPSLNEEENVVRNDEEGTVTQDLERMSGILEEAILEYRRTPLEMRPRLPRVPLNVKVRDVVGAINNMLPSYLESSIDLWDTDSILFGAAIAVCRIVGAKMHMPGRVARYNEAPAWQRRIESRIAWARVLIGKLTSFRSGNTRTRVVRFVRKAFSGETVNLSHPDMPRKLTERIDDLKQKIAAWGRRIRRYSERVKRYRQNRLFMSDQKKFYKSLECSDGRVTGPIPNQAETVAFWRDLWSQPVTHAEGPWIETVVDARATIRPMNPITIIEDDVVAAVRKASNWKSPGPDGLHNYWLKGFWRSHATLARQFQRALENGTLPEFLTTGVTHLAPKDGATADPSKYRPITCLCTIYKTLTSILSSKIYRHIAENNIMSGAQNGCRGGSRGSKELLLIDTAVSRLVKRNRRNFSAAWIDYKKAFDSVPHTWLLRVLELYKVDGTTREFLRACMGQWSTMLSLSGQRMTDAADRIRISRGIFQGDCLSPLWFCLALNPLSTILENSRLGFQFRRGGHRMSHLLYMDDLKLFAPNADHLEELLQLTTDFSSSIGMEFGFDKCGVLHVERGRVIRSTDVEVGPGQMRSLSETETYRYLGMSESLGVMEKVVKQSVCEEFWERLTKVLRSYLSMANKVRAFNGWVMPILLYTFGVLRWSQTELDALDRRVRTTMISHRMRHPKSSVERMYVSRKCGGRGLLCAKTMHNREICNLRNFFLADSGGVLRRAVVECDNGLTPLFLADQQWRDPVIPSTSVREAVWKEKELHGRFYKALHEPHIDRKTSVHWLRFGDLFGETEGFVCAIQDGVVKTRNYQKYIIKDGTEDICRACRHPGETLRHITSGCSALANTEYLHRHNQAAKILHQELALKYGFIEERIPYYRYSPEPVFENSRAKLYWDRPIITDRTILANRPDIVLMDREQSRVFLVDVTIPHDDGLVKAETEKKRKYLDLAHEIVDMWSVASTEIIPVVISVNGLIPTNLNSNLKRLGFRGGSLPAQMQKAVLLDTARIVRRFLSLSS

SEQ ID NO: 14499 - protein, 1169 aa, Bembecia ichneumoniformis
MKMDNDDMSIGPLPGGRQGTSRSRAGTGRGRGRASVPYPSPPAGLVPTGSSTTQNSASATGGTRRRMAWSTQMNSNAMRAFYRATSAVTGGTGYRALMHQQFLQLEPGVNVTEQNLSDRVRFIQRSGLFSATELERLRREAVPELDSVQTREVSPQPSLNEEANVVRNDEEGTATQDLERMSGILEEAILEYRRTPLEMRPRLPRVPLNVKVRDVVGAINNMLPSYLESSIDLWDTDSILFGAAIAVCRIVGAKVHMPGRMAGYNEAPAWQRRIESRIAWARVLIGKLTSFRSGNTRTRVVRFVRKAFSGETVNLSHPDMPRKLTERIDDLKQKNAAWGRRIRRYSERVKRYRQNRLFMSDQKKFYKSLECSDGRVTGPIPNQAETVAFWRDLWSQPVTHAEGPWIETVEGACATIRPMNPITIIEDDVVAAVRKASNWKSPGPDGLHNYWLKGFWRSHATLARQFQGALENGTLPEFLTTGVTHLAPKDGATADPSKYRPITCLCTIYKTLTSILSSKIYRHIAENNIMSGAQNGCRGGSRGSKELLLIDTAVSRLVKRNRRNFSAAWIDYKKAFDSVPHTWLLRVLELYKVDGRTREFLRACMGQWSTMLSLSGQRMTDAADRIRISRGIFQGDCLSPLWFCLALNPLSTILENSRLGFQFRRGGHRMSHLLYMDDLKLFAPNAHHLEELLQLTTDFSSSIGMEFGFDKCGILHVERGRVIRSTDVEVGPGQMRSLSETETYRYLGMSESLGVMERVVKQSVCEEFWERLTKVFRSYLSGVNKVRAFNGWVMPILLYTFGVLRWSQTELDALDRRVRTTMISHRMRHPKSSVERMYVSRKCGGRGLLCAKTMHNREICNLRNFFLADSGGVLRRAVVECDNGLTPLFLADQQWRDPVIPSTSVREAVWKEKELHGRFYKALHEPHIDRKASVHWLRFGDLFGETEGFVCAIQDGVVKTRNYQKYIIKDGTEDICRACRHPGETLRHITSGCSALANTEYLHRHNQAAKILHQELSLKYGFIEERIPYYRYSPEPVFENSRAKLYWDRPIITDRTILANRPDIVLMDREQSRVFLVDVTIPHDDGLVKAETEKKRKYLDLAHEIVDMWAVASTEIIPVVISVNGLIPTSLNSNLKRLGFRGGSLPAQMQKAVLLDTARIVRRFLSLSS

SEQ ID NO: 14500 - protein, 1208 aa, Bembecia ichneumoniformis
MGAPRCTQPTKMMMDLNEARIWPLPGGRRGTSRTSAGTGRGRGRASVRGAGSPPSLPSNSSSPPGGLVPIGPPAAQNSASAVGGPRRRMAWTNAMNMNAMRAFYMATMTETGGTGYRARMHREFLQLEPEVTVTEQNLSDRVRYIQRSGLFGATELEQLRQEVTPDPNAAFVVDASAPRRGSTDYPVDPVQPRSGAETNNRPQHVQGEDEGITTQEIEQMRSTLEEAILEYRQTPLEMRQRLPRVPLSVKVRDVVEAINNMLPSYLESSTGLSDTDSILFGAAMAVCRIVGVKVRLPGRATHCNEVPAWQRRIESRIRETRVLIGKLTSFRSGNTRPRVMRFVREAFSGERVNLSHPDVHRKLTERIDDLKQKIAAWGKRIRRYSERVKRYRQNRLFMSDQKKFYKGLGRPDDRVTGPGPNQVETIAFWRNLWSEPVTHEEGPWMRTVEEACATISPMNPITITEDDVVAAVRKAPNWKSPGPDGLHGYWLKGFWRSHATLAVQFQEALENGALPDFLTTGVTHLTPKDGATADPSKYRPITCLCTLYKILTSILSFKIYRHVTDNNILSEAQNGCKGGSRGSKELLLIDTAVCRLVKRNRRNFSAAWIDYKKAFDSVPHTWLLRVLELYKVDSTTRHFLETCMGQWSTMLSLSGERMTDAADRIRISRGIFQGDCLSPLWFCLALNPLSTVLEDSAIGFQFRRGGHRMSHLLYMDDLKLFAPNAHRLEELLQITENFSRSIRMEFGLDKCAVIHVERGRIIRSTNVEVGPRQMRSLSGTESYRYLGMSESLGVRETVVKQSVGDEFWERLTKVLRSYLSGANKIRAFNSWVMPVLLYTFGVLRWSQTELDALDRRVRTTMISHRMRHPKSSVERMYIPRKCGGRGLLSAKTMHNREMCNLRNFFLTDSGGGLRRAIVECDNGLTPLSLSDQQWREPVVLSPSAREAVWKEKELHGRFYKALHEPHVDRKASVHWLRFGDLFGETEGFVCAIQDQVVKTRNYRRYIIKDGTEDICRACRHPGETLRHVTSGCSALANTEYLHRHNQAARILHQELALKYGFLERRIPYYRYSPEPVLENSRAKLYWDRPIITDRTILANRPDIVLMDREQSRVFLVDVTIPHDDGLVKAETEKRRKYLDLAHEIVDMWAVASVEIIPVVLSVNGLIPVSLRDNLGRLGFHGGSLPGQMQRAVLLDTARIVRRFLSLSP

SEQ ID NO: 14501 - protein, 1165 aa, Bembecia ichneumoniformis
MDNYDISIGPLPGGRQGTSRSRAGTGRGRGRASVQYPSPPAGLVPTGSSTTQNSASATGGTRRRMAWSTQMNSNAMRAFYRATSAVTGGTGYRALMHQQFLQLEPGVNVTEQNLSDRVRFIQRSGLFSATELERLRREAVPELDSVQTREVSPQPSLNEEANVVRNDEEGTVTQDLERMSGMLEEAILEYRRTPLEMRPRLPRVPLSVKVRDVVGAINNMLPSYLESSIDLCDTDSILFGAAIAVCRIVGAKVHVPGRVSRYNEIPAWQRRIESRIAWARVLIGKLTSFRSGNTRSRVVRFVRKAFSEETVNLSHPDMPRKLTERIDDLKQKIAAWGRRIRRYSERVKRYRQNRLFVSDQKKFYKSLECSDGRVTGPTPNQAETVAFWRDLWSQPVTHAEGPWIETVEGACATIRPMNPITIIEDDVVAAVRKASNWKSPGPDGLHNYWLKGFWRSHATLARQFQGALENGTLPEFLTTGVTHLAPKDGATADPSKYRPITCLCTIYKTLTSILSSKIYRHIAENNIMSGAQNGCRGGSRGSKELLLIDTAVSRLVKRNRRNFSAAWIDYKKAFDSVPHTWLLRVLELYKVDGTTREFLRACMGQCMLSLSGQRMTDAADRIRISRGIFQGDCLSPLWFCLALNPLSTILENSRLGFQFRRGGHRMSHLLYMDDLKLFAPNAHHLEELLQLTTDFSSSIGMEFGFDKCGVLHVERGRVLRSTDVEVGPRQMRSLSETETYRYLGMSESLGVMEKVVKQSVCEEFWERLTKVLRSYLSGANKVRAFNGWVMPILLYTFGVLRWSQTELDALDRRVRTSMISHRMRHPKSSVERMYVSRKCGGRGLLCAKTMHNREICNLRNFFLADSGGVLRRAVVECDNGLTPLFLADQQWRDPVIPSTSVREAVWKEKELHGRFYKALHEPHIDRKASVHWLRFGDLFGETEGFVCAIQDGVVKTRNYQKYIIKDGTEDICRACRHPGETLRHITSGCSALANTEYLHRHNQAAKILHQELALKYGFIEERMPYYRYSPEPVFENGRAKLYWDRPIITDRTILANRPDIVLMDREQSRVFLVDVTIPHDDGLVKAETEKKRKYLDLAHEIVDMWAVASTEIIPVVISVTGLIPTSLNSNLKRLGFRGGSLPAQMQKAVLLDTARIVRRFLSLSS

SEQ ID NO: 14502 - protein, 1191 aa, Bembecia ichneumoniformis
MMMNLNNKRIWPLPGGRRGTSRTNAGTGRGRGRASVRGAGSPPSLPSNSSSPPGGLVPIGPSAAQNSASAAGGTRRRMAWTNAMNMNAMRAFYMATMTETGGTGYRARMHREFLQLEPEVTVTEQNLSDRVRYIQRSGLFSAAELEQLRQEVAPDPNAAFIVDASAPRRGSTDHSVDPVQPCSDAETNSRPQCVQDEDEGVTTQEIERMRSILEEAILEYRQTPLEMRQRLPRVPLSVKVRDVVEAINNMLPSYLESSTGLSDTDSILFGAAMAVCRIVGAKVRVPGRATHCNEVPSWQRRIESRITAARVLIGKLTSFRSGNTRPRVMRFVREAFSGERVNLSHPDVHRKLTERIDDLKQKIAAWGKRIRRYSERVKRYRQNRLFMSDQKKFYKGLGRPDGRVTGPGPNQTETIAFWRNLWSEPVTHGEGPWMETVEEACATISPMNPITITEDDVVAAVRKAPNWKSPGPDGLHGYWLKGFWRSHATLAVQFQEALENGALPDFLTTGVTRATADPSKYRPITCLCTIYKILTSILSSKIYRHVADNNILSEAQNGCKGGSRGSKELLLIDTAVCRLVKRNRRNFSAAWIDYKKAFDSVPHTWLLRVLELYKVYSTTRHFLETCMGQWSTMLSLSGKRMTDAADRIRICRGIFQGDCLSPLWFCLALNPLSTVLEDSAIGFQFRRGGHQMSHLLYMDDLKLFAPNAHRLEELLQITENFSSSIRMEFGLEKCAVIHVERGRIIRSTNVEAGPRQMRSLSETETYRYLGMSESLGVRETVVKQAVGEEFWERLTKVLRSYLSGANRVRAFNGWVMPDLLYTFGVLRWSQTELDTLDRRVRTTMISHRVRHPKSSVERMYIPRKCGGRGLLSAKTMHNREMCNLRNFFLTDSGGGLRRAIVECDNGLTPLSLSDQQWRDPVVLSPSAREAGWKEKELHGRFYKALHEPHVDRKASVHWLRFGDLFGETEGFVCAIQDQVVKTRNYRRYIIKDGTEDICRACRHPGETLRHVTSGCSALANTEYLHRHNQAARILHQELALKYGFLERRIPYYRYSPEPVLENSRAKLYWDRPIITDRTILANRPDIVLMDRDQSRVFLVDVTIPHDDGLVKAETEKRRKYLDLAHEIVDMWAVTSAEIIPVVLSVNGLIPISLRDNLRRLGFRGGSLPGQMQRAVLLDTARIVRRFLSLSP

SEQ ID NO: 14503 - protein, 1197 aa, Bembecia ichneumoniformis
MMMNLNNKRIWPLPGGRRGTSRTNAGTGRGRGRASVRGAGSPPSLPSNSSSPPGGLVPIGPSAAQNSASAAGGTRRRMAWTNAMNMNAMRAFYMATMTETGGTGYRARMHREFLQLEPEVTVTEQNLSDRVRYIQRSGLFSAAELEQLRQEVTSDPNAAFIVDASAPRRGSTDHSVDPVQPRSDAETNSRPQYVQDEDEGVTAQEIERMRSILEEAILEYRQTPLEMRQRLPRVPLSVKVRDVVEAINNMLPSYLESSTGLSDTDSILFGAAMAVCRIVGAKVRVPGRATHCNEVPSWQRRIESRITAARVLIGKLTSFRSGNTRPRVMRFVREAFSGERVNLSHPDVHRKLTERIDDLKQKIAAWGKRIRRYSERVKRYRQNRLFMSDQKKFYKGLGRPDGRVTGPGPNQTETIAFWRNLWSEPVTHGEGPWMETVEEACATISPMNPITITEDDVVAAVRKAPNWKSPGPDGLHGYWLKGFWRSHATLAVQFQEALENGALPDLLTTGVTHLTPKDGATADPSKYRPITCLCTIYKILTSILSSKIYRHVADNNILSEAQNGCKGGSRGSKELLLIDTAVCRLVKRNRRNFSATWIDYKKAFDSVPHTWLLRVLELYKVDSTTRHFLETCMGQWSTMLSLSGKRMTDAADRIRICRGIFQGDCLSPLWFCLALNPLSTVLEDSAIGFQFRRGGHQMSHLLYMDDLKLFAPNAHRLEELLQITENFSSSIGMEFGLEKCAVIHVERGRIIRSTNVEAGPRQMRSLSETETYRYLGMSESLGVRETVVKQAVGEEFWERLTKVLRSYLSGANKVRAFNGWVMPVLLYTFGVLRWSQTELDTLDRRVRTTMISHRVRHPKSSVERMYIPRKCGGRGLLSAKTMHNREMCNLRNFFLTDSGGGLRRAIVECDNGLTPLSLSDQQWRDPVVLSPSAREAVWKEKELHGRFYKALHEPHVDRKASMHWLRFGDLFGETEGFVCAIQDQVVKTRNYRRYIIKDGTEDICRACRHPGETLRHVTSGCSALANTEYLHRHNQAARILHQELALKYGFLERRIPYYRYSPEPVLENSRAKLYWDRLIITDRTILANRPDIVLMDREQSWVFLVDVTIPHDDGLVKAETEKRRKYLNLAHEIVDMWAVASAEIIPVVLSVNGLIPISLRDNLRRLGFRGGSLPGQMQRAVLLDTARIVRRFLSLSP

SEQ ID NO: 14504 - protein, 1206 aa, Bembecia ichneumoniformis
MGAPRCTQPFNMMMNSKDIRIGPLPGGRRGTSRTNAGTGRGRGRASVLRGAGSPPCLPSNSSTPPDGLVPTEPPVAQNSASAAGGTRRRMAWTNAMNINAMRAFYRATMIETGGTGYRARMHREFRQLEPEVTVTEQNLSDRVRYIQRSGLFSASELEQLRQEVVPDPNAASVVEASARSRSGTDPHVQPRDCAETNSRPQHMQGEDEGITAQEIERMRSTLEEAILEYRQTPLEMRQRLPRVPLSVKVRDVVETINNMLPSYLESSTGLSDTDSILFGAAMAVCRIVGVKVCLPGRATHCNEVPAWQRRIESRITAARVLIGKLISFRSGNTRPRVMRFVREAFSGERVNLSHPDVHRKLTERIDDLKQKIAAWGKRIRRYSERVKRYRQNRLFMSDQKKFYKSLERPNGRVTGPGPSQAETISFWRSLWSEPVTHEEGPWMEVVEEACATISPMNPITITEDDVVVAIRKAPNWKSPGPDGLHGYWLKGFWRSHATLAIQFQEALETGALPNFLTTGVTHLAPKDGATADPSRYRPITCLCTIYKILTSILSSKIYRHVTDNNILSEAQNGCKGGSRGSKELLLIDTAVCRLVKRNRRNFSAAWIDYKKAFDSVPHTWLLRVLELYKVDSTTRHFLETCMGQWSTMLSLSGKRMTDAADRIRICRGIFQGDCLSPLWFCLALNPLSTVLEDSAIGFQFRRGGHQMSHLLYMDDLKLFAPNAHRLEELLKITENFSRSIRMEFGLDKCAVIHVERGRIIRSTNVEAGPRQMRSLSETETYRYLGMSESLGVRETVVKQSVGEEFWERLTKVLRSYLSGANKIRAFNGWVMPVLLYTFGVLRWSQTELDTLDRRVRTTMVSHRVRHPKSSVERLYIPRKCGGRGLLSAKTMHNREMCNLRNFFLTNSGGGLRRAIVECDNGLTPLSLSDQQWREPVVLSPSAREAVWKEKELHGRFYKALHEPHVDRKASVHWLRFGDLFGETEGFVCAIQDQVVKTRNYRRYIIKDGTEDICRACRHPGETLRHVTSGCSALANTEYLHRHNQAARILHQELALKYGFLERRIPYYRYSPEPVLENSRAKLYWDRPIITDRTILANRPDIVLMDREQSRVFLVDVTIPHDDGLVKAETEKRRKYLDLAHEIVDMWAVASVEIIPVVLSVNGLIPVSLRDNLGRLGFRGGSLPGQMQRAVLLDTARIVRRFLSLSP

SEQ ID NO: 14505 - protein, 1196 aa, Bembecia ichneumoniformis
MMMNLENDLRIWPLPGGRRGTSRTNAGTGRGRGRASVIRGAGSPPNLPSNSSSPPGGLVPIEPSVAQNSASAAGGPRRRMAWSNAMNINAMRAFYRATMIETGGTGYRARMHREFRQLEPEVTVTEQNLSDRVRYIQRSGLFSASELEQLRQEVVPDPNAASVVEASAQLRSGTDPHVQPRDCAETNSRPQHMQGEDEGITAQEIERMRSTLEEAILEYRQTPLEMRQRLPRVPLSVKVRDVVETINNMLPSYLESSTGLSDTDSILFGAAMAVCRIVGVKVRLPGRATHCNEVPAWQRRIESRITAARVLIGKLISFRSGNTRPRVMRFVREAFSGERVNLSHPDVHRKLTERIDDLKQKIAAWGKRIRRYSERVKRYRQNRLFMSDQKKFYKGLERPNGRVTGPGPSQAETISFWRSLWSEPVTHEEGPWMEVVEEACATISPMNPITITEDDVVVAVRKAPNWKSPGPDGLHGYWLKGFWRSHATLAIQFQEALETGALPNFLTTGVTHLAPKDGATADPSRYRPITCLCTIYKILTSILSSKIYRHVTDNNILSEAQNGCKGGSRGSKELLLIDTAVCRLVKRSRRNFSAAWIDYKKAFDSVPHTWLLRVLELYKVDSTTRHFLETCMGQWSTMLSLSGKRMTDAADRIGICRGIFQGDCLSPLWFCLALNPLSTVLEDSAIGFQFRRGGHRMSHLLYMDDLKLFAPNAHRLEELLQITENFSRSIRMEFGLDKCAVIHVERGRIIRSTNVEAGPRQMRSLSGTETYRYLGMSESLGVRETVMKQTVGEEFWERLTKVLRSYLSGANKIRAFNGWVMPVLLYTFGVLRWSQTELDTLDRRVRTTMISHRMRHPKSSVERMYIPRKCGGRGLLSAKTMHNREMCNLRNFFLTDSGGGLRRAIVECDNGLTPLSLSDQQWRDPVVLSPSAREAVWKEKELHGRFYKALHEPHVDRKASVHWLRFGDLFGETEGFVCAIQDQVVKTRNYRRYIIKDGTEDICRACRHPGETLRHVTSGCSALANTEYLHRHNQAARILHQELALKYGFLERRIPYYRYSPEPVLENSRAKLYWDRPIITDRTILANRPDIVLMDREQSRVFLVDVTIPHDDGLVKAETEKRRKYLDLAHEIVDMWAVASAEIIPVVLSVNGLIPISLRDNLRRLGFRGGSLPGQMQRAVLLDTARIVRRFLSLSP

SEQ ID NO: 14506 - protein, 1169 aa, Bembecia ichneumoniformis
MKMDHDVISIGPLPGGRQGTSRSRAGTGRGRGRASVQYPSPPAGLVPTGSSTTQNSASATGGTRRRMAWSTQMNSNAMRAFYRATSAVTGGTGYRALMHQQFVQLEPGVNVTEQNLSDRVRFIQRSGLFSATELERLRREAVPELDSVQTREVSPQPSPNEEANVVRNDEEGTTTQDLERMSGMLEEAILEYRRRPLEMRPRLPRVPLSVKVRDVVGAINNMLPSYLESSIDLCDTDSILFGAAIAVCRIVGAKVHVPGRVSRYNEIPAWQRRIESRIAWARVLIGKLTSFRSGNTRTRVVRFVRKAFSGETVNLSHPDMPRRLTERIDDLKQKIAAWGRRIRRYSERVKRYRQNRLFVSDQKKFYKSLECSDGRVTGPIPNQAETVAFWRDLWSQPVTHAEGPWIETVEGACATIRPMNPVTIIEDDVVAAVRKASNWKSPGPDGLHNYWLKGFWRSHATLARQFQRALENGTLPEFLTTGVTHLAPKDGATADPSKYRPITCLCTIYKTLTSILSSKIYRHIAENNIMSGAQNGCRGGSRGSKELLLIDTAVSRLVKRNRRNFSAAWIDYKKAFDSVPHTWLLRVLELYKVDGTTREFLRACMGQWSTILSLSGQRMTDAADRIRISRGIFQGDCLSPLWFCLALNPLSTILENSRLGFQFRRGGHRMSHLLYMDDLKLFAPNAHHLEELLQLTTDFSSSIGMEFGFDKCGVLHVERGRVLRSTDVEVGPGQMRSLSETETYRYLGMSESLGVMEKVVKQSVCEEFWERLTKVLRSYLSGANKVRAFNGWVMPTLLYTFGVLRWSQTELDALDRRVRTTMISHRMRHPKSSVERMYVSRKCGGRGLLCAKTMHNREICNLRNFFLADSGGVLRRAVVECDNGLTPLFLADQQWRDPVIPSTSVREAVWKEKELHGRFYKALHEPHIDRKASVHWLRFGDLFGETEGFVCAIQDGVVKTRNYQRYIIKDGTEDICRACRHPGETLRHITSGCSALANTEYLHRHNQAAKILHQELALKYGFIEERMPYYRYSPEPVFENSRAKLYWDRPIITDRTILANRPDIVLMDREQSRVFLVDVTIPHDDGLVKAETEKKRKYLDLAHEIVDMWAVASTEIIPVVISVNGLIPTSLNNNLKRLGFRGGSLPAQMQKAVLLDTARIVRRFLSLSL

SEQ ID NO: 14507 - protein, 1198 aa, Bembecia ichneumoniformis
MMMNLNGKRIWPLPGGRRGTSRTNAGTGRGRGRASVIRGAGSPPSLPSNSSSPPGGLVPIGPSAAQNSASAAGGPRRRMAWTNAMNTNAMRAFYMATTTETGGTGYRARMHREFLQLEPGLTITEQNLSDRVRYIQRSGLFSAAELEQLRQEVAPDPNAASVVDASAPRRGGADYPVDPVQPRSDAETNSRPQYMQGEDEGVTTQEIERMRSTLEEAILEYRQTPLEMRQRLPRVPLSVKVRDVVEAINNMLPSYLESSTGLSDTDSILFGAAMAVCRIVGAKVHLPGRATHCNEVPAWQRRIESRITAARVLIGKLTSFRSGNTRPRVMRFVREAFPGERVNLSHPDVHRKLTERIDDLKQKIAAWGKRIRRYSERVKRYRQNRLFMSDQKKFYKGLGRPDDRVTGLRPNQAETIDFWRNLWSEPVTHEEGPWMETVEEACATISPMNPISITEDDVVAAVRKAPNWKSPGPDGLHGYWLKGFWRSHATLAVQFQEALESGALPNFLTTGVTHLTPKDGATADPSKYRPITCLCTIYKILTSILSSKIYRHVADNNILSEAQNGCKGGSRGSKELLLIDTAVCRLVKRNRRNFSAAWIDYKKAFDSVPHTWLLRVLELYKVDSTTRHFLETCMGQWSTMLSLSGERMTDAADRIRISRGIFQGDCLSPLWFCLALNPLSTVLEDSAIGFQFRRGGHQMSHLLYMDDLKLFAPNAHRLEELLKITENFSRSIRMEFGLDKCAVIHVERGRIIRSTNVEAGPRQMRSLSETETYRYLGMSESLGVRETVVKQSVGEEFWERLTKVLRSYLSGANKIRAFNGWVMPVLLYTFGVLRWSQTELDTLDRRVRTTMISHRVRHPKSSVERLYIPRKCGGRGLLSAKTMHNREMCNLRNFFLTDSGGGLRRAIVECDNGLTPLSLSDQQWREPVVLSPSAREAVWKEKELHGRFYKALHEPHVDRKASVHWLRFGDLFGETEGFVCAIQDQVVKTRNYRRYIIKDGTEDICRACRHPGETLRHVTSGCSALANTEYLHRHNQAARILHQELALKYGFLERRIPYYRYSPEPVLENSRAKLYWDRPIITDRTILANRPDIVLMDREQSRVFLVDVTIPHDDGLVKAETEKRRKYLDLAHEIVDMWAVASVEVIPVVLSVNGLIPVSLRDNLGRLGFRGGSLPGQMQRAVLLDTARIVRRFLSLSP

SEQ ID NO: 14508 - protein, 1197 aa, Bembecia ichneumoniformis
MMMNLNNKRIWPLPGGRRGTSRTNAGTGRGRGRASVRGAGSPPSLPSNSSSPPGGLVPIGPSAAQNSASAAGGTRRRMAWTNAMNMNAMRAFYMATMTETGGTGYRARMHREFLQLEPEVTVTEQNLSDRVRYIQRSGLFSAAELEQLRQEVAPDPNAAFIVDASAPRRGSTDHSVDPVQPRSDAETNSRPQYVQGEDEGVTAQEIERMRSILEEAILEYRQTPLEMRQRLPRVPLSVKVRDVVEAINNMLPSYLESSTGLSDTDSILFGAAMAVCRIVGAKVRVPGRATHCNEVPSWQRRIESRITAARVLIGKLTSFRSGNTRPRVMRFVREAFSGERVNLSHPDVHRKLTERIDDLKQKIAAWGKRIRRYSERVKRYRQNRLFMSDQKKFYKGLGRPDGRVTGPGPNQTETIAFWRNLWSEPVTHGEGPWMETVEEACATISPMNPITITEDDVVAAVRKAPNWKSPGPDGLHGYWLKGFWRSHATLAVQFQEALENGALPDFLTTGVTHLTPKDGATADPSKYRPITCLCTIYKILTSILSSKIYRHVADNNILSEAQNGCKGGSRGSKELLLIDTAVCRLVKRNRRNFSAAWIDYKKAFDSVPHTWLLRVLELYKVDSTTRHFLETCMGQWSTMLSLSGKRMTDAADRIRICRGIFQGDCLSPLWFCLALNPLSTVLEDSAIGFQFRRGGHQMSHLLYMDDLKLFAPNAHRLEELLQITENFSSSIRMEFGLEKCAVIHVERGRIIRSTNVEAGPRQMRSLSETETYRYLGMSESLGVRETVVKQAVGEEFWERLTKVLRSYLSGANKVRAFNGWVMPVLLYTFGVLRWSQTELDTLDRRVRTTMISHRVRHPKSSVERMYIPRKCGGRGLLSAKTMHNREMCNLRNFFLTDSGGGLRRAIVECDNGLTPLSLSDQQWRDPVVLSPSAREAVWKEKELHGRFYKALHEPHVDRKASVHWLRFGDLFGETEGFVCAIQDQVVKTRNYRRYIIKDGTEDICRACRHPGETLRHVTSGCSALANTEYLHRHNQAARILHQELALKYGFLERRIPYYRYSPEPVLENSRAKLYWDRPIITDRTILANRPDIVLMDREQSRVFLVDVTIPHDDGLVKAETEKRRKYLDLAHEIVDMWAVASVEIIPVVLSVNGLVPISLRDNLRRLGFRGGSLPGQMQRAVLLDTARIVRRFLSLSP

SEQ ID NO: 14509 - protein, 1072 aa, Bembecia ichneumoniformis
MHQQFLQLEPGVNVTEQNLSDRVRFIQRSGLFSATELERLRREAVPELNSVQTREVSPQPSLNEEANVVRNDEEGIATQDLERMSSILEEAILEYRRTPLEMRPRLPRVPLNVKVRDVVGAINNMLPSYLESSIDLCDTDSILFGAAIAVCRIVGAKVHVPGRVSRYNEIPAWQRRIESRIAWARVLIGKLTSFRSGNTRTRVVRFVRKAFSGETVNLSHPDMPRRLTERIDDLKQKIAAWGGRIRRYSERVKRYRQNRLFVSDQKKFYKSLECSDGRVTGPIPNQAETVAFWRDLWSQPVTHAEGPWIETVEGACATIRPMNPITIIEDDVVAAVRKASNWKSPGPDGLHNYWLKGFWRSHATLARQFQGALENGTLPEFLTTGVTHLAPKDGATADPSKYRPITCLCTIYKTLTSILSSKIYRHIAENNIMSGAQNGCRGGSRGSKELLLIDTAVSRLVKRNRRNFSAAWIDYKKAFDSVPHTWLLRVLELYKVDGTTREFLRACMGQWSTMLSLSGQRMTDATDRIRISRGIFQGDCLSPLWFCLALNPLSTILENSRLGFQFRRGGHRMSHLLYMDDLKLFAPNAHHLEELLQLTTDFSSSIRMEFGFDKCGILHVERGRVIRSTDVEVGPGQMRSLSETETYRYLGMSESLGVMEKVVKQSVCEEFWERLTKVLRSYLSGVNKVRAFNGWVMPILLYTFGVLRWSQTELDALDRRVRTTMISHRMRHPKSSVERMYVSRKCGGRGLLCAKTMHNREICNLRNFFLADSGGVLRRAVVECDNGLTPLFLADQQWRDPVTPSTSVREAVWKEKELHGRFYKALHEPHIDRKASVHWLRFGDLFGETEGFVCAIQDGVVKTRNYQRYIIKDGTEDICRACRHPGETLRHITSGCSALANTEYLHRHNQAAKILHQELSLKYGFIEERIPYYRYSPEPVFENSRAKLYWDRPIITDRTILANRPDIVLMDREQSRVFLVDVTIPHDDGLVKAETEKKRKYLDLAHEIVDMWAVASTEIIPVVISVNGLIPTSLNSNLKRLGFRGGSLPAQMQKAVLLDTARIVRRFLSLSS

SEQ ID NO: 14510 - protein, 1114 aa, Bembecia ichneumoniformis
MNTNAMRAFYMATTTETGGTGYRARMHREFLQLEPGLTITEQNLSDRVRYIQRSGLFSAAELEQLRQEVAPDPNAASVVDASAPRRGGADYPVDPVQPRSDAETNSRPQYMQGEDEGVTTQEIERMRSTLEEAILEYRQIPLEMRQRLPRVPLSVKVRDVVEAINNMLPSYLESSTGLSDTDSILFGAAMAVCRIVGAKVHLPGRATHCNEVPAWQRRIESRITAARVLIGKLTSFRSGNTRPRVMRFVREAFPGERVNLSNPDMHRKLTERIDDLKQKIAAWGKRIRRYSERVKRYRQNRLFMSDQKKFYKGLGRPDDRVTGLGPNQAETIDFWRNLWSEPVTHEEGPWMETVEEACATISPMNPISITEDDVVAAVRKAPNWKSPGPDGLHGYWLKGFWRSHATLAVQFQEALESGALPNFLTTGVTHLTPKDGATADPSKYRPITCLCTIYKILTSILSSKIYRHVADNNILSEAQNGCKGGSRGSKELLLIDTAVCRLVKRNRRNFSAAWIDYKKAFDSVPHTWLLRVLELYKVDSTTRHFLETCMGQWSTMLSLSGERMTDAADRIRISRGIFQGDCLSPLWFCLALNPLSTVLEDSAIGFQFRRGGHQMSHLLYMDDLKLFAPNAHRLEELLKITENFSRSIRMEFGLDKCAVIHVERGRIIRSTNVEAGPRQMRSLSETETYRYLGMSESLGVRETVVKQSVGEEFWERLTKVLRSYLSGANKIRAFNGWVMPVLLYTFGVLRWSQTELDTLDRRVRTTMISHRVRHPKSSVERLYIPRKCGGRGLLSAKTMHNREMCNLRNFFLTDSGGGLRRAIVECDNGLTPLSLSDQQWREPVVLSPSAREAVWKEKELHGRFYKALHEPHVDRKASVHWLRFGDLFGETEGFVCAIQDQVVKTRNYRRYIIKDGTEDICRACRHPGETLRHVTSGCSALANTEYLHRHNQAARILHQELALKYGFLERRIPYYRYSPEPVLENSRAKLYWDRPIITDRTILANRPDIVLMDREQSRVFLVDVTIPHDDGLVKAETEKRRKYLDLAHEIVDMWAVASVEVIPVVLSVNGLIPVSLRDNLGRLGFRGGSLPGQMQRAVLLDTARIVRRFLSLSP

SEQ ID NO: 14511 - protein, 925 aa, Bembecia ichneumoniformis
MAVCRIVGAKVHLPGRATHCNEVPAWQRRIESRITAARVLIGKLTSFRSGNTRPRVMRFVREAFPGERVNLSNPDMHRKLTERIDDLKQKIAAWGKRIRRYSERVKRYRQNRLFMSDQKKFYKGLGRPDDRVTGLGPNQAETIDFWRNLWSEPVTHEEGPWMETVEEACATISPMNPISITEDDVVAAVRKAPNWKSPGPDGLHGYWLKGFWRSHATLAVQFQEALESGALPNFLTTGVTHLTPKDGATADPSKYRPITCLCTIYKILTSILSSKIYRHVADNNILSEAQNGCKGGSRGSKELLLIDTAVCRLVKRNRRNFSAAWIDYKKAFDSVPHTWLLRVLELYKVDSTTRHFLETCMGQWSTMLSLSGERMTDAADRIRISRGIFQGDCLSPLWFCLALNPLSTVLEDSAIGFQFRRGGHQMSHLLYMDDLKLFAPNAHRLEELLKITENFSRSIRMEFGLDKCAVIHVERGRIIRSTNVEAGPRQMRSLSETETYRYLGMSESLGVRETVVKQSVGEEFWERLTKVLRSYLSGANKIRAFNGWVMPVLLYTFGVLRWSQTELDTLDRRVRTTMISHRVRHPKSSVERLYIPRKCGGRGLLSAKTMHNREMCNLRNFFLTDSGGGLRRAIVECDNGLTPLSLSDQQWREPVVLSPSAREAVWKEKELHGRFYKALHEPHVDRKASVHWLRFGDLFGETEGFVCAIQDQVVKTRNYRRYIIKDGTEDICRACRHPGETLRHVTSGCSALANTEYLHRHNQAARILHQELALKYGFLERRIPYYRYSPEPVLENSRAKLYWDRPIITDRTILANRPDIVLMDREQSRVFLVDVTIPHDDGLVKAETEKRRKYLDLAHEIVDMWAVASVEVIPVVLSVNGLIPVSLRDNLGRLGFRGGSLPGQMQRAVLLDTARIVRRFLSLSP

SEQ ID NO: 14512 - protein, 989 aa, Bembecia ichneumoniformis
MSGMLEEAILEYRRTPLEMRPRLPRVPLSVKVQDVVGAINNMLPSYLESSIDLCDTDSILFGAAIAVCRIVGAKVHVPGRVSRYNEIPAWQRRIEGRIAWARVLIGKLTSFRSGNTRTRVVRFVRKAFSGETVNLSHPDMPRRLTERIDDLKQKIAAWGRRIRRYSERVKRCRQNRLFVSDQKKFYKSLECSEGRVTGPIPNQAETVAFWRDLWSQPVTHAEGPWIETVEGACATIRPMNPITIIEDDVVAAVRKASNWKSPGPDGLHNYWLKGFWRSHATLARQFQRALENGTLPEFLTTGVTHLAPKDGATADPSKYRPITCLCTIYKTLTSILSSKIYRHISENNIMSGAQNGCRGGSRGSKELLLIDTAVSRLVKRNRRNFSAAWIDYKKAFDSVPHTWLLRVLELYKVDDTTRKFLRACMGQWSTMLSLSGQRMTDAADRIRISRGIFQGDCLSPLWFCLALNPLSTILENSRLGFQFRRGGHRMSHLLYMDDLKLFAPNAHHLEELLQLTTDFSSSIGMEFGFDKCGILHVERGRVIRSTNVEVGPGQMRSLSGTETYRYLGMSESLGIMEKVVKQSVCEEFWERLTKVLRSYLSGVNKVRAFNGWVMPILLYTFGVLRWSQTELDALDRRVRTTMISHRMRHPKSSVERMYVSRKCGGRGLLCAKTMHNREICNLRNFFLADSGGVLRRAVVECDNGLTPLFLADQQWRDPVIPSTSVREAIWKEKELHGRFYKALHEPHIDRKASVHWLRFGDLFGETEGFVCAIQDGVVKTRNYQKYIIKDGTEDICRACRHPGETLRHITSGCSALANTEYLHRHNQAAKILHQELALKYGFIEERIPYYRYSPEPVFENSRAKLYWDRPIITDRTILANRPDIVLMDREQSRVFLVDVTIPHDDGLVKAETEKKRKYLDLAHEIVDMWAVASTEIIPVVISVNGLIPTSLNSNLKRLGFRGGSLPAQMQKAVLLDTARIVRRFLSLSS

SEQ ID NO: 14513 - protein, 1208 aa, Bembecia ichneumoniformis
MGAPRCTQPTKMMMDLNEARIWPLPGGRRGTSRTSAGTGRGRGRASVRGAGSPPSLPSNSSSPPGGLVPIGPSAAQNSASAAGGPRRRMAWTNAMNMNAMRAFYMATMTETGGTGYRARMHREFLQLEPEVTVTEQNLSDRVRYIQRSGLFGATELEQLRQEVTPDPNAAFVVDASAPRRGSTDYPVDPVQPRSGAETNNRPQYVQGEDEGITTQEIEQMRSTLEEAILEYRQTPLEMRQRLPRVPLSVKVRDVVEAINNMLPSYLESSTGLSDTDSILFGAAMAVCRIVGVKVRLPGRATHCNEVPAWQRRIESRIRETRVLIGKLTSFRSGNTRPRVMRFVREAFSGERVNLSHPDVHRKLTERIDDLKQKIAAWGKRIRRYSERVKRYRQNRLFMSDQKKFYKGLGRPDDRVTGPGPNQVETIAFWRNLWSEPVTHEEGPWMRTVEEACASISPMNPITITEDDVVAAVRKAPNWKSPGPDGLHGYWLKGFWRSHATLAVQFQEALENGALPDFLTTGVTHLTPKDGATADPSKYRPITCLCTLYKILTSILSFKIYRHVTDNNILSEAQNGCKGGSRGSKELLLIDTAVCRLVKRNRRNFSAAWIDYKKAFDSVPHTWLLRVLELYKVDSTTRHFLETCMGQWSTMLSLSGERMTDAADRIRISRGIFQGDCLSPLWFCLALNPLSTVLEDSAIGFQFRRGGHRMSHLLYMDDLKLFAPNAHRLEELLQITENFSRSIRMEFGLDKCAVIHVERGRIIRSTNVEVGPRQMRSLSGTETYRYLGMSESLGVRETVVKQSVGDEFWERLTKVLRSYLSGANKIRAFNSWVMPVLLYTFGVLRWSQTELDALDRRVRTTMISHRMRHPKSSVERMYIPRKCGGRGLLSAKTMHNREMCNLRNFFLTDSGGGLRRAIVECDNGLTPLSLSDQQWREPVLLSTSAREAVWKEKELHGRFYKALHEPHVDRKASVHWLRFGDLFGETEGFVCAIQDQVVKTRNYRRYIMKDDTEDICRACRHPGETLRHVTSGCSALANTEYLHRHNQGARILHQELALKYGFVEQRIPYYRYSPEPVLENSRAKLYWDRPIITDRTILANRPDIVLMDREQSRVFLVDVTIPHDDGLVKAETEKRRKYLDLAHEIVDMWAVASVEIIPVVLSVNGLIPVSFRDNLGRLGFRGGSLPGQMQRAVLLDTARIVRRFLSLSP

SEQ ID NO: 14514 - protein, 1169 aa, Bembecia ichneumoniformis
MKMDNDDMSIGPLPGGRQGTSRSRAGTGRGRGRASVPYPSPPAGLVPTGSSTTQNSASATGGTRRRMAWSTQMNSNVMRAFYRATSAVTGSTGYRALMHQQFLQLEPGVNVTEQNLSDRVRFIQRSGLFSATELERLRREAVPELDSVQTREVSPQPSLNEEANVVRNDEEGTATQDLERMSGILEEAILEYRRTPLEMRPRLPRVPLNVKVRDVVGALNNMLPSYLESSIDLWDTDSILFGAAIAVCRIVGAKVHVPGRVSRYNEIPAWQRRIESRIAWARVLIGKLTSFRSGNTRSRVVRFVRKAFSGETVNLSHPDMPRKLTERIDDLKQKIAAWGRRIRRYSERVKRYRQNRLFVSDQKKFYKSLECSDGRVTGPIPNQAETVAFWRDLWSQPVTHAEGPWIETVVGTCATIRPMNPITIIEDDVVAAVRKASNWKSPGPDGLHNYWLKGFWRSHATLARQFQRALENGTLPEFLTTGVTHLAPKDGATADPSKYRPITCLCTIYKTLTSILSSKIYRHIAENNIMSGAQNGCRGGSRGSKELLLIDTAVSRLVKRNRRNFSAAWIDYKKAFDSVPHTWLLRVLELYKVDGTTREFLRACMGQWSTMLSLSGQRMTDATDRIRISRGIFQGDCLSPLWFCLALNPLSTILENSRLGFQFRRGGHRMSHLLYMDDLKLFAPNAHHLEELLQLTSDFSSSIGMEFGFDKCGVLHVERGRVLRSTDVEVGPGQMRSLSETETYRYLGMSESLGVMERVVKQSVCEEFWERLTKVLRSYLSGANKVRAFNGWVMPILLYTFGVLRWSQTELDALDRRVRTTMISHRMRHPKSSVERMYVSRKCGGRGLLCAKTMHNREICNLRNFFLADSGGVLRRAVVECDNGLTPLFLADQQWRDPVIPSTSVREAVWKEKELHGRFYKALHEPHIDRKASVHWLCFGDLFGETEGFVCAIQDGVVKTRNYQKYIIKDGTEDICRACRHPGETLRHITSGCSALANTEYLHRHNQAAKILHQELALKYGFIEERIPYYRYSPEPVFENSRAKLYWDRPIITDRTILANRPDIVLMDREQSRVFLVDVTIPHDDGLVKAETEKKRKYLDLAHEIVDMWAVASTEIIPVVISVNGLIPTSLNSNLKRLGFRGGSLPAQMQKVVLLDTARIVRRFLSLSS

SEQ ID NO: 14515 - protein, 1089 aa, Bembecia ichneumoniformis
MHREFLQLEPEVTVTEQNLSDRVRYIQRSGLFGATELEQLRQEVTPDPNAAFVVDASAPRRGSTDYPVDPVQPRSGAETNNRPQHVQGEDEGITTQEIEQMRSTLEEAILEYRQTPLEMRQRLPRVPLSVKVRDVVEAINNMLPSYLESSTGLSDTDSILFGAAMAVCRIVGVKVRLPGRATHCNEVPAWQRRIESRIRETRVLIGKLTSFRSGNTRPRVMRFVREAFSGERVNLSHPDVHRKLTERIDDLKQKIAAWGKRIRRYSERVKRYRQNRLFMSDQKKFYKGLGRPDDRVTGPGPNQVETIAFWRNLWSEPVTHEEGPWMRTVEEACATISPMNPITITEDDVVAAVRKAPNWKSPGPDGLHGYWLKGFWRSHATLAVQFQEALENGALPDFLTTGVTHLTPKDGATADPSKYRPITCLCTLYKILTSILSFKIYRHVTDNNILSEAQNGCKGGSRGSKELLLIDTAVCRLVKRNRRNFSAAWIDYKKAFDSVPHTWLLRVLELYKVDSTARHFLETCMGQWSTMLSLSGERMTDAADRIRISRGIFQGDCLSPLWFCLALNPLSTVLEDSAIGFQFRRGGHRMSHLLYMDDLKLFAPNAHRLEELLQITENFSRSIRMEFGLDKCAVIHVERGRIIRSTNVEVGPRQMRSLSGTESYRYLGMSESLGVRETVVKQSVGDEFWERLTKVLRSYLSGANKIRAFNSWVMPVLLYTFGVLRWSQTELDALDRRVRTTMISHRMRHPKSSVERMYIPRKCGVRGLLSAKTMHNREMCNLRNFFLTDSGGGLRRAIVECDNGLTPLSLSDQQWREPVVLSASAREAVWKEKELHGRFYKALHEPHVDRKASVHWLRFGDLFGETEGFVCAIQDQVVKTRNYRRYIIKDDTEDICRACRHPGETLRHVTSGCSALANTEYLHRHNQAARILHQELALKYGFVEQRIPYYRYSPEPVLENSRAKLYWDRPIITDRTILANRPDIVLMDREQSRVFLVDVTIPHDDGLVKAETEKRRKYLDLAHEIVDMWAVTSVEIIPVVLSVNGLIPVSLRDNLGRLGFRGGSLPGQMQRAVLLDTARIVRRFLSLSP

SEQ ID NO: 14516 - protein, 1169 aa, Bembecia ichneumoniformis
MKMDNSVIRIGPLPGGRQGTSRSRAGTGRGRGRASVLYPSPPAGLVPTGSSMTQHSASATGGTRRRMAWTTEMNSNAMRAFYRATSAVTGGTGYRALMHQQFLQLEPGVNVTEQNLSDRVRFIQRSGLFSATELERLRREAVPELDFVQTREVSPQPSLNEEANVVRNDEEGTATQDLERMSGILEEAILEYRRTPLEMRPRLPRVPLSVKVRDVVGAINNMLPSYLEGSIDLCDTDSILFGAAIAVCRIVGAKVHVPGRVSRYNEIPAWQRRIESRIAWARVLIGKLTSFRSGNTRSRVVRFVRKAFSGETVNLSHPDMPRKLTERIDDLKQKIAAWGRRIRRYSERVKRYRQNRLFVSDQKKFYKSLECSDGRVTGPIPNQAETVAFWRDLWSQPVTHAEGPWIETVEGACATIRPMNPITIIEDDVVAAVRKASNWKSPGPDGLHNYWLKGFWRSHATLARQFQGALENGTLPEFLTTGVTHLAPKDGATADPSKYRPITCLCTIYKTLTSILSSKIYRHIAENNIMSGAQNGCRGGSRGSKELLLIDTAVSRLVKRNRRNFSAAWIDYKKAFDSVPHTWLLRVLELYKVDGTTREFLRACMGQWSTMLSLSGRRMTDAADKIRISRGIFQGDCLSPLWFCLALNPLSTILENSRLGFQFRRGGHRMSHLLYMDDLKLFAPNAHHLEELLQLTTDFSSSIGMEFGFDRCGVLHVERGRVIRSTGVEVGPGQMRSLSETETYRYLGMSESLGVVEKVVKQSVCEEFWERLTKVLRSYLSGANKVRAFNGWVMPILLYTFGVLRWSQTELDALDRRVRTTMISHRMRHPKSSVERMYVSRKCGGRGLLCAKTMHNREICNLRNFFLADSGGVLRRAVVECDNGLTPLFLADQQWRDLVIPSTSVREAVWKEKELHGRFYKALHEPHIDRKASVHWLRFGDLFGETEGFVCAIQDGVVKTRNYQKYIIKDGTEDICRACRHPGETLRHITSGCSALANTEYLHRHNQAAKILHQELSLKYGFIEERIPYYRYSPEPVFENGRAKLYWDRPIITDRTILANRPDIVLMDREQSRVFLVDVTIPHDDGLVKAETEKKRKYLDLAHEIVDMWAVASTEIIPVVISVNGLIPTSLNSYLKRLGFRGGSLPAQMQKAVLLDTARIVRRFLSLSS

SEQ ID NO: 14517 - protein, 1206 aa, Bembecia ichneumoniformis
MGAPRCTQPFNMMMNSKDIRIGPLPGGRRGTSRTNAGTGRGRGRASVLRGAGSPPCLPSNSSTPPDGLVPTEPPVAQNSASAAGGTRRRMAWTNAMNINAMRAFYRATMIETGGTGYRARMHREFRQLEPEVTVTEQNLSDRVRYIQRSGLFSASELEQLRQEVVPDPNAASVVEASARSRSGTDPHVQPRDCAETNSRPQHMQGEDEGITAQEIERMRSTLEEAILEYRQTPLEMRQRLPRVPLSVKVRDVVETINNMLPSYLESSTGLSDTDSILFGAAMAVCRIVGVKVCLPGRATHCNEVPAWQRRIESRITAARVLIGKLISFRSGNTRPRVMRFVREAFSGERVNLSHPDVHRKLTERIDDLKQKIAAWGKRIRRYSERVKRYRQNRLFMRDQKKFYKSLERPNGRVTGPGPSQAETISFWRSLWSEPVTHEEGPWMEVVEEACATISPMNPITITEDDVVVAIRKAPNWKSPGPDGLHGYWLKGFWRSHATLAIQFQEALETGALPNFLTTGVTHLAPKDGATADPSRYRPITCLCTIYKILTSILSSKIYRHVTDNNILSEAQNGCKGGSRGSKELLLIDTAVCRLVKRNRRNFSAAWIDYKKAFDSVPHTWLLRVLELYKVDSTTRHFLETCMGQWSTMLSLSGKRMTDAADRIRICRGIFQGDCLSPLWFCLALNPLSTVLEDSAIGFQFRRGGHQMSHLLYMDDLKLFAPNAHRLEELLKITENFSRSIRMEFGLDKCAVIHVERGRIIRSTNVEAGPRQMRSLSETETYRYLGMSESLGVRETVVKQSVGEEFWERLTKVLRSYLSGANKIRAFNGWVMPVLLYTFGVLRWSQTELDTLDRRVRTTMVSHRVRHPKSSVERLYIPRKCGGRGLLSAKTMHNREMCNLRNFFLTNSGGGLRRAIVECDNGLTPLSLSDQQWREPVVLSPSAREAVWKEKELHGRFYKALHEPHVDRKASVHWLRFGDLFGETEGFVCAIQDQVVKTRNYRRYIIKDGTEDICRACRHPGETLRHVTSGCSALANTEYLHRHNQAARILHQELALKYGFLERRIPYYRYSPEPVLENSRAKLYWDRPIITDRTILANRPDIVLMDREQSRVFLVDVTIPHDDGLVKAETEKRRKYLDLAHEIVDMWAVASVEIIPVVLSVNGLIPVSLRDNLGRLGFRGGSLPGQMQRAVLLDTARIVRRFLSLSP

SEQ ID NO: 14518 - protein, 1103 aa, Bembecia ichneumoniformis
MAWSTQMNANAMRAFYRATSAVTGGTGYRAQMHQQFLQLEPGVNVTEQNLSDRVRFIQRSGLFSATELERLRREAVPELDSVQTREVSPQPSLNEEANVVRNDEEGTATQDLERMSGMLEEAILEYRRTPLEMRPRLPRVPLSVKVQDVVGAINNMLPSYLESSIDLCDTDSILFGAAIAVCRIVGAKVHVPGRVSRYNEIPAWQRRIEGRIAWARVLIGKLTSFRSGNTRTRVVRFVRKAFSGETVNLSHPDMPRRLTERIDDLKQKIAAWGRRIRRYSERVKRCRQNRLFVSDQKKFYKSLECSEGRVTGPIPNQAETVAFWRDLWSQPVTHAEGPWIETVEGACAIIRPMNPITIIEDDVVAAVRKASNWKSPGPDGLHNYWLKGFWRSHATLARQFQRALENGTLPEFLTTGVTHLAPKDGATADPSKYRPITCLCTIYKTLTSILSSKIYRHIAENNIMSGAQNGCRGGSRGSKELLLIDTAVSRLVKRNRRNFSAAWIDYKKAFDSVPHTWLLRVLELYKVDDTTREFLRACMGQWSTMLSLSGQRMTDAADRIRISRGIFQGDCLSPLWFCLALNPLSTILENSRLGFQFRRGGHRMSHLLYMDDLKLFAPNAHHLEELLQLTTDFSSSIGMEFGFDKCGILHVERGRVIRSTNVEVGPGQMRSLSETETYRYLGMSESLGIMEKVVKQSVCEEFWERLTKVLRSYLSGVNKVRAFNGWVMPILLYTFGVLRWSQTELDALDRRVRTTMISHRMRHPKSSVERMYVSRKCGGRGLLCAKTMHNREICNLRNFFLADSGGVLRRAVVECDNGLTPLFLADQQWRDPVIPSTSVREAVWKEKELHGRFYKALHEPHIDRKASVHWLRFGDLFGETEGFVCAIQDGVVKTRNYQRYIIKDGTEDICRACRHPGETLRHITSGCSALANTEYLHRHNQAAKILHQELALKYGFIEERIPYYRYSPEPVFENSRAKLYWDRPIITDRTILANRPDIVLMDREQSRVFLVDVTIPHDDGLVKAETEKKRKYLDLAHEIVDMWAVASTEIIPVVISVNGLIPTSLNSNLKRLGFRGGSLPAQMQKAVLLDTARIVRRFLSLSS

SEQ ID NO: 14519 - protein, 1169 aa, Bembecia ichneumoniformis
MQMDNDESSIGPLPGGRQGTSRSRAGTGRGRGRASVPYPSPPAGLVPTGSSTTQNSASATGGTRRRMAWSTQMNANAMRAFYRATSAVTGGTGYRAQMHQQFLQLEPGVNVTEQNLSDRVRFIQRSGLFSATELERLRREAVPELDSVQTREVSPQPSLNEEANVVRNDEEGTATQDLERMSGMLEEAILEYRRTPLEMRPRLPRVPLSVKVQDVVGAINNMLPSYLESSIDLCDTDSILFGAAIAVCRIVGAKVHVPGRVSRYNEIPAWQRRIEGRIAWARVLIGKLTSFRSGNTRTRVVRFVRKAFSGETVNLSHPDMPRRLTERIDDLKQKIAAWGRRIRRYSERVKRCRQNRLFVSDQKKFYKSLECSEGRVTGPIPNQAETVAFWRDLWSQPVTHAEGPWIETVEGACATIRPMNPITIIEDDVVAAVRKASNWKSPGPDGLHNYWLKGFWRSHATLARQFQRALENGTLPEFLTTGVTHLAPKDGATADPSKYRPITCLCTIYKTLTSILSSKIYRHIAENNIMSGAQNGCRGGSRGSKELLLIDTAVSRLVKRNRRNFSAAWIDYKKAFDSVPHTWLLRVLELYKVDDTTREFLRACMGQWSTMLSLSGQRMTDAADRIRISRGIFQGDCLSPLWFCLALNPLSTILENSRLGFQFRRGGHRMSHLLYMDDLKLFAPNAHHLEELLQLTTDFSSSIGMEFGFDKCGILHVERGRVIRSTNVEVGPGQMRSLSETETYRYLGMSESLGIMEKVVKQSVCEEFWERLTKVLRSYLSGVNKVRAFNGWVMPILLYTFGVLRWSQTELDALDRRVRTTMISHRMRHPKSSVERMYVSRKCGGRGLLCAKTMHNREICNLRNFFLADSGGVLRRAVVECVNGLTPLFLADQQWRDPVIPSTSVREAVWKEKELHGRFYKALHEPHIDRKASVHWLRFGDLFGETEGFVCAIQDGVVKTRNYQRYIIKDGTEDICRACRHPGETLRHITSGCSALANTEYLHRHNQAAKILHQELALKYGFIEERIPYYRYSPEPVFENSRAKLYWDRPIITDRTILANRPDIVLMDREQSRVFLVDVTIPHDDGLVKAETEKKRKYLDLAHEIVDMWAVASTEIIPVVISVNGLIPTSLNSNLKRLGFRGGSLPAQMQKAVLLDTARIVRRFLSLSS

SEQ ID NO: 14520 - protein, 1169 aa, Bembecia ichneumoniformis
MVMDINGISIGPLPGGRQGTSRSRAGTGRGRGRASVPYPSPPAGLVPTESSTTQNSASATGGTRRRMAWSTQMNSNAMRAFYRATSAVTGGTGYRALMHQQFLQLEPGVNVTEQNLSDRVRFIQRSGLFSATELERLRREAVPELDSVQTREVSPQPSLNEEENVVRNDEEGTATQDLERMSGILEEAILEYRRTPLEMRPRLPRVPLNVKVRDVVGAINNMLPSYLESSIDLWDTDSILFGAAIAVCRIVGAKVHMPGRVARYNEAPAWQRRIESRIAWARVLIGKLTSFRSGNTRTRVVRFVRKAFSGETVNLSHPDMPRKLTERIDDLKQKFAAWGRRIRRYSERVKRYRQNRLFMSDQKKFYKSLECSDGRVTGPIPNQAETVAFWRDLWSQPVTHAEGPWIETVVDACATIRPMNPITIIEDDVVAAVRKASNWKSPGPDGLHNYWLKGFWRSHATLTRQFQRALENGTLPEFLTTGVTHLAPKDGATADPSKYRPITCLCTIYKTLTSILSSKIYRHIAENNIMSGAQNGCRGGSRGSKELLLIDTAVSRLVKRNRRNFSAAWIDYKKAFDSVPHTWLLRVLELYKVDGTTREFLRACMGQWSTMLSLSGQRMTDAADRIRISRGIFQGDCLSPLWFCLALNPLSTILENSRLGFQFRRGGHRMSHLLYMDDLKLFAPNAHHLEELLQLTTDFSSSIGMEFGFDKCGVLHVERGRVIRSTDVGVGPGQMRSLSETETYRYLGMSESLGVMEKVVKQSVCEEFWERLTKVLRSYLSGVNKVRAFNGWVMPILLYTFGVLRWSQTELDALDRRVRTTMISHRMRHPKSSVERMYVSRKCGGRGLLCAKTMHNREICNLRNFFLADSGGVLRRAVVECDNGLTPLFLSDQQWRDPVIPSTSVREAVWKEKELHGRFYKALHEPHIDRKASVHWLRFGDLFGETEGFVCAIQDGVVKTRNYQKYIIKDGTEDICRACRHPGETLRHITSGCSALANTEYLHRHNQAAKILHQELALKYGFIEERIPYYRYSPEPVFENSRAKLYWDRPIITDRTILANRPDIVLMDREQSRVFLVDVTIPHDDGLVKAETEKKRKYLDLAHEIVDMWAVASTEIIPVVISVNGLIPTSLNSNLKRLGFRGGSLPAQMQKAVLLDTARIVRRFLSLSS

SEQ ID NO: 14521 - protein, 1167 aa, Bembecia ichneumoniformis
MDDNEMSMGPLPGGRQGTSRSRAGTGRGRGRASVLYPSPPAGLVPTGSSTTLHSASATGGTRRRMAWSTEMNSNAMRAFYRATSAVTGGTGYRAQMHQQFLQLEPGVNVTEQNLSDRVRFIQRSGLFSATELERLRREAVPELDSVQTREVSPQPSLNEEANVVRNDEEGIVTHDLERMSGILEEAILEYRQTPLEMRPRLPRVPLNVKVRDVVGAINNMLPSYLESSIDLWDTDSILFGAAIAVCRIVGAKVHMPGRVARYNEAPAWQRRIESRIAWARVLIGKLTSFRSGNTRTRVVRFVRKAFSGETVNLSHPDMPRKLTERIDDLKQKIAAWGRRIRRYSERVKRYRQNRLFMSDQKKFYKSLECSDGRVTGPIPNQAETVAFWRDLWSQPVTHAEGPWIETVEGACATIRPMNPITIIEDDVVAAVRKASNWKSPGPDGLHNYWLKGFWRSHATLARQFQGALENGTLPEFLTTGVTHLAPKDGATADPSKYRPITCLCTIYKTLTSILSSKIYRHIAENNIMSGAQNGCRGGSRGSKELLLIDTAVSRLVKRNRRNFSAAWIDYKKAFDSVPHTWLLRVLELYKVDGTTREFLRACMGQWSTILSLSGQRMTDAADRIRISRGIFQGDCLSPLWFCLALNPLSTILENSRLGFQFRRGGHRMSHLLYMDDLKLFAPNARHLEELLQLTTDFSSSIGMEFGFDKCGVLHVERGRVIRSTDVEVGPGQMRSLSETETYRYLGMSESLGVMEKVVKQSVCEEFWERLTKVLRSYLSGANKVRAFNGWVMPILLYTFGVLRWSQTELDALDRKVRTTMISHRMRHPKSSVERMYVSRKCGGRGLLCAKTMHNREICNLRNFFLADSGGVLRRAVVECDNGLTPLFLADQQWRDPVIPSTSVREAVWKEKELHGRFYKALHEPHIDRKASVHWLRFGDLFGETEGFVCGIQDGVVKTRNYQRYIIKDGTEDICRACRHPGETLRHITSGCSALANTEYLHRHNQVAKILHQELALKYGFIEERMPYYRYSPEPVFENGRAKLYWDRPIITDRTILANRPDIVLIDREQSRVFLVDVTIPHDDGLVKAETEKKRKYLDLAHEIVDMWAVASTEIIPVVISVNGLIPTSLNSNLKRLGFRGGSLPAQMQKAVLLDTARIVRRFLSLSS

SEQ ID NO: 14522 - protein, 1197 aa, Bembecia ichneumoniformis
MMMNLNGKRIWPLPGGRRGTSRTNAGTGRGRGRASVIRGAGSPPSLPSNSSSPPGGLVPIGPSAAQNSASAAGGPRRRMAWTNAMNTNAMRAFYMATTTETGGTGYRARMHREFLQLEPGLTITEQNLSDRVRYIQRSGLFSAAELEQLRQEVAPDPNAASVVDASAPRRGGADYPVDPVQPRSDAETNSRPQYMQGEDEGVTTQEIERMRSTLEEAILEYRQIPLEMRQRLPRVPLSVKVRDVVEAINNMLPSYLESSTGLSDTDSILFGAAMAVCRIVAKVHLPGRATHCNEVPAWQRRIESRITAARVIIGKLTSFRSGNTRPRVMRFVREAFPGERVNLSNPDMHRKLTERIDDLKQKIAAWGKRIRRYSERVKRYRQNRLFMSDQKKFYKGLGRPDDRVTGLGPNQAETIDFWRNLWSEPVTHEEGPWMETVEEACATISPMNPISITEDDVVAAVRKAPNWKSPGPDGLHGYWLKGFWRSHATLAVQFQEALESGALPNFLTTGVTHLTPKDGATADPSKYRPITCLCTIYKILTSILSSKIYRHVADNNILSEAQNGCKGGSRGSKELLLIDTAVCRLVKRNRRNFSAAWIDYKKAFDSVPHTWLLRVLELYKVDSTTRHFLETCMGQWSTMLSLSGERMTDAADRIRISRGIFQGDCLSPLWFCLALNPLSTVLEDSAIGFQFRRGGHQMSHLLYMDDLKLFAPNAHRLEELLKITENFSRSIRMEFGLDKCAVIHVERGRIIRSTNVEAGPRQMRSLSETETYRYLGMSESLGVRETVVKQSVGEEFWERLTKVLRSYLSGANKIRAFNGWVMPVLLYTFGVLRWSQTELDTLDRRVRTTMISHRVRHPKSSVERLYIPRKCGGRGLLSAKTMHNREMCNLRNFFLTDSGGGLRRAIVECDNGLTPLSLSDQQWREPVVLSPSAREAVWKEKELHGRFYKALHEPHVDRKASVHWLRFGDLFGETEGFVCAIQDQVVKTRNYRRYIIKDGTEDICRACRHPGETLRHVTSGCSALANTEYLHRHNQAARILHQELALKYGFLERRIPYYRYSPEPVLENSRAKLYWDRPIITDRTILANRPDIVLMDREQSRVFLVDVTIPHDDGLVKAETEKRRKYLDLAHEIVDMWAVASVEVIPVVLSVNGLIPVSLRDNLGRLGFRGGSLPGQMQRAVLLDTARIVRRFLSLSP

SEQ ID NO: 14523 - protein, 1198 aa, Bembecia ichneumoniformis
MMMNLNGKRIWPLPGGRRGTSRTNAGTGRGRGRASVIRGAGSPPSLPSNSSSPPGGLVPIGPSAAQNSASAAGGPRRRMAWTNAMNTNAMRAFYMATTTETGGTGYRARMHREFLQLEPGLTITEQNLSDRVRYIQRSGLFSAAELEQLRQEVAPDPNAASVVDASAPRRGGADYPVDPVQPRSDAETNGRPQYMQGEDEGVTTQEIERMRSTLEEAILEYRQTPLEMRQRLPRVPLSVKVRDVVEAINNMLPSYLESSTDLSDTDSILFGAAMAVCRIVGAKVHLPGRATHCNEVPAWQRRIESRITAARVLIGKLTSFRSGNTRPRVMRFVREAFPGERVNLSNPDMHRKLTERIDDLKQKIAAWGKRIRRYSERVKRYRQNRLFMSDQKKFYKGLGRPDDRVTGLGPNKAETIDFWRNLWSEPVTHEEGPWMETVEEACATISPMNPISITEDDVVAAVRKAPNWKSPGLDGLHGYWLKGFWRSHATLAVQFQEALESGVLPNFLTTGVTHLTPKDGATADPSKYRPITCLCTIYKILTSILSSKIYRHVADNNILSEAQNGCKGGSRGSKELLLIDTAVCRLVKRNRRNFSAAWIDYKKAFDSVPHTWLLRVLELYKVDSTTRHFLETCMGQWSTMLSLSGERMTDAADRIRISRGIFQGDCLSPLWFCLALNPLSTVLEDSAIGFQFRRGGHQMSHLLYMDDLKLFAPNAHRLEELLKITENFSRSIRMEFGLDKCAVIHVERGRIIRSTNVEAGPRQMRSLSGTETYRYLGMSESLGVRETVVKQSVGEEFWERLTKVLRSYLSGANKIRAFNGWVMPVLLYTFGVLRWSQTELDTLDRRVRTTMISHRVRHPKSSVERLYIPRKCGGRGLLSAKTMHNREMCNLRNFFLTDSGGGLRRAIVECDNGLTPLSLSDQQWREPVVLSPSAREAVWKEKELHGRFYKALHEPHVDRKASVHWLRFGDLFGETEGFVCAIQDQVVKTRNYRRYIIKDGTEDICRACRHPGETLRHVTSGCSALANTEYLHRHNQAARILHQELALKYGFLERRILYYRYSPEPVLENSRAKLYWDRPIITDRTILANRPDIVLMDREQSRVFLVDVTIPHDDGLVKAETEKRRKYLDLAHEIVDMWAVASVEIIPVVLSVNGLIPVSLRDNLGRLGFRGGSLPGQMQRAVLLDTARIVRRFLSLSP

SEQ ID NO: 14524 - protein, 1196 aa, Bembecia ichneumoniformis
MMMNLENDLRIWPLPGGRRGTSRTNAGTGRGRGRASVIRGAGSPPNLPSNSSSPPGGLVPIEPSVAQNSASAAGGPRRRMAWSNAMNINAMRAFYRATMIETGGTGYRARMHREFRQLEPEVTVTEQNLSDRVRYIQRSGLFSASELEQLRQEVVPDPNAASVVEASAQLRSGTDPHVQPRDCAETNSRPQHMQGEDEGITAQEIERMRSTLEEAILEYRQTPLEMRQRLPRVPLSVKVRDVVETINNMLPSYLESSTGLSDTDSILFGAAMAVCRIVGVKVRLPGRATHCNEVPAWQRRIESRITAARVLTGKLISFRSGNTRPRVMRFVREAFSGERVNLSHPDVHRKLTERIDDLKQKIAAWGKRIRRYSERVKRYRQNRLFMSDQKKFYKSLERPNGRVTGPGPSQAETISFWRSLWSEPVTHKEGPWMEVVEEACATISPMNPITITEDDVVVAVRKAPNWKSPGPDGLHGYWLKGFWRSHATLAIQFQEALETGALPNFLTTGVTHLAPKDGATADPSRYRPITCLCTIYKILTSILSSKIYRHVTDNNILSEAQNGCKGGSRGSKELLLIDTAVCRLVKRSRRNFSAAWIDYKKAFDSVPHTWLLRVLELYKVDSTTRHFLETCMGQWSTMLSLSGKRMTDAADRIGICRGIFQGDCLSPLWFCLALNPLSTVLEDSAIGFQFRRGGHRMSHLLYMDDLKLFAPNAHRLEELLQITENFSRSIRMEFGLDKCAVIHVERGRIIRSTNVEAGPRQMRSLSGTETYRYLGMSESLGVRETVMKQTVGEEFWERLTKVLRSYLSGANKIRAFNGWVMPVLLYTFGVLRWSQTELDTLDRRVRTTMISHRMRHPKSSVERMYIPRKCGGRGLLSAKTMHNREMCNLRNFFLTDSGGGLRRAIVECDNGLTPLSLSDQQWRDPVVLSPSAREAVWKEKELHGRFYKALHEPHVDRKASVHWLRFGDLFGETEGFVCAIQDQVVKTRNYRRYIIKDGTEDICRACRHPGETLRHVTSGCSALANTEYLHRHNQAARILHQELALKYGFLERRIPYYRYSPEPVLENSRAKLYWDRPIITDRTILANRPDIVLMDREQSRVFLVDVTIPHDDGLVKAETEKRRKYLDLAHEIVDMWAVASAEIIPVVLSVNGLIPISLRDNLRRLGFRGGSLPGQMQRAVLLDTARIVRRFLSLSP

SEQ ID NO: 14525 - protein, 1167 aa, Bembecia ichneumoniformis
MDDNEMSMGPLPGGRQGTSRSRAGTGRGRGRASVLYPSPPAGLVPTGSSTTLHSASATGGTRRRMAWSTEMNSNAMRAFYRATSAVTGGTGYQAQMHQQFLQLEPGVNVTEQNLSDRVRFIQRSGLFSATELERLRREAVPELDSVQTREVSPQPSLNEEANVVRNDEEGIVTHDLERMSGILEEAILEYRQTPLEMRPRLPRVPLNVKVRDVVGAINNMLPSYLESSIDLWDTDSILFGAAIAVCRIVGAKVHMPGRVARYNEAPAWQRRIESRIAWARVLIGKLTSFRSGNTRTRVVRFVRKAFSGETVNLSHPDMPRKLTERIDDLKQKIAAWGRRIRRYSERVKRYRQNRLFMSDQKKFYKSLECSDGRVTGPIPNQAETVAFWRDLWSQPVTHAEGPWIETVEGACATIRPMNPITIIEDDVVAAVRKASNWKSPGPDGLHNYWLKGFWRSHATLARQFQGALENGTLPEFLTTGVTHLAPKDGATADPSKYRPITCLCTIYKTLTSILSSKIYRHIAENNIMSGAQNGCRGGSRGSKELLLIDTAVSRLVKRNRRNFSAAWIDYKKAFDSVPHTWLLRVLELYKVDGTTREFLRACMGQWSTILSLSGQRMTDAADRIRISRGIFQGDCLSPLWFCLALNPLSTILENSRLGFQFRRGGHRMSHLLYMDDLKLFAPNARHLEELLQLTTDFSSSIGMEFGFDKCGVLHVERGRVIRSTDVEVGPGQMRSLSETETYRYLGMSESLGVMEKVVKQSVCEEFWERLTKVLRSYLSGANKVRAFNGWVMPILLYTFGVLRWSQTELDALDRKVRTTMISHRMRHPKSSVERMYVSRKCGGRGLLCAKTMHNREICNLRNFFLADSGGVLRRAVVECDNGLTPLFLADQQWRDPVIPSTSVREAVWKEKELHGRFYKALHEPHIDRKASVHWLRFGDLFGETEGFVCGIQDGVVKTRNYQRYIIKDGTEDICRACRHPGETLRHITSGCSALANTEYLHRHNQVAKILHQELALKYGFIEERMPYYRYSPEPVFENGRAKLYWDRPIITDRTILANRPDIVLIDREQSRVFLVDVTIPHDDGLVKAETEKKRKYLDLAHEIVDMWAVASTEIIPVVISVNGLIPTSLNSNLKRLGFRGGSLPAQMQKAVLLDTARIVRRFLSLSS

SEQ ID NO: 14526 - protein, 1208 aa, Bembecia ichneumoniformis
MGAPRCTQPTKMMMDLNEARIWPLPGGRRGTSRTSAGTGRGRERASVRGAGSPPSLPSNSSSPPGGLVPIGPSAAQNSASAAGGPRRRMAWTNAMNMNAMRAFYMATMTETGGTGYRARMHREFLQLEPEVTVTEQNLSDRVRYIQRSGLFGATELEQLRQEVTPDPNAAFVVDASAPRRGSTDYPVDPVQPRSGAEINNRPQYVQGEDEGITTQEIEQMRSTLEEAILEYRQTPLEMRQRLPRVPLSVKVRDVVEAINNMLPSYLESSTGLSDTDSILFGAAMAVCRIVGVKVRLPGRATHCNEVPAWQRRIESRIRETRVLIGKLTSFRSGNTRPRVMRFVREAFSGERVNLSHPDVHRKLTERIDDLKQKIAAWGKRIRRYSERVKRYRQNRLFMSDQKKFYKGLGRPDDRVTGPGPNQVETIAFWRNLWSEPVTHEEGPWMRTVEEACATISPMNPITITEDDVVAAVRKAPNWKSPGPDGLHGYWLKGFWRSHATLAVQFQEALENGALPDFLTTGVTHLTPKDGATADPSKYRPITCLCTLYKILTSILSFKIYRHVTDNNILSEAQNGCKGGSRGSKELLLIDTAVCRLVKRNRRNFSAAWIDYKKAFDSVPHTWLLRVLELYKVDSTTRHFLGTCMGQWSTMLSLSGERMTDAADRIRISRGIFQGDCLSPLWFCLALNPLSTVLEDSAIGFQFRRGGHRMSHLLYMDDLKLFAPNAHRLGELLQITENFSRSIRMEFGLDKCAVIHVERGRIIRSTNVEVGPRQMRSLSGTETYRYLGMSESLGVRETVVKQSVGDEFWERLTKVLRSYLSGANKIRAFNSWVMPVLLYTFGVLRWSQTELDALDRRVRTTMISHRMRHPKSSVERMYISRKCGGRGLLSAKTMHNREMCNLRNFFLTDSGGGLRRAIVECDNGLTPLSLSDQQWREPVVLSPSAREAVWKEKELHGRFYKALHEPHVDRKASVHWLRFGDLFGETEGFVCAIQDQVVKTRNYRRYIIKDGTEDICRACRHPGETLRHVTSGCSALANTEYLHRHNQAARILHQELALKYGFLERRIPYYRYSPEPVLENSRAKLYWDRPIITDRTILANRPDIVLMDREQSRVFLVDVTIPHDDGLVKAETEKRRKYLDLAHEIVDMWAVASVEIIPVVLSVNGLIPVSLRDNLGRLGFRGGSLPGQMQRAVLLDTARIVRRFLSLSP

SEQ ID NO: 14527 - protein, 1105 aa, Parnassius apollo
MMEYGRTRKGPLPGGRQGASGAGAGRGSMRTASRARGAARPPSSPSHPSSPPAGLVSAGSSRAQQSAPASGGVRRMRWTTQMNSNALRAYFGAKGGETGCLAYRARMHRLFAELEPSLTVTEQNLADRVRYILRSNIFDVAELERLRREAVPSSDENATAEDAAPQMVEQPANVDAAVNTPVVVDSNDDGTVAQELELEHMRSTLEEAIVETRSTPLENRPRLPRIALSKRNRAVVRALNPMLVTYLEASRDLCETDSILFGAALAVCRIIGAKVSTAGRATGHSSAIPAWRRRIEERIAKARALIGRLICFRSGNNRPRIVRTVRMAFAGTNVSLSQPDITQKLTERIDDLKQRIAAWGKRIRRYTERSTRFNQNRLFQSDQKRLYESLERPMVSGTGPAPNQADTVAFWRGLWSEPVNHSEGPWTEVVASQCAGITPMDPVIITPDDVAEAVRRAPNWKSPGLDGLHHYWLKGFMVCHSVLARQFQEALNQKSLPSLITTGITHLVPKDQGTTDPTKYRPITCLPTIYKTLTSILSARITCHLDSNQVMSRAQNGCRGGGRGTKEPLLIDAVIGKVVKRNRRNFSAAWIDYRKAFDSVPHTWLKRVLELYKIDCTVRDFLEQCMGQWSTILCHLGERMMAAENHIRIRRGIFQGDCLSPIWFCLSLNPLSTLLEGSGRGFQLRRGGTKVTHLFYMDDLKLFASSRSHLMELLNITCEFSNSIGMELGTDKCAVLHVERGRVANSEGVDLSMPVNLRTLSEAETYRYLGMSQNIGIDETGMKQSVCDVFYARLTKVLNSLLSGVNKAHAYNGWVMPVLMYTFGILRWTQTELNALDRKVRTTMTSHRMHHPRSSVMRLYLSRKHGGRGFLSALTMHNREVCSLRDYFLARSDDPFYMDVISCDKGLTPLSLANEQWQDPAVQSISDRETVWKEKELHGRFYKALHEPFVDTVASLHWLRFGDLFGETEGFVCAIQDQVIKTNNYRRYILKDGTVDICRACRHPGESLRHVISGCSALSNSEYLHRHNLVARILHQELALKYGLVDQKLPYYKYLPEAVLENDRARLYWDRAIITDRTILANKPDIVLMDRGTVKDIFGRHYHSV

SEQ ID NO: 14528 - protein, 1090 aa, Parnassius apollo
MMELNRTRKGPLPGGRQGASGAGAGRGSMRTASRARGAARPPSSPSHPSSPPAGLVSAGSSRAQQSAPASGGVRRKRWTTQMNSNALRAYFRAKGGETGCLAYRARMHRLFAELEPSLTVTEQNLADRVRYILRSNIFDVAELERLRREAVPSSDENATAEDAAPQMVEQPANVDAAVNTPVVVDSNDDGTVAQELELEHMRSTLEEAIVETCSTPLKNRPRLPRIALSKRNRALVRALNPMLVTYLEASRDLCETDSILFGAALAVCCIIGAKVSTAGRATGHSNAIPAWRRRIEERIAKARALIGRLICFRSGNNRPRIVRTVRMAFAGTNVSFSQPDITQKLTERIDDLKQRIAAWGKRIRRYTERSTRFNQNRLFQSDQKRLYESLERPMVSGTGPAPNQAEAVAFWRGLWSEPVNHSEGPWTEVVASQCAGITPMDPVIITPDDVAEAVRRAPNWKSPGLDGLHHYWLKGFMVCHTVLARQFQEALNQKSLPSLFTTGITHLVPKDQGTTDPSKYRPITCLPTIYKTLTSILSARITCHLDSNQVMSRAQNECRGGGRGTKEPLLIDAVIGKVVKRNRRNFSAAWIDYRKAFDLVPHTWLKRVLELYKIDCTVRDFLEQCMGQWSTILCHLGERMMAAENHIRIRRGIFQGDCLSPIWFCLSLNPLSTLLEGSGRGFQLRKGGTKVTHLFYMDDLKLFASSRSHLMELLNITCEFSNSIGMELGTDKCAVLHVERGRVANSEGVDLSMPVNLRTLSEAETYRYLGMSQNIGIDETGMKQSVCDVFYARLTKVLNSLLSGVNKAHAYNGWVMPVLILYTFGILRWTQTELNALDRKVHTTMTSHRMHHPRSSVMRLYLSRKHGGRGFLSALTMHNREVCSLRDYFLARSDDPFYKDVISCDKGLTPLSLANEQWQDPAVQSISDRETVWKEKELHGRFYKALHEPFVDTVASLHWLRFGDLFGETEGFVCAIQDQVIKTNNYRRYILKDGTVDICRACRHPGESLRHVISGCSPLSNSEYLHRHNLVARILHQELALKYGLVDRKLPYYKYLPEAVLENDRARLYWDRAIIMERSEFRLRISLILC

SEQ ID NO: 14529 - protein, 1004 aa, Bembecia ichneumoniformis
MQGEDEGVTTQEIERMRSTLEEAILEYRQIPLEMRQRLPRVPLSVKVRDVVEAINNMLPSYLESSTGLSDTDSILFGAAMAVCRIVGAKVHLPGRATHCNEVPAWQRRIESRITAARVLIGKLTSFRSGNTRPRVMRFVREAFPGERVNLSNPDMHRKLTERIDDLKQKIAAWGKRIRRYSERVKRYRQNRLFMSDQKKFYKGLGRPDDRVTGLGPNQAETIDFWRNLWSEPVTHEEGPWMETVEEACATISPMNPISITEDDVVAAVRKAPNWKSPGLDGLHGYWLKGFWRSHATLAVQFQEALESGALPNFLTTGVTYLTPKDGATADPSKYRPITCLCTIYKILTSILSSKIYRHVADNNILSEAQNGCKGGSRGSKELLLIDTAVCRLVKRNRRNFSAAWIDYKKAFDSVPHTWLLRVLELYKVDSTTRHFLETCMGQWSTMLSLSGERMTDAADRIRISRGIFQGDCLSPLWFCLALNPLSTVLEDSAIGFQFRRGGHQMSHLLYMDDLKLFAPNAHRLEELLKITENFSRSIRMEFGLDKCAVIHVERGRIIRSTNVEAGPRQMRSLSETETYRYLGMSESLGVRETAVKQSVGEEFWERLTKVLRSYLSGANKIRAFNGWVMPVLLYTFGVLRWSQTELDTLDRRVRTTMISHRVRHPKSSVERLYIPRKCGGRGLLSAKTMHNREMCNLRNFFLTDSGGGLRRAIVECDNGLTPLSLSDQQWREPVVLSPSAREAVWKEKELHGRFYKALHEPHVDRKASVHWLRFGDLFGETEGFVCAIQDQVVKTRNYRRYIIKDGTEDICRACRHPGETLRHVTSGCSALANTEYLHRHNQAARILHQELALKYGFLERRIPYYRYSPEPVLENSRAKLYWDRPIITDRTILANRPDIVLMDREQSRVFLVDVTIPHDDGLVKAETEKRRKYLDLAHEIVDMWVVASVEVIPVVLSVNGLIPVSLRDNLGRLGFRGGSLPGQMQRAVLLDTARIVRRFLSLSP

SEQ ID NO: 14530 - protein, 994 aa, Bembecia ichneumoniformis
MNNNNNNSTLEEAILEYRQTPLEMRQRLPRVPLSVKVRDVVETINNMLPSYLESSTGLSDTDSILFGAAMAVCRIVGVKVRLPGRATHCNEVPAWQRRIESRITAARVLIGKLISFRSGNTRPRVMRFVREAFSGERVNLSHPDVHRKLTERIDDLKQKIAAWGKRIRRYSERVKRYRQNRLFMSDQKKFYKSLERPNGRVTGPGPSQAETISFWRSLWSEPVTHEEGPWMEVVEEACATISPMNPITITEDDVVVAVRKAPNWKSPGPDGLHGYWLKGFWRSHATLAIQFQEALETGALPNFLTTGVTHLAPKDGATADPSRYRPITCLCTIYKILTSILSSKIYRHVTDNNILSEAQNGCKGGSRGSKELLLIDTAVCRLVKRSRRNFSAAWIDYKKAFDSVPHTWLLRVLELYKVDSTTRHFLETCMGQWSTMLSLSGKRMTDAADRIGICRGIFQGDCLSPLWFCLALNPLSTVLEDSAIGFQFRRGGHRMSHLLYMDDLKLFAPNAHRLEELLQITENFSRSIRMEFGLDKCAVIHVERGRIIRSTNVEAGPRQMRSLSGTETYRYLGMSESLGVRETVMKQTVGEEFWERLTKVLRSYLSGANKIRAFNGWVMPVLLYTFGVLRWSQTELDTLDRRVRTTMISHRVRHPKSSVERMYIPRKCGGRGLLSAKTMHNREMCNLRNFFLTDSGGGLRRAIVECDNGLTPLSLSDQQWRDPVVLSPSAREAVWKEKELHGRFYKALHEPHVDRKASVHWLRFGDLFGETEGFVCAIQDQVVKTRNYRRYIIKDGTEDICRACRHPGETLRHVTSGCSALANTEYLHRHNQAARILHQELALKYGFLERRIPYYRYSPEPVLENSRAKLYWDRPIITDRTILANRPDIVLMDREQSRVFLVDVTIPHDDGLVKAETEKRRKYLDLAHEIVDMWAVASAEIIPVVLSVNGLIPISLRDNLRRLGFRGGSLPGQMQRAVLLDTARIVRRFLSLSP

SEQ ID NO: 14531 - protein, 1131 aa, Parnassius apollo
MTQPRNGAGLGRLPLFGAHKMDDGKTQKGTRIGPLPGGRRGASGAGAERGSMRAASRVRGAARSPSSPSHPSSPPEGLVSAGSSRTQQAAPAAGGARRMRWTKSMNENALRAYYRAKGEETVGIAYRSRRHCFFAELEPSIPVTEQNLADRVRYIMRSKIFDDAELERLRREAILTSNESAMAGDAAPHSTDQHPHVEAAMDLPVVVDLNDDEIVSHELEQMRIILEEAILETRSTPLENRPQLPRIPLSKRNRAVARALNPMLVTYLEASRDLCETDSILFGAAVAVCRIIGAKLPTAGRATTQTNAIPAWRKRIEDRIAKARALIGRLTSFRSGNNRPRIMRTVRMAFAGTNISLSQPDITQKLTERIDDLKQKIAAWGKRIRRFSEGSRRFNQNRLFQSDQKRLYKLLERPKVCGAGQGLDQADIIAFWRGLWSEPVNHSEGPWMEVVASQGASVTPMDRITITPEDVAEVVRRVPNWKSPGLDGLHHYWLKGFVVCHAVLARRFQEALDQKSLPSLFTTGITHLVPKDQDTTDPSKYRPITCLPTIYKTLTSILSARIARHLELNQVMSRAQNGCRGGGRGTKEPLLIDAVIGKVVKRNRRNFSAAWIDYRKAFDSVPHTWLKRVLELYKIDCTVRDFLEQCMGQWSTILCHLGERMTAAENRIRIRRGIFQGDCLSPIWFCLSLNPLSTLLEGSGRGFQLRKGGTKVTHLFYMDDLKLFASSRSHLMELLNITCEFSSSIGMELGTDKCAVLHVERGRVAYSEGIDKSMPVNLRTLSEAETYRYLGMSQNIGIDEAGMKQSVCDVFYARLTKVLNSLLSGVNKTHAYNGWVMPVLMYTFGILRWTQTELNALDRKVRTTMTSHRMHHPRSSVMRLYLPRKYGGRGFLSALTMHNREVCSLRQYFLARSDDPFYNDVISSDKGLTPLSLANEQWQDPAVLSNSDRETVWKEKELHGRYYKALHELFVDTVASLNWLRFGDLFGETEGFVCAIQDQVIKTNNYRRYILKDGTVDVCRACRHPGESLRHVISGCPALSNSEYLHRHILVARILHQELALKYGLVDRKLPYYKYLPEAVLENDRARLYWDRAIITDRTILANKPDIVLMDRAQSRIFLVDITISRMTRTS

SEQ ID NO: 14532 - protein, 783 aa, Parnassius apollo
MAFAGTNVSLSQPDITQKLTERIDDLKQRIAAWGKRIRRYTERSTRFNQNRLFQSDQKRLYESLERPMVSGTGPAPGQADTVAFWRGLWSEPVNHSEGPWTEIVASQCAGITPMDPVIITPDDVAEAVRRAPNWKSPGLDGLHHYWLKGFMVCHSVLARQFQEALNQKSLPSLFTTGITHLVPKDQGTTDPSKYRPITCLPTIYKTLTSILSARITCHLDSNQVMSRAQNGCRGGGRGTKEPLLIDAVIGKVVKRNRRNFSAAWIDYRKAFDSVPHTWLKRVLELYKIDCTVRDFLEQCMGQWSTILCHLGERMMAAENHIRIRRGIFQGDCLSPIWFCLSLNPLSTLLEGSGRGFQLRKGGTKVTHLFYMDDLKLFASSRSHLMELLNITCEFSNSIGMELGTDKCAVLHVERGRVANSEGVDLSMPVNLRTLSEAETYRYLGMSQNIGIDETGMKQSVCDVFYARLTKVLNSLLSGVNKAHAYNGWVMPVLMYTFGILRWTQTELNALDRKVRTTMTSHRMHHPRSSVMRLYLPRKHGGRGFLSALTMHNREVCSLRDYFLARSDDPFYKDVISCDKGLTPLSLANEQWQDPAVQSISDRETVWKEKELHGRFYKALHEPFVDTVASLHWLRFGDLFGETEGFVCAIQDQVIKTNNYRRYILKDGTVDICRACRHPGESLRHVISGCSALSNSEYLHRHNLVARILHQELALKYGLVDRKLPYYKYLPEAVLENDRARLYWDRAIITDRTILANKPDIVLMDRAQSRIFWSTLPFRMTRTS

SEQ ID NO: 14533 - protein, 1253 aa, Parnassius apollo
MMEHRRLRKGPLPGGRQGASGAGAGRDSMRTASRARGAARPPSSPSHPSSPPACLVSAGSSQTQQSAPATGGVRRMRWTINMNTNALRAYFRVKGGEIGGFTYRARMHRLFTELEPSITVTEQNLADRVRYILRSNIFDGAELERLRREAVPSSNENATTGGVVPQVAEQPAHVDAAENTTVVANSNDDGTFTQELEIEQMRSTLEEVIMETRSTPLENRPRLPRIALSKRNRAVVRALNPMLVTYLEASRGLCETDSILFGAALAVCRIIGAKLSTAGRTTGQSSAIPAWRTRIEERIAKARALIGRLICFRSGNTRPRIVRTVRIAFAGTNVSLSQPDIMQKLTERIDDLKQRIAAWGKRIRRYTERSTRFNQNRLLQSDQKRLYKSLERPKVSGTGPVPNQADTVAFWRSLWSEPVNHNEGPWTEVVASQCAGITPMDPVTITPDDVAEAVRRAPNWKSPGLDGLHHYWLKGFVVCHTVLARQFQEALNQKSLPSLFTTGITHLVPKGQGTTDPSKYRPITCLPTIYKTLTSILSARITRHLDSNQVMSRAQNGCRGGGRGTKEPLLIDAVIGKVVKRNRRNLSAACIDCRKAFDSVPHTWLKRVLELYKIDCTVRDFLEQCMGQWSTILCHLGERMMAAENHIRIRRGIFQGDYLSPIWFCLSLNPLSTLLEGSGRGFQLRKGGTKVTHLFYMDDLKLFASSRSHLMELLNITCEFSNSIGMELGTDKCAVLHVERGRVANSEGIDLSMPVNLRTLSEAETYRYLGMSQNIGIDEAGMKQSVCDVFYARLTKVLNSLLSGVNKTQAYNGWVMPVLMYTFGILRWTQTELNALDRKVRTTMTSHRMHHPRSSVMRLYLPRKHGGRGFLSALTMHNREVCSLRNYFLARSDDPFYKDVISCDKGLTPLSLANDQWQDPAVQTISDRETVWKEKELHGRFYKSLHGPFVDTVTSLHWLRFGDLFGETEGFVCAIQDQVIKTNNYRRYILKDGTIDICRACRHPGESLRHVISGCSALSNTEYLHRHNLVARILHQKLALKYGFVDRKLPYYKYLPEAVLENDRARLYWDRAIITDRIILANKPDIVLMDRAQSRIFLVDITIPCDENLVKAETDKQTKYLDLAHEVTDMWGGLPTEIILVVVSANGLIPVSLSGHLRRLGLRGGPLRAQMQKAVLLDTARIVRRFLSLAPSPSSVLSPLARASVFLGFYLFMYFFIYFILLIFMYIYLFIFVYNYIFVHPNQMRKLYRYPTL

SEQ ID NO: 14534 - protein, 1197 aa, Bembecia ichneumoniformis
MMMNVNNKRIWPLPGGRRGTSRTNAGTGRGRGRASVRGAGSPPSLPSNSSSPPGGLVPIGPSAAQNSASAAGGTRRRMAWTNAMNMNAMRAFYMATMTETGGTGYRARMHREFLQLEPEVTVTEQNLSDRVRYIQRSGLFSAAELEQLRQEVAPDPNAAFIVDASAPRRGSTDHSVDPVQPRSDAETNSRPQYVQGEDEGVTAQEIERMRSILEEAILEYRQTPLEMRQRLPRVPLSVKVRDVVEAINNMLPSYLESSTGLSDTDSILFGAAMAVCRIVGAKVRVPGRATHCDKVPSWQRRIESRITAARVLIGKLTSFRSGNTRPRVMRFVREAFSGERVNLSHPDVHRKLTERIDDLKQKIAAWGKRIRRYSERVKRYRQNRLFMSDQKKFYKGLGRPDGRVTGPGPNQTETIAFWRNLWSEPVTHGEGPWMETVEEACATISPMNPITITEDDVVAAVRKAPNWKSPGPDGLHGYWLKGFWRSHATLAVQFQEALENGVLPDFLTTGVTHLTPKDGATADPSKYRPITCLCTIYKILTSILSSKIYRHVADNNILSEAQNGCKGGSRGSKELLLIDTAVCRLVKRNRRNFSAAWIDYKKAFDSVPHTWLLRVLELYKVDSTTRHFLETCMGQWSTMLSLSGKRMTDAADRIRICRGIFQGDCLSPLWFCLALNPLSTVLEDSAIGFQFRRGGHQMSHLLYMDDLKLFAPNAHRLEELLQITENFSSSIRMEFGLEKCAVIHVERGRIIRSTNVEAGPRQMRTLSETETYRYLGMSESLGVRETVVKRAVSEEFWERLTKVLRSYLSGANKVRAFNGWVMPVLLYTFGVLRWSQTELDTLDRRVRTTMISHRVRHPKSSVERMYIPRKCGGRGLLSAKTMHNREMCNLRKFFLTDSGGGLRRAIVECDNGLTPLSLSDQQWRDPVVLSPSAREAVWKEKELHGRFYKALHEPHVDRKASVHWLRFGDLFGETEGFVCAIQDQVVKTRNYRRYIIKDGTEDICRACRHPGETLRHVTSGCSALANTEYLHRHNQAARILHQELALKYGFLERRIPYYRYSPEPVLESSRAKLYWDRPIITDRTILANRPDIVLMDREQSRVFLVDVTIPHDDGLVKAETEKRRKYLDLAHEIVDMWVVASAEIIPVVLSVNGLIPISLRDNLRRLGFRGGSLPGQMQRAVLLDTARIVRRFLSLSP

SEQ ID NO: 14535 - protein, 1197 aa, Bembecia ichneumoniformis
MMMNLNNKRIWPLPGGRRGTSRTNAGTGRGRGRASVRGAGSPPSLPSNSSSPPGGLVPIGPSAAQNSASAAGGTRRRMAWTNAMNMNAMRAFYMATMTETGGTGYRARMHREFLQLEPEVTVTEQNLSDRVRYIQRSGLFSAAELEQLRQEVAPDPNAAFIVEASAPRRGSTDHSVDPVQPRSDAETNSRPQYVQGEDEGVTAQEIERMRSILEEAILEYRQTPLEMRQRLPRVPLSVKVRDVVEAINNMLPSYLESSTGLSDTDSILFGAAMAVCRIVGAKVRVPGRATHCNEVPSWQRRIESRITAARVLIGKLTSFRSGNTRPRVMRFVREAFSGERVNLSHPDVHRKLTERIDDLKQKIAAWGKRIRRYSERVKRYRQNRLFMSDQKKFYKGLGRPDGRVTGPGPNQTETIAFWRNLWSEPVTHGEGPWMETVEEACATISPMNPITITEDDVVAAVRKAPNWKSPGPDGLHGYWLKGFWRSHATLAVQFQEALENGALPDFLTTGVTHLTPKDGATADPSKYRPITCLCTIYKILTSILSSKIYRHVADNNILSEAQNGCKGGSRGSKELLLIDTAVCRLVKRNRRNFSAAWIDYKKAFDSVPHTWLLRVLELYKVDSTTRHFLETCMGQWSTMLSLSGKRMTDAADRIRICRGIFQGDCLSPLWFCLALNPLSTVLEDSAIGFQFRRGGHQMSHLLYMDDLKLFAPNAHRLEELLQITENFSSSIRMEFGLEKCAVIHVERGRIIRSTNVEAGPRQMRSLSETETYRYLGMSESLGVRETVVKQAVGEEFWERLTKVLRSYLSGANKVRAFNGWVMPVLLYTFGVLRWSQTELDTLDRRVRTTMISHRVRHPKSSVERMYIPRKCGGRGLLSAKTMHNREMCNLRNFFLTDSGGGLRRAIVECDNGLTPLSLSDQQWRDPVVLSPSAREAVWKEKELHGRFYKALHEPHVDRKASVHWLRFGDLFGETEGFVCAIQDQVVKTRNYRRYIIKDGTEDICRACRHPGETLRHVTSGCSALANTEYLHRHNQAARILHQELALKYGFLERRIPYYRYSPEPVLENSRAKLYWDRPIITDRTILANRPDIVLMDREQSRVFLVDVTIPHDDGLVKAETEKRRKYLDLAHEIVDMWAVASVEIIPVVLSVNGLIPISLRDNLRRLGFRGGSLPGQMQRAVLLDTARIVRRFLSLSP

SEQ ID NO: 14536 - protein, 991 aa, Dalla quadristriga
MRGILQEAISEIRSIPLEQRPRLSRLSLNAATRGAIEAANRLLPPYLDGSLGLDDTGSILFGAALAVHRFIGAKTQEPGRTTNKSSDVPAWKKRIERRISLARALIGRLQSFRSGNTRPRIVRSVRIAFNGLGVRLDQPDIAEKLTERIDGLKQRIAAWGKRIRRYSERVERFRQNRLFLSDQKRFYRKLENPTPCSTSQKPNTADLVAFWRNIWSREVEHEEGPWIAAVQEACARIEPMNPIAISSENVADAVRRAPNWKSPGADGLHHYWLKGFSVCHATLARQYQEAIERKTLPNLFTTGITHLAPKSTNTADPTNYRPITCLTSIFKTLTSVLSCKISRHIDEFNILSAAQNGCRGGGRGTKELLIIDSVAGQLVKRNRRNFSAAWIDYKKAFDSVPHSWLLRVLELYKIDGAVRDFLEVCMGQWSTILCLQGERLTTGADDRIRIRRGIFQGDCLSPLWFCLSLNPLSTLLERSGTGFQFRRGGTKVSHLLYMDDLKLLAPNPARLMELLKITTEFSGSIRMQLGVDKCAVVHVDRGQVTQSAEISLELSNFKTLSEAESYRYLGMSQCIGVQEVDMKQAVCEVFFGRLTKVLRSYLSGANKVRAYNGWVMPTLLYTFGVLRWTQTELDALDRRVRTTMTYHRMHHPKSSVMRLYIPRKCGGRGLLSAKSMHNREVCSLRAYFETRRESAMHGDVVVCDKGLTPLSLAKEEWRRPVVLSTSDRETVWMEKELHGRFYKALHAPHVDVKASVQWLRFGDLFGETEGFVCAIQDQVVKTNNYRKHILKDGTPDFCRACRHPGESLRHVLSGCSALANTEYLHRHNQAAKILHQELALMYCLLEQRMPYYQYTPAPVLERDGVRLYWDLPIATDRTILANKPDIVVMDRAQSRVFLVDITIPHDENLVRAETEKKRKYLDLAHEVTGMWHVECTETIPIVISANGLIPVSLAHHLKRLGFRGSSLAAKMQKAVLLDSARIVRRFLSLSP

SEQ ID NO: 14537 - protein, 1096 aa, Oxynetra hopfferi
MRAYFRAVGGETGRTGYRAVMHREFLLLEPNITVTEQNLADRARYIQRKGVFNAAELERLRREAAPEVEPVPTEHNAVVTQQESVRSEVPVDAIAEEAVSQKVEQMRGILEEAISEIRSTPLEQRPRLSRLPLNAATRGAIEAANRLLPPYLDGSLGLDDTGSILFGAALAVHRFIGAKTQEPGRTTNKSSDVPAWKKRIERRISLARALIGRLQSFRSGNTRPRIVRSVRIAFNGLGVRLDQPDIAEKLTERIDGLKQRIAAWGKRIRRYSERVERFRQNIHFVSDQKRFYRKLENPTPCSTSQKPNTADLVAFWRNIWSREVEHEEGPWIAAVQEACARIEPMNPIAISSENVADAVRRAPNWKSPGADGLHHYWLKGFSVCHATLARQYQEAIERRTLPNLFTTGITHLAPKSTNTADPTNYRPITCLTSIYKTLTSVLSCKISRHIDEFNILSVAQNGCRGGGRGTKELLIIDSVAGQLVKRNRRNFSAAWIDYKKAFDSVPHSWLLRVLELYKIDGAVRDFLEVCMGQWSTILCLQGERLTTGADDRIRIRRGIFQGDCLSPLWFCLSLNPLSTLLERSGTGFQFRRGGTKVSHLLYMDDLKLLAPNPARLMELLKITTEFSGSIRMQLGVDKCAVVHVDRGQVTQSAEISLELSNFKTLSEAESYRYLGMSQCIGVQEVDMKQAVCEVFFGRLTKVLRSYLSGANKVRAYNGWVMPTLLYTFGVLRWTQTELDALDRRVRTTMTYHRMHHPKSSVMRLYIPRKCGGRGLLSAKSMHNREVCSLRAYFETRRESAMHGDVVVCDKGLTPLSLAKEEWRRPVVLSTSNRETVWMEKELHGRFYKALHAPHVDVKASVQWLRFGDLFGETEGFVCAIQDQVVKTNNYRKHILKDGTPDFCRACRHPGESLRHVLSGCSALANTEYLHRHNQAAKILHQELALMYCLLEQRMPYYQYTPAPVLERDGVRLYWDLPIATDRTILANKPDIVVMDRAQSRVFLVDITIPHDENLVKAETEKKRKYLDLAHEIVDMWGVDSTEIIPIVISANGLIPVSLAHHLRQLGIRDGSLAARMQKAVLLDSARIVRRFLSLQP

SEQ ID NO: 14538 - protein, 1009 aa, Melitaea cinxia
MRGILQEAISETRGAPLEMRPRLSRLPLNAATRHAIEAANRLLPPYLEGSLSLEDTGSILFGAALAVHRLVGAKTQESGRATHKNSDVPAWKRRIERRINLARALIGRLLAFRSSNTRPRIVRSVRMAFNGLGISLDQPDIADKLTERIDGLKQRIAAWGKRIRRYSERVERFRQNRLFVSDQKRFYRKLENPISGSASLKPSTVDLVAFWRNIWSGEVEHEEGPWIAAVQDACAKIEPMNPIAISTEDVSGAVRRAPNWKSPGADGLHHYWLKGLSVCHATLARQYQEAIDRKTLPNLFTTGITHLAPKSTNTADPTNYRPITCLTSIYKTLTSVLSCKISRHIGEFNILSAAQNGCRGGGRGTKELLLIDSVAGQLVRRNRRNFSAAWIDYKKAFDSVPHSWLLRVLELYKIDQAFRDFLGVCMGQWSTILCLQGERLTGADDPIRIRRGIFQGDCLSPLWFCLSLNPLSTLLERSGTGFQFRRGGTKVSHLLYMDDLKLLAPNAARLQELLKITTEFSSSIRMQLGVDKCAVVHVDRGQVTQSSQLSLDLTSFKTLSEAESYRYLGMSQCIGVKEVDMKQAVCEIFFGRLTKVLRSYLSGANKVRAYNAWVMPTLLYTFGILRWTQTELDALDRRVRTTMTHHRMHHPKSSVMRLYIPRKCGGRGMLSAKTMHNREVCSLRAYFETRRDSALHGDVSMCDKGLTPLALAKENWQKPVVLSTSDRETVWMEKELHGRFYKALHAPHVDSKASVQWLRFGDLFGETEGFVCAIQDQVVKTNNYRKHVLKDGTPDFCRACRHPGESLRHVLSGCSALANTEYLHRHNQVAKILHQELALMYGLLEQRMPYYQYSPVPVLERDGVRLYWDLPIATDRTILANKPDIVVMDRARSRVFLVDITVPHDENLVKAETEKKRKYLDLAHEIVDMWGVGSAEIIPIVISASGLIPVSLVHHLRQLGIRDGSLAARMQKAVLLDSARIVRRFLSPNPRPFDLPAGAYSSTRLYLYM

SEQ ID NO: 14539 - protein, 1200 aa, Hyposmocoma kahamanoa
MMEHNSYDERIGPLPGGNRRGAPGAGAGRGSMRAPSRGRLARPSGQSTHDPSPPVGMVSAGAGATWSQQSVPASGGVRRRMAWTIDMNKNAMRAYFRASGSGTGRTGYRAVMYREFLRLEPTLTVTEQNLADRVRYLQRSGLFSAAELEQLRCEAVPPLEEEPPSLERSPVPSREVHREPSAQQPDTGGTESDWGTVALDLEALRSSLEETILEYRHVPLERRPRLPRVPLSIKVRDAVGAINNMLPSFLEECADLWETDSILFAAAMTVCQFVGVRMPPTRPGGNHQVGSTTPRTSTKPAWMRRIEGRIAWARVLIGKLTSFRSGVTRPRVMRFVREAFPGENIFVDSPEFARKLTGRIDDLKQKIAAWGKRIRRYSERVKRYQNRLFMSDQKKFYRTLECPDVVLTGERPDKAEVVAFWRRLWSQPVDHEEGPWFEAVERACATIAPMNPISISEEDVAVAVRKAPNWKSPGPDGLHHYWLKGFWCCHATLARQFQSALESGTLPNFLTTGVTHLAPKSDATVDPSQYRPITCLCTIYKTLTSVLSSKISQHIVDNSVMSEAQNGCRGGSRGSKELLLIDAVAGQLVRRNRRNFSAAWIDYRKAFDSVPHSWLSRVLELYKIDSAARHFLGQCMGCWRTILSLDGRRMTDADDRIEIRRGIFQGDCLSPLWFCLALNPLSTLLERSGTGFQFRRGGPRMPHLLYMDDLKLYGPTADRLTELLTITNDFSSSVRMELGIDKCAVVHVEKGRVMHSDGINIGTNHLRVLSETETYRYLGMSQTIGVKEADVKQGVCEVFYGRLKNVLNSYLSGVNKIRAYNSWVMPVLMYTFGVLKWTQTELDALDRRVRTTMTSHRMHHPRSSVMRLYVPRKCGGRGLLSVKTMHNREICSLRNYFLTMTDDVIRGEVVTCDKGLTPLSLAKEEWRDPVVLSTSDRESVWKEKELHGRFFKVLHEPFMDRKASLHWLRFGDLFGETEGFVCAIQDRVIKTRNYRKYILKDGTVDICRACGRPGESLRHIVSGCSALANTEYLHRHNQAAKILHQELALKYGLVQQRLPYYKYSPEPILEDDRTKIYWDRSIITDRTILANKPDIVILDRSQSRVFLVDVTIPHDEGLVKAETEKRRKYLDLAHEITDMWDVASTEIIPIVLSANGLIPVSLSNSLRRLDFCGVSLPAQMQKAVLLDTARIVRRFLDLSP

SEQ ID NO: 14540 - protein, 1189 aa, Maniola jurtina
MMDNGKRNERIGPLPGGRQGAPGAGAGRGSMRAASATSRPALPPSRSTYPSSPPDGLAPTGSTRAQSSAPAAGGVRRMRWTSLMNENVMRAYYRATGGETGRTGYRAAMYREFLLLEPNLTVTEQNLADRARYIQRSNIFNATELERLRREAVPEVSAPTAEQIVSQAAPVREETITTSQDLPVEEDTEGTVSLDIERMRGILEEAISEIRSAPLENRPRLSRLTLNVATRDVIEAINKMLPQHLESSTGLGDTASILFGAALAVHRFIGAKTPGLGRAAATRRSAEPAWKKRIEHRITLARVLIGRLQSFRSGNTRPRIVRSVRVAFNGCGVRLDQPDIAQKLTERIDDLKQKIAAWGNRIRRYSARVERFQQNRLFSSDQKRFYKRLECPAVCSTSQRPDPADLVAFWRGVWSREVEHEEGPWIAAVEEACARIEPMNPVAISAEDVAGAVRRAPNWKSPGPDGLHHYWLKGFSVCHATLARQFQEALEQRALPSLFTTGVTHLAPKSTDTTDPAKYRPITCLTTIYKTLTSVLSLKISRHIDENNIMSGAQNGCRGGGRGTKELLLIDSVAGQLVKRNRRNFSAAWIDYKKAFDSVPHSWLLRVLELYKVDSAVRDFLEACMGQWSTILCLHGERLAAADDRIRIGRGIFQGDCLSPLWFCLSLNPLSTLLEGSGTGFQFRRGGTKVPHLLYMDDLKLLAPNATRLKELLNITTEFSNSIRMELGLDKCAVIHVERGQVTHSAEISLEPTNIKTLSEAESYRYLGMSQSLGVKEADMKQSVCEAFFGRLTKICKSYLSGANKVRAYNGWVMPVLMYTFGVLSWTQTELDTLDRKVRTTMTLYRMHHPKSSVMRLYIPRKCGGRGVLSVKTMHNREISNLRTYFETMRGSPMHREVIECDKGLTPLSLAKTEWQKPVVLSTSDRETVWKEKELHGRFFKALNEPHVDKKASVQWLRFGDLFGETEGFVCAIQDQVVKTRNYRKYILKDGTHDICRACRHPGESLRHVLSGCSALANTEYLHRHNQAAKILHQELALKYGLLDERLPYYRYTPVPVLERDGVRLYWDRSIITDRTILANKPDIVVVDRAQSRVFLVDITIPYDENLVRAETEKKRKYLDLAHEVSDMWHVGSTEIIPIVISANGLIPVSLAHHLRRLGFRGSSLAARMQKAVLLDSARIVRRFLNLSP

SEQ ID NO: 14541 - protein, 1190 aa, Maniola jurtina
MMMDRNIRNVRIGPLPGGRQGAPGAGAGRSSIRAASTISRPALPPSRSTHPSSPPDGLAPTGSTRAQSSAPAAGGVRRMRWTSLMNENVMRAYYRATGGETGRTGYRAAMYREFLLLEPNLTVTEQNLADRARYIQRSNIFNAAELERLRREAVPEVSAPTTVQIVSQAEPVREEATTTLQDLPVEEDTGETVSLDIERMRRILEEAISEIRNAPLENRPRLSRLTLNVVTRDVIEAINKMLPQHLESSTGLGDTASIIFGAALAVHRFIGAKTPGPGRAAATRRSAEPAWKKRIEHRITLARVLIGRLQSFRSGNTRPRIVRSVRVAFNGCGVRLDQPDIAQKLTERIDDLKQKIAAWGNRIRRYSARVERFQQNRLFSSDQKRFYKRLECPAVCSTSQRPDPADLVAFWRGVWSREVEHEEGPWIAAVEEACARIEPMNPVAISAEDVAGAVRRAPNWKSPGPDGLHHYWLKGFSACHATLARQFQEALEQRALPSLFTTGITHLAPKSTDATDPAKYRPITCLTTIYKTLTSVLSLKISRHIDENNIMSGAQNGCRGGSRGTKELLLIDSVAGQLVKRNRRNFSAAWIDYKKAFDSVPHSWLLRVLELYKVDSAVRDFLEACMGQWSTILCLHGERLAAADDRIRIGRGIFQGDCLSPLWFCLSLNPLSTLLEGSGTGFQFRRGGTKVPHLLYMDDLKLLAPNATRLRELLNITTEFSNSIRMELGLDKCAVIHVERGQVTHSAEISLEPSNIKTLSEAESYRYLGMSQSLGVKEADMKQSVCEAFFGRLTKVCKSYLSGANKVRAYNGWVMPVLMYTFGVLSWTQTELDALDRKVRTTMTLYRMHHPKSSVMRLYIPRKCGGRGVLSVKTMHNREISNLRTYFETMRGSPMHREVIECDKGLTPLSLAKTEWQKPVVLSTSDRETVWKEKELHGRFFKALNEPHVDKKASVQWLRFGDLFGETEGFVCAIQDQVVKTRNYRKYILKDGTHDICRACRHPGESLRHVLSGCSALTNTEYLHRHNQAAKILHQELALKYGLLDERLPYYKYTPVPVLERDGVRLYWDRSIITDRTILANKPDIVLVDRAQSRVFLVDITIPYDENLVRAETEKKRKYLDLAHEVSDMWHVESTEIIPIVISANGLIPVSLAHHLRRLGFRGSSLAARMQKAVLLDSARIVRRFLSLSP

SEQ ID NO: 14542 - protein, 1189 aa, Maniola jurtina
MMDNGTRNKRIRPLPGGRQGAPGAGAGRGSMRAASATSRPALSPSRSTYPSSPPDGLAPTGSTRAQSSAPAAGGVRRMRWTSLMNENVMRAYYRATGGETGRTGYRAAMYREFLLLEPNLTVTEQNLADRARYIQRSNIFNATELERLRREAVPEVSAPTAEQIVSQAAPVREETITTSQDLPVEEDTEGTVSLDIERMRGILEEAISEIRSAPLENRPRLSRVTLNVATRDVIEAINKMLPQHLESSTGLGDTASILFGAALAVHRFIGAKTPGLGRAAATRRSAEPAWKKRIEHRITLARVLIGRLQSFRSGNTRPRIVRSVRVAFNGCGVRLDQPDIAQKLTERINDLKQKIAAWGNRIRRYSARVERFQQNRLFSSDQKRFYKRLECPAVCSTSQRPDPADLVAFWRGVWSREVEHEEGPWIAAVEEACARIEPMNPVAISAEDVAGAVGRAPNWKSPGPDGLHHYWLKGFSACHATLARQFQEALEQRALPSLFTTGITHLAPKSTDATDPAKYRPITCLTTIYKTLTSVLSLKISRHIDENNIMSGAQNGCRGGGRGTKELLLIDSVAGQLVKRNRRNFSAAWIDYKKAFDSVPHSWLLRVLELYKVDSAVRDFLEACMGQWSTILCLHGEWLAAADDRIRIGRGIFQGDCLSPLWFCLSLNPLSTLLEGSGTGFQFRRGGTKVPHLLYMDDLKLLAPNATRLRELLNITTEFSNSIRMELGLDKCAVVHVERGQVTHSAEISLEPSNIKTLSEAESYRYLGMSQTLGVKEADMKQSVCEAFFGRLTKVCKSYLSGANKVRAYNGWVMPVLMYTFGVLSWTQTELDALDRKVRTTMTLYRMHHPKSSVMRLYIPRKCGGRGVLSVKTMHNREISNLRTYFETMRGSPMHREVIECDKGLTPLSLAKTEWQKPVVLSTSDRETVWKEKELHGRFFKALNEPHVDKKASVQWLRFGDLFGDTEGFVCAIQDQVVKTRNYRKYILKDGTHDICRACRHPGESLRHVLSGCSALANTEYLHRHNQAAKILHQELALKYGLLDERLPYYKYTPVPVLERDGVRLYWDRSISTDRTILANKPDIVLVDRAQSRVFLVDITIPYDENLVRAETEKKRKYLDLAHEVSDMWHVESTEIIPIVISANGLIPVSLAPHLRRLGFRGSSLAARMQKAVLLDSARIVRRFLSLSP

SEQ ID NO: 14543 - protein, 1158 aa, Piruna pirus
MRTASHTSRPPLPSRRPANPSSPPEGLAPTGSSRTQSSEPAAGGVRRMRWTSPMNRNVMRAYYRATGGETGRTGYRAAMYREFLLLEPNLTVTEQNLADRARYIQRSNIFSATELERLRREAVPEVTTPTTEQIVSLAEPVREETDAIAQDLPVEEDTEETVSLDIERMGRILEEAISEIRSAPLENRPRLSRLTLNVATRDVIEAINQMLPQYFERSTGLDDTASILFGAALAVHRFMGVKTQERGRTTLRRSTEPAWKRRIEHRITLARALIGKLQSFRSGNTRPRIVRSVRIAFNGLGVRLDQPDIAQKLTERIDDLKQKIAAWGNRIRRYSERVERFQQNRLFSSDQKRFYKKLECPAVCSTSQRPSPADLVAFWRNVWSREVEHEEGPWIAAVEEACASIEPMNPDAISSEDVAGAVRRAPNWKSPGPDGLHHYWLKGFSLCHATLARQFQDALEQRALPSLFTTGITHLAPKSTDTADPAKYRPITCLTTIYKTLTSVLSLKISRHVDENNIMSEAQNGCRGGGRGTKELLLIDSVAGQLVKRNRRNFSAAWIDYKKAFDSVPHSWLLRVLELYKVDSTVRDFLGECMGQWSTILCLHGERLAAAGDRIKIRRGIFQGDCLSPLWFCLSLNPLSSLLERSGTGFQFRRGGTKVPHLLYMDDLKLLAPNATRLRELLNITTEFSNSIRMELGLDKCAVLHVERGQVTHSAEINLEPSNIRTLSEAESYRYLGMSQSVGVKEADVKQSVCEVFFGRLTKVCKSYLSGANKVRAYNGWVMPVLMYTFGVLRWTQTELDALDRKVRTTMTLYRMHHPKSSVMRLYIPRKCGGRGVLSVKTMHNREISSLRTYFETKRECPMHRDVIECDKGLTPLSLAKLEWQKPVVLSTSDRETVWKERELHGRFFKALNEPHVDKKASVQWLRFGDLFGETEGFVCAIQDQVVKTRNYRKYILKDGTHDICRACRHPGESLRHVLSGCSALANTEYLHRHNQAAKILHQELALKYGLLDERVPYYRYTPVPVLERDGVRLYWDRSIITDRTILANKPDIVLMDRAQSRVFLVDITIPHDENLVRAETEKKRKYLDLAHEVTGMWHVESTETIPIVISANGLIPVSLAHHLRRLGFRGSSLAAKMQKAVLLDSARIVRRFLSLSP

SEQ ID NO: 14544 - protein, 1201 aa, Maniola hyperantus
MYPPLPPPPLLMMMENNEMNVRIGPLPGGRQGAPGAGAGRSSIRAASTTSRPAPPPSRSTHPSSPPDGLAPTGSTRAQSSAPAAGGVRRMRWTSLMNENVMRAYYRATGGETGRTGYRAAMYREFLLLEPNLTVTEQNLADRARYIQRSNIFNATELERLRREAVPEVSAPATEQIDSQAVPVPVETNTISQDLPMEEDTEGTVSLDIERMRGILEEAISEIRSAPLENRPRLSRLTLNVATRDVIEAINKMLPQHLESSTGLGDTASILFGAALAVHRFIGAKTPGPERAAAARRSAEPAWKKRIERRITLARVLIGRLQSFRSGNTRPRIVRSVRVAFNGCGVRLDQPNIAQKLTERIDDLKQKIAAWGNRIRRYSERVERFQQNRLFLSDQKRFYKRLECPAVCSTSQRPDLANLVTFWRGVWSREVEHEEGPWIAAVEEACASIEPMNPVAISAEDVAGAVRRAPNWKSPGPDGLHHYWLKGFSVCHATLARQFQEALEQRALPSLFTTGITHLAPKSTDTTDPAKYRPITCLTTIYKTLTSVLSLKISRHVDENNIISGAQNGCRGGSRGTKELLLIDSVAGQLVKRNRRNFSAAWIDYRKAFDSVPHSWLLRVLELYKVDGTVRDFLGACMGQWSTILCLHGERLAAADDRIRIGRGIFQGDCLSPLWFCLSLNPLSTLLEGSGTGFQFRRGGTKVPHLLYMDDLKLLAPNATRLQELLNVTTDFSNSIRMELGLEKCAVMHVERGQVTHSAEMSLEPSTIRTLSEAESYRYLGMSQSLGVKETDVKQSVCEAFFGRLTKICKSYLSGANKVRAYNGWVMPVLMYTFGVLRWTQTELDALDRKVRTTMTLYRMHHPKSSVMRLYIPRKCGGRGVLSVKTMHNREIANLRTYFETMRGSPMHREVIECDNGLTPLSLAQTEWQKPVVLSTSDREAVWREKELHGRFFKALNEPHVDKKASVQWLRFGDLFGETEGFVCAIQDQVVKTRNYRKYILKDGTHDICRACRHPGESLRHVLSGCSALANTEYLHRHNQAAKILHQELALKYGLLDERLPYYKYTPVPVLERDGVRLYWDRSIITDRTILANKPDIVVVDRAQSRVFLVDITIPYDENLVRAETEKKRKYLDLAHEVSDMWHVESTEIIPIVISANGLIPVSLAHHLRRLGFRGSSLAARMQKAVLLDSARIVRRFLYLSP

SEQ ID NO: 14545 - protein, 1182 aa, Melitaea cinxia
MMEDNLERRIGPLPGGRQGASGAGAGRGSMRAASQPRRPAPPPDMSAYPPSLPVGLATTESQGTQHSLPAAGGVRRMRWTPKMNENVMRAYYRAVGRETGRTGYRAVMHREFLLLEPTLTVTEQNLADRARYIQRKGIFDAAELERFRREAAPEVEPVSTVRNEVSTQQESVRSEAPVEAITEGAVAQKVEQMRGILHEAISETRGAPLEMRPRLSRLPLNAATRHAIEAANRLLPPYLETSFSLEDTGSILFGAALAVHRLVGAKTQESGRATHKNSDVPAWKRRIERRINLARALIGRLLAYRSGNTRPRIVRSVRMVFNGLGISLDQPDIADKLTERIDGLKQRIAAWGKRIRRYSERVERFRQNRLFVSDQKRFYRKLENPISGSASLKPSTVDLVAFWRNIWSGEVEHEEGPWIAAVQDACAKIEPMNPIAISTEDVSGAVRRAPNWKSPGADGLHHYWLKGLSVCHATLARQYQEAIDRKTLPNLFTTGITHLAPKSTNTADPTNYRPITCLTSIYKTLTSVLSCKISRHIGEFNILSAAQNGCRGGGRGTKELLLIDSVAGQLVRRNRRNFSAAWIDYKKAFDSVPHSWLLRVLELYKIDQAVRDFLGVCMGQWSTILCLQGERLTGAGDPIRIRRGIFQGDCLSPLWFCLSLNPLSTLLERSGTGFQFRRGGTKVSHLLYMDDLKLLAPNAARLQELLKITTEFSSSIRMQLGVDKCAVVHVDRGQVTQSSQLSLELTSFKTLSEAESYRYLGMSQCIGVKEVDMKQAVCEIFFGRLTKVLRSYLSGANKVRAYNAWVMPTLLYTFGILRWTQTELDALDRRVRTTMTYHRVHHPKSSVMRLYIPRKCGGRGMLSAKTMHNREVCSLRAYFETRRDSALHGDVSMCDKGLTPLALAKENWQKPVVLSTSDRETVWMEKELHGRFYKALHAPHVDSKASVQWLRFGDLFGETEGFVCAIQDQVVKTNNYRKHVLKDGTPDFCRACRHPGESLRHVLSGCSALANTEYLHRHNQVAKILHQELALMYGLLEQRMPYYQYSPVPVLERDGVRLYWDLPIATDRTILANKPDIVVMDRARSRVFLVDITVPHDENLVKAETEKKRKYLDLAHEIVDMWGVGSAEIIPIVISANGLIPVSLAHHLRQLGIRDGSLAARMQKAVLLDSARIVRRFLSLQP

SEQ ID NO: 14546 - protein, 1190 aa, Maniola jurtina
MMMEQNIRNARIGPLPGGRQGAPGAGAGRSSIRAASTTSRPALPPSRSTHPSSPPDGLAPTGPTRAQSSAPAAGGVRRMRWTSLMNENVMRAYYRATGGETGRTGYRAAMYREFLLLEPNLTVTEQNLADRARYIQRSNIFNAAELERLRREAVPEVSAPTTVQIVSQAEPVREEATTTLQDLPVEEDTGETVSLDIERMRRILEEAISEIRNAPLENRPRLSRLTLNVATRDVIEAINKMLPQHLESSTGLCDTASIVFGAALAVYRFIGAKTPGPGRAAATRRSAEPAWKKRIEHRITLARVLIGRLQSFRSGNTRPRIVRSVRVALNGCGVRLDQPDIAQKLTERIDDLKQKIAAWGNRIRRYSARVERFQQNRLFSSDQKRFYKRLECPAVCSTSQRPDPADLVAFWRGVWSREVEHEEGPWIAAVEEACARIEPMNPVAISAEDVAGAVRRAPNWKSPGPDGLHHYWLKGFSVCHATLARQFQEALEQRALPSLFTTGITHLAPKSTDATDPAKYRPITCLTTIYKTLTSVLSLKISRHIDENNIMSGAQNGCRGGGRGTKELLLIDSVAGQLVKRNRRNFSAAWIDYKKAFDSVPHSWLLRVLELYKVDSAVRDFLETCMGQWSTILCLHGERLAAADDRIRIGRGIFQGDCLSPLWFCLSLNPLSTLLEGSGTGFQFRRGGTKVPHLLYMDDLKLLAPNATRLKELLSITTEFSNSIRMELGLDKCAVMHVERGQVTHSAEISLEPSNIKSLSEAESYRYLGMSQSLGVKEADMKQSVCEAFFGRLTKICKSYLSGANKVRAYNGWVMPVLMYTFGVLSWTQTELDALDRKVRATMTLYRMHHPKSSVMRLYIPRKCGGRGVLSAKTMHNREISNLRTYFETMRGSPMHREVIECDKGLTPLSLAKTEWQKPVVLSTSDREAVWKEKELHGRFFKALNEPHVDKKASVQWLRFGDLFGETEGFVCAIQDQVVKTRNYRKYILKDGTQDICRACRHPGESLRHVLSGCSALANTEYLHRHNQAAKILHQELALKYGLLDERLPYYKYTPVPVLERDGVRLYWDRSIITDRTILANKPDIVVVDRAQSRVFLVDITIPYDENLVRAETEKKRKYLDLAHEVSDMWHVESTEIIPIVISANGLIPVSLAHHLRRLGFRGSSLAARMQKAVLLDSARIVRRFLNLSP

SEQ ID NO: 14547 - protein, 1188 aa, Boloria selene
MMENKNKNARLGPLPGGRQGAPGAGAGRDSIRAASTINRPALPPSRPTHPSPPPEGLVPTGSSRTQTSGPAAGGVRRMRWTSQMNENVMRAYYRATGGETGRTGYRAAMYREFLLLEPTLTVTEQNLADRARYIQRSNILNATELERLRREAVPEVRTLTTEQIVPPAATGEDVLTNFHDLPIEGGTQETVALDTERMRRILEEAVSEIRSAPLENRPRLSRLTLNVATREIIEAINQLLPQHLESSIGLEDTASILFGAALAVHRFVGARTPGPERDTAARRKAQPAWKKRIERRINHARGLIGRLQSFRSGNTRPRIVRSVRIAFNGLGVRLDQPDIAQKLTERIDDLKQRIAAWGSRIRRYSERVERFQQNRLFSSDQKRFYRTLECPAVCSTSQKPSPADLVAFWRNVWSTEVQHEEGPWIAAVEEACAVIKPMSPVAISAEDVVDAVRRAPNWKSPGPDGLHHYWLKGFSVCHATLARQFQEALEQRTLPNLFTTGITHLAPKSTDAADPAKYRPITCLTTIYKTLTSVLSSKISRHVDENNIISGAQNGCRGRSRGTKELLLIDSVAGQLVKRNRRNFSAAWIDYKKAFDSVPHSWLSRVLELYKVDSTVRNFLGKCMGQWSTILSLHGERITAADDRIRIRRGIFQGDCLSPLWFCLSLNPLSSLLESSGTGFQFRRGGTRVPHLLYMDDLKLLAPNANRLQELLKITSEFSNSIRMKLGLDKCAVLHVVRGQVTHSAEINLEPSSIRTLSEAESYRYLGMSQSIGVNEADMKQSVCEAFFGRLTKVCKSSLSGANKVRAYNGWVMPVLMYTFGVLRWTQTELDTLDRRVRTTMTLYRMHHPKSSVMRLYIPRKCGGRGLLSVKTMHNREIANLRTYFETKRESPMHREVVECDKGLTPLSLAKTEWQAPVVLSTSNRETVWKEKELHGRFFKALNEPNVDKKASVQWLRFGDLFGETEGFVCAIQDQVVKTRNYRKYILKDGTHDICRACGHPGESLRHVLSGCSALANTEYLHRHNQAAKILHQELALKHGLLNERLPYYKYTPMPVLERDGVRLYWDRSIITDRTILANKPDIVLMDRAQSRVFLMDITVPYDENLVRAETEKKRKYLDLAHEVSTMWHVGSTEIIPIVISANGLIPVSLAHYLRRLGFRDSSLAARLQKAVLLDSARIVRRFLNLSP

SEQ ID NO: 14548 - protein, 1201 aa, Hyposmocoma kahamanoa
MMEHNSYDERIGPLPGGNRRGAPGAGAGRGSMRAPSRGRLARPSGQSTHDPSPPVGMVSAGAGATWSQQSVPASGGVRRRMAWTIDMNKNAMRAYFRASGSGTGRTGYRAVMYREFLRLEPTLTVTEQNLADRVRYLQRSGLFSAAELEQLRCEAVPPLEEEPPRLERSPVPSREVHREPSAQQPDTGGTESDWGTVALDLEALRSSLEETILEYRHVPLERRPRLPRVPLSIKVRDAVGAINNMLPSFLEESADLWETDSILFAAAMTVCQFFGVRMPPTRPGGNHQVGSTTPRTSTKPAWMRRIEGRIAWARVLIGKLTSFRSGVTRPRVMRFVREAFPGENIFVDSPEFARKLTGRIDDLKQKIAAWGKRIRRYSERVKRYRQNRLFMSDQKKFYRTLERPDVVLTGERPDKAEVVAFWRRLWSQPVDHEEGPWFEAVERACATIAPMNPISISEEDVAVAVRKAPNWKSPGPDGLHHYWLKGFWCCHATLARQFQSALESGTLPNFLTTGVTHLAPKSDATVDPSQYRPITCLCTIYKTLTSVLSSKISQHIADNSVMSETQNGCRGGSRGSKELLLIDAVAGQLVRRNRRNFSAAWIDYRKAFDSVPHPWLSRVLELYKIDSAVRHFLGQCMGCWRTILSLDGRRMTDADDRIEIRRGIFQGDCLSPLWFCLALNPLSTLLERSGTGFQFRRGGPRMPHLLYMDDLKLYGPTADRLTELLTITNDFSSSVRMELGIDKCAVVHVEKGRVMHSDGINIGTNHLRVLSETETYRYLGMSQTIGVKEADVKQGVCEVFYGRLKNVLNSYLSGVNKIRAYNSWVMPVLMYTFGVLKWTQTELDALDRRVRTTMTSHRMHHPRSSVMRLYVPRKCGGRGLLSVKTMHNREICSLRNYFLTMTDDVIRGEVVTCDKGLTPLSLAKEEWRDPVVLSTSDRESVWKEKELHGRFFKVLHEPFMDRKASLHWLRFGDLFGETEGFVCAIQDQVIKTRNYRKYILKDGTVDICRACGRPGESLRHIVSGCSALANTEYLHRHNQAAKILHQELALKYGLVQQRLPYYKYSPEPILEDDRTKIYWDRSIITDRTILANKPDIVILDRSQSRVFLVDVTIPHDEGLVKAETEKRRKYLDLAHEITDMWDVASTEIIPIVLSANGLIPVSLSNSLRRLDFCGVSLPAQMQKAVLLDTARIVRRFLDLSP

SEQ ID NO: 14549 - protein, 1111 aa, Narcosius parisi
MRWTSQMNENVMRAYYRATGGETGRTGYRAAMYREFLLLEPNLTVTEQNLADRARYIQRSNIFSATELERLRREAVPEVTTPTTEQIVSLAEPVREETDANAQDLPVEEDTEETVSLDIERMGRILEEAISEIRSAPLENRPRLSRLTLNVATRDVIEAINQMLPQYLERSTGLDDTASILFGAALAVHRFMGVKTQERGRTTLRRSTEPAWKRRIEHRITLARALIGRLQSFRSGNTRPRIVRSVRIAFNGLGVRLDQPDIAQKLTERIDDLKQKIAAWGNRIRRYSERVERFQQNRLFSSDQKRFYKKLECPAVCSTSQRPSPADLVAFWRNVWSREVEHEEGPWIAAVEEACASIEPMNPVAISSEDVAGAVRRAPNWKSPGPDGLHHYWLKGFSLCHATLARQFQDALEQRALPSLFTTGITHLAPKSTDTADPAKYRPITCLTTIYKTLTSVLSLKISRHVDENNIMSEAQNGCRGGGRGTKELLLIDSVAGQLVKRNRRNFSAAWIDYKKAFDSVPHSWLLRVLELYKVDSTVRDFLGECMGQWSTILCLHGERLAAAGDRIKIRRGIFQGDCLSPLWFCLSLNPLSSLLERSGTGFQFRRGGTKVPHLLYMDDLKLLAPNATRLRELLNITTEFSNSIRMELGLDKCAVLHVERGQVTHSAEINLEPSNIRTLSEAESYRYLGMSQSVGVKEADVKQSVCEVFFGRLTKVCKSYLSGANKVRAYNGWVMPVLMYTFGVLRWTQTELDALDRKVRTTMTLYRMHHPKSSVMRLYIPRKCGGRGVLSVKTMHNREISSLRTYFETKRECPMHRDVIECDKGLTPLSLAKLEWQKPVVLSTSDRETVWKERELHGRFFKALNEPHVDKKASVQWLRFGDLFGETEGFVCAIQDQVVKTRNYRKYILKDGTHDICRACRHPGESLRHVLSGCSALANTEYLHRHNQAAKILHQELALKYGLLDERVPYYRYTPVPVLERDGVRLYWDRSIITDRTILANKPDIVLMDRAQSRVFLVDITIPHDENLVRAETEKKRKYLDLAHEVTGMWHVESTETIPIVISANGLIPVSLAHHLRRLGFRGSSLAAKMQKAVLLDSARIVRRFLSLSP

SEQ ID NO: 14550 - protein, 918 aa, Melitaea cinxia
MRSRLSRLPLNAATRNAIEAANRLLPPYLEGSLSLEDTGSILFGAALAVHRLVRAKTQESGRATHKNSDVPAWKGRIERRINLARALIGRLLAFRSGNTRPRIVRSVRMAFNGLGISLDQPDIADKLTERIDGLKPRIAAWGKRIRRYSERIERFRQNRLFVSDQKRFYRKLENPISGSASLKPSTVDLVAFWRNIWSGEVEHEEGPWIAAVQDACAKIEPMNPIAISTEDVSGAVRRAPNWKSPGADGLHHYWLRGLSVCHATLARQYQEAIDRKTLPNLFTTGITHLAPKSTNTADPTNYRPITCLTSIYKTLTSILSCKISRHIGEFNILSAAQNGCRGGGRGTKELLLIDSVAGQLVRRNRRNFSATWIDYKKAFDSVPHSWLLRVLELYKIDEAVRDFLGVCMGQWSTNLCLQGERLTGADDPIRIRRGIFQGDCLSPLWFCLSLNPLSTLLERSGTGFQFRRGGTKVSHLLYMDDLKLLAPNAARLQELLKITTEFSSSIRIQLGVDKCAVVHVDRGQVTQSAQLSLELTSFKTLSEAESYRYLGMSQCIGVKEVDMKQAVCEIFFGRVTKVLRSYLSGANKVQAYNAWVMPTLLYTFGILRWTQTELDALDRRVHTTMTYHRVHHSKSSVMRLYIPRKCGGRGMLSAKTMHNCEVCSLRAYFETRRDSALHGDVSMCDKGLTPLALAKENWQKPVVLSTSDRETVWMEKELHGRFYKALHAPHIDNKASLQWLRFGALFGEIEGFVCAIQDQVVKTNNYRKHVLKDGTPDFCRACRHPGESLRHVLSGCSALANTEYLHRHNQVAKILHQELALMYGLLEQRMPYYQYSPVPVLERDGVRLYWDLPIATDRTILANKSDIVVMDRARMRVFLVDVTVPHDENLVKAETEKNVNIWIWRTRLSTCGVWGLLI

SEQ ID NO: 14551 - protein, 1181 aa, Mellicta athalia
MEDKFGKRIGPLPGGRQGASGAGAGRGSIRAASHPRRPAPPPDRSANPPSPPDGLAPTEPQGTQHSAPAAGGVRRMRWTPKMNESVMRAYYRAVGRETGRTGYRAVMHREFLLLEPTVTVTEQNLADRARYIQRKGVFDAAELERFRREAAPEVEPVSAERDAVTTQQESVRSEAPVEAITEEAVSQKIEQMRGILEEAISETRGVPLELRPRLSRLPLNAATRRAIEAANRLLPPYLEGSLGLEDTGSILFGAALAVHRLVGAKTQEPGRATHKNSDVPAWKRRIERRISLARALIGRLLAFRSGNTRPRIVRSVRMAFNGLGDSLDQPDIADRLTERIDGLKQRIAAWGKRIRRYSERVERFRQNRLFASDQKRFYRKLKNPTPCSASLKPSTVDLVAFWRNIWSREVEHEEGPWIAAVQDACAKIEPMNPIAISTEDVSDAVRRAPNWKSPGADGLHHYWLKGLSVCHATLARQYQEAIDRKTLPNLFATGITHLAPKSNNTADPTNYRPITCLTSIYKTLTSVLSCKISRHSSESNILSAAQNGCRGGGRGTKELFLIDSVAGQLVRRNRRNFSAAWIDYKKAFDSVPHSWLLRVLELYKIDKAVRDFLGVCMGQWSTILCLQGERLTGADDPIRIRRGIFQGDCLSPLWFCLSLNPLSTLLERSGTGFQFRRGGTKVSHLLYMDDLKLLAPNAARLQELLKITMEFSGSIRMQLGVDKCAVVHVDRGQVTQSAQFSLELTSFKTLSEAEAYRYLGMSQCIGVKEVDMKQAVCEVFFGRLTKVLRSYLSGANKVRAYNAWVMPTLLYTFGILRWTQTELDALDRRVRTTMTHHHVHHPKSSVMRLYISRKRGDRGMLSAKTMHNREVCSLRAYFEARRDSAMHGDVVVCDKGLTPLSLAKENWQKPVVLSTSDRETVWMEKELHGRFYKALHAPHVDSKASVQWLRFGDLFGETEGFICAIQDQVVKTNNYRRHILKDGTPDFCRACRHPGESLRHVLSGCSVLANTEYLHRHNQAAKILHQELALMYGLLEQRMPYYQYSPVPVLERDGVRLYWDLPIATDRTILANKPDIVVMDRARTRVFLVDITIPHDENLVKAETEKKRKYLDLAHEIVDMWDVRSAEIIPIVISANGLIPVSLAHHLRQLGIRDSSLAARMQKAVLLDSARIVRRFLSLQP

SEQ ID NO: 14552 - protein, 1188 aa, Boloria selene
MMENKNKNARLGPLPGGRQGAPGAGAGRDSIRAASTINRPALPPSRPTHPSPPPEGLVPTGSSRTRTSGPAAGGVRRMRWTSQMNENVMRAYYRATGGETGRTGYRAAMYREFLLLEPTLTVTEQNLADRARYIQRSNILNATELEQLRREAVPEVRTLTTEQIVPPAATGEDVLTNFHDLPIEGGTQETVALDTERMRMILEEAVSEIRSAPLENRPRLSRLTLNVATREVIEAINQLLPQHLESSIGLEDTASILFGAALAVHRFVGARTPGPERDTAARRKAQPAWKKRIERRINHARGLIGRLQSFRSGNTRPRIVRSVRIAFNGLGVRLDQPDIAQKLTERIDDLKQRIAAWGSRIRRYSERVECFQQNRLFSSDQKRFYRTLECPAVCSISQKPSPADLVAFWRNVWSKEVQHEEGPWIAAVEEACAVIKPMSSVAISAEDVVDAVRRAPNWKSPGPDGLHHYWLKGFSVSHATLARQFQEALEQRTLPNLFTTGITHLAPKSTDAADPAKYRPITCLTTIYKTLTSVLSSKISRHVDENNIISGAQNGCRGRSRGTKELLLIDSVAGQLVKRNRRNFSAAWIDYKKAFDSVPHSWLSRVLELYKVDSTVRNFLGKCMGQWSTILSLHGERITAADDRIRIRRGIFQGDCLSPLWFCLSLNPLSSLLESSGTGFQFRRGGTRVPHLLYMDDLKLLAPNANRLQELLKITSEFSNSIRMKLGLDKCAVLHVVRGQVTHSAEINLEPSSIRTLSEAESYRYLGMSQSIGVNEADMKQSVCEAFFGRLTKVFKSFLSGANKVRAYNGWVMPVLMYTFGVLRWTQTELDTLDRRVRTTMTLYRMHHPKSSVMRLYIPRKCGGRGLLSVKTMHNREIANLRTYFETKRESPMHREVVECDKGLTPLSLAKTEWQAPVVLSTSNRETVWKEKELHGRFFKALNEPNVDKKASVQWLRFGDLFGETECFVCAIQDQVVKTRNYRKYILKDGTHDICRACGHPGESLRHVLSGCSALANTEYLHRHNQAAKILHQELALKHGLLDERLPYYKYTPMPVLERDGVRLYWDRSIITDRTILANKPDIVLMDRAQSRVFLVDITVPYDENLVRAETEKKRKYLDLAHEVSTMWHVESTETIPIVISANGLIPVSLAHYLRRLGFRDSSLAARLQKAVLLDLARIVRRFLNLSP

SEQ ID NO: 14553 - protein, 957 aa, Hyposmocoma kahamanoa
MLPSFLEESVGLWETDSILFAAAMTVCQFVGVRMPPTRPGGNHQVGSTTPRTSTKPAWMRRIEGRIAWARVLIGKLTSFRSGVTRPRVMRFVREAFPGENIFVDSPEFARKLTGRIDDLKQKIAAWGKRIRRYSERVKRYRQNRLFMSDQKKFYRTLERPDVVLTGERPDKADVVAFWRRLWSQPVDHEEGPWFEAVEGACATIAPMNPISISEEDVAVAVRKAPNWKSPGPDGLHHYWLKGFWCCHATLARQFQSALESGTLPNFLTTGVTHLAPKSDATVDPSQYRPITCLCTIYKTLTSVLSSKISQHIVDNSVMSEVQNGCRGGSRGSKELLLIDAVAGQLVRRNRRNFSAAWIDYRKAFDSVPHSWLSRVLELYKIDSAVRHFLGQCMGCWRTILSLDGRRMTDADDRIEIRRGIFQGDCLSPLWFCLALNPLSTLLERSGTGFQFRRGGPRMPHLLYMEDLKLYGPTADRLTELLTITNDFSSSVRMELGIDKCAVVHVERGRVMHSDGINIGNNHLRVLSETETYRYLGMSQTIGVKEADVKQGVCEVFYGRLKNVLNSYLSGVNKIRAYNSWVMPVLMYTFGVLKWTQTELDALDRRVRTTMTSHRMHHPRSSVMRLYVPRKCGGRGLLSVKTMHNREICSLRNYFLTMTDDVIRGEVVTCDKGLTPLSLAKEEWRDPVVLSTSDRESVWKEKELHGRFFKVLHEPFMDRKASLHWLRFGDLFGETEGFVCAIQDQVIKTRNYRKYILKDGTVDICRACGRPGESLRHIVSGCSALANTEYLHGHNQAAKILHQELALKYGLVQQRLPYYKYSPEPILEDDRTKIYWDRSIITDRTILANKPDIVILDRSQSRVFLVDVTIPHDEGLVKAETEKRRKYLDLAYEITDMWDVASTEIIPIVLSANGLIPVSLSNSLRRLDFCGVSLPAQMQKAVLLDTARIVRRFLDLSP

SEQ ID NO: 14554 - protein, 751 aa, Maniola hyperantus
MNPIAISTEDVAGAVRRAPNWKSPGPDGLHHYWLKGFSVCHATLARQFQEALEQRTLPSLFTTGITHLAPKSTDTTDPAKYRPITCLTTIYKTLTSVLSLKISRHVDENNIISGAQNGCRGGSRGTKELLLIDSVAGQLVKRNRRNFSAAWIDYRKAFDSVPHSWLLRVLELYKVDGTVRDFLGECMGQWSTILCLHGERLADADDRIRIGRGIFQGDCLSPLWFCLSLNPLSTLLEGSGTGFQFRRGGTKVPHLLYMDDLKLLAPNATRLQELLNVTTDFSNSIRMELGLDKCAVMHVERGQVTHSAEMSLEPSTIRTLSEAESYRYLGMSQSLGVKETDVKQSVCEAFFGRLTKICKSYLSGANKIRAYNGWVMPVLMYTFGVLRWTQTELDALDRKVRTTMTLYRMHHPKSSVMRLYIPRKCGGRGVLSVKTMHNREIANLRTYFETMRGSPMHREVIECDKGLTPLALAQTEWQKPVVLSTSDREAVWREKELHGRFFKALNEPHVDKKASVQWLRFGDLFGETEGFVCAIQDQVVKTRNYRKYILKDGTHDICRACRHPGESLRHVLSGCSALANTEYLHRHNQAAKILHQELALKYGLLDERLPYYKYTPVPVLERDGVRLYWDRSIITDRTILANKPDIVVVDRAQSRVFLVDITIPYDENLVRAETEKKRKYLDLAHEVSDMWHVESTEIIPIVISANGLIPVSLAQHLRRLGFRGSSLAARMQKAVLLDSARIVRRFLHLSP

SEQ ID NO: 14555 - protein, 1114 aa, Maniola hyperantus
MRWTSLMNENVMRAYYRATGGETGRTGYRAAMYREFLLLEPNLTVTEQNLADRARYIQRSNIFNATELERLRREAVPEVSAPTTEQIVSQAARPSVREETITTSQDLPVEEDTEETVSLDIERMRRILEETISEIRSAPLENRPRLSRLTLNVATRDVIEAINKMLPQHLESSTGLGDTASILFGAALAVHRFIGAKTPGPGRAAAARCSAEPAWKKRIERRITLARVLIGRLQSFRSGNTRPRIVRSVRVAFNGCGVRLDQPDIAQKLTERIDDLKQKIAAWGNRIRRYSERVERFQQNRLFLSDQKRFYKRLECPAVCSTSQRLDPADLVTFWRGVWSREVEHEEGPWIAAIEEACASIEPMNPIAISTEDVAGAVRRAPNWKSPGPDGLHHYWLKGFSVCHATLARQFQEALEQRTLPSLFTTGITHLAPKSTDTTDPAKYRPITCLTTIYKTLTSVLSLKISRHVDENNIISGAQNGCRGGSRGTKELLLIDSVAGQLVKRNRRNFSAAWIDYRKAFDSVPHSWLLRVLELYKVDGTVRDFLGECMGQWSTILCLHGERLADADDRIRIGRGIFQGDCLSPLWFCLSLNPLSTLLEGSGTGFQFRRGGTKVPHLLYMDDLKLLAPNATRLQELLNVTTDFSNSIRMELGLDKCAVMHVERGQVTHSAEMSLEPSTIRTLSEAESYRYLGMSQSLGVKETDVKQSVCEAFFGRLTKICKSYLSGANKIRAYNGWVMPVLMYTFGVLRWTQTELDALDRKVRTTMTLYRMHHPKSSVMRLYIPRKCGGRGVLSVKTMHNREIANLRTYFETMRGSPMHREVIECDKGLTPLALAQTEWQKPVVLSTSDREAVWREKELHGRFFKALNEPHVDKKASVQWLRFGDLFGETEGFVCAIQDQVVKTRNYRKYILKDGTHDICRACRHPGESLRHVLSGCSALANTEYLHRHNQAAKILHQELALKYGLLDERLPYYKYTPVPVLERDGVRLYWDRSIITDRTILANKPDIVVVDRAQSRVFLVDITIPYDENLVRAETEKKRKYLDLAHEVSDMWHVESTEIIPIVISANGLIPVSLAQHLRRLGFRGSSLAARMQKAVLLDSARIVRRFVHLSP

SEQ ID NO: 14556 - protein, 1181 aa, Melitaea cinxia
MEDNLERRIGPLPGGRQGASGAGAGRGSMRAASQPRRPAPPPDQSAYPPSPPVGLATTESQGTQHSLPAAGGVRRMRWTPKMNENVMRAYYRAVGRETGRTGYRAVMHREFLLLEPTLTVTEQNLADRARYIQRKGIFDAAELERFRREAAPEVEPVSTVRNEMSTQQEGVRSEAPVEVITEGAVAQKVEQMRGILQEAISETRGAPLEMRPRLSRLPLNAATRNSIEAANRLLPPYLEGSLSLEDTGSILFGAALAVHRLVGAKTQESGRATHKNSDVPAWKRRIERRINLARALIGRLLAFRSGNTRPRIVRSVRMAFNGLGISLDQPDIADKLTERIDGLKQRIAAWGKRIRRYSERVERFRQNRLFVSDQKRFYRNLENPISGSASLKLSTVDLVAFWRNIWSGEVEHEEGPWIAAVQDACAKIKPMNPIAISTEDVSGAVRRAPNWKSPGADGLHHYWLKGLSVCHATLARQYQEAIDRKTLPNLFTTGITHLAPKSTNTADPTNYRPITCLTSIYKTLTSVLSCKISRHIGEFNVLSAAQNGCRGGGRGTKELLLIDSVAGQLVRRNRRNFSAAWIDYKKAFDSVPHSWLLRVLELYKIDEAVRDFLGVCMGQWSTILCLQGERLTGADDLIRIRRGIFQGDCLSPLWFCLSLNPLSTLLERSGTGFQFRRGGTKVSHLLYMDDLKLLAPNAARLQELLKITTEFSSSIRMQLGVDKCAVVHVDRGQVTQSSQLSLELTSFKTLSEAESYRYLGMSQCIGVKEVDMKQAVCEIFFGRLTKVLRSYLSGANKVRAYNAWVMPTLLYTFGILRWTQTELDALDRRVRTTMTYHRVHHPKSSVMRLYIPRKCGGRGMLSAKTMHNREVCSLRAYFETRRDSALHGDVSMCDKGLTPLALAKENWQNPVVLSTSDRETVWMEKELHGRFYKALHAPHVDSKASVQWLRSGDLFGETEGFVCAIQDQVVKTNNYRKHVLKDGTPDFCRACRHPGESLRHVLSGCSALANTEYLHRHNQVAKILHQELALMYGLLEQRMPYYQYSPVPVLERDGVRLYWDLPIATDRTILANKPDIVVMDRARSRVFLVDITVPHDENLVKAETEKKRKYLDLAHEIVDMWGVGSAEIIPIVISANDLIPVSLAHHLRQLGIRDGSLAARMQKAVLLDSARIVRRFLSLQP

SEQ ID NO: 14557 - protein, 864 aa, Melitaea cinxia
MAFNGLGISLDQPDIADKLTERIDGLKQRIAAWGKRIRRYSERVERFRQNRLFVSDQKRFYRKLENPISSSASLKPSTVDLVAFWRNIWSGEVEHEEGPWIAAVQDACAKIEPMNPIAISTEDVSGAVRRAPNWKSPGADGLHHYWLKGLSVCHATLARQYQEAIDRKTLPNLFTTGITHLAPKSTNTADPTNYRPITCLTSIYKTLTSVLSCKISRHIGEFNILSAAQNGCRGGGRGTKELLLIDSVAGQLVRRNRRNFSAAWIDYKKAFDSVPHSWLLRVLELYKVDQTVRDFLGVCMGQWSTILCLQGERLTGADDPIRIRRGIFQGDCLSPLWFCLSLNLLSTLLERSGTGFQFRRGGTKVSHLLYMDDLKLLAPNAARLQELLKITTEFSSSIRMQLGVDKCAVVHVDRGQVTQSSQLSLELTSFKTLSEAESYRYLGMSQCIGVKEVDMKQAVCEIFFGRLTKVLRSYLSGANKVRAYNAWVMPTLLYTFGILRWTQTELDALDRRVHTTMTHHRMHHPKSSVMRLYIPRKCGGRGMLSAKTMHNREVCSLRAYFETRRDSALHGDVSMCDKGLTPLALAKENWQKPVVLSTSDRETVWMEKELHGRFYKALHAPHVDSKASVQWLRFGDLFGETEGFVCAIQDQVVKTNNYRKHVLKDGTPDFCRACRHPGESLRHVLSGCSALANTEYLHRHNQVAKILHQELALMYGLLEQRMPYYQYSPVPVLERDGVRLYWDLPIATDRTILANKPDIVVMDRARSRVFLVDITVPHDENLVKAETEKKRKYLDLAHEIVDMWGVGSAEIIPIVISANGLIPVSLAHHLRQLGIRDGSLAARMQKAVLLDSARIVRRFLSLQP

SEQ ID NO: 14558 - protein, 1182 aa, Mellicta athalia
MEDKKNGKRIGPLPGGRQGASGAGAGRGSMRAASHPRRPAPPPDRSANPPSPPDGLAPTESQGAQHSAPAAGGVRRMRWTTTMNENVMRAYYRAVGRETGRTGYRAVMHREFLLLEPTLTVTEQNLADRARYIQRKGVFDATELEWFRRGAAPEVEPVSAERDAVTTQQESVRSEAPVEAITEGAVSQKVELMRGILEEAISETQGAPLEQRPRLSRLPLNAATRSAIEAANRLLPPYLEGSLGLEDTGSILFAAALAVHRLVGAKTQEPGRATHKNSDVPAWKRRIERRISLARALIGRLLAFRSGNTRPRIVRSVRKAFNGLGISLDQPDIADRLTERIDGLKQRIAAWGKRIRRYSERVERFRQNRLFVSDQKRFYRKLENPIPCSSSLKPSTVDLVAFWRNIWSREVEHEEGPWIAAVQEACAKIEPMNPIAISTEDVSDAVRRAPNWKSPGVDGLHHYWLKGLSVCHATLARQYQEAIDRKTLPNLFATGITHLAPKSTNTADPTNYRPITCLTSIYKTLTSVLSCKISRHIRESNILSAAQNGCRGGGRGTKELLLIDSVAGQLVRRNRRNFSAAWIDYKKAFDSVPHSWLLRVLELYKIDKAVRDFLGVCMGQWSTILCLQGERLTGADDPIRIRRGIFQGDCLSPLWFCLSLNPLSTLLERSGTGFQFRRGGTKVSHLLYMDDLKLLAPNAARLQELLKITTEFSGSIRMQLGVDKCAVVHVDRGQVTQSAQFSLELTSFKTLSEAESYRYLGMSQCIGVKEVDMKQAVCEVFFGRLTKVLRSYLSGANKVRAYNAWVMPTLLYTFGILRWTQTELDALDRRVRTTMTHHRVHHPKSSVMRLYISRKCGGRGMLSAKTMHNREVCSLRAYFEARRDSAMHGDVVVCDKGLTPLSLANENWQKPVILSTSDRETVWMEKELHGRFYKALHAPHVDSKASVQWLRFGDLFGETEGFVCAIQDQVVKTNNYRKHILKDGTPDFCRACRHPGESLRHVLSGCSVLANTEYLHRHNQAAKILHQELALMYGLLEQRMPYYQYSPVPVLERDGVRLYWDLPIATDRTILANKPDIVVMDRARSRVFLVDITIPHDENLVKAETEKKRKYLDLAHEIVDMWDVRSTEIIPIVISANGLIPVSLAHHLRQLGIRDSSLAARMQKAVLLDSARIVRRFLSLQP

SEQ ID NO: 14559 - protein, 1189 aa, Maniola jurtina
MMDNGKRNERIGPLPGGRQGAPGAGAGRGSMRAASATSRPALPPSRSTYPSSPPDGLAPTGSTRAQSSAPAAGGVRRMRWTSLMNENVMRAYYRATGGETGRTGYRAAMYREFLLLEPNLTVTEQNLADRARYIQRSNIFNATELERLRREAVPEVSAPTAEQIVSQAAPVREETITTSQDLPVEEDTEGTVSLDIERMRGILEEAISEIRSAPLENRPRLSRLTLNVATRDVIEAINKMLPQHLESSTGLGDTASILFGAALAVHRFIGAKTPGLGRAAATRRSTEPAWKKRIEHRITLARVLIGRLQSFRSGNTRPRIVRSVRVAFNGCGVRLDQPDIAQKLTERIDDLKQKIAAWGNRIRRYSARVERFQQNRLFSSDQKRFYKRLECPAVCSTSQRPDPADLVAFWRGVWSREVEHEEGPWIAAVEEACARIEPMNPVAISAEDVAGAVRRAPNWKSPGPDGLHHYWLKGFSVCHATLARQFQEALEQRALPSLFTTGVTHLAPKSTDTTDPAKYRPITCLATIYKTLTSVLSLKISRHIDENNIMSGAQNGCRGGGRGTKELLLIDSVAGQLVRRNRRNFSAAWIDYKKAFDSVPHSWLLRVLELYKVDSAVRDFLEACMGQWSTILCLHGERLAAADDRIRIGRGIFQGDCLSPLWFCLSLNPLSTLLEGSGTGFQFRRGGTKVPHLLYMDDLKLLAPNATRLKELLNITTEFSNSIRMELGLDKCAVIHVERGQVTHSAEISLEPTNIKTLSEAESYRYLGMSQSLGVKEADMKQSVCEAFFGRLTKICKSYLSGANKVRAYNGWVMPVLMYTFGVLSWTQTELDTLDRKVRTTMTLYRMHHPKSSVMRLYIPRKCGGRGVLSVKTMHNREISNLRIYFETMRGSPMHREVIECDKGLTPLSLAKTEWQKPVVLSTSDRETVWKEKELHGRFFKALNEPHVDKKASVQWLRFGDLFGETEGFVCAIQDQVVKTRNYRKYILKDGTHDICRACRHPGESLRHVLSGCSALANTEYLHRHNQAAKILHQELALKYGLLDERLPYYRYTPVPVLERDGVRLYWDRSIITDRTILANKPDIVVVDRAQSRVFLVDITIPYDENLVRAETEKKRKYLDLAHEVSDMWHVESTEIIPIVISANGLIPVSLAHHLRRLGFRGSSLAARMQKAVLLDSARIVRRFLNLSP

SEQ ID NO: 14560 - protein, 749 aa, Elymnias hypermnestra
MNPVAITPEDVVGAVRRAPNWKSPGPDGLHHYWLKGFSACHATLARQFQEAMAQKALPNLFTTGITHLAPKTSNAADPTKYRPITCLSSIYKTLTSILSRKISYHIDENNIMSVAQNGCRGGSRGTKELLLIDSVAGQLVKRNRRNFSAAWIDYKKAFDSVPHSWLLRVLELYKIDGTLRDFLGECMRQWSTILCLHGERLTAADDRIRIRRGIFQGDCLSPLWFCLSLNPLSFLLERSGTGFQFRRGGARVPHLLYMDDLKLLAPNAPRLQELLKITSDFSNSIRMEMGLDKCAVLHVERGQVSHSAEINLEPTQLKTLSETETYRYLGMSQCMGVKEADMKQSVCEVFYGRLTKILKSYLSGANKIRAYNGWVMPVLLYTFGILRWTQTELDALDRRVRTTMTFHRMHHPKSSVMRLYIPRKCGGRGLLSAKTMHNREISSLRTYFETKRESPMHLEVIECDKGLTPLSLANENWQRPAVLSTSDREAVWKGKEMHGRFFKALHEPHVNRKASVQWLRFGDLFGETEGFVCAIQDQVVKTRNYRKYILKDGTHDICRACRHPGESLRHVLSGCSALANTEYLHRHNQAAKILHQELALMYGLLDERLPYYRYQPVPVLERDGVRLYWDRSIITDRTILANKPDIVIMDRAQSRVFLVDITIPYDENLVRAETEKKRKYLDLAHEITAMWGVGSTETIPIVISANGLIPVSLAHHLRRLGFRGSSLAARMQKAVLLDSARIVRRFLSL

SEQ ID NO: 14561 - protein, 1182 aa, Melitaea cinxia
MMGDNVERRIGPLPGGRQGASGAGAGRGSMRTASQRRRPAPPPDRSAYPPSPPVGLATIESQGTQHSVPAAGGVRRMRWTPKMNESVMRAYYRAVGRETGRTGYRAVMHREFLLLEPTLTVTEQNLADRARYIQRKGIFDAAELERFRREAAPEVEPVSAVRNEVSTQQEGVRSEAPVEAITEGAVAQKVEQMRGILQEAISETRGAPLEMRPRLSRLPLNAATRNAIEAANRLLPPYLEGSLSLEDTGSILFGAALAVHRLVGAKTQESGRATHKNSDVPAWKRRIERRINLARALIGRLLAFRSGNTRPRIVRSVRMAFNGLGISLDQPDIADKLTEHIDGLKQRIAAWGKRIRRYSERVERFRQNRLFVSDQKRFYRKLENPISGSASLKPSTVDLVAFWRNIWSGDVEHEEGPWIAAVQDACAKIEPMNPIAISTEDVSGAVRRAPNWKSPGADGLHHYWLKGLSVCHATLARQYQEAIDRKTLPNLFTTGITHLAPKSTNTADPTNYRPITCLASIYKTLTSVLSCKISRHIGEFNILSAAQNGCRGGGRGTKELLLIDSVAGQLVRRNRRNFSLAWIDYKKAFDSVPHSWLLRVLELYKIDQAVRDFLGVCMGQWSTILCLQGERLTGADDPIRIRRGIFQGDCLSPLWFCLSLNPLSTLLERSGTGFQFRRGGTKISHLLYMDDLKLLAPNAARLQELLKITTEFSSSIRMQLGVDKCAVVHVDRGQVTQSSQLSLELTSFKTLSEAESYRYLGMSQCIGVKEVDMKQAVCEIFFGRLTKVLRSYLSGANKVRAYNAWVMPTLLYTFGILRWTQTELDALDRRVRTTMTHHRMHHPKSSVMRLYIPRKCGGRGMLSAKTMHNREVCSLRAYFETRRDSALHGDVSMCDKGLTPLALAKENWQKPVVLSTSDRETVWMEKELHRRFYKALHAPHVDSKASVQWLRFGDLFGETEGFVCAIQDQVVKTNNYRKHVLKDGTPDFCRACRHPGESLRHALSGCSALANTEYLHRHNQVAKILHQELALMYGLLEQRMPYYQYSPVPVLERDGVRLYWDLPIATDRTILANKPDIVVMDRARSRVFLVDITVPHDENLVKAETEKKRKYLDLAHEIVDMWGVGSAEIIPIVISANGLIPVSLAHHLRQLGIRDGSLAARMQKAVLLDSARIVRRFLSLQP

SEQ ID NO: 14562 - protein, 1182 aa, Melitaea cinxia
MMEDNLERRIGPLPGGRQGASGAGAGRGSMRAASQARRPAPPPDRSGYPPSPPVGLATTESQGTQHSLPAAGGVRRMRWTPKMNESVMRAYYRAVGRETGRTGYRAVMHREFLLLEPTLTVTEQNLADRARYIQRKGIFDAAELERFRREAAPEVEPVSTVRNEVSTQQEGVCSEAPVEVITEGAVAQKVEQMRGILQEAISETRGAPLELRPRLSRLPLNAATRNAIEAANRLLPPYLEGSLSLEDTGSILFGAALAVHRLVGAKTQESGRATHKNSDVPAWKRRIERLINLARALIGRLLAFRSSNTRPRIVRSVRMAFNGLGISLDQPDIADKLTERIDGLKQRIAAWGKRIRRYSERVERFRQNRLFVSDQKRFYRKLENPISGSASLKPSTVDLVVFWRNIWSGEVEHEEGPWIAAVQDACAKIEPMNPIAISTEDVSGAVRRAPNWKSPGADGLHLYWLKGLSVCHATLARQYQEAIDRKTLPNLFTTGITHLAPKSTNTADPTNYRPITCLTSIYKTLTSVLSCKISRHIGEFNILSAAQNGCRGGGRGTKELLLIDSVAGQLVRRNRRNFSAAWIDYKKAFDSVPHSWLLRVLELYKIDEAVRDFLGACMGQWSTILCLQGERLTGADDPIRIRRGIFQGDCLSPLWFCLSMNPLSTLLERSGTGFQFRRGGTKVSHLLYMDDLKLLAPNAARLQELLKITTEFSSSIRMQLGVDKCAVVHVDRGQVTQSSQLSLELTSFKTLSEAESYRYLGMSQCIGVKEVDMKQAVCEIFFGRLTKVLRSYLSGANKVRAYNAWVMPTLLYTFGILRWTQTELDALDRRVRTTMTHHRMHHPKSSVMRLYIPRKCGGRGMLSAKTMHNRGVCSLRAYFETRRDSALHGDVSMCDKGLTPLALAKENWQKPVVLSTFDRETVWMEKELHGRFHKALHAPHIDSKASVQWLRFGELFGETEGFVCAIQDQVVKTNNYRKHVLKDGTPDFCRACRHPGESLRHVLSGCSALANTEYLHRHNQVAKILHQELALMYGLLEQRMPYYQYSPVPVLERDGVRLYWDLPIATDRTILANKPDIVVMDRARSRVFLVDITVPHDENLVKAETEKKRLYLDLAHEIVGMWGVGSAEIIPIVISANGLIPVSLAHHLRQLGIRDGSLAARMQKAVLLNSARIVRRFLSLQP

SEQ ID NO: 14563 - protein, 1181 aa, Mellicta athalia
MEDKIGKRIGPLPGGRQGASGAGAGRGSMRAASHPRRPAPPPDRSANPPSPPDGLAPTEPQGTQHSAPAAGGVRRMRWTLKMNESVMRAYYRAVGRETGRTGYRAVMHREFLLLEPTVTVTEQNLADRARFIQRKGVFDAAELERFRREAAPEDEPVSAERDAVSTQQESVRSEAPVEAITEGAVAQKVEQMRGILQEAISETRGAPLEQRPRLSRLPLNAATRSAIEAANRLLPPYLEGSLGLEDTGSILFGAALAVHRLVGAKTQEPGLATHKNSDVPAWKRRIERRISLARALIGRLLAFRSGNTRPRIVRSVRMAFNGLGVSLNQPDIADRLTERIDGLKQRIAAWGKRIRRYSERVERFRQNRLFVSDQKRFYRKLENPIPCSAFLKPSTVDLVAFWRNIWSREVEHEEGPWIAAVQDACAKVEPMNPIAISTEDVSGAVRRAPNWKSPGADGLHHYWLKGLSVCHATLARQYQEAIDRKTLPNLFTTGITHLAPKSTNTADPTNYRPITCLSSIYKTLTSVLSCKISRHIGEFNILSAAQNGCRGGGRGTKELLLIDSVAGQLVRRNRRNFSAAWIDYKKAFDSVPHSWLLRVLELYKIDEAVRDFLGVCMGQWSTILCLQGERLTGADDPIRIRRGIFQGDCLSPLWFCLSLNPLSTLLERSGTGFQFRRGGTKVSHLLYMDDLKLLAPNAAHLQELLKITTEFSGSIRMQLGVDKCAVVHVDRGQVTQSAQFSLELTSFKTLSEAESYRYLGMSQCIGVKEVDMKQAVCEVFFGRLTKVLRSYLSGANKVRAYNTWVMPTLLYTFGILRWTQTDLDALDRRVRTTMTHHRVHHPKSSVMRLYISRKCGGRGMLNAKTMHNREVCSLRAYFETRRDSAMHGDVVVCDKGLTPLSLANENWQKPVVLSTSDRETVWMEKELHGRFYKALHAPHVDSKASVQWLRFGDLFGETEGFVCAIQDQVVKTNNYRKHILKDGTPDFCRACRHPGESLRHVLSGCSALANTEYLHRHNQVAKILHQELALMYGLLEQRMPYYQYTPVPVLERDGVRLYWDLPIATDRTILANKPDIVVMDRARSRVFLVDITIPHDENLVKAETEKKRKYLDLAHEIVDMWGVGSAEIIPIVISANGLIPVSLAHHLRQLGIRDGSLAGRMQKAVLLDSARIVRRFLSLQP

SEQ ID NO: 14564 - protein, 1190 aa, Maniola jurtina
MMMDTNMRNVRIRPLPGGRQGAPGAGAGRSSMRAASTISRPALPPSRSTHPSSPPDGLAPTGPTRAQSSAPAAGGVRRMRWTSLMNENVMRAHYRATGGETGRTGYRAAMYREFLLLEPNLTVTEQNLADRARYIQRSNIFNATELERLRREAVPEVSAPTTEQIVSQAAPARDETITISQDLPVEEDTEGTVSLDIERMRGILEEAISEIRSAPLENRPRLSRLTLNVATRDVIEAINKMLPQHLESSTGLGDTASIIFGAALAVHRFIGAKTPGPGRAAATRRSAEPAWKKRIEHRITLTRVLIGRLQSFRSGNTRPRIMRSVRVAFNGCGVRLDQPDITQKLTERIDDLKQKIAAWGNRIRRYSARVERFQQNRLFSSDQKRFYKRLECPAVCSTSQRPDPADLVAFWRGVWSREVEHEEGPWIAAVEEACARIEPMNPVAISAEDVAGAVRRAPNWKSPGPDGLHHYWLKGFSVCHATLARQFQEALEQRALPSLFTTGITHLAPKSTDATDPAKYRPITCLTTIYKTLTSVLSLKISRHIDENNIMSGAQNGCRGGGRGTKELLLIDSVAGQLVKRNRRNFSAAWIDYKKAFDSVPHSWLLRVLELYKVDSAVRDFLEACMGQWSTILCLHGERLAAADDRIRIGRGIFQGDCLSPLWFCLSLNPLSTLLEGSGTGFQFRRGGTKVPHLLYMDDLKLLAPNATRLRELLNITTEFSNSIRMELGLDKCAVIHVERGQVTHSAEISLEPSNIKTLSEAESYRYLGMSQSLGVKEADMKQSVCEAFFGRLTKICKSYLSGANKVRAYNGWVMPVLMYTFGVLSWTQTELDALDRKVRTTMTLYRMHHPKSSVMRLYIPRKCGGRGVLSVKTMHNREISNLRTYFETMRGSPMHRDVIECDKGLTPLSLAKTEWQKPVVLSTSDRETVWKEKELHGRFFKALNEPHVDKKASVQWLRFGDLFGETEGFVCAIQDQVVKTRNYRKYILKDGTQDICRACRHPGESLRHVLSGCSALANTEYLHRHNQAAKILHQELALKYGLLDERLPYYRYTPVPVLERDGVRLYWDRSIITDRTILANKPDIVVVDRAQSRVFLVDITIPYDENLMRAETEKKRKYLDLAHEVSDMWHVESTEIIPIVISANGLIPVSLAHHLRRLGFRGSSLAVRMQKAVLLDSARIVRRFLNLSP

SEQ ID NO: 14565 - protein, 1189 aa, Maniola jurtina
MMDNGKRNERIGPLPGGRQGAPGAGAGRGSIRAASATSRPALPPSRSTYPSSPPDGLAPTGSTRAQSSAPAAGGVRRMRWTSLMNENVMRAYYRATGGETGRTGYRAAMYREFLLLEPNLTVTEQNLADRARYIQRSNIFNATELERLRREAVPEVSAPTAEQIVSQAAPVREETITTSQDLPVEEDTEGTVSLDIERMRGILEEAISEIRSAPLENRPRLSRLTLNVATRDVIEAINKMLPQHLESSTGLGDTASILFGAALAVHRFIGAKTPGLGRAAATRRSAEPAWKKRIEHRITLARVLIGRLQSFRSGNTRPRIVRSVRVAFNGCGVRLDQPDIAQKLTERIDDLKQKIAAWGNRIRRYSARVERFQQNRLFSSDQKRFYKRLECPAVCSTSQRPDPADLVAFWRGVWSREVEHEEGPWIAAVEEACARIEPMNPVAISAEDVAGAVRRAPNWKSPGPDGLHHYWLKGFSVCHATLARQFQEALEQRALPSLFTTGVTHLAPKSTDATDPAKYRPITCLTTIYKTLTSVLSLKISRHIDENNIMSGAQNGCRGGGRGTKELLLIDSVAGQLVKRNRRNFSAAWIDYKKAFDSVPHSWLLRVLELYKVDSAVRDFLEACMGQWSTILCLHGERLAAADDRIRIGRGIFQGDCLSPLWFCLSLNPLSTLLEGSGTGFQFRRGGTKVPHLLYMDDLKLLAPNATRLKELLNITTEFSNSIRMELGLDKCAVIHVERGQVTHSAEISLEPTNIKTLSEAESYRYLGMSQSLGVKEADMKQSVCEAFFGRLTKICKSYLSGANKVRAYNGWVMPVLMYTFGVLSWTQTELDTLDRKVRTTMTLYRMHHPKSSVMRLYIPRKCGGRGVLSVKTMHNREISNLRTYFETMRGSPMHREVIECDKGLTPLSLAKTEWQKPVVLSTSDRETVWKEKELHGRFFKALNEPHVDKKASVQWLRFGDLFGETEGFVCAIQDQVVKTRNYRKYILKDGTHDICRACRHPGESLRHVLSGCSALANTEYLHRHNQAAKILHQELALKYGLLDERLPYYRYTPVPVLERDGVRLYWDRSIITDRTILANKPDIVVVDRAQSRVFLVDITIPYDENLVRAETEKKRKYLDLAHEVSDMWHVESTEIIPIVISANGLIPVSLAHHLRRLGFRGSSLAARMQKAVLLDSARIVRRFLNLSP

SEQ ID NO: 14566 - protein, 991 aa, Maniola jurtina
MRRILEEAISEIRNAPLENRPRLSRLTLNVVTRDVIEAINKMLPQHLESSTGLGDTASIIFGAALAVHRFIGAKTPGPGRAAATRRSAEPAWKKRIEHRITLARVLIGRLQSFRSGNTRPRIVRSVRVAFNGCGVRLDQPDIAQKLTERIDDLKQKIAAWGNRIRRYSARVERFQQNRLFSSDQKRFYKRLECPAVCSTSQRPDPADLVAFWRGVWSREVEHEEGPWIAAVEEACARIEPMNPVAISAEDVAGAVRRAPNWKSPGPDGLHHYWLKGFSACHATLARQFQEALEQRALPSLFTTGITHLAPKSTDATDPAKYRPITCLTTIYKTLTSVLSLKISRHIDENNIMSGAQNGCRGGSRGTKELLLIDSVAGQLVKRNRRNFSAAWIDYKKAFDSVPHSWLLRVLELYKVDSAVRDFLEACMGQWSTILCLHGERLAAADDRIRIGRGIFQGDCLSPLWFCLSLNPLSTLLEGSGTGFQFRRGGTKVPHLLYMDDLKLLAPNATRLGELLNITTEFSNSIRMELGLDKCAVIHVERGQVTHSAEISLEPSNIKTLSEAESYRYLGMSQSLGVKEADMKQSVCEAFFGRLTKVCKSYLSGANKVRAYNGWVMPVLMYTFGVLSWTQTELDALDRKVRTTMTLYRMHHPKSSVMRLYIPRKCGGRGVLSVKTMHNREISNLRTYFETMRGSPMHREVIECDKGLTPLSLAKTEWQKPVVLSTSDREAVWKEKELHGRFFKALNEPHVDKKASVQWLRFGDLFGETEGFVCAIQDQVVKTRNYRKYILKDGTHDICRACRHPGESLRHVLSGCSALANTEYLHRHNQAAKILHQELALKYGLLDERLPYYKYTPVPVLERDGVRLYWDRSIITDRTILANKPDIVLVDRAQSRVFLVDITIPYDENLVRAETEKKRKYLDLAHEVSDMWHVESTEIIPIVISANGLIPVSLAHHLRRLGFRGSSLAARMQKAVLLDSARIVRRFLSLSP

SEQ ID NO: 14567 - protein, 1188 aa, Boloria selene
MMENNNKNARLGPLPGGRQGAPGAGAGRDSIRAASTTNRPALPPSRPTHPSLPPEGLVPTGSSRTQTSGPAAGGVRRMRWTSQMNENVMRAYYRATGGETGRTGYRAAMYREFLLLEPTLTVTEQNLADRARYIQRSNILNATELERLRREAVPEVRTLTTEQIVPPAATGEDVLTNFHDLPIEGGTQETAALDTERMKRILEEAVSEIRSAPLENRPRLSRLTLNVATREVIEAINQLLPQHLESSIGLDDTASILFGAALAVHRFVGVRTPGPERDTAARRKAQPAWKKRIERRINHARGLIGRLQSFRSGNTRPRIVRSVRIAFNGLGVRLDQPDIAQKLTERIDDLKQRIAAWGSRIRRYSERVERFQQNRLFSSDQKRFYRTLECPAVCSTSQKPSPADLVAFWRNVWSKEVQHEEGPWIAAVEEACAVIKPMSPVAISAEDVVDAVRRAPNWKSPGPDGLHHYWLKGFSVCHVTLARQFQEALEQRTLPNLFTTGITHLAPKSTDAADPAKYRPITCLTTIYKTLTSVLSSKISRHVDENNIISGAQNGCRGRSRGTKELLLIDSVAGQLVKRNRRNFSAAWIDYKKAFDSVPHSWLSRVLELYKVDSTVRNFLGKCMGQWSTILSLHGERITAADDRIRIRRGIFQGDCLSPLWFCLSLNPLSSLLESSGTGFQFRRGGTRVPHLLYMDDLKLLAPNANRLQELLKITSEFSNSIRMKLGLDKCAVLHVVRGQVTHSAEINIEPSSIRTLSEAESYRYLGMSQSIGVNETDMKQSVCEAFFGRLTKVCKSFLSGANKVRAYNGWVMPVLMYTFGVLRWTQTELDTLDRRVRTTMTLYRMHHPKSSVMRLYIPRKCGGRGLLSVKTMHNREIANLRTYFETKGESPMHREVVECDKGLTPLSLAKTEWQAPVVLSTSDRETVWKEKELHGRFFKALNEPNVDKKASVQWLRFGDLFGETEGFVCAIQDQVVKTRNYRKYILKDGTHDICRACGHPGESLRHVLSGCSALANTEYLHRHNQAAKILHQELALKFGLLDERLPYYKYTPMPVLERDGVRLYWDRSIITDRTILANKPDIVLMDRAQSRVFLVDITVPYDENLVRAETEKKRKYLDLAHEVSTMWHVGSTETIPIVISANGLIPVSLAHYLRRLGFRDSSLAARMQKAVLLDSARIVRRFLNLSP

SEQ ID NO: 14568 - protein, 1187 aa, Elymnias hypermnestra
MMDLFNRGKRLGPLPGGRQGTSGAGAGRGSMRAASSTSSTRRPARPPCRPTNPSSPPEGLALAGTARAQNPEPATGGVRRMRWTSLMNENVMRAYYRATGGETGRTGYRTAMHREFLLLEPNLTVTEQNLADRARYIQRSNIFSATELERLRCEAVPEVTPPATQQIAATAIVHQELENNQDLLVDGDAEGTVSLDIEKMRGILEEAISESRSAPLEGRPRLSRLTLSAATRDVIEAINKLLPQYFEGSTGLSETASILYGAALAVHRFIGVKIREPGRTANTSSAVPAWKRRIERRITHARRLIGRLQSFRSGNTRPRIVRSVRIAFNGLDVRLDQPDIAQKLTERIDDLKQKIAAWGNRIRRYSERVERFHQNRLFVSDQKRFYERLQRPASCSSSQRPASADLVAYWRSIWSLEVEHEEGSWTAAVEEACAVIQPMNPVAITPEDVVGAVRRAPNWKSPGPDGLHHYWLKGFSACHATLARQFQEAMAQKALPNLFTTGITHLAPKTSNAADPTKYRPITCLSSIYKTLTSILSRKISYHIDENNIMSVAQNGCRGGSRGTKELLLIDSVAGQLVKRNRRNFSAAWIDYKKAFDSVPHSWLLRVLELYKIDGTLRDFLGECMRQWSTILCLHGERLTAADDRIRIRRGIFQGDCLSPLWFCLSLNPLSFLLERSGTGFQFRRGGARVPHLLYMDDLKLLAPNAPRLQELLKITSDFSNSIRMEMGLDKCAVLHVERGQVSHSAEINLEPTQLKTLSETETYRYLGMSQCMGVKEADMKQSVCEVFYGRLTKILKSYLSGANKIRAYNGWVMPVLLYTFGILRWTQTELDALDRRVRTTMTFHRMHHPKSSVMRLYIPRKCGGRGLLSAKTMHNREISSLRTYFETKRESPMHLEVIECDKGLTPLSLANENWQRPAVLSTSDREAVWKGKEMHGRFFKALHEPHVNRKASVQWLRFGDLFGETEGFVCAIQDQVVKTRNYRKYILKDGTHDICRACRHPGESLRHVLSGCSALANTEYLHRHNQAAKILHQELALMYGLLDERLPYYRYQPVPVLERDGVRLYWDRSIITDRTILANKPDIVIMDRAQSRVFLVDITIPYDENLVRAETEKKRKYLDLAHEITAMWGVGSTETIPIVISANGLIPVSLAHHLRRLGFRGSSLAARMQKAVLLDSARIVRRFLSL

SEQ ID NO: 14569 - protein, 1201 aa, Hyposmocoma kahamanoa
MMEHNSYDERIGPLPGGNRRGAPGAGAGRGSMRAPSRGRLARPSGQSTHDPSPPVGMVSAGAGATRSQQSVPASGGVRRRMAWTIDMNKNAMRAYFRASGSGTGRTGYRAVMYREFLRLEPTLTVTEQNLADRVRYLQRSGLFSAAELEQLRCEAVPPLEEEPPRLERSPVLSREVHREPSAQQPDTGGTESDWGTAALDLEALRSSLEETILEYRHVPLERRPRLPRVPLSIKVRDAVGAINNMLPSFLEESVGLWETDSILFAAAMTVCQFVGVRMPPTRPGGNHQVGSTTPRTSTKPAWMRRIEGRIAWARVLIGKLTSFRSGVTRPRVMRFVREAFPGENIFVDSPEFARKLTGRIDDLKQKIAAWGKRIRRYSERVKRYRQNRLFMSDQKKFYRTLERPDVVLTGERPDKAEVVAFWRRLWSQPVDHEEGPWFEAVEGACATIAPMNPISISEEDVAVAVRKAPNWKSPGPDGLHHYWLKGFWCCHATLARQFQSALESGTLPNFLTTGVTHLAPKSDATVDPSQYRPITCLCTIYKTLTSVLSSKISQHIVDNSVMSEVQNGCRGGSRGSKELLLIDAVAGQLVRRNRRNFSAAWIDYRKAFDSVPHSWLSRVLELYKIDSAVRHFLGQCMGCWRTILSLDGRRMTDADDRIEIRRGIFQGDCLSPLWFCLALNPLSTLLERSGTGFQFRRGGPRMPHLLYMDDLKLYGPTADRLTELLTITNDFSSSVRMELGIDKCAVVHVERGRVMHSDGINIGTNHLRVLSETETYRYLGMSQTIGVKEADVKQGVCEVFYGRLKNVLNSYLSGVNKIRAYNSWVMPVLMYTFGVLKWTQTELDALDRRVRTTMTSHRMHHPRSSVMRLYVPRKCGGRGLLSVKTMHNREICSLRNYFLTMTDDVIRGEVVTCDKGLTPLSLAKEEWRDPVVLSTSDRESVWKEKELHGRFFKVLHEPFMDRKASLHWLRFGDLFGETEGFVCAIQDQVIKTRNYRKYILKDGTVDICRACGRPGESLRHIVSGCSALANTEYLHRHNQAAKILHQELALKYGLVQQRLPYYKYSPEPILEDDRTKIYWDRSIITDRTILANKPDIVILDRSQSRVFLVDVTIPHDEGLVKAETEKRRKYLDLAHEITDMWDVASTEIIPIVLSANGLIPVSLSNSLKRLDFCGVSLPAQMQKAVLLDTARIVRRFLDLSP

SEQ ID NO: 14570 - protein, 1191 aa, Bicyclus anynana
MMMDNNDARIGPLPGGRQGASGAGAGRGSMRAASQTRRPALSPVRSAHPSSPPEGLALTGSIRAQSSEPAAGGVRRMKWTCDMNKNVMRAYYRATGGETGRTGYRAAMYREFLLLEPHLTVTEQNLADRARFIQRSNIFNATELERLRREAVPEVPTSSAEQIVSPAAPVCEETEPMSQDLHAEEEDTEGTVSLDLERMRRILEETIAEIRNAPLENRPRLSRIALNIATRDVIEAVNKMLPQHLAGSTGLDDTASILFGAALAVHRFIGIKTKEPGRPGRSVNNIRAEPAWKRRMERRITLARGLIGRLLCFRSGNRRPRIVRSVRIAFNGLGVRLDQPDITLKLTERIDDLKQKIAAWGNRIRRYSERVERFQQNRLFSSDQKRFYNRLECPAVCSTSPQPNPADLIAFWRNIWSREVEHDEGPWISAIEETCAAIRPMNPVAISTEDVVGAVRRAANWKSPGPDGLHHYWLKAFSTCHVTLARQFQEALEQGTLPNLFTTGITHLAPKTTDTVDPSKYRPITCLTTIYKTLTSVLSSKITRHVDDNNIMSGAQNGCRGGSRGTKELLLIDSVAGQLVKRNRRNFAAAWIDYKKAFDSVPHSWLLRVLELYKIDCTVQDFLRSCMGQWSTILCLHGERLATADDRIRIRRGIFQGDCLSPLWFCLALNPLSTLLEGSGIGFQFRRGGTKVPHLLYMDDLKLLAPNATRLQELLNLTTGFSNSIRMELGLDKCAVLHVERGQVTHTVGINPDLLNIKTLSETESYRYLGMSQSIGVQEADMKQSVCEGFYRRLTKICKSYLSGANKIRAYNGWVMPVLMYTFGVLRWTQTELDILDRRVRTTMTLYRMHHPKSSVMRLYVPRKCGGRGLLSAKTMHNREICSLRTYFETKMESPMHTEVIACDKGLTPLSLANSEGQKPVVQSISDRETVWKGKELHGRFFKALHEPHVSKKASVQWLRFGDLFGETEGFVFAIQDQVVKTRNYRKYILKDGTHDICRACRHPGESLRHVLSGCSALANTEYLHRHNQAAKILHQELALTYGLLDQRLPYYKYTPVPVLERDGVRLYWDRSIITDRTILANKPDIVVLDRAQSRVFLVDITIPYDENLVRAETEKKRKYLDLAHEVTAMWHVESTEIIPIVISANGLIPVSLAHHLRRLGFRGSSLAGKMQKAVLLDSARIVRRFLHLSP

SEQ ID NO: 14571 - protein, 1182 aa, Melitaea cinxia
MMEDNLERRIGPLPGGRQGASGAGAGRGSMRAASQPRRPAPPPDMSAYPPSLPVGLATTESQGTQHSLPAAGGVRRMRWTPKMNENVMRAYYRAVGRETGRTGYRAVMHREFLLLEPTLTVTEQNLADRARYIQRKGIFDAAELERFRREAAPEVEPVSTVRNEVSTQQEGVRSEAPVEAITEGAVAQKVEQMRGILHEAISETRGAPLEMRPRLSRLPLNAATRHAIEAANRLLPPYLETSFSLEDTGSILFGAALAVHRLVGAKTQESGRATHKNSDVPAWKRRIESRINLARSLIGRLLAFRSGNTRPRIVRSVRMAFNGLGISLDQPDIADKLTERIDGLKQRIAAWGKRIRRYSERVERFRQNRLFLSDQKRFYRKLENPISGSASLKPSTVDLVAFWRNIWSGEVEHEEGPWIAAVQDACAKIEPMNPIAISTEDVSGAVRRAPNWKSPGADGLHHYWLKGLSVCHATLARQYQEAIDRKTLPNLFTTGITHLAPKSTNTADPTNYRPITCLTSIYKTLTSVLSCKISRHIGEFNILSAAQNGCRGGGRGTKELLLIDSVAGQLVRRNRRNFSAAWIDYKKAFDSVPHSWLLRVLELYKIDQAVRDFLGVCMGQWSTILCLQGERLTGAGDPIRIRRGIFQGDCLSPLWFCLSLNPLSTLLERSGTGFQFRRGGTKVSHLLYMDDLKLLAPNAARLQELLKITTEFSSSIRMQLGVDKCAVVHVDRGQVTQSSQLSLELTSFKTLSEAESYRYLGMSQCIGVKEVDMKQAVCEIFFGRLTKVLRSYLSGANKVRAYNAWVMPTLLYTFGILRWTQTELDALDRRVRTTMTYHRVHHPKSSVMRLYIPRKCGGRGMLSAKTMHNREVCSLRAYFQTRRDSALHGDVSMCDKGLTPLALAKENWQKPVVLSTSDRETVWMEKELHGRFYKALHAPHVDSKASVQWLRFGDLFGETEGFVCAIQDQVVKTNNYRKHVLKDGTPDFCRACRHPGESLRHVLSGCSALANTEYLHRHNQVAKILHQELALMYGLLEQRMPYYQYSLVPVLERDGVRLYWDLPIATDRTILANKPDIVVMDRARSRVFLVDITVPHDENLVKAETEKKRKYLDLAHEIVDMWGVGSAEIIPILISANGLIPVSLAHHLRQLGIRDGSLAARMQKAVLLDSARIVRRFLSLQP

SEQ ID NO: 14572 - protein, 1182 aa, Melitaea cinxia
MMEDNLERRIGPLPGGRQGASGAGAGRGSMRAASQPRRPAPPPDRSAYPPSLPVGLATTESQGTQHSLPAAGGVRRMRWTPKMNENVMRAYYRAVGRETGRTGYRAVMHREFLLLEPTLTVTEQNLADRARYIQRKGIFDATELERFRREAAPEVEPVSTVRNEVSTQQEGVRSEAPVEAITEGAVAQKVEQMRGILHEAISETRGAPLEMRPRLSRLPLNAATRHAIEAANRLLPPYLETSFSLEDTGSILFGAALAVHRLVGAKTQESGRATHKNSDVPAWKRRIERRINLARALIGRLLAFRSGNTRPRIVRSVRMAFNGLGISLDQPDIADKLTERIDGLKQRIAAWGKRIRRYSERVERFRQNRLFVSDQKRFYRKLENPISGSASLKPSTVDLVAFWRNIWSGEVEHEEGPWIAAVQDACAKIEPMNPIAISTEDVSGAVRRAPNWKSPGADGLHHYWLKGLSVCHATLARQYQEAIDRKTLPNLFTTGITHLAPKSTNTADPTNYRPITCLTSIYKTLTSVLSCKISRHIGEFNILSAAQNGCRGGGRGTKELLLIDSVAGQLVRRNRRNFSAAWIDYKKAFDSVPHSWLLRVLELYKIDQAVRDFLGVCMGQWSTILCLQGERLTGADDPIRIRRGIFQGDCLSPLWFCLSLNPLSTLLERSGTGFQFRRGGTKVSHLLYMDDLKLLAPNAARLQELLKITTGFSSSIRMQLGVDKCAVVHVDRGQVTQSSQLSLELTSFKTLSEAESYRYLGMSQCIGVKEVDMKQAVCEIFFGRLTKVLRSYLSGANKVRAYNAWVMPTLLYTFGILRWTQTELDALDRRVRTTMTHHRMHHPKSSVMRLYIPRKCGGRGMLSAKTMHSREVCSLRAYFETRRDSALHGDVSKCDKGLTPLALAKENWQKPVVLSTSDRETVWMEKELHGRFYKALHAPHVDSKASVQWLRFGDLFGETEGFVCAIQDQVVKTNNYRKHVLKDGTPDFCRACRHPGESLRHVLSGCSALANTEYLHRHNQVAKILHQELALMYGLLEQRMPYYQYSPVPVLERDGVRLYWDLPIATDRTILANKPDIVVMDRARSRVFLVDITVPHDENLVKAETEKKRKYLDLAHEIVDMWGVGSAEIIPIVISANGLIPVSLAHHLRQLGIRDGSLAARMQKAVLLDSARIVRRFLSLQP

SEQ ID NO: 14573 - protein, 1181 aa, Mellicta athalia
MEDKFGKRIGPLPGGRQGASGAGAGRGSMRAASHPRRPAPPPDRSANPPSPPDGLAPTEPQGTQHSAPAAGGVRRMRWTLKMNESVMRAYYRAVGRETGRTGYRAVMHREFLLLEPTVTVTEQNLADRARFIQRKGVFDAAELERFRREAAPEDEPVSAERDAVSTQQESVRSEAPVEAITEGAVAQKVEQMRGILQEAISETRGAPLEQRPRLSRLPLNAATRSAIEAANRLLPPYLEGSLGLEDTGSILFGAALAVHRLVGAKTQEPGLATHKNSDVPAWKRRIERRISLARALIGRLLAFRSGNTRPRIVRSVRMAFNGLGVSLNQPDIADRLTERIDGLKQRIAAWGKRIRRYSERVERFRQNRLFVSDQKRFYRKLENPIPCSASLKPSTVDLVAFWRNIWSREVEHEEGPWIAAVQDACAKVDPMNPIAISTEDVSGAVRRAPNWKSPGADGLHHYWLKGLSVCHATLARQYQEAIDRKTLPNLFTTGITHLAPKSTNTADPTNYRPITCLSSIYKTLTSVLSCKISRHIGEFNILSAAQNGCRGGGRGTKELLLIDSVAGQLVRRNRRNFSAAWIDYKKAFDSVPHSWLLRVLELYKIDEAVRDFLGVCMGQWSTILCLQGERLTGADDPIRIRRGIFQGDCLSPLWFCLSLNPLSTLLERSGTGFQFRRGGTKVSHLLYMDDLKLLAPNAAHLQELLKITTEFSGSIRMQLGVDKCAVVHVDRGQVTQSAQFSLELTSFKTLSEAESYRYLGMSQCIGVKEVDMKQAVCEVFFGRLTKVLRSYLSGANKVRAYNTWVMPTLLYTFGILRWTQTELDALDRRVRTTMTHHRVHHPKSSVMRLYISRKCGGRGMLNAKTMHNREVCSLRAYFETRRDSAMHGDVVVCDKGLTPLSLANENWQKPVVLSTSDRETVWMEKELHGRFYKALHAPHVDSKASVQWLRFGDLFGETEGFVCAIQDQVVKTNNYRKHILKDGTPDFCRACRHPGESLRHVLSGCSALANTEYLHRHNQVAKILHQELALMYGLLEQRMPYYQYTPVPVLERDGVRLYWDLPIATDRTILANKPDIVVMDRARSRVFLVDITIPHDENLVKAETEKKRKYLDLAHEIVDMWGVGSAEIIPIVISANGLIPVSLAHHLRQLGIRDGSLAGRMQKAVLLDSARIVRRFLSLQP

SEQ ID NO: 14574 - protein, 1181 aa, Mellicta athalia
MEDKFGKRIGPLPGGRQGASGAGAGRGSMRAASHPRRPAPLPDRSANPPSPPYGLAPTEPQGTQHSAPAAGGVRRMRWTLKMNESVMRAYYRAVGRETGRTGYRAVMHREFLLLEPTVTVTEQNLADRARFIQRKGVFDAAELERFRRKAAPEDEPVSAERDAVSTQQESVRSEAPVEAITEGAVAQKVEQMRGILQEAISETRGAPLEQRPRLSRLPLNAATRSAIEAANRLLPPYLEGSLGLEDTGSILFGAALAVHRLVGAKTQEPGLASHKNSDVPAWKRRIERRISLARVLIGRLLAFRSGNTRPRIVRSVRMAFNGLGVSLNQPDIADRLTERIDGLKQRIAAWGKRIRRYSERVERFRQNRLFVSDQKRFYRKLENPIPCSAFLKPSTVDLVAFWRNIWSREVEHEEGPWIAAVQDACAKVEPMNPIAISTEDVSGAVRRAPNWKSPGADGLHHYWLKGLSVCHATLARQYQEAIDRKTLPNLFTTGITHLAPKSTNTADPTNYRPITCLSSIYKTLTSVLSCKISRHIGEFNILSAAQNGCRGGGRGTKELLLIDSVAGQLVRRNRRNFSAAWIDYKKAFDSVPHSWLLRVLELYKIDEAVRDFLGVCMGQWSTILCLQGERLTDADDPIRIRRGIFQGDCLSPLWFCLSLNPLSTLLERSGTGFQFRRGGTKVSHLLYMDDLKLLAPNAARLQELLKITTEFSGSIRMQLGVDKCAVVHVDRGQVTQSAQFSLELTSFKTLSEAESYRYLGMSQCIGVKEVDMKQAVCEVFFGRLTKVLRSYLSGANKVRAYNTWVMPTLLYTFGILRWTQTDLDALDRRVRTTMTHHRVHHPKSSVMRLYISRKCGGRGMLNAKTMHNREVCSLRAYFETRRDSAMHGDVVVCDKGLTPLSLANENWQKPVVLSTSDRETVWMEKELHGRFYKALHAPHVDSKASVQWLRFGDLFGETEGFVCAIQDQVVKTNNYRKHILKDGTPDFCRACRHPGESLRHVLSGCSALANTEYLHRHNQVAKILHQELALMYGLLEQRMPYYQYTPVPVLERDGVRLYWDLPIATDRTILANKPDIVVMDRARSRVFLVDITIPHDENLVKAETEKKRKYLDLAHEIVDMWGVGSAEIIPIVISANGLIPVSLAHHLRQLGIRDGSLAGRMQKAVLLDSARIVRRFLSLQP

SEQ ID NO: 14575 - protein, 1190 aa, Maniola jurtina
MMMDTNMRNVRIGPLPGGRQGAPGAGAGRSSMRAASTISRPALPPSRSTHPSSPPDGLAPTGSTRAQSSAPAAGGVRRMRWTSLMNENVMRAYYRATGGETGRTGYRAAMYREFLLLEPNLTVTEQNLADRARYIQRSNIFNATELERLRREAVPEVSAPTTEQIVAQAAPARDETITISQDLPVEEDTEGTVSLDIERMRGILEEAISEIRSAPLENRPRLSRLTLNVATRDVIEAINKMLPQHLESSTGLGDTASIIFGAALAVHRFIGAKTPGPGRAAATGRSAEPAWKKRIEHRITLTRVLIGRLQSFRSGNTRPRIVRSVRVAFNGCGVRLDQPDIAQKLTERIDDLKQKIAAWGNRIRRYSARVERFQQNRLFSSDQKRFYKRLECPAVCSTSQRPDPADLVAFWRGVWSREVEHEEGPWIAAVEEACARIEPMNPVAISAEDVAGAVRRAPNWKSPGPDGLHHYWLKGFSVCHATLARQFQEALEQRALPSLFTTGITHLAPKSTDATDPAKYRPITCLTTIYKTLTSVLSLKISRHIDENNIMSGAQNGCRGGGRGTKELLLIDSVAGQLVKRNRRNFSAAWIDYKKAFDSVPHSWLLRVLELYKVDSAVRAFLEACMGQWSTILCLHGERLAAADDRIRIGRGIFQGDCLSPLWFCLSLNPLSTLLEGSGTGFQFRRGGTKVPHLLYMDDLKLLAPNATRLRELLNITTEFSNSIRMELGLDKCAVIHVERGQVTHSAEISLEPSNIKTLSEAESYRYLGMSQSLGVKEADMKQSVCEAFFGRLTKICKSYLSGANKVRAYNGWVMPVLMYTFGVLSWTQTELDALDRKVRTTMTLYRMHHPKSSVMRLYIPRKCGGRGVLSVKTMHNREISNLRTYFETMRGSPMHREVIECDKGLTPLSLAKTEWQKPVVLSTSDRETVWKEKELHGRFFKALNEPHVDKKASVQWLRFGDLFGETEGFVCAIQDQVVKTRNYRKYILKDGTHDICRACRHPGESLRHVLSGCSALANTEYLHRHNQAAKILHQELALKYGLLDERLPYYRYTPVPVLERDGVRLYWDRSIITDRTILANKPDIVVVDRAQSRVFLVDITISYDENLVRAETEKKRKYLDLAHEVSDMWHVESTEIIPIVISANGLIPVSLAHHLRRLGFRGSSLAARMQKAVLLDSARIVRRFLNLSP

SEQ ID NO: 14576 - protein, 1112 aa, Maniola jurtina
MRWTSLMNENVMRAYYRATGGETGRTGYRAAMYREFLLLEPNLTVTEQNLADRARYIQRSNIFNATELERLRREAVPEVSAPTAEQIVSQAAPVREETITTSQDLPVEEDTEGTVSLDIERMRGILEEAISEIRSAPLENRPRLSRLTLNVATRDVIEAINKMLPQHLESSTGLGDAASILFGAALAVHRFIGAKTPGLGRAAATRRSAEPAWKKRIEHRITLARVLIGRLQSFRSGNTRPRIVRSVRVAFNGCGVRLDQPDIAQKLTERIDDLKQKIAAWGNRIRRYSARVERFQQNRLFSSDQKRFYKRLECPAVCSTSQRPDPADLVAFWRGVWSREVEHEEGPWIAAVEEACARIEPMNPVAISAEDVAGAVRRAPNWKSPGPDGLHHYWLKGFSVCHATLARQFQEALEQRALPSLFTTGVTHLAPKSTDTTDPAKYRPITCLTTIYKTLTSVLSLKISRHIDENNIMSGAQNGCRGGGRGTKELLLIDSVAGQLVKRNRRNFSAAWIDYKKAFDSVPHSWLLRVLELYKVDSAVRDFLEACMGQWSTILCLHGERLAAADDRIRIGRGIFQGDCLSPLWFCLSLNPLSTLLEGSGTGFQFRRGGTKVPHLLYMDDLKLLAPNATRLKELLNITTEFSNSIRMELGLDKCAVIHVERGQVTHSAEISLEPTNIKTLSEAESYRYLGMSQSLGVKEADMKQSVCEAFFGRLTKICKSYLSGANKVRAYNGWVMPVLMYTFGVLSWTQTELDTLDRKVRTTMTLYRMHHPKSSVMRLYIPRKCGGRGVLSVKTMHNREISNLRTYFETMRGSPMHREVIECDKGLTPLSLAKTEWQKPVVLSTSDRETVWKEKELHGRFFKALNEPHVDKKASVQWLRFGDLFGETEGFVCAIQDQVVKTRNYRKYILKDGTHDICRACRHPGESLRHVLSGCSALANTEYLHRHNQAAKILHQELALKYGLLDERLPYYRYTPVPVLERDGVRLYWDRSIITDRTILANKPDIVVVDRAQSRVFLVDITIPYDENLVRAETEKKRKYLDLAHEVSDMWHVGSTEIIPIVISANGLIPVSLAHHLRRLGFRGSSLAARMQKAVLLDSARIVRRFLNLSP

SEQ ID NO: 14577 - protein, 1187 aa, Elymnias hypermnestra
MMDLPKKSKRIGPLPGGRQGTSGAGAGRGSMRAASSSSSTRRPAQPPSRPTNPSSPPEGLASAGAARTQIPEPATGGVRRMRWTSQMNENVMRAYFRATGGETGRTGYRTAMYREFLLLEPNLTVTEQNLADRARYIQRSNIFDATELERLRREAVPEVTPPATEQIAATAIVHQELENNQDLLVDGDAEGTASLDIEKMRGILEEAISESRSAPLEGRPRLSRLTLSAATRDVIEAINKLLPQYFEGSTGLSETASILYGAALAVHRFIGAKIREPGRTANTSSAVPAWKRRIERRITHARRLIGRLQSFRSGNTRPRIVRSVRIAFNGLDVRLDQPDIAQKLTERIDDLKQKIAAWGNRIRRYSERVERFHQNRLFVSDQKRFYERLQRPASCSSSQRPASADLVAYWRSIWSLEVEHEEGSWTAAVEEACAVIQPMNPVAITPEDVVGAVRRAPNWKSPGPDGLHHYWLKGFSACHATLARQFQEAMAQKALPNLFTTGITHLAPKTSNAADPTKYRPITCLSSIYKTLTSILSRKISYHIDENNIMSVAQNGCRGGSRGTKELLLIDSVAGQLVKRNRRNFSAAWIDYKKAFDSVPHSWLLRVLELYKIDGTLRDFLGECMRQWSTILYLHGERLTAADDRIRIRRGIFQGDCLSPLWFCLSLNPLSFLLERSGTGFQFRRGGARVPHLLYMDDLKLLAPNAPRLQELLKITTDFSNSIRMEMGVDKCAVLHVDRGQVSHSAEINLEPTQLKTLSEAETYRYLGMSQCIGLKEADMKQSVCEVFYGRLTKILKSYLSGANKIRAYNGWVMPVLLYTFGILRWTQTELDALDRRVRTTMTFHRMHHPKSSVMRLYIPRKCGGRGLLSAKTMHNREISSLRTYFETKRESPMHLEVIECDKGLTPLSLANENWQRPAVLSTSDREAVWKGKEMHGRFFKALHEPHVNRKASVQWLRFGDLFGETEGFVCAIQDQVVKTRNYRKYILKDGTHDICRACRHPGESLRHVLSGCSALANTEYLHRHNQAAKILHQELALMYGLLDERLPYYRYQPVPVLERDGVRLYWDRSIITDRTILANKPDIVIMDRAQSRVFLVDITIPYDENLVRAETEKKRKYLDLAHEITAMWGVGSAETIPIVISANGLIPVSLAHHLRRLGFRGSSLAARMQKAVLLDSARIVRRFLSL

SEQ ID NO: 14578 - protein, 957 aa, Hyposmocoma kahamanoa
MLPSFLEESADLWETDSILFAAAMTVCQFVGVRMPPTRPGGNHQVGSTTPRTSTKPAWMRRIEGRIAWARVLIGKLTSFRSGVTRPRVMRFVREAFPGENIFVDSPEFARKLTGRIDDLKQKIAAWGKRIRRYSERVKRYRQNRLFMSDQKKFYRTLERPDVVLTGERPDKAEVVAFWRRLWSQSVDHEEGPWFEAVERACATIAPMNPISISEEDVAVAVRKAPNWKSPGPDGLHHYWLKGFWCCHATLARQFQSALESGTLPNFLTTGVTHLAPKSDATVDPSQYRPITCLCTIYKTLTSVLSSKISQHIVDNSVMSEAQNGCRGGSRGSKELLLIDAVAGQLVRRNRRNFSAAWIDYRKAFDSVPHSWLSRVLELYKIDSAVRHFLGQCMGCWRTILSLDGRRMTDADDRIEIRRGIFQGDCLSPLWFCLALNPLSTLLERSGTGFQFRRGGPRMPHLLYMDDLKLYGPTADRLTELLTITNDFSSSVRMELGIEKCAVVHVEKGRVMHSNGINIGTNHLRVLSETETYRYLGMSQTIGVKEADVKQGVCEVFYGRLKNVLNSYLSGVNKIRAYNSWVMPVLMYTFGVLKWTQTELDALDRRVRTTMTSHRMHHPRSSVMRLYVPRKCGGRGLLSVKTMHNREICSLRNYFLTMTDDVIRGEVVTSDKGLTPLSLAKEEWRDPVVLSTSDRESVWKEKELHGRFFKVLHEPFMDRKASLHWLRFGDLFGETEGFVCAIQDQVIKTRNYRKYILKDGTVDICRACGRPGESLRHIVSGCSALANTEYLHRHNQAAKILHQELALKYGLVQQRLPYYKYSPEPILEDDRTKIYWDRSIITDRTILANKPDIVILDRSQSRVFLVDVTIPHDEGLVKAETEKRRKYLDLAHEITDMWDVASTEIIPIVLSANGLIPVSLSNSLRRLDFCGVSLPAQMQKAVLLDTARIVRRFLDLSP

SEQ ID NO: 14579 - protein, 920 aa, Thymelicus sylvestris
MGVKTQERWHSTPRRNAEPAWKKRIERRITLARALIGRLRSFRSGNTRPRIVRSVRIAFDGLGVRLDQPDIDQKLTERIDDLKQKIAAWGSRIRRYSERVKRFQQNRLFSSDQKRFYKKLESSAVCSTSQQPSPADLIAFWRSVWSREVEHEEGPWIAAVEEACASIEQMNPVAISPEDVAGAVRRAANWKSPGPDGLHHYWLKGFSLCHATLARQFQDALEQRTLPSLFTTGITHLAPKSTDAADPAKYRPITCLTTIYKTLTSVLSIKISRHVDENSIISGAQNGCRGGSRGTKELLLIDSVAGQLVKRNRRNFSAAWIDYKKAFDSVPHSWLLRVLELYKVDSTVQDFLRECMGQWSTILCLHGERLAAADDRIRIRRGIFQGDCLSPLWFCLSLNPLSSLLERSGTGFQFRRGGTKVPHLLYMDDLKLLAPNATRLRELLNITTEFSSSIRMELGLDKCAVLHVERGQVTHSAEINLEPTSIRTLSEPESYRYLGMSQSVGVHEADMKQSVCEAFLGRLTKVCKIYLSGANKVRAYNGWVVPVLMYTFGVLRWTQTELDALDRKVRTTMTLYRMHHPKSSVMRLYIPRKCGGRGVLSVKTMHNREISNLRTYFETKRESPMHRDVIECDKGLTPLSLAKPEWQKPVVLSTSDRETVWKEKELHGRFFKALHEPYVDKKASVQWLRFGDLFGETEGFVCAIQDQVVKTRNYRKYILKDGTTDICRACRHPGESLRHVLSGCSALANTEYLHRHNQAAKILHQELALKYGLLDERVPYYRYTPTPVLERDGVRLYWDRSIITDRTILANKPDIVLMDRAQSRVFLVDITIPHDENLVRAETEKKRKYLDLAHEVSSMWHVESTEIIPIVISVNGLIPVSLAHHMRRLGFRGSSLAAKMQKAVLLDSARIVRRFLSLSP

SEQ ID NO: 14580 - protein, 1112 aa, Maniola hyperantus
MRWTSLMNENVMRAYYRATGGETGRTGYRAAMYREFLLLEPNLTVTEQNLADRARYIQRSNIFNATELERLRREAVPEVSAPATEQIDSQAVPVPVETNTISQDLPVEEDTEGTVSLDIERMRGILEEAISEIRSAPLENRPRLSRLTLNVATRDVIEAINKMLPQHLESSTGLGDTASILFGAALAVHRFIGVKTPGPERAAAARRSAEPAWKKRIERRITLARVLIGRLQSFRSGNTRPRIVRSVRVAFNGCGVRLDQPNIAQKLTERIDDLKQKIAAWGNRIRRYSERVERFQQNRLFLSDQKRFYKRLECPAVCSTSQRPDPADLVTFWRGVWSREVEHEEGPWIAAVEEACASIEPMNPVAISAEDVAGAVRRAPNWKSPGPDGLHHYWLKGFSVCHATLARQFQEALEQRALPSLFTTGITHLAPKSTDTTDPAKCRPITCLTTIYKTLTSVLSLKISRHVDENNIISGAQNGCRGGSRGTKELLLIDSVAGQLVKRNRRNFSAAWIDYRKAFDSVPHSWLLRVLELYKVDGTVRDFLGACMGQWSTILCLHGERLAAADDRIRIGRGIFQGDCLSPLWFCLSLNPLSTLLEGSGTGFRFRRGGTKVPHLLYMDDLKLLAPNATRLQELLNVTTDFSNSIRMELGLDKCAVMHVERGQVTHSAEMSLEPSTIRTLSEAESYRYLGMSQSLGVKETDVKQSVCEAFFGRLTKICKSYLSGANKVRAYNGWVMPVLMYTFGVLRWTQTELDALDRKVRTTMTLYRMHHPKSSVMRLYIPRKCGGRGVLSVKTMHNREIANLRTYFETMRGSPMHREVIECDKGLTPLSLAQTEWQKPMVLSTSDREAVWREKELHGRFFKALNEPHVDKKASVQWLRFGDLFGETEGFVCAIQDQVVKTRNYRKYILKDGTHDICRACRHPGESLRHVLSGCSALANTEYLHRHNQAAKILHQELALKYGLLDERLPYYKYTPVPVLESDGVRLYWDRSIITDRTILANKPDIVVVDRAQSRVFLVDITIPYDENLVRAETEKKRKYLDLAHEVSDMWHVESTEIIPIVISANGLIPVSLAQHLRRLGFRGSSLAARMQKAVLLDSARIVRRFLHLSP

SEQ ID NO: 14581 - protein, 1182 aa, Melitaea cinxia
MMEDNLERRIGPLPGGRQGASGAGAGRGSMRAASQPRRPAPPPDMSAYPPSLPVGLATTESQGTQHSLPAAGGVRRMRWTPKMNENVMRAYYRAVGRETGRTGYRAVMHREFLLLEPTLTVTEQNLADRARYIQRKGIFDAAELERFRREAAPEVEPVSTVRNEVSTQQEGVRSEAPVEAITEGAVAQKVEQMRGILHEAISETRGAPLEMRPRLSRLPLNAATRHAIEAANRLLPPYLETSFSLEDTGSILFGAALAVHRLVGAKTQESGRATHKNSDVPAWKRRIERRINLARALIGRLLAFRSGNTRPRIVRSVRMAFNGLGISLDQPDIADKLTERIDGLKQRIAAWGKRIRRYSERVERFRQNRLFVSDQKRFYRKLENPISGSASLKPSTVDLVAFWRNICSGEVEHEEGPWIAAVQDACAKIEPMNPIAISTEDVSGAVRRAPNWKSPGADGLHHYWLKGLSVCHATLARQYQEAIDRKTLPNLFTTGITHLAPKSTNTADPTNYRPITCLTSIYKTLTSVLSCKISRHIGEFNILSAAQNGCRGGGRGTKELLLIDSVAGQLVRRNRRNFSAAWIDYKKAFDSVPHSWLLRVLELYKIDQAVRDFLGVCMGQWSTILCLQGERLTGAGDPIRIRRGIFQGDCLSPLWFCLSLNPLSTLLERSGTGFQFRRGGTKVSHLLYMDDLKLLAPNAARLQELLKITTEFSSSIRMQLGVDKCAVVHVDRGQVTQSSQLSLELTSFKTLSEAESYRYLGMSQCIGVKEVDMKQAVCEIFFGRLTKVLRSYLSGANKVRAYNAWVMPTLLYTFGILRWTQTELDALDRRVRTTMTYHRVHHPKSSVMRLYIPRKCGGRGMLSAKTMHNREVCSLRAYFETRRDSALHDDVSMCDKGLTPLALAKENWQKPVVLSTSDRETVWMEKELHGRFYKALHAPHVDSKASVQWLRFGDLFGETEGFVCAIQDQVVKTNNYRKHVLKDGTPDFCRACRHPGESLRHVLSGCSALANTEYLHRHNQVAKILHQELALMYGLLEQRMPYYQYSPVPVLERDGVRLYWDLPIATDRTILANKPDIVVMDRARSRVFLVDITVPHDENFVKAETEKKRKYLDLAHEIVDMWGVGSAEIIPIVISANGLIPVSLAHHLRQLGIRDGSLAARMQKAVLLDSARIVRRFLSLQP

SEQ ID NO: 14582 - protein, 1182 aa, Melitaea cinxia
MMEDNLERRIGPLPGGRQGASGAGAGRGSMRTASQPRRPAPPPDRSGYPPSPPVGLATTESQGTQHSLPAAGGVRRMRWTPKMNESVMRAYYRAVGRETGRTGYRAVMHREFLLLEPTLTVTEQNLADRARYIQRKGIFDAAELEQFRREAAPEVEPVSTVRNEVSTQQEGVCSEAPVEVITEGAVAQKVEQMRGILQEAISETRGAPLELRPRLSRLPLNAATRNAIEAANRLLPPYLEGSLSLEDTGSILFGAALAVHRLVGAKTQESGRATHKNSDVPAWKRRIERRINLARALIGRLLAFRSGNTRPRIVRSVRMAFNGLGISLDQPDIADKLTERIDGQKQRIAAWGKRIRRYSERVERFRQNRLFVSDQKRFYRKLENPISGSASLKPSTVDLVAFWRNIWSGEVEHEEGPWIAAVQDACAKIEPMNPIAISTEDVSGAVRRAPNWKSPGADGLHHYWLKGLSVCHATLARQYQEAIDRKTLPNLFTTGITHLAPMSTNTADPTNYRPITCLTSIYKTLTSVLSCKISRHIGEFNILSAAQNGCRGGGRGTKELLLIDSVAGQLVRRNRRNFSAAWIDYKKAFDSVPHSWLLRVLELYKIDEAVRDFLGECMGQWSTILCLQGERLTGADDPIRIRRGIFQGDCLSPLWFCLSMNPLSTLLERSGTGFQFRRGGTKVSHLLYMDDLKLLAPNAARLQELLKITTEFSSSIRMQLGVDKCAVVHVDRGQVTQSSQLSLELTSFKTLSEAESYRYLGMSQCIGVKEVDMKQAVCEIFFRRLTKVLRSYLSGANKVRAYNAWVMPTLLYTFGILRWTQTELDALDRRVRTTMTHHRMHHPKSSVMRLYIPRKCGGRGMLSAKTMHNREVRSLRAYFETRRDSALHGDVSMCDKGLTPLALAKENWQKPVVLSTSDRETVWMEKELHGRFYKALHAPHVDSKASVQWLRFGDFFGETEGFVCAIQDQVVKTNNYRKHVLKDGTPDFCRACRHPGESLRHVLSGCSALANTEYLHRHNQVAKILHQELALMYGLLEQRMPYYQYSPVPVLERDGVRLYWDLLIATDRTILANKPDIVVMDRARSRVFLVDITVPHDENLVKAETEKKRKYLDLAHEIVDMWGVGSAEIIPIVISANGLIPVSLAHHLRQLGIRDGSLAARMQKAVLLDSARIVRRFFSLQP

SEQ ID NO: 14583 - protein, 1183 aa, Melitaea cinxia
MMEDDLQRRIGPLPGGRQGASGAGAGRGSMRAASQPRRPAPPPDRSGYPPSPPVGLATTESQGTQHSLPAAGGVRRMRWTPKMNESVMRAYYRAVGRETGRTGYRAVMHREFLLLEPTLTVTEQNLADRARYIQRKGIFDAAELERFRREAAPEVEPVSTVRNEVSAQQEGVRSEAPVEVITEGAVAQKVEQMRGILQEAISETRGAPLEMRPRLSRLPLNAATRNAIEAANRLLPPYLEGSLSLEDTGSILFGAALAVHRLVGAKTQESGRATHKNSDVPAWKRRIERRINLARALIGRLLAFRSGNTRPRIVRSVRMAFNGLGISLDQPDIIADKLTERIDGLKQRIAAWGKRIRRYSERVERFRQNRLFVSDQKRFYRKLENPISSSASLKPSTVDLVAFWRNIWSGEVEHEEGPWIAAVQDACAKIEPMNPIAISTEDVSGAVRRAPNWKSPGADGLHHYWLKGLSVCHATLARQYQEAIDRKTLPNLFTTGITHLAPKSTNTADPTNYRPITCLTSIYKTLTSVLSCKISRHIGEFNILSAAQNGCRGGGRGTKELLLIDSVAGQLVRRNRRNFSAAWIDYKKAFDSVPHSWLLRVLELYKVDQAVRDFLGVCMGQWSTILCLQGERLTGADDPIRIRRGIFQGDCLSPLWFCLSLNPLSTLLERSGTGFQFRRGGTKVSHLLYMDDLKLLAPNAARLQELLKITTEFSSSIRMQLGVDKCAVVHVDRGQVTQSSQLSLELTSFKTLSEAESYRYLGMSQCIGVKEVDMKQAVCEIFFGRLTKVLRSYLSGANKVRAYNAWVMPTLLYTFGILRWTQTELDALDRRVRTTMTHHRMHHPKSSVMRLYIPRKCGGRGMLSAKTMHNREVCSLRAYFETRRDSALHGDVSMCDKGLTPLALAKENWQKPVVLSTSDRETVWMEKELHGRFYKALHAPHVDSKASVQWLRFGDLFGETEGFVCAIQDQVVKTNNYRKHVLKDGTPDFCRACRHPGESLRHVLSGCSVLANTEYLHRHNQVAKILHQELALMYGLLEQRMPYYQYSPVPVLERDGVRLYWDLPIATDRTILANKPDIVVMDRARSRVFLVDITVPHDENLVKAETGKKRKYLDLAHEIVDMWGVGSAEIIPIVISANGLIPVSLAHHLRQLGIRDGSLAARMQKAVLLDSARIVRRFLSLQP

SEQ ID NO: 14584 - protein, 1182 aa, Melitaea cinxia
MMEDNLERRIGPLPGGRQGASGAGAGRGSMRAASQPRRPAPPPDRSGYPPSPPVGLATTESQGTQHSLPAAGGVRRMRWTPKMNESVMRAYYRAVGRETGRTGYRAVMHREFLLLEPTLTVTEQNLADRARYIQRKGIFDAAELERFRREAAPEVEPVSTVRNEVSTQQEGVRSEAPVEVITEGAVAQKVEQMRGILQEAISETQGAPLEMRPRLSRLPLNAATRNAIEAANRLLPPYLEGSLSLEDTGSILFGAALAVHRLVGAKTQESGRATHKNSDVPAWKRRIERRINLARALIGRLLAFRSGNTRPRIVRSVRMAFNGLGISLDQPDIADKLTERIDGLKQRIAAWGKRIRRYSERVERFRQNRLFVSDQKSFYRKLENPISSSASLKPSTVDLVAFWRNIWSGEVEHEEGPWIAAVQDACAKIEPMNPIAISTEDVSGAVRRAPNWKSPGADGLHHYWLKGLSVCHATLARQYQEAIDRKTLPNLFTTGITHLAPKSTNTADPTNYRPITCLTSIYKTLTSVLSCKISRHIGEFNILSAAQNGCRGGGRGTKELLLIDSVAGQLVRRNRRNFSAAWIDYKKAFDSVPHSWLLRVLELYKIDQAVRDFLGVCMGQWSTILCLQGERLTGADDPIRIRRGIFQGDCLRPLWFCLSLNPLSTLLERSGTGFQFRRGGTKVSHLLYMDDLKLLAPNAARLQELLKITTEFSSSIRMQLGVDKCAVVHVDRGQVTQSSQLSLELTSFKTLSEAESYRYLGMSQCIGVKEVDMKQAVCEIFFGRLTKVLRSYLSGANKVRAYNAWVMPTLLYTFGILRWTQTELDALDRRVRTTMTYHRMHHPKSSVMRLYIPRKCGGRGMLSAKTMHNREVCSLRAYFETRRDSALHGDVSMCDKGLTPVALAKENWQKPVVLSTSDRETVWMEKELHGRFYKALHAPHVDSKASVQWLRFGDLFGETEGFVCAIQDQVVKTNNYRKHVLKDGTPDFCRACRHPGESLRHVLSGCSVLANTEYLHRHNQVAKILHQELALMYGLLEQRMPYYQYSPVPVLERDGVRLYWDLPIATDRTILANKPDIVVMDRARSRVFLVDITVPHDENLVKAETEKKRKYLDLAHEIVDMWGVGSAEIIPIVISANGLIPVSLAHHLRQLGIRDGSLAARMQKAVLLDSARIVRRFLSLQP

SEQ ID NO: 14585 - protein, 1181 aa, Mellicta athalia
MEDKFGKRIGPLPGGRQGASGAGAGRGSMRAASHPRRPAPPPDRSANPPSPPDGLAPTEPQGTQHSAPAAGGVRRMRWTLKMNESVMRAYYRAVGRETGRTGYRAVMHREFLLLEPTVTVTEQNLADRARFIQRKGVFDAAELERFRREAAPEDEPVSAERDAVSTQQESVRSEAPVEAITEGAVAQKVEQMRGILQEAISETRGAPLEQRPRLSRLPLNAATRSAIEAANRLLPPYLEGSLGLEDTGSILFGAALAVHRLVGAKTQEPGLATHKNSDVPAWKRRIERRISLARALIGRLLAFRSGNTRPRIVRSVRMAFNGLGVSLNQPDIADRLTERIDGLKQRIAAWGKRIRRYSERVERFRQNRLFVSDQKRFYRKLENPIPCSAFLKPSTVDLVAFWRNIWSREVEHEEGPWIAAVHDACAKVEPMNPIAISTEDVSGTVRRAPNWKSPGADGLHHYWLKGLSVCHATLARQYQEAIDRKTLPNLFTTGITHLAPKSTNTADPTNYRPITCLSSIYKTLTSVLSCKISRHIGEFNILSAAQNGCRGGGRGTKELLLIDSVAGQLVRRNRRNFSAAWIDYKKAFDSVPHSWLLRVLELYKIDEAVRDFLGVCMGQWSTILCLQGERLTGADDPIRIRRGIFQGDCLSPLWFCLSLNPLSTLLERSGTGFQFRRGGTKVSHLLYMDDLKLLAPNAAHLQELLKITTEFSGSIRMQLGVDKCAVVHVDRGQVTQSAQFSLELTSFKTLSEAESYRYLGMSQCIGVKEVDMKQAVCEVFFGRLTKVLRSYLSGANKVRAYNTWIMPTLLYTFGILRWTQTELDALDRRVRTTMTHHRVHHPKSSVMRLYISRKCGGRGMLNAKTMHNREVCSLRAYFETRRDSAMHGDVVVCDKGLTPLSLANENWQKPVVLSTSDRETVWMEKELHGRFYKALHAPHVDSKASVQWLRFGDLFGETEGFVCAIQDQVVKTNNYRKHILKDGTPDFCRACRHPGESLRHVLSGCSALANTEYLHRHNQVAKILHQELALMYGLLEQRMPYYQYTPVPVLERDGVRLYWDLPIATDRTILANKPDIVVMDRAQSRVFLVDITIPHDENLVKAETEKKRKYLDLAHEIVDMWGVGSAEIIPIVISANGLIPVSLAHHLRQLGIRDGSLAGRMQKAVLLDSARIVRRFLSLQP

SEQ ID NO: 14586 - protein, 1189 aa, Maniola jurtina
MMDNKTRNERIGPLPGGRQGAPGAGAGRGSMRAASATSRPALPPSRSTYPSSPPDGLAPTGSTRAQSSAPAAGGVRRMRWTSLMNENVMRAYYRATGGETGRTGYRAAMYREFLLLEPNLTVTEQNLADRARYIQRSNIFNATELERLRREAVPEVSAPTAEQIVSQAAPVREETITTSQDLPVEEDTEGTVSLDIERMRGILEEAISEIRSAPLENRPRLSRLTLNVATRDVIEAINKMLPQHLESSTGLGDTASIIFGAALAVHRFIGAKTPGLGRAAATRRSVEPAWKKRIEHRITLARVLIGRLQSFRSGNTRPRIVRSVRVAFNGCGVRLDQPDIAQKLTERIDDLKQKIAAWGNRIRRYSARVERFQQNRLFSSDQKRFYKRLECPAVCSTSQRPDPADLVAFWRGVWSREAEHEEGPWIAAVEEACARIEPMNPVAISAEDVAGAVRRAPNWKSPGPDGLHHYWLKGFSVCHATLARQFQEALEQRALPSLFTTGITHLAPKSTDATDPAKYRPITCLTTIYKTLTSVLSLKISRHIDENNIMSGAQNGCRGGSRGTKELLLIDSVAGQLVKRNRRNFSAAWIDYKKAFDSVPHSWLLRVLELYKVDSTVRDFLEACMGQWSTILCLHGERLAAADDRIRIGRGIFQGDCLSPLWFCLSLNPLSTLLEGSGTGFQFRRGGTKVPHLLYMDDLKLLAPNATRLRELLNITTEFSNSIRMELGLDKCAVIHVERGQVTHSAEISLEPSNIKTLSEAESYRYLGMSQSLGVKEADMKQSVCEAFFGRLTKICKSYLSGANKVRAYNGWVMPVLMYTFGVLSWTQTELDALDRKVRTTMTLYRMHHPKSSVMRLYIPRKCGGRGVLSVKTMHNREISNLRTYFETMRGSPMHREVIECDKGLTPLSLAKTEWQKPVVLSTSDRETVWKEKELHGRFFKALNEPHVDKKASVQWLRFGDLFGETEGFVCAIQDQVVKTRNYRKYILKDGTHDICRACRHPGESLRHVLSGCSALANTEYLHRHNQAAKILHQELALKYGLLDERLPYYRYTPVPVLERDGVRLYWDRSIITDRTILANKPDIVVVDRAQSRVFLVDITIPYDENLVRAETEKIRKYLDLAHEVSDMWHVESTEIVPIVISANGLIPVSLAHHLRRLGIRGSSLAARMQKAVLLDSARIVRRFLNLSP

SEQ ID NO: 14587 - protein, 1081 aa, Maniola jurtina
MYREFLLLEPNLTVTEQNLADRARYIQRSNIFNAAELERLRREAVPEVSAPTTVQIVSQAEPVREEATTTLQDLPVEEDTGETVSLDIERMRRILEEAISEIRNAPLENRPRLSRLTLNVATRDVIEAINKMLPQHLESSTGLGDTASIIFGAALAVHRFIGAKTPGPGRAAATRRSAEPAWKKRIEHRITLARVLIGRLQSFRSGNTRPRIVRSVRVALNGCGVRLDQPDIAQKLTERIDDLKQKIAAWGNRIRRYSARVERFQQNRLFSSDQKRFYKRLECPAVCSTSQRPDPADLVAFWRGVWSREVEHEEGPWIAAVEEACARIEPMNPVAISAEDVAGAVRRAPNWKSPGPDGLHHYWLKGFSVCHATLARQFQEALEQRALPSLFTTGITHLAPKSTDATDPAKYRPITCLTTIYKTLTSVLSLKISRHIDENNIMSGAQNGCRGGSRGTKELLLIDSVAGQLVKRNRRNFSAAWIDYKKAFDSVPHSWLLRVLELYKVDSAVRDFLETCMGQWSTILCLHGERLAAADDRIRIGRGIFQGDCLSPLWFCLSLNPLSTLLEGSGTGFQFRRGGTKVPHLLYMDDLKLLAPNATRLKELLSITTEFSNSIKMELGLDKCAVMHVERGQVTHSAEISLEPSNIKSLSEAESYRYLGMSQSLGVKEADMKQSVCEAFFGRLTKICKSYLSGANKVRAYNGWVMPVLMYTFGVLSWTQTELDALDRKVRATMTLYRMHHPKSSVMRLYIPRKCGGRGVLSAKTMHNREISNLRTYFETMRGSPMHREVIECDKGLTPLSLAKTEWQKPVVLSTSDRETVWKEKELHGRFFKALNEPHVDKKASVQWLRFGDLFGETEGFVCAIQDQVVKTRNYRKYILKDGTHDICRACRHPGESLRHVLSGCSALANTEYLHRHNQAAKILHQELALKYGLLDERLPYYKYTPVPVLERDGVRLYWDRSIITDRTILANKPDIVLVDRAQSRVFLVDITIPYDQNLVRAETEKKRKYLDLAHEVSDMWHVESTEIIPIVISANGLIPVSLAHHLRRLGFRGSSLAARMQKAVLLDSARIVRRFLSLSP

SEQ ID NO: 14588 - protein, 1189 aa, Maniola jurtina
MMDNEIRNERIGPLPGGRQGAPGAGAGRGSMRAASATSRPALPPSRSTYPSSPPDGLAPTGSTRAQSSAPAAGGVRRMRWTSLMNENVMRAYYRATGGETGRTGYRAAMYREFLLLEPNLTVTEQNLADRARYIQRSNIFNATELERLRREAVPEVSAPTAEQIVSQAAPVREETITTSQDLPVEEDTEGTVSLDIERMRGILEEAISEIRSAPLENRPRLSRLTLNVATRDVIEAINKMLPQHLESSTGLGDTASILFGAALAVHRFIGAKTLGPRRAAATRHSAEPAWKRRIEHRITLARVLIGRLQSFRSGNARPRIVRSVRVAFNGCGVRLDQPDIAQKLTERIDDLKQKIAAWGNRIRRYSARVERFQQNRLFSSDQKRFYKRLECPAVCSTSQRPDPADLVTFWRGVWSREVEHEEGPWIAAVEEACARIEPMSPVAISAEDVAGAVRRAPNWKSPGPDGLHHYWLKGFSVCHATLARQFQEALEQRALPSLFTTGITHLAPKSTDATDPAKYRPITCLTTIYKTLTSVLSLKISRHIDENNIMSGAQNGCRGGSRGTKELLLIDSVAGQLVKRNRRNFSAAWIDYKKAFDSVPHSWLLRVLELYKVDSAVRDFLEACMGQWSTILCLHGERLAAADDRIRIGRGIFQGDCLSPLWFCLSLNPLSTLLEGSGTGFQFRRGGTKVPHLLYMDDLKLLAPNATRLKELLNITTEFSKSIKMELGLDKCAVIHVERGQVTHSAEISLEPSNIKTLSEAESYRYLGMSQSLGVKEADMKQSVCEAFFGRLTKICKSYLSGANKVRAYNGWVMPVLMYTFGVLSWTQTELDALDRKVRTTMTLYRMHHPKSSVMRLYIPRKCGGRGVLSVKTMHNREISNLRTYFETMRGSPMHRDVIECDKGLTPLSLAKTEWQKPVVLSTSDRETVWKEKELHGRFFKALNEPHVDKKASVQWLRFGDLFGETEGFVCAIQDQVVKTRNYRKYILKDGTQDICRACRHPGESLRHVLSGCSALANTEYLHRHNQAAKILHQELALKYGLLDERLPYYRYTPVPVLERDGVRLYWDRSIITDRTILANKPDIVVVDRAQSRVFLVDITIPYDENLVRAETEKKRKYLDLAHEVSDMWHVESTEIIPIVISANGLIPVSLAHHLRRLGFRGSSLAVRMQKAVLLDSARIVRRFLNLSP

SEQ ID NO: 14589 - protein, 1188 aa, Boloria selene
MMENNNKNARLGPLPGGRQGAPGAGAGRDSIRAASTTNRPALPPSRPTHPSPPPEGLVPTGSSRTQTSGPAAGGVRRMRWTSQMNENVMRAYYRATGGETGRTGYRAAMYREFLLLEPTLTVTEQNLADRARYIQRSNILNATELERLRREAVPEVRTLTTEQIVPPAATGEDVLTNFHDLPIEGGTQETAALDTERMKRILEEAVSEIRSAPLENRPRLSRLTLNVATREVIEAINQLLPQHLESSIGLDDTASILFGAALAVHRFVGVRTPGPERDTAARRKAQPAWKKRIERRINHARGLIGRLQSLRSGNTRPRIVRSVRIAFNGLGVRLDQPDIAQKLTERIDDLKQRIAAWGSRIRRYSERVERFQQNRLFSSDQKRFYRTLECPAVCSTSQKPSPADLVAFWRNVWSKEVQHEEGPWIAAVEEACAVIKPMSPVAISAEDVVDAVRRAPNWKSPGPDGLHHYWLKGFSVCHVTLARQFQEALEQRTLPNLFTTGITHLAPKSTDAADPAKYRPITCLTTIYKTLTSVLSSKISRHVDENNIISGAQNGCRGRSRGTKELLLIDSVAGQLVKRNRRNFSAAWIDYKKAFDSVPHSWLSRVLELYKVDSTVRNFLGKCMGQWSTILSLHGERITAADDRIRIRRGIFQGDCLSPLWFCLSLNPLSSLLESSGTGFQFRRGGTRVPHLLYMDDLKLLAPNANRLQELLKITSEFSNSIRMKLGLDKCAVLHVVRGQVTHSAEINIEPSSIRTLSEAESYRYLGMSQSIGVNETDMKQSVCEAFFGRLTKVCKSFLSGANKVRAYNGWVMPVLMYTFGVLRWTQTELDTLDRRVRTTMTLYRMHHPKSSVMRLYIPRKCGGRGLLSVKTMHNREIANLRTYFETKGESPMHREVVECDKGLTPLSLAKTEWQAPVVLSTSDRETVWKEKELHGRFFKALNEPNVDKKASVQWLRFGDLFGETEGFVCAIQDQVVKTRNYRKYILKDGTHDICRACGHPGESLRHVLSGCSALANTEYLHRHNQAAKILHQELALKFGLLDERLPYYKYTPMPVLERDGVRLYWDRSIITDRTILANKPDIVLMDRAQSRVFLVDITVPYDENLVRAETEKKRKYLDLAHEVSTMWHVGSTETIPIVISANGLIPVSLAHYLRRLGFRDSSLAARMQKAVLLDSARIVRRFLNLSP

SEQ ID NO: 14590 - protein, 1190 aa, Elymnias hypermnestra
MMDLPNNDVRIGPLPGGRQGTSGAGAGRGSMRAASSSSATRRPARPPSRPTNPSSPPEGLASAGAARPRIPEPAAGGVRRMRWTSLMNENVMRAYFRATGGETGRTGYRAAMYREFLLLEPNITVTEQNLADRARYIQRSNILAAAELERLRREAVSEITPSITERIESAESAVIEPEETGNNQDLPVDGDVEETVSLDIEKMGRTLEEAIAEIRNAPHECRPRISRLTLNKAMRNVIEAINTMLPQYLEGSTGLSDTTSILYGAALAVHRFVGAKTQQPGFTAARGNVIPAWKQRIERRITSARRLIGRLQSFRSGNTRPRIVRSVRIDLNGLGIGLDQPDITQKLTERIDDLKQKIAAWGNRIRRYSERVERFQQNRLFVSDQKRFYAKLQRSTSCSSSRRPASMDLVAYWRSVWSLEMEHEENSWTAAVEEACAEINPMNPIAISTDDVAGAVGRAPNWKSPGPDGLHHYWLKGFTSCHATLARQFQEAIERRALPNLFTTGITHLAPKTTDAADPTKYRPITCLSSIYKTLTSILSRKISRHIDENNIMSVAQNGCRGGSRGTKELLLIDGVAGHVVKHSRRNFSAAWIDYKKAFDSVPHSWLLRVLELYKIDDTVRNFLGECMRQWSTILCLHGERLTASDDRIRIRRGIFQGDCLSPLWFCLALNPLSLLLEKSGTGFQFRRGGTKVSHLLYMDDLKLLAPNATRLGELLQIVTDFSNSIRMELGVDKCAVLHVERGGVAHSAGINLEPSNFRTLSETESYRYLGMSQCIGVKEADMKQTVCKEFYRRLTKILKSYLSGANKIRAYNGWVMPVLLYTFGVLKWTQTELDALDRKVRTTMTFHRMHHPKSSVMRLYIPRKCGGRGLLNAKTMHNREVSSLRAYFEAKRESPMHLEVIQCDKGLTPLSLAKEEWQRPAVLSTSDREAVWKGKEMHGRFFKALHESHVDAKASVQWLRFGDLFGETEGFVCAIQDQVIKTRNYRKYILKDGTHDICRACRRPGESLRHVLSGCPALANTEYLHRHNQAAKILHQELALKYGLVDERLPYYKYTPVPVLECGAVRLYWDRSIITDRTILANKPDIVIMDRAQSRVFLVDITIPYDENLVRAETEKKRKYLDLAHEITAMWGVGSTETIPIVISANGLIPVSLAHHLRRLGLRNGSLAAKMQKAVLLDSAGIVRRFLSL

SEQ ID NO: 14591 - protein, 1115 aa, Hyposmocoma kahamanoa
MNKNAMRAYFRASGSGTGRTGYRGVMYREFLRLEPTLTVTEQNLADRVRYLQRSGLFSAAELEQLRCEAVPPLEEEPPRLERSPVPSTEVHREPSAQQPDTGGTESDWGTVALDLEALRSSLEETILEYRHVPLERRPRLPRVPLSIKVRDAVGAINNMLPSFLEESADLWETDSILFAAAMTVCQFVGVRMPPTRPGGNHQVGSTTPRTSTKPAWMRRIEGRIAWARVLIGKLTSFRSGVTRPRVMRFVREAFSGENIFVDSPEFARKLTGRIDDLKQKIAAWGKRIRRYSERVKRYRQNRLFMSDQKKFYRTLERPDVVLTGERPDKAEVVAFWRRLWSQPVDHEEGPWFEAVERACATIAPMNPISISEEDVAVAVRKAPNWKSPGPDGLHHYWLKGFWCCHATLARQFQSALESGTLPNFLTTGVTHLAPKSDATVDPSQYRPITCLCTIYKTLTSVLSSKISQHIVDNSVMSEAQNGCRGGSRGSKELLLIDAVAGQLVRRNRRNFSAAWIDYRKAFDSVPHSWLSRVLELYKIDSAVRHFLGQCMGCWRTILSLDGRRMTDADDRIEIRRGIFQGDCLSPLWFCLALNPLSTLLERSGTGFQFRRGGPRMPHLLYMDDLKLYGPTADRLTELLTITNDFSSSVRMELGIDKCAVVHVEKGRVMHSNGINIGTNHLRVLSETETYRYLGMSQTIGVKEADVKQGVCEVFYGRLKNVLNSYLSGVNKIRAYNSWVMPVLMYTFGVLKWTQTELDALDRRVRTTMTSHRMHHPRSSVMRLYVPRKCGGRGLLSVKTMHNREICSLRNYFLTMTDDVIRGEVVTCDKGLTPLSLAKEEWRDPVVLSTSDRESVWKEKELHGRFFKVLHEPFMDRKASLHWLRFGDLFGETEGFVCAIQDQVIKTRNYRKYILKDGTVDICRACGRPGESLRHIVSGCSALANTEYLHRHNQAAKILHQELALKYGLVQQRLPYYKYSPEPILEDDRTKIYWDRSIITDRTILANKPDIVILDRSQSRVFLVDVTIPHDEGLVKAETEKRRKYLDLAHEITDMWDVASTEIIPIVLSANGLIPVSLSNSLRRLDFCGVSLPAQMQKAVLLDTARIVRRFLDLSP

SEQ ID NO: 14592 - protein, 1187 aa, Thymelicus sylvestris
MMMERNENARIGPLPGGRQGASGAGAGRGSMRSASHTSRLPLPPRQPAEPSSPPEGLAPTGSSTQSSGPATGGVRRMRWTSHMNENVMRAYYRATEGEAGRTGYRAAMYREFLLLEPTLTVTEQNLADRARYIQRSNIFSATELERLRREAVPEVTTPTTEQIVSLADPVREETDANAQDLPVEEDTEVTVSLDIERMRRILGEAISEIQSAPVQNRPRLSRLTLNVATRDIIEAINQMLPQYLERSTGLDDTASILFGAALAVHRFMGVKTQERWHSTPRRNAEPAWKKRIERRITLARALIGRLRSFRSGNTRPRIVRSVRIAFDGLGVRLDQPDIDQKLTERIDDLKQKIAAWGSRIRRYSERVKRFQQNRLFSSDQKRFYKKLESSAVCSTSQQPSPADLIAFWRSVWSREVEHEEGPWIAAVEEACASIEQMNPVAISPEDVAGAVRQAANWKSPGPDGLHHYWLKGFSLCHATLARQFQDALEQRTLPSLFTTGITHLAPKSTDAADPAKYRPITCLTTIYKTLTSVLSIKISRHVDENSIISGAQNGCRGGSRGTKELLLIDSVAGQLVKRNRRNFSAAWIDYKKAFDSVPHSWLLRVLELYKVDSTVQDFLRECMGQWSTILCLHGERLAAADDRIRIRRGIFQGDCLSPLWFCLSLNPLSSLLERSGTGFQFRRGGTKVPHLLYMDDLKLLAPNATRLRELLNITTEFSSSIRMELGLDKCAVLHVERGQVTHSVEINLEPTSIRTLSEPESYRYLGMSQSVGVHEADMKQSVCEAFLGRLTKVCKSYLSGANKVRAYNGWVVPVLMYTFGVLRWTQTELDALDRKVRTTMTLYRMHHPKSSVMRLYIPRKCGGRGVLSVKTMHNREISNLRTYFETKRESPMHRDVIECDKGLTPLSLAKPEWQKPVVLSTSDRETVWKEKELHGRFFKALHEPYVDKKASVQWLRFGDLFGETEGFVCAIQDQVVKTRNYRKYILKDGTTDICRACRHPGESLRHVLSGCSALANTEYLHRHNQAAKILHQELALKYGLLDERVPYYRYTPTPVLERDGVRLYWDRSIITDRTILANKPDIVLMDRAQSRVFLVDITIPHDENLVRAETEKKRKYLDLAHEVSSMWHVESTEIIPIVISVNGLIPVSLAHHMRRLGFRGSSLAAKMQKAVLLDSARIVRRFLSLSP

SEQ ID NO: 14593 - protein, 1182 aa, Melitaea cinxia
MMEDDLQRRIGPLPGGRQGASGAGAGRGSMRAASQPRRPAPPPDRLGYPPSPPVGLATTESQGTQHSLPAAGGVRRMRWTPKMNESVMRAYYRAVGRETGRTGYRAVMHREFLLLEPTLTVTEQNLADRARYIQRKGIFDAAELERFRREAAPEVEPVSTVRNEVSTQQEGVRSEAPVEVITEGAVAQKVEQMRGILQEAISETRGAPLEMRPRLSRLPLNAATRNAIEAAKRLLPPYLEGSLSLEDTGSILFGAALAVHRLVGAKTQESGRATHKNSDVPAWKRRIERRINLARALIGRLLAFRSGNTRPRIVRSVRMAFNGLGISLDQPDIADKLTERIDGLKQRIAAWGKRIRRYSERVERFRQNRLFVSDQKRFYRKLENPISSSASLKPSTVDLVAFWRNIWSGEVEHEEGPWIAAVQDACAKIEPMNPIAISTEDVSGAVRRAPNWKSPGADGLHHYWLKGLSVCHATLARQYQEAIDRKTLPNLFTTGITHLAPKSTNTADPTNYRPITCLTSIYKTLTSVLSCKISRHIGEFNILSAAQNGCRGGGRGTKELLLIDSVAGQLVRRNRRNFSAAWIDYKKAFDSVPHSWLLRVLELYKVDQAVRDFLGVCMGQWSTILSLQGERLTGADDPIRIRRGIFQGDCLSPLWFCLSLNPLSTLLERSGTGFQFRRGGTKVSHLLYMDDLKLLAPNAARLQELLKITTEFSSSIRMQLGLDKCAVVHVDRGQVTQSSQLSLELTSFKTLSEAESYRYLGMSQCIGVKEVDMKQAVCEIFFGRLTKVLRSYLSGANKVRAYNAWVMPTLLYTFGILRWTQTELDALDRRVRTTMTHHRMHHPKSSVMRLYISRKCGGRGMLSAKTMHNREVCSLRAYFETRRDSALHGDVSMCDKGLTPLALAKENWQKPVVLSTSDRETVWMEKELHGRFYKALHAPHVDSKASVQWLRFGDLFGETEGFVCAIQDQVVKTNNYRKHVLKDGTPDFCRACRHPGESLRHVLSGCSVLANTEYLHRHNQVAKILHQELALMYGLLEQRMPYYQYSPVPVLERDGVRLYWDLPIATDRTILANKPDIVVMDRARSRVFLVDITVPHDENLVKAETEKKRKYLDLAHEIVDMWGVGSAEIIPIVISANGLIPVSLAHHLRQLGIRDGSLAARMQKAVLLDSARIVRRFLSLQP

SEQ ID NO: 14594 - protein, 1182 aa, Melitaea cinxia
MMEDDLQRRIGPLPGGRQGASGAGAGRGSMRAASQPRRPAPPPDRSGYPPSPPVGLATTESQGTQHSLPAAGGVRRMRWTPKMNESVMRAYYRAVGRETGRTGYRAVMHREFLLLEPTLTVTEQNLADRARYIQRKGIFEAAELERFRREAAPEVEPVSTVRNEVSAQQEGVRSEAPVEVITEGAVAQKVEQMRGILQEAISETRGAPLEMRPRLSRLPLNAATRNAIEAANRLLPPYLEGSLSLEDTGSILFGAALAVHRLVGAKTQESGRATHKNSDVPAWKRRIERRINLARALIGRLLAFRSGNTRPRIVRSVRMAFNGLGISLDQPDIADKLTERIDGLKQRIAAWGKRIRRYSERVERFRQNRLFVSDQKRFYRKLENPISSSASLKPSTVDLVAFWRNIWSGEVEHEEGPWIAAVQDACAKIEPMNPIAISTEDVSGAVRRAPNWKSPGADGLHHYWLKGLSVCHATLARQYQEAIDRKTLPNLFTTGITHLAPKSTNTADPTNYRPITCLTSIYKTLTSVLSCKISRHIGEFNILSAAQNGCRGGGRGTKELLLIDSVAGQLVRRNRRNFSAAWIDYKKAFDSVPHSWLLRVLELYKVDQAVRDFLGVCMGQWSTILCLQGERLTGADDPIRIRRGIFQGDCLSPLWFCLSLNPLSTLLERSGTGFQFRRGGTKVSHLLYMDDLKLLAPNAARLQELLKITTEFSSSIRMQLGVDKCAVVHVDRGQVTQSSQLSLELTSFKTLSEAESYRYLGMSQCIGVKEVDMKQAVCEIFFGRLTKVLRSYLSGANKVRAYNAWVMPTLLYTFGILRWTQTELDALDRRVRTTMTHHRMHHPKSSVMRLYIPRKCGGRGMLSAKTMHNREVCSLRAYFETRRDSALHGDVSMCDKGLTPLALAKENWQKPVVLSTSDRETVWMEKELHGRFYKALHAPHVDSKASVQWLRFGDLFGETEGFVCAIQDQVVKTNNYRKHVLKDGTPDFCRACRHPGESLRHVLSGCSVLANTEYLHRHNQVAKILHQELALMYGLLEQRMPYYQYSPVPVLERDGVRLYWDLPIATDRTILANKPDIVVIDRARSRIFLVDITVPHDENLVKAETEKKRKYLDLAHEIVDMWGVGSAEIIPIVISANGLIPVSLAHHLRQLGIRDGSLAARMQKAVLLDSARIVRRFLSLQP

SEQ ID NO: 14595 - protein, 864 aa, Mellicta athalia
MAFNGLGVSLNQPDIADRLTERMDGLKQRIAAWGKRIRRYSERVERFRQNRLFVSDQKRFYRKLENPIPCSAFLKPSTVDLVAFWRNIWSREVEHEEGPWIAAVQDACAKVDPMNPIAISTEDVSGAVRRAPNWKSPGADGLHHYWLKGLSVCHATLARQYQEAIDRKTLPNLFTTGITHLAPKSTNTADPTNYRPITCLSSIYKTLTSVLSCKISRHIGEFNILSAAQNGCRGGGRGTKELLLIDSVAGQLVRRNRRNFSAAWIDYKKAFDSVPHSWLLRVLELYKIDEAVRDFLGVCMGQWSTILCLQGERLTGADDPIRIRRGIFQGDCLSPLWFCLSLNPLSTLLERSGTGFQFRRGGTKVSHLLYMDDLKLLAPNAAHLQELLKITTEFSGSIRMQLGVDKCAVVHVDRGQVTQSAQFSLELTSFKTLSEAESYRYLGMSQCIGVKEVDMKQAVCEVFFGRLTKVLRSYLSGANKVRAYNTWVMPTLLYTFGILRWTQTELDALDRRVRTTMTHHRVHHPKSSVMRLYISRKCGGRGMLSAKTMHNREVCSLRAYFETRRDSAMHGDVVVCDKGLTPLSLANENWQKPVVLSTSDRETVWMEKELHGRFYKALHAPHVDSKASVQWLRFGDLFGETEGFVCAIQDQVVKTNNYRKHILKDGTPDFCRACRHPGESLRHVLSGCSALANTEYLHRHNQVAKILHQELALMYGLLEQRMPYYQYTPVPVLERDGVRLYWDLPIATDRTILANKPDIVVMDRARSRVFLVDITIPHDENLVKAETEKKRKYLDLAHEIVDMWGVGSAEIIPIVISANGLIPVSLAHHLRQLGIRDGSLAGRMQKAVLLDSARIVRRFLSLQP

SEQ ID NO: 14596 - protein, 1204 aa, Maniola jurtina
MHNNNNNNNNPPLFYMMDNGTRNKRIGPLPGGRQGAPGAGAGRGSMRAASATSRPALSPSRSTYPSSPPDGLAPTGSTRAQSSAPAAGGVRRMRWTSLMNENVMRAYYRATGGETGRTGYRAAMYREFLLLEPNLTVTEQNLADRARYIQRSNIFNATELERLRREAVPEVSAPTAEQIVSQVAPAREETITTSQDLPVEEDTEGTVSLDIERMRGILEEAISEIRSAPLENRPRLSRVTLNVATRDVIEAINKMLPQHLESSTGLGDTASILFGAALAVHRFIGAKTPGLGRAAATRRSAEPAWKRRIEHRITLARVLIGRLQSFRSGNTRPRIVRSVRVAFNGCGVRLDQPDIAQKLTERIDDLKQKIAAWGNRIRRYSARVERFQQNRLFSSDQKRFYKRLECPAVCSTSQRPDPADLVAFWRGVWSREVEHEEGPWIAAVEEACARIEPMNPVAISAEDVAGAVGRAPNWKSPGPDGLHHYWLKGFSACHATLARQFQEALEQRALPSLFTTGITHLAPKSTDATDPAKYRPITCLTTIYKTLTSVLSLKISRHIDENNIMSGAQNGCRGGGRGTKELLLIDSVAGQLVKRNRRNFSAAWIDYKKAFDSVPHSWLLRVLELYKVDSAVRDFLEACMGQWSTILCLHGERLAAADDRIRIGRGIFQGDCLSPLWFCLSLNPLSTLLEGSGTGFQFRRGGTKVPHLLYMDDLKLLAPNATRLRELLNITTEFSNSIRMELGLDKCAVVHVERGQVTHSAEISLEPSNIKTLSEAESYRYLGMSQSLGVKEADMKQSVCEAFFGRLTKVCKSYLSGANKVRAYNGWVMPVLMYTFGVLSWTQTELDALDRKVRTTMTLYRMHHPKSSVMRLYIPRKCGGRGVLSVKTMHNREISNLRTYFETMRGSPMHREVIECDKGLTPLSLAKTEWQKPVVLSTSDRETVWKEKELHGRFFKALNEPHVDKKASVQWLRFGDLFGETEGFVCAIQDQVVKTRNYRKYILKDGTHDICRACRHPGESLRHVLSGCSALANTEYLHRHNQAAKILHQELALKYGLLDERLPYYKYTPVPVLERDGVRLYWDRSISTDRTILANKPDIVLVDRAQSRVLLVDITIPYDENLVRAETEKKRKYLDLAHEVSDMWHVESTEIIPIVISANGLIPVSLAPHLRRLGFRGSSLAARMQKAVLLDSARIVRRFLSLSP

SEQ ID NO: 14597 - protein, 1190 aa, Maniola hyperantus
MMMENNEMNVRIGPLPGGRQGAPGAGAGRSSIRAASTISRPAPPPSRSTHPSSPPDGLAPTGSTRAQSSAPAAGGVRRMRWTSLMNENVMRAYYRATGGETGRTGYRAAMYREFLLLEPNLTVTEQNLADRARYIQRSNIFNATELERLRREAVPEVSAPATEQIDSQAVPVPVEPNTISQDLPVEEDTEGTVSLDIERMRGILEEAISEIRSAPLENRPRLSRLTLNVPTRDVIEAINKMLPQHLESSTGLGDTASILFGAALAVHRFIGAKTPGPERAAAARRSAEPAWKKRIERRITLARVLIGRLQSFRSGNTRPRIVRSVRVAFNGCGVRLDQPNIAQKLTERIDDLKQKIAAWGNRIRRYSERVERFQQNRLFLSDQKRFYKRLECPAVCSTSQRPDLANLVTFWRGVWSREVEHEEGPWIAAVEEACASIEPMNPVAISAEDVAGAVRRAPNWKSPGPDGLHHYWLKGFSVCHATLARQFQEALEQRALPSLFTTGITHLAPKSTDTTDPAKYRPITCLTTIYKTLTSVLSLKISRHVDENNIISGAQNGCRGGSRGTKELLLIDSVAGQLVKRNRRNFSAAWIDYRKAFDSVPHSWLLRVFELYKVDGTVRDFLGACMGQWSTILCLHGERLAAADDRIRIGRGIFQGDCLSPLWFCLSLNPLSTLLEGSGTGFQFRRGGTKVPHLLYMDDLKLLAPNATRLQELLNVTTDFSNSIRMELGLEKCAVMHVERGQVTHSAEMSLEPSTIRTLSEAESYRYLGMSQSLGVKETDVKQSVCEAFFGRLTKICKSYLSGANKVRAYNGWVMPVLMYTFGVLRWTQTELDALDRKVRTTMTLYRMHHPKSSVMRLYIPRKCGGRGVLSVKTMHNREIANLRTYFETMRGSPMHREVIECDKGLTPLSLAQTEWQKPVVLSTSDREAVWREKELHGRFFKALNEPHVDKKASVQWLRFGDLFGETEGFVCAIQDQVVKTRNYRKYILKDGTHDICRACRHPGESLRHVLSGCSALANTEYLHRHNQAAKILHQELALKYGLLDERLPYYKYTPVPVLERDGVRLYWDRSIITDRTILANKPDIVVVDRAQSRVFLVDITIPYDENLVRAETEKKRKYLDLAHEVSDMWHVESTEIIPIVISANGLIPVSLAHHLRRLGFRGSSLAARMQKAVLLDSARIVRRFLHLSP

SEQ ID NO: 14598 - protein, 1201 aa, Maniola hyperantus
MYPPPTPPPLFMMMENNEMNVRIGPLPGGRQGAPGAGAGRSSIRAASTISRPAPPPSRSTHPSSPPDGLAPTGSTRAQSSAPAAGGVRRMRWTSLMNENVMRAYYRATGGETGRTGYRAAMYREFLLLEPNLTVTEQNLADRARYIQRSNIFNATELERLRREAVPEVSAPATEQNDSQAVPVPVETNTISQDLPVEEDTEGTVSLDIERMRGILEEAISEIRSAPLENRPRLSRLTLNVATRDVIEAINKMLPQHLESSTGLGDTASILFGAALAVHRFIGAKTPGPERAAAARRSAEPAWKKRIERRITLARVLIGRLQSFRSGNTRPRIVRSVRVAFNGCGVRLDQPNIAQKLTERIDDLKQKIAAWGNRIRRYSERVERFQQNRLFLSDQKRFYKRLECPAVCSTSQRPDPADLVTFWRGVWSREVEHEEGPWIAAVEEACASIEPMNPVAISAEDVAGAVRRAPNWKSPGPDGLHHYWLKGFSVCHATLARQFQEALEQRALPSLFTTGITHLAPKSTDTTDPAKYRPITCLTTIYKTLTSVLSLKISRHVDENNIISGAQNGCRGGSRGTKELLLIDSVAGQLVKRNRRNFSAAWIDYRKAFDSVPHSWLLRVLELYKVDGTVRDFLGECMGQWSTILCLHGERLADADDRIRIGRGIFQGDCLSPLWFCLSLNPLSTLLEGSGTGFQFRRGGTKVPHLLYMDDLKLLAPNATRLQELLNVTTDFSNSIRMELGLDKCAVMHVERGQVTHSAEMSLEPSTIRTLSEAESYRYLGMSQSLGVKETDVKQSVCEAFFGRLTKICKSYLSGANKIRAYNGWVMPVLMYTFGVLRWTQTELDALDRKVRTTMTLYRMHHPKSSVMRLYIPRKCGGRGVLSVKTMHNREIANLRTYFETMRGSPMHREVIECDKGLTPLSLAQTEWQKPVVLSTSDREAVWREKELHGRFFKALNEPHVDKKASVQWLRFGDLFGETEGFVCAIQDQVVKTRNYRKYILKDGTHDICRACRHPGESLRHVLSGCSALANTEYLHRHNQAAKILHQELALKYGLLDERLPYYKYTPVPVLERDGVRLYWDRSIITDRTILANKPDIVVVDRAQSRVFLVDITIPYDENLVRAETEKKRKYLDLAHEISDMWHVESTEIIPIVISANGLIPVSLAQHLRRLGFRGSSLAARMQKAVLLDSARIVRRFLHLSP

SEQ ID NO: 14599 - protein, 1182 aa, Melitaea cinxia
MMEDNLERRIGPLPGGRQGASGAGAGRGSMRAASQPRRPAPPPDMSAYPPSLPVGLATTESQGTQHSLPAAGGVRRMRWTPKMNENVMRAYYRAVGRETGRTGYRAVMHREFLLLEPTLTVTEQNLADRARYIQRKGIFDAAELERFRREAAPEVEPVSTVRNEVSMQQESVRSEAPVEAITEGAVAQKVEQMRGILHEAISETRGASLEMRPRLSRLPLNAATRHAIEAANRLLPPYLETSFSLEDTGSILFGAALAVHRLVGAKTQESGRATHKNSDVPAWKRRIERRINLARALIGRLLAFRSGNTRPRIVRSVRMAFNGLGISLDQPDIADKLTERIDGLKQRIAAWGKRIRRYSERVERFRQNRLFVSDQKRFYRKLENPISGSASLKPSTVDLVAFWRNIWSGEVEHEEGPWIAAVQDACAKIEPMNPIAISTEDVSGAVRRAPNWKSPGADGLHHYWLKGLSVCHATLARQYQEAIDRKTLPNLFTTGITHLAPKSTNTADPTNYRPITCLTSIYKTLTSVLSCKISRHIGEFNILSAAQNGCRGGGRGTKELLLIDSVAGQLVRRNRRNFSAAWIDYKKAFDSVPHSWLLRVLELYKIDQAVRDFLGVCMGQWSTILCLQGERLTGAGDPIRIRRGIFQGDCLSPLWFCLSLNPLSTLLERSGTGFQFRRGGTKVSHLLYMDDLKLLAPNAARLQELLKITTEFSSSIRMQLGVDKCAVVHVDRGQVTQSSQLSLELTSFKTLSEAESYRYLGMSQCIGVKEVDMKQAVCEIFFGRLTKVLRSYLSGANKVRAYNAWVMPTLLYTFGILRWTQTELDALDRRVRTTMTYHRVHHPKSSVMRLYIPRKCGGRGMLSAKTMHNREVCSLRAYFETRRDSALHGDVSMCDKGLTPLALAKENWQKPVVLSTSDRETVWMEKELHGRFYKALHAPHVDSKASVQWLRFGDLFGETEGFVCAIQDQVVKTNNYRRHVLKDGTPDFCRACRHPGESLRHVLSGCSALANTEYLHRHNQVAKILHQELALMYGLLEQRMPYYQYSPVPVLERDGVRLYWDLPIATDRTILANKPDIVVMDRARSRVFLVDITVPHDENLVKAETEKKRKYLDLAHEIVDMWGVGSAEIIPIVISANGLIPVSLAHHLRQLGIRDGSLAARMQKAVLLDSARIVRRFLSLQP

SEQ ID NO: 14600 - protein, 990 aa, Melitaea cinxia
MRGILQEAISEIRGAPLEMRPRLSRLPLNAATRNAIEAANRLLPPYLEGSLSLEDTGSILFGAALAVHRLVGAKTQESGRATHKNSDVPAWKRRIERRINLARALIGRLLAFRSGNTRPRIVRSVRMAFNGLGISLDQPDIADKLTERIDGLKQRIAAWGKRIRRYSERVERFRQNRLFVSDQKRFYRKLENPISSSASLKPSTVDLVAFWRNIWSGEVEHEEGPWIAAVQDACAKIEPMNPIAISTEDVSGAVRRTPNWKSPGADGLHHYWLKGLSVCHATLARQYQEAIDRKTLPNLFTTGITHLAPKSTNTADPTNYRPITCLTSIYKTLTSVLSCKISRHIGEFNILSAAQNGCRGGGRGTKELLLIDSVAGQLVRRNRRNFSAAWIDYKKAFDSVPHSWLLRVLELYKVDQAVRDFLGVCLGQWSTILCLQGERLTGADDPIRIRRGIFQGDCLSPLWFCLSLNPLSTLLERSGTGFQFRRGGTKVSHLLYMDDLKLLAPNAARLQELLKITTEFSSSIRMQLGVDKCAVVHVDRGQVTQSSQLSLELTSFKTLSEAESYRYLGMSQCIGVKEVDMKQAVCEIFFGRLTKVLRSYLSGANKVRVYNAWVMPTLLYTFGILRWTQTELDALDRRVRTTMTHHRMHHPKSSVMRLYISRKCGGRGMLSAKTMHNREVCSLRAYFETRRDSALHGDVSMCDKGLTPLALAKENWQKPVVLSTSDRETVWMEKELHGRFYKALHAPHVDSKASVQWLRFGDLFGETEGFVCAIQDQVVKTNNYRKHVLKDGTPDFCRACRHPGESLRHVLSGCSVLANTEYLHRHNQVAKILHQELALMYGLLEQRMPYYQYSPVPVLERDGVRLYWDLPIATDRTILANKPDIVVMDRARSRVFLVDITVPHDENLVKAETEKKRKYLDLAHEIVDMWGVGSAEIIPIVISANGLIPVSLAHHLRQLGIRDGSLAARMQKAVLLDSARIVRRFLSLQP

SEQ ID NO: 14601 - protein, 864 aa, Melitaea cinxia
MAFNGLGTSLDQPDIADKLTERIDGLKQRIAAWGKRIRRYSERVERFRQNRLFVSDQKRFYRKLENPIPCSASLKPSTVDLVAFWRNISSGEVEHEEGPWIAAVQDACAKIEPMNPIAISTEDVSGAVRRAPNWKSPGADGLHHYWLKGLSVCHATLARQYQEAIDRKTLPNLFTTGITHLASKSTNTADPTNYRPITCLTSIYKTLTSVLTCKISRHIGEFNILSAAQNGCRGGGRGTKELLLIDSVAGQLVRRNRRNFSAAWIDYKKAFDSVPHSWLLRVLELYKIDEAVRDFLGVCMGQWSTILCLQGERLTGADDPIRIRRGIFQGDCLSPLWFCLSLNPLSTLLERSGTGFQFRRGGTKVSHLLYMDDLKLLAPNAARLQELLKITTEFSSSIRMQLGVDKCAVVHVDRGQVTQSSQLSLELTSFKTLSEAESYRYLGMSQCIGVKEVDMKQAVFEIFFGRLTKVLRSYLSGANKVRAYNAWVMPTLLYTFGILRWTQTELDALDRRVRTTMTHHRLHHPKSSVMRLYIPRKCGGRGMLSAKTMHNREVCSLRAYFETRRDSALHGDVSMCDKGLTPLALAKENWQKPVVLSTSDRETVWMEKELHGRFYKALHAPHVDSKASVQWLRFGDLFGETEGFVCAIQDQVVKTNNYRKHVLKDGTPDFCRACRHPGESLRHVLSGCSALANTEYLHRHNQVAKILHQELALMYDLLEQRMPYYQYSPVPVLECDGVRLYWDLPIATDRTILANKPDIVVMDRARSRVFLVDITVPHDENLVKAETEKKRKYLDLAHDIVDMWGVGSAEIIPIVISANGLIPVSLAHHLRQLGIRDGTLAARMQKAVLLDSARIVRRFLSLQP

SEQ ID NO: 14602 - protein, 1181 aa, Mellicta athalia
MEDKFGKRIGPLPGGRQGASGAGAGRGSMRAASHPRRPAPPPDRSANPPSPPDGLAPTEPQGTQHSAPAAGGVRRMRWTLKMNESVMRAYYRAVGRETGRTGYRAVMHREFLLLEPTVTVTEQNLADRARFIQRKGVFDAAELERFRREAAPEDEPVSAERDAVSTQQESVRSEAPVEAITEGAVAQKVEQMRGILQEAISETRGAPLEQRPRLSRLPLNAATRSAIEAANRLLPPYLEGSLGLEDTGSILFGAALAVHRLVGAKTQEPGLATHKNSDVPAWKRRIERRISLARALIGRLLAFRSGNTRPRIVRSVRMAFNGLGVSLNQPDIADRLTERIDGLKQRIAAWGKRIRRYSERVERFRQNRLFVSDQKRFYRKLENPIPCSAFLKPSTVDLVAFWRNIWSREVEHEEGPWIAAVQDACAKVDPMNPIAISTEDVSGAVRRAPNWKSPGADGLHHYWLKGLSVCHATLARQYQEAIDRKTLPNLFTTGITHLAPKSTNTADPTNYRPITCLSSIYKTLTSVLSCKISRHIGEFNILSAAQNGCRGGGRGTKELLLIDSVAGQLVRRNRRNFSAAWIDYKKAFDSVPHSWLLRVLELYKIDEAVRDFLGVCMGQWSTILCLQGERLTGADDPIRIRRGIFQGDCLSPLWFCLSLNPLSTLLERSGTGFQFRRGGTKVSHLLYMDDLKLLAPNAAHLQELLKITTEFSGSIRMQLGVDKCAVVHVDRGQVTQSAQFSLELTSFKTLSEAESYRYLGMSQCIGVKEVDMKQAVCEVFFGRLTKVLRSYLSGANKVRAYNTWVMPTLLYTFGILRWTQTELDALDRRVRTTMTHHRVHHPKSSVMRLYISRKCGGRGMLNAKTMHNREVCSLRAYFETRRDSAMHGDVVVCDKGLTPLSLANENWQKPVVLSTSDRETVWMEKELHGRFYKALHAPHVDSKASVQWLRFGDLFGETEGFVCAIQDQVVKTNNYRKHILKDGTPDFCRACRHPGESLRHVLSGCSALANTEYLHRHNQVAKILHQELALMYGLLEQRMPYYQYTPVPVLERDGVRLYWDLPIATDRTILANKPDIVVMDRARSRVFLVDITIPHDENLVKAETEKKRKYLDLAHEIVDMWGVGSAEIIPIVISANGLIPVSLAHHLRQLGIRDGSLAGRMQKAVLLDSARIVRRFLSLQP

SEQ ID NO: 14603 - protein, 882 aa, Mellicta athalia
MYYVMNNNNNNNNNNNNNNNNNNNNNSLNQPDIADRLTERIDGLKQRIAAWGKRIRRYSERVERFRQNRLFVSDQKRFYRKLENPIPCSAFLKPSTVDLVAFWRNMWSREVEHEEGPWIAAVQDACAKVEPMNPIAISTEDVSGAVRRAPNWKSPGADGLHHYWLKGLSVCHATLARQYQEAIDRKTLPNLFTTGITHLAPKSTNTANPTNYRPITCLTSIYKTLTSVLSCKISRHIGEFNILSAAQNGCRGGGRGTKELLLIDSVAGQLVRRNRRNFSAAWIDYKKAFDSVPHSWLLRVLELYKIDEAVRDFLGVCMGQWSTILCLQGERLTGADDPIRIRRGIFQGDCLSPLWFCLSLNPLSTLLERSGTGFQFRRGGTKVSHLLYMDDLKLLAPNAARLQELLKITTEFSGSIRMQLGVDKCAVVHVDRGQVTQSAQFSLELTSFKTLSEAESYRYLGMSQCIGVKEVDMKQAVCEVFFGRLTKVLRSYLSGANKVRAYNTWVMPTLLYTFGILRWTQTELDALDRRVRTTMTHHRVHHPKSSVMRLYISRKCGGRGMLNAKTMHNREVCSLRAYFETRRDSAMHGDVVVCDKGLTPLSLANENWQKPVVLSTSDRETVWMEKELHGRFYKALHAPHVDSKASVQWLRFGDLFGETEGFVCAIQDQVVKTNNYRKHILKDGTPDFCRACRHPGESLRHVLSGCSALANTEYLHRHNQVAKILHQELSLMYGLLEQRMPYYQYTPVPVLERDGVRLYWDLPIATDRTILANKPDIVVMDRARSRVFLVDITIPHDENLVKAETEKKRKYLDLAHEIVDMWGVGSAEIIPIVISANGLIPVSLAHHLRQLGIRDGSLAGRMQKAVLLDSARIVRRFLSLQP

SEQ ID NO: 14604 - protein, 1181 aa, Mellicta athalia
MEDKFGKRIGPLPGGLQGASGAGAGRGSMRAASHPRRPAPPPDRSANPPSPPDGLAPTEPQGTQHSAPAAGGVRRMRWTPKMNESVMRAYYRAVGRETGRTGYRAVMHREFLLLEPTVTVTEQNLADRARYIQRKGVFDAAELERFRREAAPEDEPVSAERDAVSTQQESVRSEAPVEAITEGAVAQIVEQMRGILQEAISETRGAPLEQRPRLSRLPLNAVTRSAIEAANRLLPAYLEGSLGLEDTGSILFGAALAVHRLVGAKTQEPGLATHKNSDVPAWKRRIERRISLARALIGRLLAFRSGNTRPRIVRSVRMAFNGLGVSLNQPDIADRLTERIDGLKQRIAAWGKRIRRYSERVERFRQNRLFVSDQKRFYRKLENPIPCSAFLKPSTVDLVAFWRNIWSREVEHEEGPWIAAVQDACAKVEPMNPIAISTEDVSGAVRRAPNWKSPGADGLHHYWLKGLSVCHETLARQYQEAIDRKTLPNLFTTGITHLAPKSTNTADPTNYRPITCLTSIYKTLTSVLSCKISRHIGEFNILSAAQNGCRGGGRGTKELLLIDSVAGQLVRRNRRNFSAAWIDYKKAFDSVPHSWLLRVLELYKIDEAVRDFLGVCMGQWSTILCLQGERLTGADDPIRIRRGIFQGDCLSPLWFCLSLNPLSTLLERSGTGFQFRRGGTKVSHLLYMDDLKLLAPNAARLQELLKITTEFSGSIRMQLGVDKCAVVHVDRGQVTESAQFSLELSSFKTLSEAESYRYLGMSQCIGVKEVDMKQAVCEVFFGRLTKVLRSYLSGANKVRAYNTWVMPTLLYTFGILRWTQTELDALDRRVRTTMTHHRVHHPKSSVMRLYISRKCGGRGMLNAKTMHNREVCSLRAYFETRRDSAMHGDVVVCDKGLTPLSLANENWQKPVVLSTSDRETVWMEKELHGRFYKALHAPHVDSKASVQWLRFGDLFGETEGFVCAIQDQVVKTNNYRKHILKDGTPDFCRACRHPGESLRHVLSGCSALANTEYLHRHNQVAKILHQELALIYGLLEQRMPYYQYTPVPVLERDGVRLYWDLPIATDRTILANKPDIVVMDRARSRVFLVDITIPHDENLVKAETEKKRKYLDLAHEIVDMWGVGSAEIIPIVISANGLIPVSLAHHLRQLGIRDGSLAGRMQKAVLLDSARIVRRFLSLQP

SEQ ID NO: 14605 - protein, 1181 aa, Mellicta athalia
MEDKFGKRIGPLPGGRQGASGAGAGRGSMRAASHPRRPAPPPDRSANPPSPPDGLAPTEPQGTQHSAPAAGGVRRMRWTPKMNESVMRAYYRAVGRETGRTGYRAVMHREFLLLEPTVTVTEQNLADRARYIQRKGVFDAAELERLRREAAPEDEPVSAERDAVSTQQESVRSEAPVEAITEGAVAQKVEQMRGILQEAISETRGAPLEQRPRLSRLPLNAATRSAIEAANRLLPPYLEGSLGLEDTGSILFGAALAVHRLVGAKTQEPGLATHKNSDVPAWKRRIERRISLARALIGRLLAFRSGNTRPRIVRSVRMAFNGLGVSLNQPDIADRLTERIDGLKQRIAAWGKRIRRYSERVERFRQNRLFVSDQKRFYRKLENPIPCSAFLKPSTVDLVAFWRNIWSREVEHEEGPWIAAVQDACAKVEPMNPIAISTEDVSGAVRRAPNWKSPGADGLHHYWLKGLSVCHETLARQYQEAIDRKTLPNLFTTGITHLAPKSTNTADPTNYRPITCLTSIYKTLTSVLSCKISRHIGEFNILSAAQNGCRGGGRGTKELLLIDSVAGQLVRRNRRNFSAAWIDYKKAFDSVPHSWLLRVLELYKIDEAVRDFLGVCMGQWSTILCLQGERLTGADDPIRIRRGIFQGDCLSPLWFCLSLNPLSTLLERSGTGFQFRRGGTKVSHLLYMDDLKLLAPNAARLQELLKITTEFSGSIRMQLGVDKCAVVHVDRGQVTQSAQFSLELSSFKTLSEAESYRYLGMSQCIGVKEVDMKQAVCEVFFGRLTKVLRSYLSGANKVRAYNTWVMPTLLYTFGILRWTQTELDALDRRVRTTMTHHRVHHPKSSVMRLYISRKCGGRGMLNAKTMHNREVCSLRAYFETRRDSAMHGDVVVCDKGLTPLSLANENWQKPVVLSTSDRETVWMEKELHGRFYKALHAPHVDSKASVQWLRFGDLFGETEGFVCAIQDQVVKTNNYRKHILKDGTPDFCRACRHPGESLRHVLSGCSALANTEYLHRHNQVAKILHQELALMYGLLEQRMPYYQYTPVPVLERDEVRLYWDLPIATDRTILANKPDIVVMDRARSRVFLVDITIPHDENLVKAETEKKRKYLDLAHEIVDMWGVGSAEIIPIVISANGLIPVSLAHHLRQLGIRDGSLAGRMQKAVLLDSARIVRRFLSLQP

SEQ ID NO: 14606 - protein, 1190 aa, Maniola jurtina
MMMDRNIRNVRIGPLPGGRQGAPGAGAGRSSIRAASTISRPALPPSRSTHPSSPPDGLAPTGSTRAQSSAPAAGGVRRMRWTSLMNENVMRAYYRATGGETGRTGYRAAMYREFLLLEPNLTVMEQNLADRARYIQRSNIFNATELERLRREAVPEVSAPTTEQIVSQAAPARDETVTISQDLPVEEDTEGTVSLDIERMRGILEEAISEIRSAPLENRPRLSRLTLNVATRDVIEAINKMLPQHLESSTGLGDTASIIFGAALAVHRFIGAKTPGLGRAAATRRSAEPAWKKRIERRITLARVLIGRLQSFRSGNTRPRIVRSVGVAFSGCGVRLDQPDIAQKLTERIDDLKQKIAAWGNRIRRYSARVERFQQNRLFSSDQKRFYKRLECPAVCSTSQRPDPADLVAFWRGVWSREVEHEEGPWIAAVEEACARIEPMNPVAISAEDVAGAVRRAPNWKSPGPDGLHHYWLKGFSACHATLARQFQEALEQRALPSLFTTGITHLAPKSTDATDPAKYRPITCLTTIYKTLTSVLSLKISRHIDENNIMSGAQNGCRGGGRGTKELLLIDSVAGQLVKRNRRNFSAAWIDYKKAFDSVPHSWLLRVLELYKVDSAVRDFLEACMGQWSTILCLHGERLAAADDRIRIGRGIFQGDCLSPLWFCLSLNPLSTLLEGSGTGFQFRRGGTKVPHLLYMDDLKLLAPNATRLRELLNITTEFSNSIRMELGLDKCAVVHVERGQVTHSAEINLEPSNIKTLSEAESYRYLGMSQSLGVKEADMKQSVCEAFFGRLTKVCKSYLSGANKVRAYNGWVMPVLMYTFGVLSWTQTELDALDRKVRTTMTLYRMHHPKSSVMRLYIPRKCGGRGVLSVKTMHNREISNLRTYFETMRGSPMHREVIECDKGLTPLSLAKTEWQKPVVLSTSDRETVWKERELHGRFFKALNEPHVDKKASVQWLRFGDLFGETEGFVCAIQDQVVKTRNYRRYILKDGTHDICRACRHPGESLRHVLSGCSALANTEYLHRHNQAAKILHQELALKYGLLDERLPYYKYTPVPVLERDGVRLYWDRSIITDRTILANKPDIVVMDRAQSRVFLVDITIPYDENLVRAETEKKRKYLDLAHEVSGMWHVESTEIIPIVISANGLIPVSLAHHLRRLGFRGSSLAARMQKAVLLDSARIVRRFLSLSP

SEQ ID NO: 14607 - protein, 1190 aa, Maniola jurtina
MMMEHNIRNARIGPLPGGRQGAPGAGAGRSSIRAASTTSRPALPPSRSTHPSSPPDGLAPTGPTRAQSSAPAAGGVRRMRWTSLMNENVMRAYYRATGGETGRTGYRAAMYREFLLLEPNLTVTEQNLADRALYIQRSNIFNAAELERLRREAVPEVSAPTTVQIVSQAEPVREEATTTLQDLPMEEDTGETVSLDIERMRRILEEAISEIRNAPLENRPRLSRLTLNVATRDVIEAINKMLPQHLESSTGLGDTASIIFGAALAVHRFIGAKTPGPGRAAATRRSAEPAWKKRIEHRITLARVLIGRLQSFRSGNTRPRIVRSVRVALNGCGVRLDQPDIAQKLTERIDDLKQKIAAWGNRIRRYSARVERFQQNRLFSSDQKRFYKRLECPAVCSTSQRPDPADLVAFWRGVWSREVEHEEGPWIAAVEEACARIEPMNPVAISAEDVAGAVRRAPNWKSPGPDGLHHYWLKGFSVCHATLARQFQEALEQRALPSLFTTGITHLAPKSTDATDPAKYRPITCLTTIYKTLTSVLSLKISRHIDENNIMSGAQNGCRGGSRGTKELLLIDSVAGQLVKRNRRNFSAAWIDYKKAFDSVPHSWLLRVLKLYKVDSAVRDFLETCMGQWSTILCLHGERLAAADDRIRIGRGIFQGDCLSPLWFCLSLNPLSTLLEGSGTGFQFRRGGTKVPHLLYMDDLKLLAPNATRLKELLSITTEFSNSIKMELGLDKCAVMHVERGQVTHSAEISLEPSNIKSLSEAESYRYLGMSQSLGVKEADMKQSVCEAFFGRLTKICKSYLSGANKVRAYNGWVMPVLMYTFGVLSWTQTELDALDRKVRATMTLYRMHHPKSSVMRLYIPRKGGGRGVLSAKTMHNREISNLRTYFETMRGSPMHREVIECDKGLTPLSLAKTEWQKPVVLSTSDRETVWKEKELHGRFFKALNEPHVDKKASVQWLRFGDLFGETEGFVCAIQDQVVKTRNYRKYILKDGTHDICRACRHPGESLRHVLSGCSALANTEYLHRHNQAAKILHQELALKYGLLDERLPYYKYTPVPVLERDGVRLYWDRSIITDRTILANKPDIVLVDRAQSRVFLVDITIPYDENLVRAETEKKRKYLDLAHEVSDMWHVESTEIIPIVISANGLIPVSLAHHLRRLGFRGSSLAARMQKAVLLDSARIVRRFLSLSP

SEQ ID NO: 14608 - protein, 1188 aa, Elymnias hypermnestra
MMMDLFCTDKRLGPLPGGRQGTSGAGAGRDSMRAASSTSSTRRPARPPRRPTNPSSPPEGLASAGTARTQNPEPAAGGVRRMRWTSLMNENVMRAYYRATGGETGRTGYRTAMYREFLLLEPNLTVTEQNLADRARYIQRSNIFSATELERLRCEAVPEVTPPATQQTAATAIVHQELENNQDLLVDGDAEGTVSLDIEKMRGILEEAISESRSAPLEGRPRLSRLTLSAATRDVIEAINKLLPQYFEGSTGLSETASILYGAALAVHRFIGVKIREPGRTANTSSAVPAWKRRIERRITHARRLIGRLQSFRSGNTRPRIVRSVRIAFNGLDVRLDQPDIAQKLTERIDDLKQKIAAWGNRIRRYSERVERFHQNRLFVSDQKRFYERLQRPASCSSSQRPASADLVAYWRSIWSLEVEHEEGSWTAAVEEACAVIQPMNPVAITPEDVVGAVRRAPNWKSPGPDGLHHYWLKGFSACHATLARQFQEAMAQKALPNLFTTGITHLAPKTSNAADPTKYRPITCLSSIYKTLTSILSRKISYHIDENNIMSVAQNGCRGGSRGTKELLLIDSVAGQLVKRNRRNFSAAWIDYKKAFDSVPHSWLLRVLELYKIDGTLRDFLGECMRQWSTILCLHGERLTAADDRIRIRRGIFQGDCLSPLWFCLSLNPLSFLLERSGTGFQFRRGGARVPHLLYMDDLKLLAPNAPRLQELLKITSDFSNSIRMEMGLDKCAVLHVERGQVSHSAEINLEPTQLKTLSETETYRYLGMSQCMGVKEADMKQSVCEVFYGRLTKILKSYLSGANKIRAYNGWVMPVLLYTFGILRWTQTELDALDRRVRTTMTFHRMHHPKSSVMRLYIPRKCGGRGLLSAKTMHNREISSLRTYFETKRESPMHLEVIECDKGLTPLSLANENWQRPAVLSTSDREAVWKGKEMHGRFFKALHEPHVNRKASVQWLRFGDLFGETEGFVCAIQDQVVKTRNYRKYILKDGTHDICRACRHPGESLRHVLSGCSALANTEYLHRHNQAAKILHQELALMYGLLDERLPYYRYQPVPVLERDGVRLYWDRSIITDRTILANKPDIVIMDRAQSRVFLVDITIPYDENLVRAETEKKRKYLDLAHEITAMWGVGSTETIPIVISANGLIPVSLAHHLRRLGFRGSSLAARMQKAVLLDSARIVRRFLSL

SEQ ID NO: 14609 - protein, 1187 aa, Elymnias hypermnestra
MMDLAKKSKRIGPLPGGRQGTSGAGAGRGSMRAASSSSSTRRPAQPPSRPTNPSSPPEGLASAGAARTQIPEPATGGVRRMRWTSQMNENVMRAYFRATGGETGRTGYRTAMYREFLLLEPNLTVTEQNLADRARYIQRSNIFDATELERLRREAVPEVTPPATEQIAATAIVHQELENNQDLLVDGDAEGTASLDIEKMRGILEEAISESRSAPLEGRPRLSRLTLSAATRDVIEAINKLLPQYFEGSTGLSETASILYGAALAVHRFIGVKIREPGRTANTSSAVPAWKRRIERRITHARRLIGRLQSFRSGNTRPRIVRSVRIAFNGLDVRLDQPDIAQKLTERIDDLKQKIAAWGNRIRRYSERVERFHQNRLFVSDQKRFYERLQRPASCSSSQRPASADLVAYWRSIWSLEVEHEEGSWTAAVEEACAVIQPMNPVAITPEDVVGAVRRAPNWKSPGPDGLHHYWLKGFSACHATLARQFQEAMAQKALPNLFTTGITHLAPKTSNAADPTKYRPITCLSAIYKTLTSILSHKISCHIDENNIMSVAQNGCRGGSRGTKELLLIDSVAGQLVKRNRRNFSAAWIDYKKAFDSVPHSWLLRVLELYKIDGTLRDFLGECMRQWSTILYLHGERLTAADDRIRIRRGIFQGDCLSPLWFCLSLNPLSFLLERSGTGFQFRRGGARVPHLLYMDDLKLLAPNAPRLQELLKITTDFSNSIRMEMGVDKCAVLHVERGQVSHSAEINLEPTQLKTLSEAETYRYLGMSQCIGLKEADMKQSVCEVFYGRLTKILKSYLSGANKIRAYNGWVMPVLLYTFGILRWTQTELDALDRRVRTTMTFHRMHHPKSSVMRLYIPRKCGGRGLLSAKTMHNREISNLRTYFETKRESPMHLEVIECDKGLTPLSLANENWQRPAVLSTSDREAVWKGKEMHGRFFKALHEPHVNRKASVQWLRFGDLFGETEGFVCAIQDQVVKTRNYRKYILKDGTHDICRACRHPGESLRHVLSGCSALANTEYLHRHNQAAKILHQELALMYGLLDERLPYYRYQPVPVLERDGVRLYWDRSIITDRTILANKPDIVIMDRAQSRVFLVDITIPYDENLVRAETEKKRKYLDLAHEITAMWGVGSTETIPIVISANGLIPVSLAHHLRRLGFRGSSLAARMQKAVLLDSARIVRRFLSL

SEQ ID NO: 14610 - protein, 1187 aa, Thymelicus sylvestris
MMMERNENARIGPLPGGRQGASGAGAGRGSMRSASHTSRLPLPPRQPAEPSSPPEGLAPTGSSTQSSGPATGGVRRMRWTSHMNENVMRAYYRATEGEAGRTGYRAAMYREFLLLEPTLTVTEQNLADRARYIQRSNIFSATEFERLRREAVPEVTTPTTEQIVSLADPIREETDANAQDLPVEEDTEVTVSLDIERMRRILGEAISEIQSAPVQNRPRLSRLTLNVATRDIIEAINQMLPQYLERSTGLDDTASILFGAALAVHRFMGVKTQERWHSTPRQNAEPAWKKRIERRITLARALIGRLRSFRSGNTRPRIVRSVRIAFDGLGVRLDQPDIDQKLTERIDDLKQKIAAWGSRIRRYSERVKRFQQNRLFSSDQKRFYKKLESPAVCSTSQQPSPADLIAFWRSVWSREVEHEEGPWIAAVEEACASIEQMNPVAISPEDVAGAVRRAANWKSPGPDGLHHYWLKGFSLCHATLARQFQDALEQRTLPSLFTTGITHLAPKSTDAADPAKYRPITCLTTIYKTLTSVLSIKISRHVDENSIISGAQNGCRGGSRGTKELLLIDSVAGQLVKRNRRNFSAAWIDYKKAFDSVPHSWLLRVLELYKVDSTVQDFLRECMGQWSTILCLHGERLAAADDRIRIRRGIFQGDCLSPLWFCLSLNPLSSLLERSGTGFQFRRGGTKVPHLLYMDDLKLLAPNATRLRELLNITTEFSSSIRMELGLDKCAVLHVERGQVTHSAEINLEPTSIRTLSEPESYRYLGMSQSVGVHEADMKQSVCEAFLGRLTKVCKSYLSGANKVRAYNGWVVPVLMYTFGVLRWTQTELDALDRKVRTTMTLYRMHHPKSSVMRLYIPRKCGGRGVLSVKTMHNREISNLRTYFETKRESPMHRDVIECDKGLTPLSLAKPEWQKPVVLSTSDRETVWKEKELHGRFFKALHEPYVDKKASVQWLRFGDLFGETEGFVCAIQDQVVKTRNYRKYILKDGTTDICRACRHPGESLRHVLSGCSALANTEYLHRHNQAAKILHQELALKYGLLDERVPYYRYTPTPVLERDGVRLYWDRSIITDRTILANKPDIVLMDRAQSRVFLVDITIPHDENLVRAETEKKRKYLDLAHEVSSMWHVESTEIIPIVISVNGLIPVSLAHHMRRLGFRGSSLAAKMQKAVLLDSARIVRRFLSLSP

SEQ ID NO: 14611 - protein, 1191 aa, Bicyclus anynana
MMMEQQRARLGPLPGGRQGASGAGAGRGSMRAASQHSRPALPPDRSTLPSSPSEGLASTGSPRAQSSEPAAGGVRRMKWTCDMNKNVMRAYYRATGGETGRTGYRAAMYREFLLLEPHLTVTEQNLADRARFIQRSNIFNATELERLRREAVPEVPTSSAEQIVSPAAPVREETEPMSQDLHAEEEDTEGTVSLDLERMRRILEETIAEIRNAPLENRPRLSRIALNIATRDVIEAVNKMLPQHLAGSTGLDDTASILFGAALTVHRFIGIKTKEPGRPGRSVNNIRAEPAWKRRIERRITLARGLIGRLLCFRLGNRRPRIVRSVRIAFNGLGVRLDQPDITLKLTERIDDLKQKIAAWGNRIRRYSERVERFQQNRLFSSDQKRFYNRLECPAVCSTSPQPNPADLIAFWRNIWSREVEHDEGPWISAIEETCAAIRPMNPVAISTEDVVCAVRRAANWKSPGPDGLHHYWLKAFSTCHVTLARQFQEALEQGTLPNLFTTGITHLAPKTTDTVDPSKYRPITCLTTIYKTLTSVLSSKITRHVDDNNIMSGAQNGCRGGSRGTKELLLIDSVAGQLVKRNRRNFAAAWIDYKKAFDSVPHSWLLRVLELYKIDCTVQDFLRSCMGQWSTILCLHGERLAAADDRIRIRRGIFQGDCLSPLWFCLALNPLSTLLEGSGTGFQFRRGGTKVPHLLYMDDLKLLAPNATRLQELLNLTTGFSNSIRMELGLDKCAVLHVERGQVTHTVGINPDLLNIKTLSETESYRYLGMSQSIGVQEADMKQSVCEGFYRRLTKICKSYLSGANKIRAYNGWVMPVLMYTFGVLRWTQTELDVLDRRVRTTMTLYRMHHPKSSVMRLYVPRKCGGRGLLSAKTMHNREICSLRTYFETKRESPMHTEVIACDKGLTPLSLANSEWQKPVVQSISDRETVWKGKELHGRFFKALHEPHVTNKASVQWLRFGDLFGETEGFVFAIQDQVVKTRNYRKYILKDGTHDICRACRHPGESLRHVLSGCSALANTEYLHRHNQAAKILHQELALTYGLLDQRLPYYKYTPVPVLERDGVRLYWDRSIITDRTILANKPDIVVLDRAQSRVFLVDITIPYDENLVRAETEKKRKYLDLAHEVTAMWHVESTEIIPIVISANGLIPVSLAHHLRRLGFRGSSLAGKMQKAVLLDSARIVRRFLHLSP

SEQ ID NO: 14612 - protein, 1181 aa, Melitaea cinxia
MEDNLERRIGPLPGGRQGASGAGAGRGSMRAASQPHRPAPPPDRSGYPPSPPVGLATTESQGTQHSLPAAGGVRRMRWTPKMNESVMRAYYRAVGRETGRTGYRAVMHREFLLLEPTLTVTEQNLADRARYIQRKGIFDAAELERFRREAAPEVEPVSTVRNEVSTQQEGVRSEAPVEVITEGAVAQKVEQMRGILQEAISETRGAPLEMRPRLSRLPLNAATRNAIEAANRLLPPYLEGSLSLEDTGSILFGAALAVHRLVGAKTQESGRATHKNSDVPAWKRRIERRINLARALIGRLLAFRSGNTRPRIVRSVRMAFNRLGISLDQPDIADKLTERIDGLKQRIAAWGKRIRRYSERVERFRQNRLFVSDQKRFYRKLENPISSSASLKPSTVDLVAFWRNIWSGEVEHEEGPWIAAVQDACAKIEPMNPIAISTEDVSGAVRRAPNWKSPGADGLHHYWLKGLSVCHATLARQYQEAIDRKTLPNLFTTGITHLAPKSTNTADPTNYRPITCLTSIYKTLTSVLSCKISRHIAEFNILSAAQNGCRGGGRGTKELLLIDSVAGQLVRRNRRNFSAAWIDYKKAFDSVPHSWLLRVLELYKIDEAVRDFLGVCMGQWSTILCLQGERLTGADDPIRIRRGIFQGDCLSPLWFCLSLNPLSTLLERSGTGFQFRRGGTKVSHLLYMDDLKLLAPNAARLQELLKITTEFSSSIRMQLGVDKCAVVHVDRGQVTQSSQLSLELTSFKTLSEAESYRYLGMSQCIGVKEVDMKRAVCEIFFGRLTKVLRSYLSGANKVRAYNAWVMPTLLYTFGILRWTQTELDALDRRVRTTMTHHRMHHPKSSVMRLYIPRKCGGRGMLSAKTMHNREVCSLRAYFETRRDSALHGDVSMCDKGLTPLALAKENWQKPVVLSTSDRETVWMEKELHGRFYKALHAPHVDSKASVQWLRFGDLFGETEGFVCAIQDQVVKTNNYRKHVLKDGTPDFCRACRHPGETLRHVLSGCSALANTEYLHRHNQVAKILHQELALMYGLLEQRMPYYQYSPVPVLERDGVRLYWDLPIATDRTILANKPDIVVMDRARSRVFLVDITVPHDENLVKAETEKKRKYLDLAHEIVDMWGVGSAEIIPIVISANGLIPVSLAHHLRQLGIRDGSLAARMQKAVLLDSARIVRRFLSLQP

SEQ ID NO: 14613 - protein, 1100 aa, Melitaea cinxia
MNENVMRAYYRAVGRETGRTGYRAVMHREFLLLEPTLTVTEQNLADRARYIQRKGIFDVAELERFRREAAPEVEPVSTVRNEVSTQQEGVRSEAPVEAITEGAVAQKVEQMRGILHEAISETRGAPLEMRPRLSRLPLNAATRHAIEAANRLLPPYLETSFSLEDTASILFGAALAVHRLVGAKTQESGRATHKNSDVPAWKRRIERRINLARSLIGRLLAFRSGNTRPRIVRSVRMAFNGLGISLDQPDIADKLTERIDGLKQRIAAWGKRIRRYSERVERFRQNRLFLSDQKRFYRKLENPISGSASLKPSTVDLVAFWRNIWSGEVEHEEGPWIAAVQDACAKIEPMNPIAISTEDVSGAVRRAPNWKSPGADGLHHYWLKGLSVCHATLARQYQEAIDRKTLPNLFTTGITHLAPKSTNTADPTNYRPITCLTSIYKTLTSVLSCKISRHIGEFNILSAAQNGCRGGGRGTKELLLIDSVAGQLVRRNRRNFSAAWIDYKKAFDSVPHSWLLRVLELYKIDQAVRDFLGVCMGQWSTILCLQGERLTGAGDPIRIRRGIFQGDCLSPLWFCLSLNPLSTLLERSGTGFQFRRGGTKVSHLLYMDDLKLLAPNAARLQELLKITTEFSSSIRMQLGVDKCAVVHVDRGQVTQSSQLSLELTSFKTLSEAESYRYLGMSQCIGVKEVDMKQAVCEIFFGRLTKVLRSYLSGANKVRAYNAWVMPTLLYTFGILRWTQTELDALDRRVRTTMTYHRVHHPKSSVMRLYIPRKCGGRGMLSAKTMHNREVCSLRAYFQTRRDSALHGDVSMCDKGLTPLALAKENWQKPVVLSTSDRETVWMEKELHGRFYKALHAPHVDSKASVQWLRFGDLFGETEGFVCAIQDQVVKTNNYRKHVLKDGTPDFCRACRHPGESLRHVLSGCSALANTEYLHRHNQVAKILHQELALMYGLLEQRMPYYQYSPVPVLERDGVRLYWDLPIATDRTILANKPDIVVMDRARSRVFLVDITVPHDENLVKAETEKKRKYLDLAHEIVDMWGVGSAEIIPIVISANGLIPVSLTHHLRQLGIRDGSLAARMQKAVLLDSARIVRRFLSLQP

SEQ ID NO: 14614 - protein, 1182 aa, Melitaea cinxia
MMEDDLQRRIGPLPGGRQGASGAGAGRGSMRAASQPRRPAPPPDRLGYPPSPPVGLATTESQGTQHSLPAAGGVRRMRWTPKMNESVMRAYYRAVGRETGRTGYRAVMHREFLLLEPTLTVTEQNLADRARYIQRKGIFDAAELERFRREAAPEVEPVSTVRNEVSTQQEGVRSEAPVEVITEGAVAQKVEQMRGILQEAISETRGAPLEMRPRLSRLPLNAATRNAIEAANRLLPPYLEGTLSLEDTGSILFGAALAVHRLVGAKTQESGRATHKNSDVPAWKRRIERRINLARALIGRLLAFRSGNTRPRIVRSVRMAFNGLGISLDQPDIADKLTERIDGLKQRIAAWGKRIRRYSERFERFRENRLFVSDQKRFYRKLENPISSSASLKPSTVDLVAFWRNIWSGEVEHEEGPWIAAVQDACAKIEPMNPIAISTEDVSGAVRRTPNWKSPGADGLHHYWLKGLSVCHATLARQYQEAIDRKTLPNLFTTGITHLAPKSTNTADPTNYRPITCLTSIYKTLTSVLSCKISRHIGEFNILSAAQNGCRGGGRGTKELLLIDSVAGQLVRRNRRNFSAAWIDYKKAFDSVPHSWLLRVLELYKVDQAVRDFLGVCMGQWSTILSLQGERLTGADDPIRIRRGIFQGDCLSPLWFCLSLNPLSTLLERSGTGFQFRRGGTKVSHLLYMDDLKLLAPNAARLQELLKITTEFSSSIRMQLGVDKCAVVHVDRGQVTQSSQLSLELTSFKTLSEAESYRYLGMSQCIGVKEVDMKQAVCEIFFGRLTKVLRSYLSGANKVRVYNAWVMPTLLYTFGILRWTQTELDALDRRVRTTMTHHRMHHPKSSVMRLYISRKCGGRGMLSAKTMHNREVCSLRAYFETRRDSALHGDVSMCDKGLTPLALAKENWQKPVVLSTSDRETVWMEKELHGRFYKALHAPHVDSKASVQWLRFGDLFGETEGFVCAIQDQVVKTNNYRKHVLKDGTPDFCRACRHPGESLRHVLSGCSVLANTEYLHRHNQVAKILHQELALMYGLLEQRMPYYQYSPVPVLERDGVRLYWDLPIATDRTILANKPDIVVMDRARSRVFLVDITVPHDENLVKAETEKKRKYLDLAHEIVDMWGVGSAEIIPIVISANGLIPVSLAHHLRQLGIRDGSLAARMQKAVLLDSARIVRRFLSLQP

SEQ ID NO: 14615 - protein, 1182 aa, Melitaea cinxia
MMEDDLQRRIGPLPGGRQGASGAGAGRGSMRAASQPRRPAPPPDRSGYPPSPPVGLATTESQGTQHSLPAAGGVRRMRWTPKMNESVMRAYYRAVGRETGRTGYRAVMHREFLLLEPTLTVTEQNLADRARYIQRKGIFDAAELERFRREAAPEVEPVSTVRNEVSTQQEGVRSEAPVEVITEGAVAQKVEQMRGILQEAISETRGAPLEMRPRLSRLPLNAATRNAIEAANRLLPPYLEGSLSLEDTGSILFGAALAVHRLVEAKTQESGRATHKNSDVPAWKRRIERRINLARALIGRLLAFRSGNTRPRIVRSVRMAFNGLGISLDQPDIADKLTERIDGLKQRIAAWGKRIRRYSERVERFRLNRLFVSDQKRFYRKLENPISSSASLKPSTVDLVAFWRNIWSGEVEHEEGPWIAAVQDACAKIEPMNPIAISTEDVSGAVRRAPNWKSPGADGLHHYWLKGLSVCHATLARQYQEAIDRKTLPNLFTTGITHLAPKSTNTADPTNYRPITCLTSIYKTLTSVLSCKISRHIGEFNILSAAQNGCRGGGRGTKELLLIDSVAGQLVRRNRRNFSAAWIDYKKAFDSVPHSWLLRVLELYKVDQAVRDFLGVCMGQWSTVLCLQGERLTGADDPIRIRRGIFQGDCLSALWFCLSLNPLSTLLERSGTGFQFRRGGTKVSHLLYMDDLKLLAPNAARLQELLKITTEFSSSIRMQLGVDKCAVVHVDRGQVTQSSQLSLELTSFKTLSEAESYRYLGISQCIGVKEVDMKQAVCEIFFGRLTKVLRSYLSGANKVRAYNAWVMPTLLYTFGILRWTQTELDALDRRVRTTMTHHRMHHPKSSVMRLYIPRKCGGRGMLSAKTMHNREVCSLRAYFETRRDSALHGDVSMCDKGLTPLALAKENWQKPVVLSTSDRETVWMEKELHGRFYKALHAPHVDSKASVQWLRFGDLFGETEGFVCAIQDQVVKTNNYRKHVLKDGTPDFCRACRHPGESLRHVLSGCSVLANTEYLHRHNQVAKILHQELALMYGLLEQRMPYYQYSPVPVLERDGVRLYWDLPIATDRTILANKPDIVVMDRARSRVFLVDITVPHDENLVKAETEKKRKYLDLAHEIVDMWGVGSAEIIPIVISANGLIPVSLAHHLRQLGIRDGSLAARMQKAVLLDSARIVRRFLSLQP

SEQ ID NO: 14616 - protein, 1181 aa, Mellicta athalia
MEDKFGKRIGPLPGGRQGASGAGAGRGSMRAASHPRRPAPPPDRSANPPSPPDGLAPTEPQGTQHSAPAAGGVRRMRWTLKMNESVMRAYYRAVGRETGRTGYRAVMHREFLLLEPTVTVTEQNLADRARFIQRKGVFDAAELERFRREAAPEDEPVSAERDAVSTQQESVRSEAPVEAITEGAVAQKVEQMRGILQEAISETRGAPLEQRPRLSRLPLNAATRSAIEAANRLLPPYLEGSLGLEDTGSILFGAALAVHRLVGAKTQEPGLATHKNSDVPAWKRRIERRISLARALIGRLLAFRSGNTRPRIVRSVRMAFNGLGVSLNQPDIADRLTERIDGLKQRIAAWGKRIRRYSERVERFRQNRLFVSDQKRFYRKLENPIPCSAFLKPSMVDLVAFWRNIWSREVEHEEGPWIAAVQDACAKVEPMNPIAISTEDVSGAVRRAPNWKSPGADGLHHYWLKGLSVCHATLARQYQEAIDRKTLPNLFTTGITHLAPKSTNTADPTNYRPITCLSSIYKTLTSVLSCKISRHIGEFNILSAAQNGCRGGGRGTKELLLIDSVAGQLVRRNRRNFSAAWIDYKKAFDSVPHSWLLRVLELYKIDEAVRDFLGVCMGQWSTILCLQVERLTGADDPIRIRRGIFQGDCLSPLWFCLSLNPLSTLLERSGTGFQFRRGGTKVSHLLYMDDLKLLAPNAEHLQELLKITTEFSGSIRMQLGVDKCAVVHVDRGQVTQSAQFSLELTSFKTLSEAESYRYLGMSQCIGVKEVDMKQAVCEVFFGRLTKVLRSYLSGANKVRAYNTWVMPTLLYTFGILRWTQTELDALDRRVRTTMTHHRVHHPKSSVMRLYISRKCGGRGMLNAKTMHNREVCSLRAYFETRRDSAMHGDVVVCDKGLTPLSLANENWQKPVVLSTSDRETVWMEKELHGRFYKALHAPHVDSKASVQWLRFGDLFGETEGFVCAIQDQVVKTNNYRKHILKDGTPDFCRACRHPGESLRHVLSGCSTLANTEYLHRHNQVAKILHQELALMYGLLEQRMPYYQYTPVPVLERDGVRLYWDLPIATDRTILANKPDIVVMDRARSRVFLVDITIPHDENLVKAETEKKRKYLDLAHEIVDMWGVGSAEIIPIVISANGLIPVSLAHHLRQLGIRDGSLAGRMQKAVLLDSARIVRRFLSLQP

SEQ ID NO: 14617 - protein, 1181 aa, Mellicta athalia
MEDKFGKRIGPLPGGRQGASGAGAGRGSMRAASHPRRPAPPPDRSANPPSPPDGLAPTEPQGTQHSAPAAGGVRRMRWTPKMNESVMRAYYRAVGRETGRTGYRAVMHCEFLLLEPTVTVTEQNLADRARYIQRKGVFDAAELERFRREAAPEDEPVSAERDAVSTQQESVRSEAPVEAITEGAVAQIVEQMRGILQEAIYETRGAPLEQRPRLSRLPLNAATRSAIEAANRLLPAYLEGSLGLEDTGSILFGAALAVHRLVGAKTQEPGLATHKNSDVPAWKRRIERRISLARALIGRLLAFRSGNTRPRIVRSVRMAFNGLGVSLNQPDIADRLTERIDGLKQRIAAWGKRIRRYSERVERFRQNRLFVSDQKRFYRKLENPIPCSAFLKPSTVDLVAFWRNIWSREVEHEEGPWIAAVQDACAKVEPMNPIAISTEDVSGAVRRAPNWKSPGADGLHHYWLKGLSVCHATLARQYQEAIDRKTLPNLFTTGITHLAPKSTNTADPTNYRPITCLTSIYKTLTSVLSCKISRHIGEFNILSAAQNGCRGGGRGTKELLLIDSVAGQLVRRNRRNFSAAWIDYKKAFDSVPHSWLLRVLELYKIDEAVRDFLGVCMGQWSTILCLQGERLTGADDPIRIRRGIFQGDCLSPLWFCLSLNPLSTLLERSGTGFQFRRGGTKVSHLLYMDDLKLLAPNAARLQELLKITTEFSGSIRMQLGVDKCAVVHVDRGQVTQSAQFSLELTSFKTLSEAESYRYLGMSQCIGVKEVDMKQAVCEVFFGRLTKVLRSYLSGANKVRAYNTWVMPTLLYTFGILRWTQTELDALDRRVRTTMTHHRVHHPKSSVMRLYISRKCGGRGMLNAKTMHNREVCSLRAYFETRRDSAMHGDVVVCDKGLTPLSLANENWQKPVVLSTSDRETVWMEKELHGRFYKALHAPHVDSKASVQWLRFGDLFGETEGFVCAIQDQVVKTNNYRKHILKDGTPDFCRACRHPGESLRHVLSGCSALANTEYLHRHNQVAKILHQELALMYGLLEQRMPYYQYTPVPVLERDGVRLYWDLPIATDRTILANKPDIVVMDRARSRVFLVDITIPHDENLVKAETEKKRKYLDLAHEIVDMWGVGSAEIIPIVISANGLIPVSLAHHLRQLGIRDGSLAGRMQKAVLLDSARIVRRFLSLQP

SEQ ID NO: 14618 - protein, 1190 aa, Maniola jurtina
MMMDTNMRNVRIRPLPGGRQGAPGAGAGRSSMRAASTISRPALPPSRSTHPSSPPDGLAPTGPTRAQSSAPAAGGVRRMRWTSLMNENVMRAYYRATGGETGRTGYRAAMYREFLLLEPNLTVTEQNLADRARYIQRSNIFNATELERLRREAVPEVSAPTTEQIVSQAAPARDETITISQDLPVEEDTEGTVSLDIERMRGILEEAISEIRSAPLENRPRLSRLTLNVATRDVIEAINKMLPQHLESSTGLGDTASIIFGAALAVHRFIGAKTPGPGRAAATRRSAEPAWKKRIEHRITLTRVLIGRLQSFRSGNTRPRIVRSVRVAFNGCGVRLDQPDITQKLTERIDDLKQKIAAWGNRIRRYSARVERFQQNRLFSSDQKRFYKRLECPAVCSTSQRPDPADLVAFWRGVWSREVEHEEGPWIAAVEEACARIEPMNPVAISAEDVAGAVRRAPNWKSPGPDGLHHYWLKGFSVCHATLARQFQEALEQRALPSLFTTGITHLAPKSTDATDPAKYRPITCLTTIYKTLTSVLSLKISRHIDENNIMSGAQNGCRGGGRGTKELLLIDSVAGQLVKRNRRNFSAAWIDYKKAFDSVPHSWLLRVLELYKVDSAVRDFLEACMGQWSTILCLHGERLAAADDQIRIGRGIFQGDCLSPLWFCLSLNPLSTLLEGSGTGFQFRRGGTKVPHLLYMDDLKLLAPNATRLRELLNITTEFSNSIRMELGLDKCAVIHVERGQVTHSAEISLEPSNIKTLSEAESYRYLGMSQSLGVKEADMKQSVCEAFFGRLTKICKSYLSGANKVRAYNGWVMPVLMYTFGVLSWTQTELDALDRKVRTTMTLYRMHHPKSSVMRLYIPRKCGGRGVLSVKTMHNREISNLRTYFETMRGSPMHREVIECDKGLTPLSLAKTEWQKPVVLSTSDRETVWKEKELHGRFFKALNEPHVDKKASVQWLRFGDLFGETEGFVCAIQDQVVKTRNYRKYILKDGTHDICRACRHPGESLRHVLSGCSALANTEYLHRHNQAAKILHQELALKYGLLDERVPYYRYTPVPVLERDGVRLYWDRSIITDRTILANKPDIVVVDRAQSRVFLVDITIPYDENLVRAETEKKRKYLDLAHEVSDMWHVESTEIIPIVISANGLIPVSLAHHLRRLGFRGSSLAARMQKAVLLDSARIVRRFLNLSP

SEQ ID NO: 14619 - protein, 942 aa, Maniola jurtina
MQYIYNNNSIIFGAALAVHRFIGAKTPGPGRAAATRRSAEPAWKKRIEHRITLARVLIGRLQSFRSGNTRPRIVRSVRVALNGCGVRLDQPDIAQKLTERIDDLKQKIAAWGNRIRRYSVRVERFQQNRLFSSDQKRFYKRLECPAVCSTSQRPDPADLVAFWRGVWSREVEHEEGPWIAAVEEACARIEPMNPVAISAEDVAGAVRRAPYWKSPGPDGLHHYWLKGFSVCHATLARQFQEALEQRALPSLFTTGITHLAPKSTNATNPAKYRPITCLTTIYKTLTSVLSLKISRHIDENNIMSGAQNGCRGGGRGTKELLLIDSVAGQLVKRNRRNFSAAWIDYKKAFDSVPHSWLLRVLELYKVDSAVRDFLETCMGQWSTILCLHGERLAAADDRIRIGRGIFQGDCLSPLWFCLSLNPLSTLLEGSGTGFQFRRGGTKVPHLLYMDDLKLLAPNATRLKELLSITTEFSNSIKMELGLDKCAVMHVERGQVTHSAEISLEPSNIKSLSEAESYRYLGMSQSLGVKEADMKQSVCEAFFGRLTKICKSYLSGANKVRAYNGWVMPVLMYTFGVLSWTQTELDALDRKVRATMTLYRMHHPKSSVMRLYIPRKCGGRGVLSAKTMHNREISNLRTYFETMRGSPMHREVIECDKGLTPLSLAKTEWQKPVVLSTSDRETVWKEKELHGRFFKALNEPHVDKKASVQWLRFGDLFGETEGFVCAIQDQVVKTRNYRKYILKDGTHDICRACRHPGESLRHVLSGCSALANTEYLHRHNQAAKILHQELALKYGLLDERLPYYKYTPVPVLERDGVRLYWDRSIITDRTILANKPDIVVVDRAQSRVFLVDITIPYDENLVRAETEKKRKYLDLAHEVSDMWHVESTEIIPIVISANGLIPVSLAHHLRRLGFRGSSLAARMQKAVLLDSARIVRRFLSLSP

SEQ ID NO: 14620 - protein, 1189 aa, Maniola jurtina
MMDNKTRNERIGPLPGGRQGAPGAGAGRGSMRAASATSRPALPPSRSTYPSSPPDGLAPTGSTRARSSAPAAGGVRRMRWTSLMNENVMRAYYRATGGETGRTGYRAAMYREFLLLEPNLTVTEQNLADRARYIQRSNIFNATELERLRREAVPEVSAPTAEQIVSQAAPVREETITTSQDLPVEEDTEGTISLDIERMRGILEEAISEIRSAPLENRPRLSRLTLNVATRDVIEAINKMLPQHLEGSTGLGDTASIIFGAALAVHRFIGAKTPGPGRAAATRRSAEPTWKKRIEHRITLARVLIGRLQSFRSGNTGPRIVRSVRVAFNGCGVRLDQPDIAQKLTERIDDLKQKIAAWGNRIRRYSARVERFQQNRLFSSDQKRFYKRLECPAVCSTSQRPDPADLVAFWRGVWSREVEHEEGPWIAAVEEACARIEPMNPVAISAEDVAGAVRRAPNWKSPGPDGLHHYWLKGFSVCHATLARQFQEALEQRALPSLFTTGITHLAPKSTDATDPAKYRPITCLTSIYKTLTSVLSLKISRHIDENNIMSGAQNGCRGGGRGTKELLLIDSVAGQLVKRNRRNFSAAWIDYKKAFDSVPHSWLLRVLELYKVDSAVRDFLEACMGQWSTILCLHGERLAAADDRIRIGRGIFQGDCLSPLWFCLSLNPLSTLLEGSGTGFQFRRGGTKVPHLLYMDDLKLLAPNATRLRELLNITTEFSNSIRMELGLDKCAVIHVERGQVTHSAEISLEPSNIKTLSEAESYRYLGMSQSLGVKEADMKQSVCEAFFGRLTKICKSYLSGANKVRAYNGWVMPVLMYTFGVLSWTQTELDALDRKVRTTMTLYRMHHPKSSVMRLYIPRKCGGRGVLSVKTMHNREISSLRTYFETMRGSPMHREVIECDKGLTPLSLAKTEWQKPVVLSTSDRETVWKEKELHGRFFKALNEPHVDKKASVQWLRFGDLFGETEGFVCAIQDQVVKTRNYRKYILKDGTHDICRACRHPGESLRHVLSGCSALANTEYLHRHNQAAKILHQELALKYGLLDERLPYYRYTPVPVLERDGVRLYWDRSIITDRTILANKPDIVVVDRAQSRVFLVDITIPYDENLVRAETEKKRKYLDLAHEVSDMWHVESTEIIPIVISANGLIPVSLAHHLRRLGFRGSSLAARMQKAVLLDSARIVRRFLNLSP

SEQ ID NO: 14621 - protein, 1191 aa, Maniola hyperantus
MMMDNNIRNMRIGPLPGGRQGAPGAGAGRSSIRAASITTSRPAPLPSRPTNPSSPPEGLAPTGSTRAQFSAPAAGGVRRMRWTSLMNENVMRAYYRATGGETGRTSYRAAMYREFLLLEPNLTVTEQNLADRARYIQRSNIFNATELERLRREAVPEVSAPTTEQIDSQAMPAPEETNTISQDLPVEDGTEETVSLDIERMRGILEEAISEIRSAPLESRPRLSRLTLNVATRDVIEAINKMLPQHLESSTGLGDTASILFGAALAVHRFIGAKTPGPGRAAAARRSAEPAWKKRIERRITLARVLIGRLQSFRSGNTRPRIVRSVGIAFNGCGVRLDQPDIAQKLTERIDDLKQKIAAWGNRIRRYSERVERFQQNRLFLSDQKRFYKRLECPAVCSTSQRPDPADLVTFWRGVWSREVEHEEGPWIEAIEEACASIEPMNPIAISTEDVAGAVRRAPNWKSPGPDGLHHYWLKGFSVCHATLARQFQEALEQRTLPSLFTTGITHLAPKSTDTTDPAKYRPITCLTTIYKTLTSVLSLKISRHVDENNIISGAQNGCRGGSRGTKELLLIDSVAGQLVKRNRRNFSAAWIDYRKAFDSVPHSWLLRVLELYKVDGTVRDFLGECMGQWSTILCLHGERLADADDRIRIGRGIFQGDCLSPLWFCLSLNPLSTLLEGSGTGFQFRRGGTKVPHLLYMDDLKLLAPNATRLQELLNVTTDFSNSIRMELGLDKCAVMHVERGQVTHSAEMSLEPSTIRTLSEAESYRYLGMSQSLGVKETDVKQSVCEAFFGRLTKICKSYLSGANKIRAYNGWVMPVLMYTFGVLRWTQTELDALDRKVRTTMTLYRMHHPKSSVMRLYIPRKCGGRGVLSVKTMHNREIANLRTYFETMRGSPMHREVIECDKGLTPLSLAQTEWQKPVVLSTSDREAVWREKELHGRFFKALNEPHVDKKASVQWLRFGDLFGETEGFVCAIQDQVVKTRNYRKYILKDGTHDICRACRHPGESLRHVLSGCSALANTEYLHRHNQAAKILHQELALKYGLLDERLPYYKYTPVPVLERDGVRLYWDRSIITDRTILANKPDIVVVDRAQSRVFLVDITIPYDENLVRAETEKKRKYLDLAHEVSDMWHVESTEIIPIVISANGLIPVSLAQHLRRLGFRGSSLAARMQKAVLLDSARIVRRFLHLSP

SEQ ID NO: 14622 - protein, 1191 aa, Maniola hyperantus
MMMDNNIRNVRIGPLPGGRQGAPGAGAGRSSIRAASITTSRPAPLPSRPTNPSSPPEGLAPTGSTRAQFSAPAAGGVRRMRWTSLMNENVMRAYYRATGGETGRTGYRAAMYREFLLLEPNLTVTEQNLADRARYIQRSNIFNATELERLRREAVPEVSAPTTEQIDSQAVPAPEETNTISQDLPVEDGTEETVSLDIERMRGILEEAISEIRSAPLESRPRLSRLTLNVATRDVIEAINKMLPQHLESSTGLGDTASILFDAALAVHRFIGAKTPGPGRAAAARRSAEPAWKKRIERRITLARVLIGRLQSFRSGNTRPRIVRSVGIAFNGCGVRLDQPDIAQKLTERIDDLKQKIAAWGNRIRRYSERVERFQQNRLFLSDQKRFYKRLECPAVCSTSQRPDPADLVTFWRGVWSREVEHEEGPWIEAIEEACASIEPMNPIAISTEDVAGAVRRAPNWKSPGPDGLHHYWLKGFSVCHATLARQFQEALEQRTLPSLFTTGITHLAPKSTDTTDPAKYRPITCLTTIYKTLTSVLSLKISRHVDENNIISGAQNGCRGGSRGTKELLLIDSVAGQLVKRNRRNFSAAWIDYRKAFDSVPHSWLLRVLELYKVDGTVRDFLGECMGQWSTILCLHGERLADADDRIRIGRGIFQGDCLSPLWFCLSLNPLSTLLEGSGTGFQFRRGGTKVPHLLYMDDLKLLAPNATRLQELLNVTTDFSNSIRMELGLDKCAVMHVERGQVTHSAEMSLEPSTIRTLSEAESYRYLGMSQSLGVKETDVKQSVCEAFFGRLTKICKSYLSGANKIRAYNGWVMPVLMYTFGVLRWTQTELDALDRKVRTTMTLYRMHHPKSSVMRLYIPRKCGGRGVLSVKTMHNREIANLRTYFETMRGSPMHREVIECDKGLTPLSLAQTEWQKPVVLSTSDREAVWREKELHGRFFKALNEPHVDKKASVQWLRFGDLFGETEGFVCAIQDQVVKTRNYRKYILKDGTHDICRACRHPGESLRHVLSGCSALANTEYLHRHNQAAKILHQELALKYGLLDERLPYYKYTPVPVLERDGVRLYWDRSIITDRTILANKPDIVVVDRAQSRVFLVDITIPYDENLVRAETEKKRKYLDLAHEVSDMWHVESTEIIPIVISANGLIPVSLAQHLRRLGFRGSSLAARMQKAVLLDSARIVRRFLHLSP

SEQ ID NO: 14623 - protein, 1182 aa, Melitaea cinxia
MMEDNLERRIGPLPGGRQGASGAGAGRGSMRAASQPRRPAPPPDMSAYPPSLPVGLATTESQGTQHSLPAAGGVRRMRWTPKMNENVMRAYYRAVGRETGRTGYRAVMHREFLLLEPTLTVTEQNLADRARYIQRKGIFDAAELERFRREAAPEVEPVSTVRNEVSTQQEGVRSEAPVEAITEGAVAQKVEQMRGILHEAISETRGAPLEMRPRLSRLPLNAATRHAIEAANRLLTPYLETSFSLEDTGSILFGAALAVHRLVGAKTQESGRATHKNSDVPAWKRRIERRINLARALIGRLLAFRSGNTRPRIVRSVRMAFNGLGISLDQPDIADKLTERIDGLKQRIAAWGKRIRRYSERVERFRQNRLFVSDQKRFYRKLENPISGSASLKPSTVDLVAFWRNIWSGEVEHEEGPWIAAVQDACAKIEPMNPIAISTKDVSGAVRRAPNWKSPGADGLHHYWLKGLSVCHATLARQYQEAIDRKTLPNLFTTGITHLAPKSTNTADPTNYRPITCLTSIYKTLTSVLSCKISRHIGEFNILSAAQNGCRGGGRGTKELLLIDSVAGQLVRRNRRNFSAAWIDYKKAFDSVPHSWLLRVLELYKIDQAVRDFLGVCKGQWSTILCLQGERLTGAGDPIRIRRGIFQGDCLSPLWFCLSLNPLSTLLERSGTGFQFRRGGTKVSHLLYMDDLKLLAPNAARLQELLKITTEFSSSIRMQLGVDKCAVVHVDRGQVTQSSQLSLELTSFKTLSEAESYRYLGMSQCIGVKEVDMKQAVCEIFFGRLTKVLRSYLSGANKVRAYNAWVMPTLLYTFGILRWTQTELDALDRRVRTTMTYHRVHHPKSSVMRLYIPRKCGGRGMLSAKTMHNREVCSLRAYFETRRDSALHGDVSMCDKGLTPLALAKENWQKPVVLSTSDRETIWMEKELHGRFYKALHAPHVDSKASVQWLRFGDLFGETEGFVCAIQDQVVKTNNYRKHVLKDGTPDFCRACRHPGESLRHVLSGCSALANTEYLHRHNQVAKILHQELALMYGLLEQRMPYYQYSPVPVLEHDGVRLYWDLPITTDRTILANKPDIVVMDRARSRVFLVDITVPHDENLVKAETEKKRKYLDLAHEIVDMWGVGSAEIIPIVISANGLIPVSLAHHLRQLGIRDGSLAARMQKAVLLDSARIVRRFLSLQP

SEQ ID NO: 14624 - protein, 1182 aa, Melitaea cinxia
MMEDDLQRRIGPLPGGRQGASGAGAGRGSMRAASQPRRPAPPPDRSGYPPSPPVGLATTESQGTQHSLPAAGGVRRMRWTPKMNESVMRAYYRAVGRETGRTGYRAVMHREFLLLEPTLTVTEQNLADRARYIQRKGIFDAAELERFRREAAPEVEPVSTVCNEVSTQQEGVRSEAPVEVITEGAVAQKVEQMRGILQEAISETRGAPLEMRPRLSRLPLNVATRNAIEAANRLLPPYLEGSLSLEDTGSILFGAALAVHRLVGAKTQESGRATHKNSDVPAWKRRIERRINLARALIGRLLAFRSGNTRPRIVRSVRMAFNGLGISLDQPDIADKLTERIDGLKQRIAAWGKRIRRYSERVERFRQNRLFVSDQKRFYRKLENPISSSASLKPSTVDLVAFWRNIWSGEVEHEEGPWIAAVQDACAKIEPMNPIAISTEDVSGAVRRAPNWKSPGADGLHHYWLKGLSVCHATLARQYQEAIDRKTLPNLFTTGITHLAPKSTNTADPTNYRPITCLTSIYKTLTSVLSCKISRHIGEFNILSAAQNGCRGGGRGTKELLLIDSVAGQLVRRNRRNFSAAWIDYKKAFDSVPHSWLLRVLELYKVDQAVRDFLGVCMGQWSTILCLQGERLTGADDPIRIRRGIFQGDCLSPLWFCLSLNPLSTLLERSGTGFQFRRGGTKVSHLLYMDDLKLLAPNAARLQELLKITTEFSSSIRMQLGVDKCAVVHVDRGQVTQSSQLSLELTSFKTLSEAESYRYLGMSQCIGVKEVDMKQAVCEIFFGRLTKVLRSYLSGANKVRAYNAWVMPTLLYTFGILRWTQTELDALDRRVRTTMTHHRMHHPKSSVMRLYIPRKCGGRGMLSAKTMHNREVCSLRAYFEMRRDSALHGDVSMCDKGLTPLALAKENWQKPVVLSTSDRETVWMEKELHGRFYKALHAPHVDSKASVQWLRFGDLFGETEGFVCAIQDQVVKTNNYRKHVLKDGTPDFCRACRHPGESLRHVLSGCSVLANTEYLHRHNQVAKILHQELALMYGLLEQRMPYYQYSPVPVLERDGVRLYWDLPIATDRTILANKPDIVVMDRARSRVFLVDITVPHDENLVKAETEKKRKYLDLAHEIVDMWGVGSAEIIPIVISANGLIPVSLAHHLRQLGIRDGSLAARMQKAVLLDSARIVRRFLSLQP

SEQ ID NO: 14625 - protein, 1182 aa, Melitaea cinxia
MMEDDLQRRIGPLPGGRQGASGAGAGRGSMRAASQPRRPAPPPDRSGYPPSPPVGLATTESQGTQHSLPAAGGVRRMRWTPKMNESVMRAYYRAVGRETGRTGYRAVMHREFLLLEPTLTVTEQNLADRARYIQRKGIFDAAELERFRREAAPEVEPVSTVRNEVSTQQEGVRSEAPVEVITEGAVAQKVEQMRGILQEAISEIRGAPLEMRPRLSRLPLNAATRNAIEAANRLLPPYLEGSLSLEDTGSILFGAALAVHRLVGAKTQESGRATHKNSDVPAWKRRIERRINLARALIGRLLAFRSGNTRPRIVRSVRMAFNGLGISLDQPDIADKLTERIDGLKQRSAAWGKRIRRYSERVERFRQNRLFVSDQKRFYRKLENPISSSASLKPSTVDLVAFWRNIWSGEVEHEEGPWIAAVQDACAKIEPMNPIAISTEDVSGAVRRAPNWKSPGADGLHHYWLKGLSVCHATLARQYQEAIDRKTLPNLFTTGITHLAPKSTNTADPTNYRPITCLTSIYKTLTSVLSCKISRHIGEFNILSAAQNGCRGGGRGTKELLLIDSVAGQLVRRNRRNFSAAWIDYKKAFDSVPHSWLLRVLELYKVDQAVRDFLGVCLGQWSTILCLQGERLTGADDPIRIRRGIFQGDCLSPLWFCLSLNPLSTLLERSGTGFQFRRGGTKVSHLLYMDDLKLLAPNAARLQELLKITTEFSSSIRMQLGVDKCAVVHVDRGQVTQSSQLSLELTSFKTLSEAESYRYLGMSQCIGVKEVDMKQAVCEIFFGRLTKVLRSYLSGANKVRAYNAWVMPTLLYTFGILRWTQTELDALDRRVRTTMTHHRMHHPKSSVMRLYIPRKCGGRGMLSAKTMHNREVCSLRAYFETRRDSALHGDVSMCDKGLTPLALAKENWQKPVVLSTSDRETVWMEKELHGRFYKALHAPHVDSKASVQWLRFGDLFGETEGFVCAIQDQVVKTNNYRKHVLKDGTPDFCRACRHPGESLRHVLSGCSALANTEYLHRHNQVAKILHQELVLMYGLLEQRMPYYQYSPVPVLERDGVRLYWDLPIATDRTILANKPDIVVMDRARSRVFLVDITVPHDENLVKAETEKKRKYLDLAHEIVDMWGVGSAEIIPIVISANGLIPVSLAHHLRQLGIRDGSLAARMQKAVLLDSARIVRRFLSLQP

SEQ ID NO: 14626 - protein, 751 aa, Mellicta athalia
MNPIAISTEDVSDAVRRAPNWKSPGADGLHHYWLKGLSVCHATLARQYQEAIDRKTLPNLFATGITHLAPKSTNTADPTNYRPITCLTSIYKTLTSVLSCKISRHIRESNILSAAQNGCRGGGRGSKELLLIDSVAGQLVRRNRRNFSAAWIDYKKAFDSVPHSWLLRVLELYKIDKAVRDFLGVCMGQWSTILCLQGERLTGADDPIRIRRGIFQGDCLSPLWFCLSLNPLSTLLERSGTGFQFRRGGTKVSHLLYMDDLKLLAPKAARLQELLKITTEFSGSIRMQLGVDKCAVVHVDRGQVTQSAQFSLELTSFKTLSEAESYRYLGMSQCIGVKEVDMKQAVCEVFFGRLTKVLRSYLSGANKVRAYNAWVMPTLLYTFGILRWTQTELDALDRRVRTTMTHHRVHHPKSSVMRLYISRKCGGRGMLSAKTMHNREVCSLRAYFEARRDSAMHGDVVVCDKGLTPLSLANENWQKPVILSTSDRETVWMEKELHGRFYKALHAPHVDSKASVQWLRFGDLFGETEGFVCAIQDQVVKTNNYRKHILKDGTPDFCRACRHPGESLRHVLSGCSVLANTEYLHRHNQAAKILHQELALMYGLLEQRMPYYQYSPVPVLERDGVRLYWDLPIATDRTILANKPDIVVMDRARSRVFLVDITIPHDENLVKAETEKKRKYLDLAHEIVDMWDVRSAEIIPIVISANGLIPVSLAHHLRQLGIRDSSLAARMQKAVLLDSARIVRRFLSLQP

SEQ ID NO: 14627 - protein, 1181 aa, Mellicta athalia
MEDKFGKHIGPLPGGRQGASGAGAGRGSMRAASHPRRPAPPPDRSANPPSPPDGLAPTEPQGTQHSAPAAGGVRRMRWTLKMNESVMRAYYRAVGRETGRTGYRAVMHREFLLLEPTVTVTEQNLADRARFIQRKGVFDAAELERFRREAAPEDEPVSAERDAVSTQQESVRSEAPVEAITEGAVVQKVEQMRGILQEAISETRGAPLEQRPRLSRLPLNAATRSAIEAANRLLPPYLEGSLGLEDTGSILFGAALAVHRLVGAKTQEPGLATHKNSDVPAWKRRIERRISLARALIGRLLAFRSGNTRPRIVRSVRMAFNGLGVSLNQPDIADRLTERIDGLKQRIAAWGKRIRRYSERVERFRQNRLFVSDQKRFYRKLENPIPCSAFLKPSTVDLVAFWRNIWSREVEHEEGPWIAAVQDACAKVEPMNPIAISTEDVSGAVRRAPNWKSPGADGLHHYWLKGLSVCHATLARQYQEAIDRKTLPNLFTTGITHLAPKSTNTADPTNYRPITCLSSIYKTLTSVLSCKISRHIGEFNILSAAQNGCRGGGRGTKELLLIDSVAGQLVRRNRRNFSAAWIDYKKAFDSVPHSWLLRVLELYKIDETVRDFLGVCMGQWSTILCLQGERLTGADDPIRIRRGIFQGDCLSPLWFCLSLNPLSTLLERSGTGFQFRRGGTKVSHLLYMDDLKLLAPNAARLQELLKITTEFSGSIRMQLGVDKCAVVHVDRGQVTQSAQFSLELTSFKTLSEAESYRYLGMSQCIGVKEVDMKQAVCEVFFGRLTKVLRSYLSGANKVRAYNTWVMPTLLYTFGILRWTQTELDALDRRVRTTMTHHRVHHPKSSVMRLYISRKCGGRGMLNAKTMHNREVCSLRAYFETRRDSAMHGDVVVCDKGLTPLSLANENWQKPVVLSTSDRETVWMEKELHGRFYKALHAPHVDSKASVQWLRFGDLFGETEGFVCAIQDQVVKTNNYRKHILKDGTPDFCRACRHPGESLRHVLSGCSALANTEYLHRHNQVAKILHQELALMYGLLEQRMPYYQYTPVPVLERDGVRLYWDLPIATDRTILANKPDIVVMDRARSRVFLVDITIPHDENLVKAETEKKRKYLDLAHEIVDMWGVGSAEIIPIVISANGLIPVSLAHHLRQLGIRDGSLAGRMQKAVLLDSARIVRRFLSLQP

SEQ ID NO: 14628 - protein, 1190 aa, Maniola jurtina
MMMEHNIRNARIGPLPGGRQGAPGAGAGRSSIRAASTTSRPALPPSRSTHPSSPPDGLAPTGPTRAQSSAPAAGGVRRMRWTSLMNENVMRAYYRATGGETGRTGYRAAMYREFLLLEPNLTVTEQNLADRARYIQRSNIFNAAELERLRREAVPEVSAPTTVQIVSQAEPVREEATTTLQDLPVEEDTGETVSLDIERMRRILEEAISEIRNAPLENRPRLSRLTLNVATRDVIEAINKMLPQHLESSTGLGDTASIIFGAALAVHRFIGAKTPGPGRAAATRRSAEPAWKKRIEHRITLARVLIGRLQSFRSGNTRPRIVRSVRVALNGCGVRLDQPDIAQKLTERIDDLKQKIAAWGNRIRRYSARVERFQQNRLFSSDQKRFYKRLECPAVCSTSQRPDPTDLIAFWRGVWSREVEHEEGPWIAAVEEACARIEPMNPVAISAEDVAGAVRRAPNWKSPGPDGLHHYWLKGFSVCHATLARQFQEALEQRALPSLFTTGITHLAPKSTDATDPAKYRPITCLTTIYKTLTSVLSLKISRHIDENNIMSGAQNGCRGGSRGTKELLLIDSVAGQLVKRNRRNFSAAWIDYKKAFDSVPHSWLLRVLELYKVDSAVRDFLETCMGQWSTILCLHGERLAAADDRIRIGRGIFQGDCLSPLWFCLSLNPLSTLLEGSGTGFQFRRGGTKVPHLLYMDDLKLLAPNATRLKELLSITTEFSNSIKMELGLDKCAVMHVERGQVTHSAEISLEPSNIKSLSEAESYRYLGMSQSLGVKEADMKQSVCEAFFGRLTKICKSYLSGANKVRAYNGWVMPVLMYTFGVLSWTQTELDALDRKVRATMTLYRMHHPKSSVMRLYIPRKCGGRGVLSAKTMHNREISNLRTYFETMRGSPMHREVIECDKGLTPLSLAKTEWQKPVVLSTSDRETVWKEKELHGRFFKALNEPHVDKKASVQWLRFGDLFGETEGFVCAIQDQVVKTRNYRKYILKDGTHDICRACRHPGESLRHVLSGCSALANTEYLHRHNQAAKILHQELALKYGLLDERLPYYKYTPVPVLERDGVRLYWDRSIITDRTILANKPDIVLVDRAQSRVFLVDITIPYDENLVRAEAEKKRKYLDLAHEVSDMWHVESTEIIPIVISANGLIPVSLAHHLRRLVFRGSSLAARMQKAVLLDSARIVRRFLSLSP

SEQ ID NO: 14629 - protein, 957 aa, Hyposmocoma kahamanoa
MLPSFLEESVGLWETDSILFAAAMTVCQFVGVRMPPTRPGGNHQVGSTTHRTSTKPAWMRRIEGSIAWARVLIGKLTSFRSGVTRPRVMRFVREAFPGENIFVDSPEFARKLTGRIDDLKQKITAWGKRIRRYSERVKRYRQNRLFMSDQKKFYRTLERPDVVLTGERPDKAEVVAFWRRLWSQPVDHEEGPWFEAVEGACATIAPMNPISISEEDVAVAVRKAPNWKSPGPDGLHHYWLKGFWCCHATLARQFQSALESGTLPNFLTTGVTHLAPKSDATVDPSQYRPITCLCTIYKTLISVLSSKISQHIVDNSVMSEVQNGCRGGSRGSKELLLIDAVAGQLVRRNRRNFSAAWIDYRKAFDSVPHSWLSRVLELYKIDSAVRHFLGQCMGCWRTILSLDGRRMTDADDRIEIRRGIFQGDCLSPLWFCLALNPLSTLLERSGTGFQFRRGGPRMPHLLYMDDLKLYGPTADRLTELLTITNDFSSSVRMELGIDKCAVVHVERGRVMHSDGINIGTNHLRVLSETETYRYLGMSQTIGVKEADVKQGVCEVFYGRLKNVLNSYLSGVNKIRAYNSWVMPVLMYTFGVLKWTQTELDALDRRVRTTMTSHRMHHPRSSVMRLYVPRKCGGRGLLSVKTMHNREICSLRNYFLTMTDDVIRGEVVTCDKGLTPLSLAKEEWRDPVVLSTSDRESVWKEKELHGRFFKVLHEPFMDRKASLHWLRFGDLFGETEGFVCAIQDQVIKTRNYWKYILKDGTVDICRACGRPGESLRHIVSGCSALANTEYLHRLNQAAKILHQELALKYGLVQQRLPYYKYSPEPILEDDRTKIYWDRSIITDRTILANKPDIVILDRSQSRVFLVDVTIPHDEGLVKAETEKRRKYLDLAHEITDMWDVASTEIIPIVLSANGLIPVSLSNSLRRLDFCGVSLPAQMQKAVLLDTARIVRRFLDLSP

SEQ ID NO: 14630 - protein, 1021 aa, Maniola hyperantus
MTLMCLRVSLSSSQPVEDGTEETVSLDIERMRGILEEAISEIRSAPLESRPRLSRLTLNVATRDVIEAINKMLPQHLESSTGLGDTASILFGAALAVHRFIGVKTPGPGRAAAARRSAEPAWKKRIERRITLARVLIGRLQSFRSGNTRPRIVRSVGIAFNGCGVRLNQPDIAQKLTERIDDLKQKIAAWGNRIRRYLERVERFQQNRLFLSDQKRFYKRLECPAVCSTSQRPDPADLVTFWRGVWSREVEHEEGPWIEAIEEACASIEPMNPIAISTEDVAGAVRRAPNWKSPGPDGLHHYWLKGFSVCHATLARQFQEALEQRTLPSLFTTGITHLAPKSTDTTDPAKYRPITCLTTIYKTLTSVLSLKISRHVDENNIIFGAQNGCQGGSRGTKELLLIDSVAGQLVKRNRRNFSTAWIDYRKAFDSVPHSWLLRVLELYKVDGTVRDFLGECMGQWSTILCLHGERLADADDRIRIGRGIFQGDCLSPLWFCLSLNPLSTFLEGSGTGFQFRRGGTKVPHLLYMDDLKLLAPNATRLQELLNVTTDFSNSIRMELGLDKCAVMHVERGQVTHSAEMSLEPSTIRTLSEAESYRYLGMSQSLGVKETDVKQSVCEAFFGRLTKICKSYLSGANKIRAYNGWVMPVLMYTFGVLRWTQTELDALDRKVRTTMTLYRMHHPKSSVMRLYIPRKCGGRGVLSVKTMHNREIANLRTYFETMRGSPMHREVIECDKGLTPLSLAQTEWQKPVVLSTSDREAVWREKELHGRFFKALNEPHVDKKASVQWLRFGDLFGETEGFVCAIQDQVVKTRNYRKYILKDGTHDICRACRHPGESLRHVLSGCSALANTEYLHRHNQAAKILHQELALKYGLLDERLPYYKYTPVPVLERDGVRLYWDRSIITDRTILANKPDIVVVDRAQSRVFLVDITIPYDENLVRAETEKKRKYLDLAHEVSDMWHVESTEIIPIVISANGLIPVSLAQHLRRLGFRGSSLAARMQKAVLLDSARIVRRFLHLSP

SEQ ID NO: 14631 - protein, 1114 aa, Maniola hyperantus
MRWTSLMNENVMRAYYRATGGETGRTGYRAAMYREFLLLEPNLTVTEQNLADRARYIQRSNIFNATELERLRREAVPEVSAPTTEQIVSQVARPSVREETITTSQDLPVEEDTEETVSLDIERMRRILEETISEIRSAPLENRPRLSRLTLNVATRDVIEAINKMLPQHLESSTGLGDTASILFGAALAVHRFIGAKTPGPGRAAAARRSAEPAWKKRIEHRITLARVLIGRLQSFRSGNTRPRIVRSVRVAFNGCGVRLDQPDIAQKLTERIDDLKQKIAAWGNRIRRYSERVERFQQNRLFLSDQKRFYKRLECPAVCSTSQRPDPADLVTFWRGVWSREVEHEEGPWIAAIEEACASIEPMNPIAISAEDVAGAVRRAPNWKSPGPDGLHHYWLKGFSVCHATLARQFQEALEQRTLPSLFTTGITHLAPKSTDTTDPAKYRPITCLTTIYKTLTSVLSLKISRHVDENNIISGAQNGCRGGSRGTKELLLIDSVAGQLVKRNRRNFSAAWIDYRKAFDSVPHSWLLRVLELYKVDGTVRDFLGECMGQWSTILCLHGERLADADDRIRIGRGIFQGDCLSPLWFCLSLNPLSTLLEGSGTGFQFRRGGTKVPHLLYMDDLKLLAPNATRLQELLNVTTDFSNSIRMELGLDKCAVMHVERGQVTHSAEMSLEPSTIRTLSEAESYRYLGMSQSLGVKETDVKQSVCEAFFGRLTKICKSYLSGANKIRAYNGWVMPVLMYTFGVLRWTQTELDALDRKVRTTMTLYRMHHPKSSVMRLYIPRKCGGRGVLSVKTMHNREIANLRTYFETMRGSPMHREVIECDKGLTPLSLAQTEWQKPVVLSTSDREAVWREKELHGRFFKALNEPHVDKKASVQWLRFGDLFGETEGFVCAIQDQVVKTRNYRKYILKDGTHDICRACRHPGESLRHVLSGCSALANTEYLHRHNQAAKILHQELALKYGLLDERLPYYKYTPVPVLERDGVRLYWDRSIITDRTILANKPDIVVVDRAQSRVFLVDITIPYDENLVRAETEKKRKYLDLAHEVSDMWHVESTEIIPIVISANGLIPVSLAQHLRRLGFRGSSLAARMQKAVLLDSARIVRRFLHLSP

SEQ ID NO: 14632 - protein, 990 aa, Melitaea cinxia
MRRILQEAISETRGAPLEMRPRLSRLPLNAATRIAIEAANRLLPPYLEGSLSLEDTGSILFGAALAVHRLVGAKTQESGRATHKNSDVPAWKRRIERRINLARALIGRLLAFRSGNTRPRIVRSVRMAFNGLGISLDQPDIADKLTERIDGLKQRIAAWRKRIRRYSERVERFRQNRLFVSDQKRFYRKLENPISSSASLKPSTVDLIAFWRNIWSGEVEHEEGPWIAAVQDACAKIEPMNPIAISTEDVSGAVRRAPNWKSPGADGLHHYWLKGLSVCHATLARQYQEAIDRKTLPNLFTTGITHLAPKSTNTADPTNYRPITCLTSIYKTLTSVLSCKISRHIGEFNILSAAQNGCRGGGRGTKKLLLIDSVAGQLVRRNRRNFSAAWIDYKKAFDSVPHSWLLRVLELYKIDQAVRDFLGVCMGQWSTILCLQGERLTGADDPIRIRRGIFQGDCLSPLWFCLSLNPLSTLLERSGTGFQFRRGGTKVSYLLYMDDLKLLAPNAARLQELLKITTEFSSSIRMQLGVDKCAVVHVDRGQVTQSSQLSLELTSFKTLSEAESYRYLGMSQCIGVKEVDMKQAVCEIFFGRLTKVLRSYLSGANKVRAYNAWVMPTLLYTFGILRWTQTELDTLDRRVRTTMTYHRVHHPKSSVMRLYIPRKCGGRRMLSAKTMHNREVCSLRAYFETRRDSALHGDVSMCDKGLTPLALAKENWQKPVVLSTSDRETVWMEKELHGRFYKALHAPHIDSKASVQWLRFGDLFGETEGFVCAIQDQVVKTNNYRKHVLKDGTPDFCRACRHPGESLRHVLSGCSALANTEYLHRHNQVAKILHQELALMYGLLEQRMPYYQYSPVPVLERDGVRLYWDLPIATDRTILANKPDIVVMDRARSRVFLVDITVPHDENLVKAETEKKRKYLDLAHEIVDMWGVGSAEIIPIVISANGLIPVSLAHHLRQLGIRDGSLTARMQKAVLLDSARIVRRFLSLQP

SEQ ID NO: 14633 - protein, 1151 aa, Melitaea cinxia
MMEDNLERRIGPLPGGRQGASGAGAGRGSMRAASQPRRPAPPPDRSGYPPSPPVGLATTESQGTQHSLPAAGGVRRMRWTPKMNESVMRAYYRAVGRETGRTGYRAVMHREFLLLEPTLTVTEQNLADRARYIQRKGRRIFDAAELERFRREAAPEVEPVSTVRNEVSTQQEGVRSEAPVEMITEGAVAQKVEQMRGILQEAISETRGAPLEMRPRLSRLLLNAATRNAIEAANRLLPPYLEGSLSLEDTGSILFGAALAVHRLVGAKTQESGRATHKNSDVPAWKRRIERRINLARALIGRLLAFRSGNTRPRIVRSVRMAFNGLGISLDQPDIADKLTERIDGLKQRIAAWGKRIRRYSERVERFRQNRLFVSDQKRFYRKLENPISSSASLKPSTVDLVAFWRNIWSGEVEHEEGPWIAAVQDACAKIEPMNPIAISTEDVSGAVRRALNWKSPGADGLHHYWLKGLSVCHATLARQYQEAIDRKTLPNLFTTGITHLAPKSTNTADPTNYRPITCLTSIYKTLTSVLSCKISRHIGEFNILSAAQNGCRGGGRGTKELLLIDSVAGQLVRRNRRNFSAAWIDYKKAFDSVPHSWLLRVLELYKVDQAVRDFLGVCMGQWSTILCLQGERLTGADDPIRIRRGIFQGDCLSPLWFCLSLNPLSTLLERSGTGFQFRRGGTKVSHLLYMDDLKLLAPNAARLQELLKITTEFSSSIRMQLGVDKYAVVHVDRGQVTQSSQLSLELTSFKTLSEAESYRYLGMSQCIGVKEVDMKQAVCEIFFGRLTKVLRSYLSGANKVRAYNAWVMPTLLYTFGILRWTQTELDALDRRVRTTMTHHRMHHPKSSVMRLYIPRKCGGRGMLSAKTMHNREVCSLRAYFETRRDSALHGDVSMCDKGLTPLALAKENWQKPVVLSTSDRETVWMEKELHGRFYKALHAPHVDSKASVQWLRFGDLFGETEGFVCAIQDQVVKTNNYRKHVLKDGTPDFCRACRHPGESLRHVLSGCSALANTEYLHRHNQVAKILHQELALMYGLLEQRMPYYQYSPVPVLERDGVRLYWDLPIATDRTILANKPDIVVMDRARSRVFLVDITVPHDENLVKAETEKKRKYLDLAHEIVDMWGVGSAEIIPIVISANGLIPVSLAHHLR

SEQ ID NO: 14634 - protein, 1189 aa, Maniola jurtina
MMDNEIRNERIGPLPGGRQGAPGAGAGRGSMRAASATSRPALPPSRSTYPSSPPDGLAPTGSTRAQSSAPAAGGVRRMRWTSLMNENVMRAYYRATGGETGRTGYRAAMYREFLLLEPNLTVTEQNLADRARYIQRSNIFNATELERLRREAVPEVSAPTAEQIVSQAAPVREETITTSQDLPVEEDTEGTVSLDIERMRGILEEAISEIRSAPLENRPRLSRLTLNVATRDVIEAINKMLPQHLESSTGLGDTASILFGAALAVHRFIGTKTLGPRRAAATRHSAEPAWKRRIEHRITLARVLIGRLQSFRSGNARPRIVRSVRVAFNGCGVRLDQPDIAQKLTERIDDLKQKIAAWGNRIRRYSARVERFQQNRLFSSDQKRFYKRLECPAVCSTSQRPDPADLVTFWRGVWSREVEHEEGPWIAAVEEACARIEPMSPVAISAEDVAGAVRRAPNWKSPGPDGLHHYWLKGFSVCHATLARQFQEALEQGALPSLFTTGITHLAPKSTDATDPAKYRPITCLTTIYKTLTSVLSLKISRHIDENNIMSGAQNGCRGGSRGTKELLLIDSVAGQLVKRNRRNFSAAWIDYKKAFDSVPHSWLLRVLELYKVDSAVRDFLEACMGQWSTILCLHGERLAAADDRIRIGRGIFQGDCLSPLWFCLSLNPLSTLLEGSGTGFQFRRGGTKVPHLLYMDDLKLLAPNATRLKELLNITTAFSNSIKMELGLDKCAVIHVERGQVTHSAEISLEPSNIKTLSEAESYRYLGMSQSLGVKEADMKQSVCEAFFGRLTKICKSYLSGANKVRAYNGWVMPVLMYTFGVLSWTQTELDALDRKVRTTMTLYRMHHPKSSVMRLYIPRKCGGRGVLSVKTMHNREISNLRTYFETMRGSPMHRDVIECDKGLTPLSLAKTEWQKPVVLSTSDRETVWKEKELHGRFFKALNEPHVDKKASVQWLRFGDLFGETEGFVCAIQDQVVKTRNYRKYILKDGTHDICRACRHPGESLRHVLSGCSALANTEYLHRHNQAAKILHQELALKYGLLDERLPYYRYTPVPVLERDGVRLYWDRSIITDRTILANKPDIVVVDRAQSRVFLVDITIPYDENLVRAETEKKRKYLDLAHEVSDMWHVESTEIIPIVISANGLIPVSLAHHLRRLGFRGSSLAARMQKAVLLDSARIVRRFLNLSP

SEQ ID NO: 14635 - protein, 1189 aa, Maniola jurtina
MMDNEIRNERIGPLPGGRQGAPGAGAGRGSMRAASATSRPALPPSRSTYPSSPPDGLAPTGSTRAQSSAPAAGGVRRMRWTSLMNENVMRAYYRATGGETGRTGYRAAMYREFLLLEPNLTVTEQNLADRARYIQRSNIFNATELERLRREAVPEVSAPTAEQIVSQAAPVREETITTSQDLPVEEDTEGTVSLDIERMRGILEEAISEIRSAPLENRPRLSRLTLNVATRDVIEAINKMLPQHLESSTGLGDTASILFGAALAVHRFIGAKTLGPRRAAAARHSAEPAWKRRIEHRITLARVLIGRLQSFRSGNTRPRIVRSVRVAFNGCGVRLDQPDIAQKLTERIDDLKQKIAAWGNRIRRYSARVERFQQNRLFSSDQKRFYKRLECPAVCSTSQRPDPADLVTFWRGVWSREVEHEEGPWIAAVEEACARIEPMSPVAISAEDVAGAVRRAPNWKSPGPDGLHHYWLKGFSVCHATLARQFQEALEQRALPSLFTTGITHLAPKSTDATDPAKYRPITCLTTIYKTLTSVLSLKISRHIDENNIMSGAQNGCRGGSRGTKELLLIDSVAGQLVKRNRRNFSAAWIDYKKAFDSVPHSWLLRVLELYKVDSAVRDFLEACMGQWSTILCLHGERLAAADDRIRIGRGIFQGDCLSPLWFCLSLNPLSTLLEGSGTGFQFRRGGTKVPHLLYMDDLKLLAPNATRLKELLNITTEFSKSIKMELGLDKCAVIHVERGQVTHSAEISLEPSNIKTLSEAESYRYLGMSQSLGVKEADMKQSVCEAFFGRLTKICKSYLSGANKVRAYNGWVMPVLMYTFGVLSWTQTELDALDRKVRTTMTLYRMHHPKSSVMRLYIPRKCGGRGVLSVKTMHNREISNLRTYFETMRGSPMHRDVIECDKGLTPLSLAKTEWQKPVVLSTSDRETVWKEKELHGRFFKALNEPHEDKKASVQWLRFGDLFGETEGFVCAIQDQVVKTRNYRKYILKDGTQDICRACRHPGESLRHVLSGCSALANTEYLHRHNQAAKILHQELALKYGLLDERLPYYRYTPVPVLERDGVRLYWDRSIITDRTILANKPDIVVVDRAQSRVFLVDITIPYDENLVRAETEKKRKYLDLAHEVSDMWHVGSTEIIPIVISANGLIPVSLAHHLRRLGFRGSSLAARMQKAVLLDSARIVRRFLNLSP

SEQ ID NO: 14636 - protein, 1189 aa, Maniola jurtina
MMDNKTRNERIGPLPGGRQGAPGAGAGRSSMRAASAISRPALPPSRSTYPSSPPDGLAPTGSTRAQSSAPAAGGVRRMRWTSLMNENVMRAYYRATGGETGRTGYRAAMYREFLLLEPNLTVTEQNLADRARYIQRSNIFNATELERLRREAVPEVSAPTAEQIVSQAAPVREETITTLQDLPVEEDTEGTVSLDIERMRGILEEAISEIRSAPLENRPRLSRLTLNVATRDVIEAINKMLPQHLESSTGLGDTASIIFGAALAVHRFIGAKTPGPGRAAATRRSAEPAWKKRIEHRITLARVLIGRLQSFRSGNTRPRIVRSVRVAFNGCGVRLDQPDIAQKLTERIDDLKQKIAAWGNRIRRYSARVERFQQNRLFSSDQKRFYKRLECPAVCSTSQRPDPADLVAFWRGVWSREVEHEEGPWIAAVEEACARIEPMNPVAISAEDVAGAVRRAPNWKSPGPDGQHHYWLKGFSVCHATLARQFQEALEQRALPSLFTTGITHLTPKSTDATDPAKYRPITCLTTIYKTLTSVLSLKISRHIDENNIMSGAQNGCRGGGRGTKELLLIDSVAGQLVKRNRRNFSAAWIDYKKAFDSVPHSWLLRVLELYKVDSAVRDFLEACMGQWSTILCLHGERLAAADDRIRIGRGIFQGDCLSPLWFCLSLNPLSTLLEGSGTGFQFRRGGTKVPHLLYMDDLKLLAPNATRLRELLNITTEFSNSIRMELGLDKCAVIHVERGQVTHSAEISLEPSNIKTLSEAESYRYLGMSQSLGVKEADMKQSVCEAFFGRLTKICKSYLSGANKVRAYNGWVMPVLMYTFGVLSWTQTELDALDRKVRTTMTLYRMHHPKSSVMRLYIPRKCGGRGVLSVKTMHNREISNLRTYFETMRGSPMHREVMECDKGLTPLSLAKTEWQKPVVLSTSDRETVWKEKELHGRFFKALNEPHVDKKASVQWLRFGDLFGETEGFVCAIQDQVVKTRNYRKYILKDGTHDIWRACRHPGESLRHVLSGCSALANTEYLHRHNQAAKILHQELALKYGLLDERLPYYRYTPVPVLERDGVRLYWDRSIITDRTILANKPDIVVVDRAQSRVFLVDITIPYDENLVRAETEKKRKYLDLAHEVSDVWHVESTEIIPIVISANGLIPVSLAHHLRRLGFRGSSLAARMQTAVLLDSARIVRRFLNLSP

SEQ ID NO: 14637 - protein, 1201 aa, Hyposmocoma kahamanoa
MMEHNSYDERIGPLPGGNRRGAPGAGAGRGSMRAPSRGRLARPSGQSTHDPSPPVGMVSAGAGATWSQQSVPASGGVRRRMAWTIDMNKNAMRAYFRASGSGTGRTGYRAVMYREFLRLEPTLTVTEQNLADRVRYLQRSGLFSAAELEQLRCEAVPPLEEEPPRLERSPVPSREVHREPSAQQPDTGGTESDWGTVALDLEALRSSLEETILEYRHVPLERRPRLPRVPLSIKVRDAVGAINNMLPSFLEESADLWETYSILFAAAMTVCQFVGVRMPPTRPGGNHQVGSTTPRTSTKPAWMRRIEGRIAWARVLIGKLTSFRSGVTRPRVMRFVREAFPGENIFVDSPEFARKLTGRIDDLKQKIAAWGKRIRRYSERVKRYRQNRLFMSDQKKFYRTLERPDVVLTGERPDKAEVVAFWRRLWSQPVDHEEGPWFEAVERACATIAPMNPISISEEDVAVAVRKAPNWKSPGPDGLHHYWLKGFWCCHATLARQFQSALESGTLPNFLTTGVTHLAPKSDATVDPSQYRPITCLCTIYKTLTSVLSSKISQHIVDNSVMSEAQNGCRGGSRGSKELLLIDAVAGQLVRRNRRNFSAAWIDYRKAFDSVPHSWLSRVLELYKIDSAVRHFLGQCMGCWRTILSLDGRRMTDADDRIEIRRGIFQGDCLSPLWFCLALNPLSTLLERSGTGFQFRRGGPRMPHLLYMDDLKLYGPTADRLTELLTITNDFSSSVRMELGIDKCAVVHVEKGRVMHSNGINIGTNHLPVLSETETYRYLGMSQTIGVKEADVKQGVCEVFYGRLKNVLNSYLSGVNKIRAYNSWVMPVLMYTFGVLKWTQTELDALDRRVRTTMTSHRMHHPRSSVMRLYVPRKCGGRGLLSVKTMHNREICSLRNYFLTMTDDVIRGEVVTCDKGLTPLSLAKEEWRDPVVLSTSDRESVWKEKELHGRFFKVLHEPFMDRKASLHWLRFGDLFGETEGFVCAIQDQVIKTRNYRRYILKDGTVDICRACGRPGESLRHIVSGCSALANTEYLHRHNQAAKILHQELALKYGLVQQRLPYYKYSPEPILEDDRTKIYWDRSIITDRTILANKPDIVILDRSQSRVFLVDVTIPHDEGLVKAETEKRRKYLDLAHEITDMWDVASTEIIPIVLSANGLIPVSLSNSLRRLDFCGVSLPAQMQKAVLLDTARIVRRFLDLSP

SEQ ID NO: 14638 - protein, 1182 aa, Melitaea cinxia
MMEDDLERRIGPLPGGRQGASGAGAGRGSMRAASQPRRPAPPPDRSGYPPSPPVGLATTESQGTQHSLPAAGGVRRMRWTPKMNESVMRAYYRAVGRETGRTGYRAVMHREFLLLEPTLTVTEQNLADRARYIQRKGIFDAAELERFRREAAPEVEPVSTVRNEVSTQQEGVRSEAPVEVITEGAVAQKVEQMRGILQEAISETRGAPLEMRLRLSRLPLNAATRNAIEAANRLLPPYLEGSLSLEDTGSILFGAALAVHRLVGAKTQESGRATHKNSDVPAWKRRIERRINLARALIGRLLAFRSGNTRPRIVRSVRMAFNGLGISLDQPDIADKLTERIDGLKQRIAAWGKRIRRYSERVERFRQNRLFVSDQKRFYRKLENPIPGSASLKPSTVDLVAFWRNIWSGEVEHEEGPWIAAVQDACAKIEPMNPIAISTEDVSGAVRRAPNWKSPGADGLHHYWLKGLSVCHATLARQYQEAIDRKTLPNLFTTGITYLAPKSTNTADPTNYRPITCLTSIYKTLTSVLSCKISRHIGEFNILSAAQNGCRGGGRGTKELLLIDSVAGQLVRRNRRNFSAAWIDYKKAFDSVPHSWLLRVLELYKIDQAVRDFLGVCMGQWSTILCLQGERLTGADDPIRIRRGIFQGDCLSPLWFCLSLNPLSTLLERSGTGFQFRRGGTKVSHLLYMDDLKLLAPNAARLQELLKITTEFSSSIRMQLGVDKCAVVHVDRGQVTQSSQLSLELTSFKTLSEAESYRYLGMSQCIGVKEVDMKQAVCEIFFGRLTKVLRSYLSGANKVRAYNAWVMPTLLYTFGILRWTQTELDALDRRVRTTMTHHRMHHPKSSVMRLYIPRKCGGRGMLSAKTMHNREVCSLRAYFETRRDSPLHGDVSMCDKGLTPLALAKENWQKPVVLSTSDRETVWMEKELHGRFYKALHAPHVDSKASVQWLRFGDLFGETEGFVCAIQDQVVKTNNYRKHVLKDGTPDFCRACRHPGESLRHVLSGCSALANTEYLHRHNQVAKILHQELALMYGLLEQRMPYYQYSPVPVLERDGVRLYWDLPIATDRTILANKPDIVVMDRARSRVFLVDITVPHDENLVKAETEKKRKYLDLAHEIVDMWGVGSAEIIPIVISASGLIPVSLAHHLRQLGIRDGSLAARMQKAVLLDSARIVRRFLSLQP

SEQ ID NO: 14639 - protein, 1182 aa, Melitaea cinxia
MMEDDLQRRIGPLPGGRQGASGAGAGRGSMRAASQPRRPAPPPDRSGYPPSPPVGLATTESQGTQHSLPAAGGVRRMRWTPKMNESVMRAYYRAVGRETGRTGYRAVMHREFLLLEPTLTVTEQNLADRARYIQRKGIFDAAELERFRREVAPEVEPVSTVRNEVSTQQEGVRSEAPVEVITEGAVAQKVEQMRGILQEAISETRGAPLEMRPRLSRLPLNAATRNAIEAANRLLPPYLEGSLSLEDTGSILFGAALAVHRLVGAKTQESGRATHKNSDVPAWKRRIERRINLARALIGRLLAFRSGNTRPRIVRSVRMAFNGLGISLDQPDIADKLTERIDGLKQRIAAWGKRIRRYSERVERFRQNRLFVSDQKRFYRKLENPISSSASLKPSTVDLVAFWRNIWSGEVEHEEGPWIAAVQDACAKIEPMNPIAISTEDVSGAVRRAPNWKSPGADGLHHYWLKGLSVCHATLARQYQEAIDRKTLPNLFTTGITHLAPKSTNTADPTNYRPITCLTSIYKTLTSVLSCKISRHIGEFNILSAAQNGCRGGGRGTKELLLIDSVAGQLVRRNRRNFSAAWIDYKKAFDSVPHSWLLRVLELYKVDQAVRDFLGVCMGQWSTILCLQGERLTSADDPIRIRRGIFQGDCLSPLWFCLSLNPLSTLLERSGTGFQFRRGGTKVSHLLYMDDLKLLAPNAARLQELLKITTEFSSSIRMQLGVDKCAVVHVDRGQVTQSSQLSLELTSFKTLSEAESYRYLGMSQCIGVKEVDMKQAVCEIFFGRLTKVLRSYLSGANKVRAYNAWVMPTLFYTFGILRWTQTELDALDRRVRTTMTHHRMHHPKSSVMRLYIPRKCGGRGMLSAKTMHSREVCSLRAYFETRRDSALHGDVSMCDKGLTPLALAKENWQKPVVLSTSDRETVWMEKELHGRFYKALHAPHVDSKASVQWLRFGDLFGETEGFVCAIQDQVVKTNNYRKHVLKDGTPDFCRACRHPGESLRHVLSGCSVLANTEYLHRHNQVAKILHQELALMYGLLEQRMPYYQYSPVPVLERDGVRLYWDLPIATDRTILANKPDIVVMDRARSRVFLVDITVPHDENLVKAETEKKRKYLDLAHEIVDMWGVGSAEIIPIVISANGLIPVSLAHHLRQLGIRDGSLAARMQKAVLLDSARIVRRFLSLQP

SEQ ID NO: 14640 - protein, 1188 aa, Maniola jurtina
MDNEIRNERIGPLPGGRQGAPGAGAGRGSMRAASATSRPALPPSRSTYPSSPPDGLAPTGSTRAQSSAPAAGGVRRMRWTSLMNENVMRAYYRATGGETGRTGYRAAMYREFLLLEPNLTVTEQNLADRARYIQRSNIFNATELERLRREAVPEVSAPTAEQIVSQAAPVREETITTSQDLPVEEDTEGTVSLDIERMRGILEEAISEIRSAPLENRPRLSRLTLNVATRDVIEAINKMLPQHLESSTGLGDTASILFGAALAVHRFIGAKTLGPRRAAATRHSAEPAWKRRVERRITLARVLIGRLQSFRSGNARPRIVRSVRVAFNGCGVRLDQPDIAQKLTERIDDLKQKIAAWGNRIRRYSARVERFQQNRLFSSDQKRFYKRLECPAVCSTSQRPDPADLVTFWRGVWSREVEHEEGPWIAAVEEACARIEPMSPVAISAEDVAGAVRRAPNWKSPGPDGLHHYWLKGFSVCHATLARQFQEALEQRALPSLFTTGITHLAPKSTDATDPAKYRPITCLTTIYKTLTSVLSLKISRHIDENNIMSGAQNGCRGGSRGTKELLLIDSVAGQLVKRNRRNFSAAWIDYKKAFDSVPHSWLLRVLELYKVDSAVRDFLEACMGQWSTILCLHGERLAAADDRIRIGRGIFQGDCLSPLWFCLSLNPLSTLLEGSGTGFQFRRGGTKVPHLLYMDDLKLLAPNATRLKELLNITTEFSKSIKMELGLDKCAVIHVERGQVTHSAEISLEPSNIKTLSEAESYRYLGMSQSLGVKEADMKQSVCEAFFGRLTKICKSYLSGANKVRAYNGWVMPVLMYTFGVLSWTQTELDALDRKVRTTMTLYRMHHPKSSVMRLYIPRKCGGRGVLSVKTMHNREISNLRTYFETMRGSPMHRDVIECDKGLTPLSLAKTEWQKPVVLSTSDRETVWKEKELHGRFFKALSEPHVDKKASVQWLRFGDLFGETEGFVCAIQDQVVKTRNYRKYILKDGTQDICRACRHPGESLRHVLSGCSALANTEYLHRHNQAAKILHQELALKYGLLDERVPYYRYTPVPVLERDGVRLYWDRSIITDRTILANKPDIVVVDRAQSRVFLVDITIPYDENLVRAETEKKRKYLDLAHEVSDMWHVESTEIIPIVISANGLIPVSLAHHLRRLGFRGSSLAARMQKAVLLDSARIVRRFLNLSP

SEQ ID NO: 14641 - protein, 1190 aa, Maniola jurtina
MMMDRNIRNVRIGPLPGGRQGAPGAGAGRSSIRAASTISRPALPPSRSTHPSSPPDGLAPTGSTRAQSSAPAAGGVRRMRWTSLMNENVMRAYYRATGGETGRTGYRAAMYREFLLLEPNLTVTEQNLADRARYIQRSNIFNATELERLRREAVPEVSAPTTEQIVSQAAPARDETVTISQDLPVEEDTEGTVSLDIERMRGILEEAISEIRSAPLENRPRLSRLTLNVATRDVIEAINKMLPQHLESSTGLGDTASIIFGAALAVHRFIGAKTPGLGRAAATRRSAEPAWKKRIERRITLARVLIGRLQSFRSGNTRPRIVRSVGVAFSGCGVRLDQPDIAQKLTERIDDLKQKIAAWGNRIRRYSARVERFQQNRLFSSDQKRFYKRLECPAVCSTSQRPDPADLVAFWRGVWSREVEHEEGPWIAAVEEACARIEPMNPVAISAEDVAGAVRRAPNWKSPGPDGLHHYWLKGFSACHATLARQFQEALEQRALPSLFTTGITHLAPKSTDATDPAKYRPITCLTTIYKTLTSVLSLKISRHIDENNIMSGAQNGCRGGGRGTKELLLIDSVAGQLVKRNRRNFSAAWIDYKKAFDSVPHSWLLRVLELYKVDSAVRDFLEACMGQWSTILCLHGERLAAADDRIRIGRGIFQGDCLSPLWFCLSLNPLSTLLEGSGTGFQFRRGGTKVPHLLYMDDLKLLAPNATRLRELLNITTEFSNSIRMELGLDKCAVVHVERGQVTHSAEINLEPSNIKTLSEAESYRYLGMSQSLGVKEADMKQSVCEAFFGRLTKVCKSYLSGANKVRAYNGWVMPVLMYTFGVLSWTQTELDALDRKVRTTMTLYRMHHPKSSVMRLYIPRKCGGRGVLSVKTMHNREISNLRTYFETMRGSPMHREVIECDKGLTPLSLAKTEWQKPVVLSTSDRETVWKERELHGRFFKALNEPHVDKKASVQWLRFGDLFGETEGFVCAIQDQVVKTRNYRRYILKDGTHDICRACRHPGESLRHVLSGCSALANTEYLHRHNQAAKILHQELALKYGLLDERLPYYKYTPVPVLERDGVRLYWDRSIITDRTILANKPDIVVMDRAQSRVFLVDITIPYDENLVRAETEKKRKYLDLAHEVSGMWHVESTEIIPIVISANGLIPVSLAHHLRRLGFRGSSLAARMQKAVLLDSARIVRRFLSLSP

SEQ ID NO: 14642 - protein, 1188 aa, Boloria selene
MMENKNKNARLGPLPGGRQGAPGAGAGRDSIRAASTINRPALPPSRPTHPSPPPEGLVPTGSSRTQTSGPAAGGVRRMRWTSQMNENVMRAYYRATGGETGRTGYRAAMYREFLLLEPTLTVTEQNLADRARYIQRSNILNATELERLRREAVPEVRTLTTEQIVPPAATGEDVLTNFHDLPIEGGTQETVALDTERMRRILEEAVSEIRSAPLENRPRLSRLTLNVATREIIEAINQLLPQHLESSIGLEDTASILFGAALAVHRFVGARTPGPERDTAARRKAQPAWKKRIERRINHARGLIGRLQSFRSGNTRPRIVRSVRIAFDGLGVRLDQPDIAQKLTERIDDLKQRIAAWGSRIRRYSERVERFQQNRLFSSDQKRFYRTLECPAVCSTSQKPSPADLVAFWRNVWSTEVQHEEGPWIAAVEEACAVIKPMSPVAISAEDVVDAVRRAPNWKSPGPDGLHHYWLKGFSVCHATLARQFQEALEQRTLPNLFTTGITHLAPKSTDAADPAKYRPITCLTTIYKTLTSVLSSKISRHVDENNIISGAQNGCRGRSRGTKELLLIDSVAGQLVKRNRRNFSAAWIDYKKAFDSVPHSWLSRVLELYKVDSTVRNFLGKCMGQWSTILSLHGERITAADDRIRIRRGIFQGDCLSPLWFCLSLNPLSSLLESSGTGFQFRRGGTRVPHLLYMDDLKLLAPNANRLQELLKITSEFSNSIRMKLGLDKCAVLHVVRGQVTHSAEINLEPSSIRTLSEAESYRYLGMSQSIGVNEADMKQSVCEAFFGRLTKVCKSFLSGANKVRAYNGWVMPVLMYTFGVLRWTQTELDILDRRVRTTMTLYRMHHPKSSVMRLYIPRKCGGRGLLSVKTMHNREIANLRTYFETKRESPMHREVVECDKGLTPLSLAKTEWQAPVVLSTSNRETVWKEKELHGRFFKALNEPNVDKKASVQWLRFGDLFGETEGFVCAIQDQVVKTRNYRKYILKDGTHDICRACGHPGESLRHVLSGCSALANTEYLHRHNQAAKILHQELALKHGLLNERLPYYKYTPMPVLERDGVRLYWDRSIITDRTILANKPDIVLMDRAQSRVFLMDITVPYDENLVRAETEKKRKYLDLAHEVSTMWHVESTEIIPIVISANGLIPVSLAHYLRRLGFRDSSLAARLQKAVLLDSARIVRRFLNLSP

SEQ ID NO: 14643 - protein, 1188 aa, Elymnias hypermnestra
MIMDLFCRDKRLGPLLGGRQGTSGAGAGRDSMRAASSTSSTRRPARPPRRPTNPSSPPEGLASAGTARTQNPEPAAGGVRRMRWTSLMNENVMRAYYRATGGETGRTGYRTAMYREFLLLEPNLTVTEQNLADRARYIQRSNIFSATELERLRCEAVPEVTPPATQQTAATAIVHQELENNQDLLVDGDAEGTVSLDIEKMRGILEEAISESRSAPLEGRPRLSRLTLSAATRDVIEAINKLLPQYFEGSTGLSETASILYGAALAVHRFIGVKIREPGRTANTSSAVPAWKRRIERRITHARRLIGRLQSFRSGNTRPRIVRSVRIAFNGLDVRLDQPDIAQKLTERIDDLKQKIAAWGNRIRRYSERVERFHQNRLFVSDQKRFYERLQRPASCSSSQRPASADLVAYWRSIWSLEVEHEEGSWTAAVEEACAVIQPMNPVAITPEDVVGAVRRAPNWKSPGPDGLHHYWLKGFSACHATLARQFQEAMAQKALPNLFTTGITHLAPKTSNAADPTKYRPITCLSSIYKTLTSILSRKISYHIDENNIMSVAQNGCRGGSRGTKELLLIDSVAGQLVKRNRRNFSAAWIDYKKAFDSVPHSWLLRVLELYKIDGTLRDFLGECMRQWSTILCLHGERLTAADDRIRIRRGIFQGDCLSPLWFCLSLNPLSFLLERSGTGFQFRRGGARVPHLLYMDDLKLLAPNAPRLQELLKITSDFSNSIRMEMGLDKCAVLHVERGQVSHSAEINLEPTQLKTLSETETYRYLGMSQCMGVKEADMKQSVCEVFYGRLTKILKSYLSGANKIRAYNGWVMPVLLYTFGILRWTQTELDALDRRVRTTMTFHRMHHPKSSVMRLYIPRKCGGRGLLSAKTMHNREISSLRTYFETKRESPMHLEVIECDKGLTPLSLANENWQRPAVLSTSDREAVWKGKEMHGRFFKALHEPHVNRKASVQWLRFGDLFGETEGFVCAIQDQVVKTRNYRKYILKDGTHDICRACRHPGESLRHVLSGCSALANTEYLHRHNQAAKILHQELALMYGLLDERLPYYRYQPVPVLERDGVRLYWDRSIITDRTILANKPDIVIMDRAQSRVFLVDITIPYDENLVRAETEKKRKYLDLAHEITAMWGVGSTETIPIVISANGLIPVSLAHHLRRLGFRGSSLAARMQKAVLLDSARIVRRFLSL

SEQ ID NO: 14644 - protein, 1145 aa, Hyposmocoma kahamanoa
MVSAGAGATRSQQSVPASGGVRRRMAWTIDMNKNAMRAYFRASGSGTGRTGYRAVMYREFIRLEPTLTVTEQNLADRVRYLQRSGLFSAAELEQLRCEAVPPLEEEPPRLERSPVLSREVHREPSAQQPDTGGTESDWGTAALDLEALRSSLEETILEYRHVPLERRPRLPRVPLSIKVRDAVGAINNMLPSFLEESVGLWETDSILFAAAMTVCQFVGVRIPPTRPGGNHQVGSTTPRTSTKPAWMRRIEGRIAWARVLIGKLTSFRSGVTRPRVMRFVREAFPGENIFVDSPEFARKLTGRIDDLKQKIAAWGKRIRRYSERVKRYRQNRLFMSDQKKFYRTLERPDVVLTGERPDKAEVVAFWRRLWSQPVDHEEGPWFEAVEGACATIAPMNPISISEEDVAVAVRKAPNWKSPGPDGLHHYWLKGFWCCHATLARQFQSALESGTLPNFLTTGVTHLAPKSDATVDPSQYRPITCLCTIYKTLTSVLSSKISQHIVDNSVMSEAQNGCRGGSRGSKELLLIDAVAGQLVRRNRRNFSAAWIDYRKAFDSVPHSWLSRVLELYKIDSAVRHFLGQCMGCWRTILSLDGRRMTDADDRIEIRRGIFQGDCLSPLWFCLALNPLSTLLERSGTGFQFRRGGPRMPHLLYMDDLKLYGPTADRLTELLTITNDFSSSVRMELGIDKCAVVHVERGRVMHSDGINIGTNHLRVLSETETYRYLGMSQTIGVKEADVKQGVCEVFYGRLKNVLNSYLSGVNKIRAYNSWVMPVLMYTFGVLKWTQTELDALDRRVRTTMTSHRMHHPRSSVMRLYVPRKCGGRGLLSVKTMHNREICSLRNYFLTMTDDVIRGEVVTCDKGLTPLSLAKEEWRDPVVLSTSDRESVWKEKELHGRFFKVLHEPFMDRKASLHWLRFGDLFGETEGFVCAIQDQVIKTRNYRKYILKDGTVDICRACGRPGESLRHIVSGCSALANTEYLHRHNQAAKILHQELALKYGLVQQRLPYYKYSPEPILEDDRTKIYWDRSIITDRTILANKPDIVILDRSQSRVFLVDVTIPHDEGLVKAETEKRRKYLDLAHEITDMWDVASTEIIPIVLSANGLIPVSLSNSLRRLDFCGVSLPAQMQKAVLLDTARIVRRFLDLSP

SEQ ID NO: 14645 - protein, 990 aa, Junonia neildi
MGRILEEAISEIRSAPLENRPRLSRLTLNVATRDVIEAINQMLPQYLKHSTGLDDTASILFGAALAVHRFMGVKTQERGRTTLRRSTEPAWKRRIEHRITLARALIGRLQSFRSGNTRPRIVRSVRIAFNGLGVRLDQPDIAQKLTERIDDLKQKIAAWGNRIRRYSERVERFQQNRLFSSDQKRFYKKLECPAVCSTSQRPSPADLVAFWRSVWSREVEHEEGPWIAAVEEACASIEPMNPVAISSEDVAGAVRRAPNWKSPGPDGLHHYWLKGFSLCHATLARQFQEALEQRALPSLFTTGITHLAPKSTDTADPAKYRPITCLTTIYKTLTSVLSLKISRHVDENNIMSGAQNGCRGGGRGTKELLLIDSVAGQLVKRNRRNFSAAWIDYKKAFDSVPHSWLLRVLELYKVDSTVRDFLGECMGQWSTILCLHGERLAAAGDRIKIRRGIFQGDCLSPLWFCLSLNPLSSLLERSGTGFQFRRGGTKVPHLLYMDDLKLLAPNATRLRELLNITTEFSNSIRMELGLDKCAVLHVERGQVTHSAEINLEPSNIRTLSEAESYRYLGMSQSVGVKEADVKQSVCEVFFGRLTKVCKSYLSGANKVRAYNGWVMPVLMYTFGVLRWTQTELDALDRKVRTTMTLYRMHHPKSSVMRLYIPRKCGGRGVLSVKTMHNREISSLRTYFETKRECPMHRDVIECDKGLTPLSLAKLEWQKPVVLSTSDRETVWKERELHGRFFKALNEPHVDKKASVQWLRFGDLFGETEGFVCAIQDQVVKTRNYRKYILKDGTHDICRACRHPGESLRHVLSGCSALANTEYLHRHNQAAKILHQELALKYGLLDERVPYYRYTPVPVLERDGVRLYWDRSIITDRTILANKPDIVLMDRAQSRVFLVDITIPHDENLVRAETEKKRKYLDLAHEVTGMWHVESTETIPIVISANGLIPVSLAHHLRRLGFRGSSLAAKMQKAVLLDSARIVRRFLSLSP

SEQ ID NO: 14646 - protein, 1000 aa, Melitaea cinxia
MIIIIIIIIIMRGILHEAISETRGAPLEMRPRLSRLPLNAATRHAIEAANRLLPPYLETSFSLEDTGSILFGAALAVHRLVGAKTQESGRATHKNSDVPAWKRRIERRINLARALIGRLLAFRSGNTRPRIVRSVRMAFNGLGISLDQPDIADKLTERIDGLKQRIAAWGKRIRRYSERVERFRQNRLFVSDQKRFYRKLENPISGSASLKPSTVDLVAFWRNIWSGEVEHEEGPWIAAVQDACAKIEPMNPIAISTEDVSGAVRRAPNWKSPGADGLHHYWLKGLSVCHATLARQYQEAIDRKTLPNLFTTGITHLAPKSTNTADPTNYRPITCLTSIYKTLTSVLSCKISRHIGEFNILSAAQNGCRGGGRGTKELLLIDSVAGQLVRRNRRNFSAAWIDYKKAFDSVPHSWLLRVLELYKIDQAVRDFLGVCMGQWSTILCLQGERLTGAGDPIRIRRGIFQGDCLSPLWFCLSLNPLSTLLERSGTGFQFRRGGTKVSHLLYMDDLKLLAPNAARLQELLKITTEFSSSIRMQLGVDKCAVVHVDRGQVTQSSQLSLELTSFKTLSEAESYRYLGMSQCIGVKEVDMKQAVCEIFFGRLTKVLRSYLSGANKVRAYNAWVMPTLLYTFGILRWTQTELDALDRRVRTTMTYHRVHHPKSSVMRLYIPRKCGGRGMLSAKTMHNREVCSLRAYFETRRDSALHGDVSMCDKGLTPLALAKENWQKPVVLSTSDRETVWMEKELHGRFYKALHAPHVDSKASVQWLRFGDLFGETEGFVCAIQDQVVKTNNYRKHVLKDGTPDFCRACRHPGESLRHVLSGCSALANTEYLHRHNQVAKILHQELALMYGLLEQRMPYYQYSPVPVLERDGVRLYWDLPIATDRTILANKPDIVVMDRARSRVFLVDITVPHDENLVKAETEKKRKYLDLAHEIVDMWGVGSAEIIPIVISANGLIPVSLAHHLRQLGIRDGSLAARMQKAVLLDSARIVRRFLSLQP

SEQ ID NO: 14647 - protein, 890 aa, Melitaea cinxia
MARALIGRLLAFRSGNTRPRIVRSVRMAFNGLGISLDQPDIADKLTERIDGLKQRIAAWGKRIRRYSERVERFRENRLFVSDQKRFYRKLENPISSSASLKPSTVDLVAFWRNIWSGEVEHEEGPWIAAVQDACAKIEPMNPIAISTEDVSGAVRRAPNWKSPGADGLHHYWLKGLSVCHATLARQYQEAIDRKTLPNLFTTGITHLAPKSTNTADPTNYRPITCLTSIYKTLTSVLSCKISRHIGEFNILSAAQNGCRGGGRGTKELLLIDSVAGQLVRRNRRNFSAAWIDYKKAFDSVPHSWLLRVLELYKVDQAVRDFLGVCMGQWSTILSLQGERLTGADDPIRIRRGIFQGDCLSPLWFCLSLNPLSTLLERSGTGFQFRRGGTKVSHLLYMDDLKLLAPNAARLQELLKITTEFSSSIRMQLGVDKCAVVHVDRGQVTQSSQLSLELTSFKTLSEAESYRYLGMSQCIGVKEVDMKQAVCEIFFGRLTKVLRSYLSGANKVRAYNAWVMPTLLYTFGILRWTQTELDALDRRVRTTMTHHRMHHPKSSVMRLYISRKCGGRGMLSAKTMHNREVCSLRAYFETRQDSALHGDVSMCDKGLTPLALAKENWQKPVVLSTSDRETVWMEKELHGRFYKALHAPHVDSKASVQWLRFGDLFGETEGFVCAIQDQVVKTNNYRKHVLKDGTPDFCRACRHPGESLRHVLSGCSVLANTEYLHRHNQVAKILHQELALMYGLLEQRMPYYQYSPVPVLERDGVRLYWDLPIATDRTILANKPDIVVMDRARSRVFLVDITVPHDENLVKAETEKKRKYLDLAHEIVDMWGVGSAEIIPIVISANGLIPVSLAHHLRQLGIRDGSLAARMQKAVLLDSARIVRRFLSLQP

SEQ ID NO: 14648 - protein, 864 aa, Mellicta athalia
MAFNGLGVSLNQPDIADRLTERIDGLKQRIAAWGKRIRRYSERVERFRQNRLFVSDQKRFYRKLENPIPCSAFLKPSTVDLVAFWRNIWSREVEHEEGPWIAAVQDACAKVEPMNPIAISTEDVSGAIQRAPNWKSPGADGLHHYWLKGLSVCHATLARQYQEAIDRKTLPNLFTTGITHLAPKSTNTADPTNYRPITCLSSIYKTLTSVLSCKISRHIGEFNILSAAQNGCRGGGCGTKELLLIDSVAGQLVRRNRRNFSAAWIDYKKAFDSVPHSWLLRVLELYKIDEAVRDFLGVCMGQWSTILCLQGERLTGADDPIRIRRGIFQGDCLSPLWFCLSLNPLSTLLERSGTGFQFRRGGTKVSHLLYMDDLKLLAPNAARLQELLKITTEFSGSIRMQLGVDKCAVVHVDRGQVTQSAQFSLELTSFKTLSEAESYRYLGMSQCIGVKEVDMKQAVCEVFFGRLTKVLRSYLSGANKVRAYNTWVMPTLLYTFGILRWTQTELDALDRRVRTTMTHHRVHHPKSSVMRLYISRKCGGRGMLNAKTMHNREVCSLRAYFETRRDNAMHGDVVVCDKGLTPLSLANENWQKPVVLSTSDRETVWMEKELHGRFYKALHAPHVDSKASVQWLRFGDLFGETEGFVCAIQDQVVKTNNYRKHILKDGTPDFCRACRHPGESLRHVLSGCSALANTAYLHRHNQVAKILHQELALMYGLLEQRMPYYQYTPVPVLERDGVRLYWDLPIATDRTILANKPDIVLMDRARSRVFLVDITIPHDENLVKAETEKKRKYLDLAHEIVDMWGVGSAEIIPIVISANGLIPVSLAHHLRQLGIRDGSLAGRMQKAVLLDSARIVRRFLSLQP

SEQ ID NO: 14649 - protein, 1189 aa, Maniola jurtina
MMGNGKRNERIGPLPGGRQGAPGAGAGRGSMRAASATSRPALPPSRSTYPSSPPDGLAPTGSTRAQSSAPAAGGVRRMRWTSLMNENVMRAYYRATGGETGRTGYRAAMYREFLLLEPNLTVTEQNLADRARYIQRSNIFNATELERLRREAVPEVSAPTAEQIISQAAPVREETITTSQDLPVEEDTEGTVSLDIERMRGILEEAISEIRSAPLENRPRLSRLTLNVATRDVIEAINKMLPQHLESSTGLGDTASILFGAALAVHRFIGAKTPGLGRAAATRRSAEPAWKKRIEHRITLARVLIGRLQSFRSGNTRPRIVRSVRVAFNGCGVRLDQPDIAQKLTERIDDLKQKIAAWGNRIRRYSARVERFQQNRLFSSDQKRFYKRLECPAVCSTSQRPDPADLVAFWRGVWSREVEHEEGPWIAAVEEACARIEPMNPVAISAEDVAGAVRRAPNWKSPGPDGLHHYWLKGFSVCHATLARQFQEALEQRALPSLFTTGVTHLAPKSTDTTDPAKDRPITCLATIYKTLTSVLSLKISRHIDENNIMSGAQNGCRGGGRGTKELLLIDSVAGQLVRRNRRNFSAAWIDYKKAFDSVPHSWLLRVLELYKVDSAVRDFLEACMGQWSTILCLHGERLAAADDRIRIGRGIFQGDCLSPLWFCLSLNPLSTLLEGSGTGFQFRRGGTKVPHLLYMDDLKLLAPNATRLKELLNITTEFSNSIRMELGLDKCAVIHVERGQVTHSAEISLEPTNIKTLSEAESYRYLGMSQSLGVKEADMKQSVCEAFFGRLTKICKSYLSGANKVRAYNGWVMPVLMYTFGVLSWTQTELDTLDRKVRTTMTLYRMHHPKSSVMRLYIPRKCGGRGVLSVKTMHNREISNLRIYFETMRGSPMHREVIECDKGLTPLSLAKTEWQKPVVLSTSDRETVWKEKELHGRFFKALNEPHVDKKASVQWLRFGDLFGETEGFVCAIQDQVVKTRNYRKYILKDGTHDICRACRHPGESLRHVLSGCSALANTEYLHRHNQAAKILHQELALKYGLLDERLPYYRYTPVPVLERDGVRLYWDRSIITDRTILANKPDIVVVDRAQSRVFLVGITIPYDENLVRAETEKKRKYLDLAHEVSDMWHVESTEIIPIVISANGLIPVSLAHHLRRLGFRGSSLAARMQKAVLLDSARIVRRFLNLSP

SEQ ID NO: 14650 - protein, 1189 aa, Maniola jurtina
MMDNGKRNERIGPLPGGRQGAPGAGAGRGSMRAASATSRPALPPSRSTYPSSPPDGLAPTGSTRAQSSAPAAGGVRRMRWTSLMNENVMRAYYRATGGETGRTGYRAAMYREFLLLEPNLTVTEQNLADRARYIQRSNIFNATELERLRREAVPEVSAPTAEQIVSQAAPVREETITTSQDLPVEEDTEGTVSLDIERMRGILEEAISEIRSAPPENRPRLSRLTLNVATRDVIEAINKMLPQYLESSTGLGDTASILFGAALAVHRFIGAKTLGSGRAAATRHSAEPAWKRRIEHRITLARVLIGRLQSFRSGNTRPRIVRSVRVAFNGCGVRLDQPDMAQKLTERIDDLKQKIAAWGNRIRRYSARVERFQQNRLFSSDQKRFYKRLECPAVCSTSQRPDPADLVAFWRGVWSREVEHEEGPWIAAVEEACARIEPMSPVAISAEDVDGAVRRAPNWKSPGPDGLHHYWLKGFSVVHATLARQFQEALEQRALPSLFTTGITHLAPKSTNATDPAKYRPITCLTTIYKTLTSVLSLKISRHIDENNIMSGAQNGCRGGSRGTKELLLIDSVAGQLVKRNRRNFSAAWIDYKKAFDSVPHSWLLRVLELYKVDSAVRDFLEACMGQWSTILCFHGERLAAADDRIRIGRGIFQGDCLSPLWFCLSLNPLSTPLEGSGTGFQFRRGGTKVPHLLYMDDLKLLAPNATRLKELLNITTEFSNSIRMELGLDKCAVIHVERGQVTHSAEISLEPSNIKTLSEAESYRYLGMSQSLGVKEADMKQSVCEAFFGRLTKICKSYLSGANKVRAYNGWVMPVLMYTFGVLSWTQTELDALDRKVRTTMTLYRMHHPKSSVMRLYIPRKCGGRGVLSVKTMHNREISNLRTYFETMRWSPMHREVIECDKGLTPLSLAKTEWQKPVVLSISDRETVWKEKELHGRFFKALNEPHVDKKASVQWLRFGDLFGETEGFVCAIQDQVVKTRNYRKYILKDGTHDICRACRHPGESLRHVLSGCSALANTEYLHRHNQAAKILHQELALKYGLLDERLPYYRYTPVPVLERDGVRLYWDRSIITDRTILANKPDIVMVDRAQSRVFLVDITIPYDENLVRAETEKKRKYLDLAHEVSDMWHVESTEIIPIVISANGLIPVSLAHHLRRLGFRGSSLAARMQKAVLLDSARIVRRFLNLSP

SEQ ID NO: 14651 - protein, 1112 aa, Maniola jurtina
MRWTSLMNENVMRAYYRATGGETGRTGYRAAMYREFLLLEPNLTVTEQNLADRARYIQRSNIFNATELERLRREAVPEVSAPTAEQIVSQAAPVREETITTSQDLPVEEDTEGTVSLDIERMRGILEEAISEIRSAPLENRPRLSRLTLNVATRDVIEAINKMLPQHLESSTGLGDTASILFGAALAVHRFIGAKTLGPRRAAATSHSAEPAWKRRIEHRITLARVLIGRLQSFRSGNARPRIVRSVRVAFNGCGVRLDQPDIAQKLTERIDDLKQKIAAWGNRIRRYSARVERFQQNRLFSSDQKRFYKRLECPAVCSTSQRPDPADLVTFWRGVWSREVEHEEGPWIAAVEEACARIEPMSPVAISAEDVAGAVRRAPNWKSPGPDGLHHYWLKGFSVCHATLARQFQEALEQGALPSLFTTGITHLAPKSTDATDPAKYRPITCLTTIYKTLTSVLSLKISRHIDENNIMSGAQNGCRGGSRGTKELLLIDSVAGQLVKRNRRNFSAAWIDYKKAFDSVPHSWLLRVLELYKVDSAVRDFLEACMGQWSTILCLHGERLAAADDRIRIGRGIFQGDCLSPLWFCLSLNPLSTLLGGSGTGFQFRRGGTKVPHLLYMDDLKLLAPNATRLKELLNITTEFSNSIKMELGLDKCAVIHVERGQVTHSAEISLEPSNIKTLSEAESYRYLGMSQSLGVKEADMKQSVCEAFFGRLTKICKSYLSGANKARAYNGWVMPVLMYTFGVLSWTQTELDVLDRKVRTTMTLYRMHHPKSSVMRLYIPRKCGGRGVLSVKTMHNREISNLRTYFETMRGSPMHRDVIECDKGLTPLSLAKTEWQKPVVLSTSDRETVWKEKELHGRFFKALNEPHVDKKASVQWLRFGDLFGETEGFVCAIQDQVVKTRNYRKYILKDGTHDICRACRYPGESLRHVLSGCSALANTEYLHRHNQAAKILHQELALKYGLLDERLPYYRYTPVPVLERDGVRLYWDRSIITDRTILANKPDIVVVDRAQSRVFLVDITIPYDENLVRAETEKKRKYLDLAHEVSDMWHVESTEIIPIVISANGLIPVSLAHHLRRLGFRGSSLAARMQKAVLLDSARIVRRFLNLSP

SEQ ID NO: 14652 - protein, 909 aa, Curetis bulis
MRRHNVTPAWKQRIERRIARARVHIGKLHSFRDGNTRPRVLRFVREAFTGTNVDLFHPNSYAILTERIDTLKQQIAAWAKRIRRYTARVERYNANRNFGNDQKRFYRSLERPEPSAEGQRPRLEELVSFWRGLWSRSVDHVEGPWYSHIHAACTAIAPMNPVTIDQEDVAAALKRSPNWKSPGLDGLQHYWLKVFSACHAILAQQFQEALERKEFPFLLTTGITHLIPKSSDTTDPSNYRPITCLSSTFKTLTSVLSSKMRSHLDTNRILSDAQNGCRAGSRGSKELLLIDAVVGKLVKRNSRNFSAAWIDYKKAFDSVPHSWLYRILELYKIDTTLRDFLKACMGQWSTVLSLHGERITATADRIKIDRGIFQGDCLSPLWFCLCLNPLSRLLEDSGAGFQFQRGGTRVSHLFYMDDLKLLASSASGLEKLLEITLDFSSSISMEFGVDKCAIIHVQKGRVTQSQGLNLGQLHMRTLDETDTYRYLGMSQCLGVKEIDVKQSVCDAFYGRLTKILNTSLSGVNKIRAYNGWGMPVLLYTFGVLRWTQTELDALDRKVRTIMTFHRVHHPKSTIMRLYIPRRRGGRALLCAKTMHNREICSLRTYFLAKADRDMHAQVIYCDKGLTPLNLACENWQHPEVLSTPQREAIWKGKELHGRFMKVLHEPHVDFKASVNWLRFGDLFGETEGFVCAIQDQVIKTNNYRKYILKDGTIDVCRACRHPGESLRHVLSGCSALSNTEYLHRHNQVARILHQELALKYGLLLGKVPYYTYSPEPVLENDCVRLYWDRSIITDRTVLANKPDIVIMDWAQSKVFLVDITIPFDENLVRAETEKKRKYLDLAHEVTDMWQVDSTEIIPIVISANGLIPTSLALHLRRLGFRGSSLPAQMQKAVLLDSARIVRRFLSLGP

SEQ ID NO: 14653 - protein, 1182 aa, Melitaea cinxia
MMEDDLERRIGPLPGGRQGASGAGAGRGSMRAASQPRRPAPPPDRSGYPPSPPVGLATTESQGTQYSLPAAGGVRRMRWTPKMNESVMRAYYRAVGRETGRTGYRAVMHPEFLQLEPTLTVTEQNLADRARYIQRKGIFDAAELERFRREAAPEVEPVSTVRNEMSTQQEGVRSEAPVEVITEGAVAQKVEQMRGILQEAISETRGAPLEMRPRLSRLPLNAATRNAIEAANRLLPPYLEGSLSLEDTGSILFGAALAVHRLVGAKTQESGRATHKNSDVPAWKRRIERRINLARALIGRLLAFRSGNTRPRIVRSVRMAFNGLGISLDQPDIADKLTERIDGLKQRIAAWGKRIRRYSERVERFRQNRLFVSDQKRFYRKLENPISSSASLKPSTVDLVAFWCNIWSGEVEHEEGPWIAAVQDACAKIEPMNPIAISTEDVSGAVRRAPNWKSPGADGLHHYWLKGLSVCHATLARQYQEAIDRKTLPNLFTTGITHLAPKSTNTADPTNYRPITCLTSIYKTLTSVLSCKISRHIGEFNILSAAQNGCRGGGRGTKELLLIDSVAGQLVRRNRRNFSAAWIDYKKAFDSVPHSWLLRVLELYKVDQAVRDFLGVCMGQWSTILCLQGERLTGADDPIRIRRGIFQGDCLSPLWFCLSLNPLSTLLERSGTGFQFRRGGTKVSHLLYMDDLKLLAPNAARLQELLKITTEFSSSIRMQLGVDKCAVVHVDRGQVTQSSQLSLELTSFKTLSEAESYRYLGMSQCIGVKEVDMKQAVCEIFFGRLTKVLRSYLSGANKVRAYNAWVMPTLLYTFGILRWTQTELDALDRRVRTTMTHHRMHHPKSSVMRLYISRKCGGRGMLSAKTMHNREVCSLRAYFETRRDSALHSDVSMCDKGLTPLALAKENWQKPVVLSTSDRETVWMEKELHGRFYKALHAPHVDSKASVQWLRFGDLFGETEGFVCAIQDQVVKTNNYRKHVLKDGTPDFCRACRHPGESLRHVLSGCSALANTEYLHRHNQVAKILHQELALMYGLLEQRMPYYQYSPVPVLERDGVRLYWDLPIATDRTILANKPDIVVMDRARSKVFLVDITVPHDENLVKAETEKKRKYLDLAHEIVDMWGVGFAEIIPIVISANGLIPVSLAHHLRELGIRDGSLAARMQRAVLLDSARIVRRFLSLQP

SEQ ID NO: 14654 - protein, 988 aa, Melitaea cinxia
MRGILHEAISETRGAPLEMRPRLSRLPLNAATRHAIEAANRLLPPYLETSFSLEDTGSILFGAALAVHRLVGAKTLESGRATHKNSDVPAWKRRIERRINLARALIGRLLAFRSGNTRPRIVRSVRMAFNGLGISLDQPDIADKLTERIDGLKQRIAAWGKRIRRYSERVERFRQNRLFVSDQKRFYRKLENPISGSASLKPSTVDLVAFWRNIWSGEMEHEEGPWIAAVQDACAKIEPMNPIAISTEDVSGAVRRAPNWKSPGADGLHHYWLKGLSVCHATLARQYQEAIDRKTLPNLFTTGITHLAPKSTNTADPTNYRPITCLTSIYKTLTSVLSCKISRHIGEFNILPAAQNGCRGGGRGTKELLLIDSVAGQLVRRNRRNFLAAWIDYKKAFDSVPHSWLLRVLELYKIDQAVRDFLGVCMGQWSTILCLQGERLTGPDDPIRIRRGIFQGDCLSPLWFCLSLNPLSTLLERSGTGFQFRRGGTKVSHLLYMDDLKLLAPNAARLQELLKITTEFSSSIRMQLGVDKCAVVHVDRGQVTQSSQLSLELTSFKTLSEAESYRYLGMSQCIGVKEVDMKQAVCEIFFGRLTKVLRSYLSGANKIRAYNACVMPTLLYTFGILRWTQTELDALDRRVRTTMTYHRVHHPKSSVMRLYIPRKCGGRGMLSAKTMHNREVCSLRAYFETRRDSALHGDVSMCDKGLTPLALAKENWQKPVVLSTSDRETVWMEKELHGRFYKALHAPHVDSKASVQWLRFGDLFGETEGFVCAIQDQVVKTNNYRKHVLKDGTPDFCRACRHPGESLRHVLSGCSALANTEYLHRHNQVAKILHQELALMYGLLEQRMPYYQYSPVPVLERVRLYWDLPIATDRTILANKPDIVVIDRARSRVFLVDITVPHDENLVKAETEKKRKYLDLAHEIVDMWGVGSAEIIPIVISANGLIPVSLAHHLRQLGIRNGSLAARMQKAVLLDSARIVRRFLSLQP

SEQ ID NO: 14655 - protein, 1182 aa, Melitaea cinxia
MMEDDLERRIGPLPGGRQGASGAGAGRGSMRAASQPHRPAPPPDRSAYPPSPPVGLATTEPQGTQHSLPAAGGVRRMRWTPKMNESVMRAYYRAVGRETGRTGYRAVMHREFLLLEPTLTVTEQNLADRARYIQRKGIFDAAELERFRREAAPEVEPVSTVRNEVSAQQEGVRSEAPVEVITEGAVAQKVEQMRGILQEAISETRGAPLEMRPRLSRLPLNAATRNAIEAANRLLPSYLEGSLSLEDTGSILFGAALAVHRLVGAKTQESGRATHKNSDVPAWKRRIERRINLARALIGRLLAFRSGNTRPRIVRSVRMAFNGLGISLDQPDIADKLTERIDGLKQRIAAWGKRIRRYSERVERFRQNRLFVSDQKRFYRKLENPISGSASLKPSTVDLVAFWRNIWSGEVEHEEGPWIAAVQDACAKIEPMNPIAISTEDVSGAVRRAPNWKSPGADGLHHYWLKGLSVCHATLARQYQEAIDRKTLPNLFTTGITQLAPKSTNTADPTNYRPITCLTSIYKTLTSVLSCKISRHIGEFNILSAAQNGCRGGGRGTKELLLIDSVAGQLVRRNRRNFSAAWIDYKKAFDSVPHSWLLRVLELYKIDQAVRDFLGVCMGQWSTILCLQGERLTGADDPIRIRRGIFQGDCLSPLWFCLSLNPLSTLLERSGTGFQFRRGGTKVSHLLYMDDLKLLAPNAARLQELLKITTEFSSSIRMQLGVDKCAVVHVDRGRVTQSSQLSLELTSFKTLSEAESYRYLGMSQCIGVKEVDMKQAVCEIFFGRLTKVLRSYLSGANKVRAYNAWVMPTLLYTFGILRWTQTELDALDRRVRTTMTHHRMHHPKSSVMRLYIPRKCGGRGMLSAKTMHNREVCSLRAYFETRRDSPLHGDVSMCDKGLTPLALAKENWQKPVVLSTSDRETVWMEKELHGRFYKALHAPHVDSKASVQWLRFGDLFGETEGFVCAIQDQVVKTNNYRKHVLKDGTPDFCRACRHPGESLRHVLSGCSALANTEYLHRHNQVAKILHQELALMYGLLEQRMPYYQYSPVPVLERDGVRLYWDLPIATDRTILANKPDIVVMDRARSRVFLVDITVPHDENLVKAETEKKRKYLDLAHEIVDMWGVGSAEIIPIVISASGLIPVSLAHHLRQLGIRDGSLAARMQKAVLLDSARIVRRFLSLQP

SEQ ID NO: 14656 - protein, 1182 aa, Melitaea cinxia
MMEDDLQRRIGPLPWGRQGASGAGAGRGSMRAASQPRRPAPPPDRSGYPPSPPVGLATTESQGTQHSLPAAGGVRRMKWTPKMNESVMRAYYRAVGRETGRTGYRAVMHREFLLLEPTLTVTEQNLADRARYIQRKGIFDAAELERFRREAAPEVEPVFTVRNEVSTQQEGVRSEAPVKVITEGAVAQKVEQMRGILQEAISETRGAPLEMRPRLSRLPLNAATRNAIEAANRLLPPYLEGSLSLEDTGSILFGAALAVHRLVGAKTQESGRATHKNSDVPAWKRRIERRINLARALIGRLLAFRSGNTRPRIVRSVRMAFNGLGISLDQPDIADKLTERIDGLKQRIAAWGKRIRRYSERVERFRQNRLFVSDQKRFYRKLENPISSFASLKPSTVDLVAFWRNIWSGEVEHEEGPWIAAVQDACAKIEPMNPIAISTEDVSGAVRRAPNWKSPGADGLHHYWLKGLSVCHATLARQYQEAIDRKTLPNLFTTGITHLAPKSTNTADPTNYRPITCLTSIYKTLTSVLSCKISRHIGEFNILSAAQNGCRGGGRGTKELLLIDSVAGQLVRRNRRNFSAAWIDYKKAFDSVPHSWLLRVLELYKVDQAVRDFLGVCMGQWSTVLCLQGERLTGADDPIRIRRGIFQGDCLSPLWFCLSLNPLSTLLERSGTGFQFRRGGTKVSHLLYMDDLKLLAPNAARLQELLKITTEFSSSIRMQLGVDKCAVVHVDRGQVTQSSQLSLELTSFKTLSEAESYRYLGMSQCIGVKEVDMKQAVCEIFFGRLTKVLRSYLSGANKVRAYNAWVMPTLLYTFGILRWTQTELDALDRRVRTTMTHHRMHHPKSSVMRLYIPRKCGGRGMLSAKTMHNREVCSLRAYFETRRDSALHGDVSMCDKGLTPLALAKENWQKPVVLSTSDRETVWMEKELHGRFYKALHAPHVDSKASVQWLRFGDLFGETEGFVCAIQDQVVKTNNYRKHVLKDGTPDFCRACRHPGESLRHVLSGCSVLANTEYLHRHNQVAKILHQELALMYGLLEQRMPYYQYSPVPVLERDGVRLYWDLPIATDRTILANKPDIVVMDRARSRVFLVDITVPHDENLVKAETEKESKYLDLAHEIVDMWGVGSAEIIPIVISANGLIPVSLAHHLRQLGIRDGSLAARMQKAVLLDSARIVRWFLSLQP

SEQ ID NO: 14657 - protein, 1159 aa, Maniola jurtina
MRAASATSRPALPPSRSTYPSSPPDGLAPTGSTRAQSSAPAAGGVRRMRWTSLMNENVMRAYYRATGGETGRTGYRAAMYREFLLLEPNLTVTEQNLADRARYIQRSNIFNATELERLRREAVPEVSAPTAEQIVSQAAPVREETITTSQDLPVEEDTEGTVSLDIERMRGILEEAISETRSAPLENRPRLSRLTLNVATRDVIEAINKMLPQHLESSTGLGDTASILFGAALAVHRFIGAKTLGPRRAAATRHSPEPAWKRRIEHRITLARVLIGRLQSFRSGNTRPRIVRSVRVAFNGCGVRLDQPDIAQKLTERIDDLKQKIAAWGNRIRRYSARVERFQQNRLFSSDQKRFYKRLECPAVCSTSQRPDPADLVTFWRGVWSREVEHEEGPWIAAVEEACARIEPMSPVAISAEDVAGAVRRAPNWKSPGPDGLHHYWLKGFSVCHATLARQFQEALEQRALPSLFTTGITHLAPKSTDATDPAKYRPITCLTTIYKTLTSVLSLKISRHIDENNIMSGAQNGCRGGSRGTKELLLIDSVAGQLVKRNRRNFSAAWIDYKKAFDSVPHSWLLRVLELYKVDSAVRDFLEACMGQWSTILCLHGERLAAADDRIRIGRGIFQGDCLSPLWFCLSLNPLSTLLEGSGTGFQFRRGGTKVPHLLYMDDLKLLAPNATRLKELLNITTEFSKSIRMELGLDKCAVIHVERGQVTHSAEISLEPSNIKTLSEAESYRYLGMSQSLGVKEADMKQSVCEAFFGRLTKICKSYLSGANKVRAYNGWVMPVLMYTFGVLSWTQTELDALDRKVRTTMTLYRMHHPKSSVMRLYIPRKCGGRGVLSVKTMHNREISNLRTYFETMRGSPMHRDVIECDKGLTPLSLAKTEWQKPVVLSTSDRETVWKEKELHGRFFKALNEPHVDKKASVQWLRFGDLFGETEGFVCAIQDQVVKTRNYRKYILKDGTQDICRACRHPGESLRHVLSGCSALANTEYLHRHNQAAKILHQELALKYGLLDERLPYYRYTPVPVLERDGVRLYWDRSIITDRTILANKPDIVVVDRAKSRVFLVDITIPYDENLVRAETEKKRKYLDLAHEVSDMWHVESTEIIPIVISANGLIPVSLAHHLRRLGFRGSSLAARMQKAVLLDSARIVRRFLNLSP

SEQ ID NO: 14658 - protein, 1190 aa, Maniola jurtina
MMMEHNIRNARIGPLPGGRQGAPGAGAGRSSIRAASTTSRPALPPSRSTHPSSPPDGLAPTGPTRAQSSAPAAGGVRRMRWTSLMNENVMRAYYRATGGETGRTGYRAAMYREFLLLEPNLTVTEQNLADRARYIQRSNIFNAAELERLRREAVPEVSEPTTVQIVSQAEPVREEATTTLQDLPGEEDTGETVSLDIERMRRILEEAISEIRNAPLENRPRLSRLTLNVATRDVIEAISKMLPQHLESSTGLGDTASIIFGAALAVHRFIGAKTPGPGRAAATRRSAEPAWKKRIEHRITLARVLIGRLQSFRSGNTRPRIVRSVRVALNGCGVRLDQPDIAQKLTERIDDLKQKIAAWGNRTRRYSARVERFQQNRLFSSDQKRFYKRLECPAVCSTSQRPDPADLVAFWRGVWSREVEHEEGPWIAAVEEACARIEPMNPVAISAEDVAGAVRRAPNWKSPGPDGLHHYWLKGFSVCHATLARQFQEAFEQRALPSLFTTGITHLAPKSTDATDPAKYRPITCLTTIYKTLTSVLSLKISRHIDENNIMSGAQNGCRGGGRGTKELLLIDSVAGQLVKRNRRNFSAAWIDYKKAFDSVPHSWLLRVLELYKVDSAVRDFLETCMGQWSTILCLHGERLAAADDRIRIGRGIFQGDCLSPLWFCLSLNPLSTLLEGSGTGFQFRRGGTKVPHLLYMDDLKLLAPNATRLKELLSITTEFSNSIKMELGLDKCAVMHVERGQVTHSAEISLEPSNIKSLSEAESYRYLGMSQSLGVKEADMKQSVCEAFFGRLTKICKSYLSGANKVRAYNGWVMPVLMYTFGVLSWTQTELDALDRKVRATMTLYRMHHPKSSVMRLYIPRKCGGRGVLSAKTMHNREISNLRTYFETMRGSPMHREVIECDKGLTPLSLAKTEWQKPVVLSTSDRETVWKEKELHGRFFKALNEPHVDKKASVQWLRFGDLFGETEGFVCAIQDQVVKTRNYRKYILKDGTHDICRACRHPGESLRHVLSGCSALANTEYLHRHNQAAKILHQELALKYGLLDERLPYYKYTPVPVLERDGVRLYWDRSIITDRTILANKPDIVLVDRAQSRVFLVDITIPYDGNLVRAETEKKRKYLDLAHEVSDMWHVESTEIIPIVISANGLIPVSLAHHLRRLGFRGSSLAARMQKAVLLDSARIVRRFLSLSP

SEQ ID NO: 14659 - protein, 1190 aa, Maniola jurtina
MMMDTNMRNVRIRPLPGGRQGAPGAGAGRSSMRAASTISRPALPPSRSTHPSSPPDGLAPTGPTRAQSSAPAAGGVRRMRWTSLMNENVMRAYYRATGGETGRTGYRAAMYREFLLLEPNLTVTEQNLADRARYIQRSNIFNATELERLRREAVPEVSAPTTEQIVSQAAPARDETITISQDLPVEEDTEGTVSLDIERMRGILEEAISEIRSAPLENRPRLSRLTLNVATRDVIEAINKMLPQHLESSTGLGDTASIIFGAALAVHRFIGAKTPGPGRAAATRRSAEPAWKKRIEHRITLTRVLIGRLQSFRSGNTRPRIVRSVRVAFNGCGVRLDQPDITQKLTERIDDLKQKIAAWGNRIRRYSARVERFQQNRLFSSDQKRFYKRLECPAVCSTSQRPDPADLVAFWRGVWSREVEHEEGPWIAAVEEACARIEPMNPVAISAEDVAGAVRRAPNWKSPGPDGLHHYWLKGFSVCHATLARQFQEALEQRALPSLFTTGITHLAPKSTDATDPAKYRPITCLTTIYKTLTSVLSLKISRHIDENNIMSGAQNGCRGGGRGTKELLLIDSVAGQLVKRNRRNFSAAWIDYKKAFDSVPHSWLLRVLELYKVDSAVRDFLEACMGQWSTILCLHGERLAAADDRIRIGRGIFQGDCLSPLWFCLSLNPLSTLLEGSGTGFQFRRGGTKVPHLLYMDDLKLLAPNATRLRELLNITTEFSNSIRMELGLDKCAVIHVERGQVTHSAEISLEPSNIKTLSEAESYRYLGMSQSLGVKEADMKQSVCEAFFGRLTKICKSYLSGANKVRAYNGWVMPVLMYTFGVLSWTQTELDALDRKVRTTMTLYRMHHPKSSVMRLYIPRKCGGRGVLSVKTMHNREISNLRTYFETMRGSPMHRGVIECDKGLTPLSLAKTEWQKPVVLSTSDRETVWKEKELHGRFFKALNEPHVDKKASVQWLRFGDLFGETEGFVCAIQDQVVKTRNYRKYILKDGTHDICRACRHPGESLRHVLSGCSALANTEYLHRHNQAAKILHQELALKYGLLDERLPYYRYTPVPVLERDGVRLYWDRSIIADRTILANKPDIVVVDRAQSRVFLVDITIPYDENLVRAETEKKRKYLDLAHEVSDMWHVESTEIIPIVISANGLIPVSLAHHLRRLGFRGSSLAARMQKAVLLDSARIVRRFLNLSP

SEQ ID NO: 14660 - protein, 1188 aa, Elymnias hypermnestra
MMMDLFYTDKRLGPLPGGRQGTSGAGAGRDSMRAASSTSSTRRPARPPRRPTNPSSPPEGLASAGTARTQNPEPAAGGVRRMRWTSLMNENVMRAYYRATGGETGRTGYRTAMYREFLLLEPNLTVTEQNLADRARYIQRSNIFSATELERLRCEAVPEVTPPATQQTAATAIVHQELENNQDLLVDGDAEGTVSLDIEKMRGILEEAISESRSAPLEGRPRLSRLTLSAATRDVIEAINKLLPQYFEGSTGLSETASILYGAALAVHRFIGVKIREPGRTANTSSAVPAWKRRIERRITHARRLIGRLQSFRSGNTRPRIVRSVRIAFNGLDVRLDQPDIAQKLTERIDDLKQKIAAWGNRIRRYSERVERFHQNRLFVSDQKRFYERLQRPASCSSSQRPASADLVAYWRSIWSLEVEHEEGSWTAAVEEACAVIQPMNPVAITPEDVVGAVRRAPNWKSPGPDGLHHYWLKGFSACHATLARQFQEAMAQKALPNLFTTGITHLAPKTSNAADPTKYRPITCLSSIYKTLTSILSRKISYHIDENNIMSVAQNGCRGGSRGTKELLLIDSVAGQLVKRNRRNFSAAWIDYKKAFDSVPHSWLLRVLELYKIDGTLRDFLGECMRQWSTILCLHGERLTAADDRIRIRRGIFQGDCLSPLWFCLSLNPLSFLLERSGTGFQFRRGGARVPHLLYMDDLKLLAPNAPRLQELLKITSDFSNSIRMEMGLDKCAVLHVERGQVSHSAEINLEPTQLKTLSETETYRYLGMSQCMGVKEADMKQSVCEVFYGRLTKILKSYLSGANKIRAYNGWVMPVLLYTFGILRWTQTELDALDRRVRTTMTFHRMHHPKSSVMRLYIPRKCGGRGLLSAKTMHNREISSLRTYFETKRESPMHLEVIECDKGLTPLSLANENWQRPAVLSTSDREAVWKGKEMHGRFFKALHEPHVNRKASVQWLRFGDLFGETEGFVCAIQDQVVKTRNYRKYILKDGTHDICRACRHPGESLRHVLSGCSALANTEYLHRHNQAAKILHQELALMYGLLDERLPYYRYQPVPVLERDGVRLYWDRSIITDRTILANKPDIVIMDRAQSRVFLVDITIPYDENLVRAETEKKRKYLDLAHEITAMWGVGSAETIPIVISANGLIPVSLAHHLRRLGFRGSSLAARMQKAVLLDSARIVRRFLSL

SEQ ID NO: 14661 - protein, 1056 aa, Apodemia chisosensis
MMMDKVNENARTGPLPGGRQGASGTGAGRDSMRTASHTSRPPLPSRRPANPSSPPEGLAPTGSSRTQSSEPAAGGVRRMRWTSPMNRNVMRAYYRATGGETGRTGYRAAMYREFLLLEPNLTVTEQNLADRARYIQRSNIFSATELERLRREAVPEVTTPTTEQIVSLAEPVREETDAIAQDLPVEEDTEETVSLDLERMGRILEEAISEIRSTPLENRPRLSRLALNVATRDVIEAINQMLPQYLERSTGLDDTASILFGAALAVHRFMGVKTQERGRTTLRRSTEPAWKRRIEHRITLARALIGRLQSFRSGNTRPRIVRSVRIAFNGLGVRLDQPDIAQKLTERIDDLKQKIAAWGNRIRRYSERVERFQQNRLFSSDQKRFYKKLECPAVCSTSQRPSPADLVAFWRNVWSREVEHEEGPWIAAVEEACASIEPMNPVTISSEDVAGAVRRAPNWKSPGPDGLHHYWLKGFSLCHATLARQFQDALEQRALPSLFTTGITHLAPKSTDTADPAKYRPITCLTTIYKTLTSVLSLKISRHVDENNIMSEAQNGCRGGGRGTKELLLIDSVAGQLVKRNRRNFSAAWIDYKKAFDSVPHSWLLRVLELYKVDSTVRDFLGECMGQWSTILCLHGERLAAAGDRIKIRRGIFQGDCLSPLWFCLSLNPLSSLLERSGTGFQFRRGGTKVPHLLYMDDLKLLAPNATRLRELLNITTEFSNSIRMELGLDKCAVLHVERGQVTHSAEINLEPSNIRTLSEAESYRYLGMSQSVGVKEADVKQSVCEVFFGRLTKVCKSYLSGANKVRAYNGWVMPVLMYTFGVLRWTQTELDALDRKVRTTMTLYRMHHPKSSVMRLYIPRKCGGRGVLSVKTMHNREISSLRTYFETKRECPMHRDVIECDKGLTPLSLAKLEWQKPVVLSTSDRETVWKERELHGRFFKALNEPHVDKKASVQWLRFGDLFGETEGFVCAIQDQVVKTRNYRKYILKDGTHDICRACRHPGESLRHVLSGCSALANTEYLHRHNQAAKILHQELALKYGLLDERVPYYRYTPVP

SEQ ID NO: 14662 - protein, 1182 aa, Melitaea cinxia
MMEDDLQRRIGPLPGGRQGASGAGAGRGSMRAASQPRRPAPPPDRLGYPPSPPVGLATTESQGTQHSLPAAGGVRRMRWTPKMNESVMRAYYRAVGRETGRTGYRAVMHREFLLLEPTLTVTEQNLADRARYIQRKGIFDAAELERFRREAAPEVEPVSTVRNEVSTQQEGVRSEAPVEVITEGAVAQKVEQMRGILQEAISETRGAPLEMRPRLSRLPLNAATRNAIEAANRLLPPYLEGSLSLEDTGSILFGAGLAVHRLVGAKTQESGRATHKNSDVPAWKRRIERRINLARALIGRLLAFRSGNTRPRIVRSVRMAFNGLGISLDQPDIADKLTERIDGLKQRIAAWGKRIRRYSERVERFRENRLFVSDQKRFYRKLENPISSSASLKPSTVDLVAFWRNIWSGEVEHEEGPWIAAVQDACAKIEPMNPIAISTEDVSGAVRRAPNWKSPGADGLHHYWLKGLSVCHATLARQYQEAIDRKTLPNLFTTGITHLAPKSTNTADPTNYRPITCLTSIYKTLTSVLSCKISRHIGEFNILSAAQNGCRGGGRGTKELLLIDSVAGQLVRRNRRNFSAAWIDYKKAFDSVPHSWLLRVLELYKVDQAVRDFLGVCMGQWSTILSLQGERLTGADDPIRIRRGIFQGDCLSPLWFCLSLNPLSTLLERSGTGFQFRRGGTKVSHLLYMDDLKLLAPNAARLQELLKITTEFSSSIRMQLGVDKCAVVHVDRGQVTQSSQLSLELTSFKTLSEAESYRYLGMSQCIGVKEVDMKQAVCEIFFGRLTKVLRSYLSGANKVRAYNAWVMPTLLYTFGILRWTQTELDALDRRVHTTMTHHRMHHPKSSVMRLYISRKCGGRGMLSAKTMHNREVCSLRAYFETRRDSALHGDVSMCDKGLTPLALAKENWQKPVVLSTSDRETVWMEKELHGRFYKALHAPHVDSKASVQWLRFGDLFGETEGFVCAIQDQVVKTNNYRKHVLKDGTPDFCRACRHPGESLRHVLSGCSVLANTEYLHRHNQVAKILHQELALMYGLLEQRMPYYQYSPVPVLERDGVRLYWDLPIATDRTILANKPDIVVMDRARSRVFLVDITVPHDENLVKAETEKKRKYLDLAHEIVDMWGVGSAEIIPIVISANGLIPVSLAHHLRQLGIRDGSLAARMQKAVLLDSARIVRRFLSLQP

SEQ ID NO: 14663 - protein, 1037 aa, Melitaea cinxia
MRWTPKMNESVMRAYYRAVGRETGRTGYRAVMNREFLLLEPTLTVTEQNLADRARYIQRKGIFDAAELERFRREAAPEVEPVSTVRNEVSTQQEGVCSEAPVEVITEGAVAQKVEQMRGILQEAISETRGAPLEMRPRLSRLLLNAATRNAIEAANRLLPPYLEGSLSLEDTGSILFGAALAVHRLVGAKTQESGRATHKNSDVPAWKRRIERRINLARALIGRLLAFRSGNTRPRIVRSVRMAFNGLGISLDQPDIADKLTERIDGLKQRIAAWGKRIRRYSERVERFRQNRLFVSDQKRFYRKLENPISGSASLKPSTVDLVAFWRNIWSGEVEHQEGPWIAAVQDACAKIEPMNPIAISTEDVSGAVRRAPNWKSPGADGLHHYWLKGLSVCHATLARQYQEAIDRKTLPNLFTTGITHLAPKSTNTADPTNYRPITCLTSIYKTLTSVLSCVCVSVVNSRHIGEFKILSAAQNGCRGGGRGTKELLLIDSVAGQLVRRNRRNFSAAWIEHKKAFDSVPHSWLLRVLELYNIDEAVRDFLGVCMGQWSTNLCLQGERLTGADDPIRIRRGIFQGDCLSPLWFCLSLNPLSTLLERSGTGFQFRRGGTKVSHLLYMDDLKLLAPNAARLQELLKITTEFSSSIRMQLGVDKCAVVHVDRGQVTQSAQLSLELTSFKTLSVAESYWYLGMSQCIGVKEVDMKKAVCEIFFERLTKVLRSYLSGANKVRAYNAWVMPTLLYTFGILRWTQTELDALDRRVRTTMTYHRVHHPKSSVMRLYIPRKCGGRVMLSAKTMHNREVCSLRAYFETRRDSALHGDVSMCDKGLTPLALAKENWQKPVVLSTSDRETVWMEKELHGRFYKALHAPHIDSKASVQWLRFGDLFGETEGFVCAIQDQVVKTNNYRKHVLKDGTPDFCRACRHPGESLRHVLSGCSALANTEYLHRHNQVAMILHQELALMYGLLEHRMPYYQYSPVPVLERDGVRLYWDLPIATDRTILANKPVIVVMDRARSRVFLVDITVPHDENFLKAETDGA

SEQ ID NO: 14664 - protein, 1181 aa, Mellicta athalia
MEDKFGKRIGPLPGGRQGASGAGAGRGSMRAASHPRRPAPPPDRSANPPSPPDGLAPTEPQGTQHSAPAAGGVRRMRWTLKMNESVMRAYYRAVGRETGRTGYRAVMHREFLLLEPTVTVTEQNLADRARFIQRKGVFDAAELERFRREAAPEDEPVSAERDAVSTQQESVRSEAPVEAITEGAVAQKVEQMRGILQEAISETRGAPLEQRPRLSRLPLNAATRSAIEAANRLLPPYLEGSLGLEDTGSILFGAALAVHRLVGAKTQEPGLATHKNSDVPAWKRRIERRISLARALIGRLLAFRSGNTRPRIVRSVRMAFNGLGVSLNQPDIADRLTERIDGLKQRIAAWGKRIRRYSERVERFRQNRLFVSDQKRFYRKLENPIPCSAFLKPSTVDLVAFWRNIWSREVEHEEGPWIAAVQDACAKVEPMNPIAISTEDVSGAVRRAPNWKSPGADGLHHYWLKGLSVCHATLARQYQEAIDRKTLPNLFTTGITHLAPKSTNTADPTNYRPITCLSSIYKTLTSVLSCKISRHIGEFNILSAAQNGCRGGGRGTKELLLIDSVAGQLVRRNRRNFSAAWIDYKKAFDSVPHSWLLRVLELYKIDEAVRDFLGVCMGQWSTILCLQGERLTGADDPIRIRRGIFQGDCLSPLWFCLSLNPLSTLLERSGTGFQFRRGGTKVSHLLYMDDLKLLAPKAAHLQELLKITTEFSGSIRMQLGVDKCAVVHVDRGQVTQSAQFSLELTSFKTLSEAESYRYLGMSQCIGVKEVDMKQAVCEVFFGRLTKVLRSYLSGANKVRAYNTWVMPTLLYTFGILRWTQTELDALDRRVRTTMTHHRVHHPKSSVMRLYISRKCGGRGMLNAKTMHNREVCSLRAYFETRRDSAIHGDVVVCDKGLTPLSLANENWQKPVVLSTSDRETVWMEKELHGRFYKALHAPHVDSKASVQWLRFGDLFGETEGFVCAIQDQVVKTNNYRKHILKDGTPDFCRACRHPGESLRHVLSGCSALANTEYLHRHNQVAKILHQELALMYGLLEQRMPYYQYTPVPVLERDGVRLYWDLPIATDRTILANKPDIVVMDRARSRVFLVDITIPHDENLVKAETEKKRKYLDLAHEIVDMWGVGSAEIIPIVISANGLIPVSLAHHLRQLGIRDGSLAGRMQKAVLLDSARIVRRFLSLQP

SEQ ID NO: 14665 - protein, 1189 aa, Maniola jurtina
MMDNKIRNERIGPLPGGRQGAPGAGAGCSSMRAASATSRPALPPSRSTYPSSPPDGLAPTGSTRAQSSAPAAGGVRRMRWTSLMNENVMRAYYRATGGETGRTGYRAAMYREFLLLEPNLTVTEQNLADRARYIQRSNIFNATELERLRREAVPEVSAPTAEQIVSQAAPVREETITTSQDLPVEEDTEGTVSLDIERMRGILEEAISEIRSAPLENRPRLSRLTLNVATRDVIEAINKMLPQHLESSTGLGDTASIIFGAALAVHRFIGAKTPGPGRAAATRRSAEPAWKKRIEHRITLARVLIGRLQSFRSGNTRPRIVRSVRVAFNGCGVRLDQPDIAQKLTERIDDLKQKIAAWGNRIRRYSARVERFQQNRLFSSDQKRFYKRLECPAVCSTSQRPDPADLVAFWRGVWSREVEHEEGPWIAAVEEACARIEPMNPVAISAEDVAGAVRRAPNWKSPGPDGLHHYWLKGFSVCHATLARQFQEALEQRALPSLFTTGITHLTPKSTDATDPAKYRPITCLTTIYKTLTSVLSLKISRHIDENNIMSGAQNGCRGGGRGTKELLLIDSVAGQLVKRNRRNFSAAWIDYKKAFDSVPHSWLLRVLELYKVDSAVRDFLEACMGQWSTILCLHGERLAAADDRIRIGRGIFQGDCLSPLWFCLSLNPLSTLLEGSGTGFQFRRGGTKVPHLLYMDDLKLLAPNATRLRELLNITTEFSNSIRMELGLDKCAVIHVERGQVTHSAEISLEPSNIKTLSEAESYRYLGMSQSLGVKEADMKQSVCEAFFGRLTKICKSYLSGANKVRAYNGWVMPVLMYTFGVLSWTQTELDALDRKVRTNMTLYRMHHPKSSVMRLYIPRKCGGRGVLSVKTMHNREISNLRTYFETMRGSPMHREVMECDKGLTPLSLAKTEWQKPVVLSTSDRETVWKEKELHGRFFKALNEPHVDKKASVQWLRFGDLFGETEGFVCAIQDQVVKTRNYRKYILKDGTHDICRACRHPGESLRHVLSGCSALANTEYLHRHNQAAKILHQELALKYGLLDERLPYYRYTPVPVLERNGVRLYWDRSIITDRTILANKPDIVVVDRAQSRVFLVDITIPYDENLVRAETEKKRKYLDLAHEVSDMWHVESTEIIPIVISANGLIPVSLAHHLRRLGFRGSSLAARMQKAVLLDSARIVRRFLNLSP

SEQ ID NO: 14666 - protein, 1191 aa, Maniola hyperantus
MMMDNNIRNMRIGPLPGGRQGAPGAGAGRSSIRAASITTSRPAPLPSRPTNPSSPPEGLAPTGSTRAQFSAPAAGGVRRMRWTSLMNENVMRAYYRATGGETGRTGYRAAMYREFLLLEPNLTVTEQNLADRARYIQRSNIFNATELERLRREAVPEVSAPTTEQIDSQAMPAPEETNTISQDLPVEDGTEETVSLDIERMRGILEEAISEIRSAPLESRPRLSRLTLNVATRDVIEAINKMLPQHLESSTGLGDTASILFGAALAVHRFIGAKTPGPGRAAAARRSAEPAWKKRIERRITLARVLIGRLQSFRSGNTRPRIVRSVGIAFNGCGVRLDQPDIAQKLTERIDDLKQKIAAWGNRIRRYSERVERFQQNRLFLSDQKRFYKRLECPAVCSTSQRPDPADLVTFWRGVWSREVEHEEGPWIEAIEEACASIEPMNPIAISTEDVAGAVRRAPNWKSPGPDGLHHYWLKGFSVCHATLARQFQEALEQRTLPSLFTTGITHLAPKSTDTTDPAKYRPITCLTTIYKTLTSVLSLKISRHVDENNIISGAQNGCRGGSRGTKELLLIDSVAGQLVKRNRRNFSAAWIDYRKAFDSVPHSWLLRVLELYKVDGTVRDFLGECMGQWSTILCLHGERLADADDRIRIGRGIFQGDCLSPLWFCLSLNPLSTLLEGSGTGFQFRRGGTKVPHLLYMDDLKLLAPNATRLQELLNVTTDFSNSIRMELGLDKCAVMHVERGQVTHSAEMSLEPSTIRTLSEAESYRYLGMSQSLGVKETDVKQSVCEAFFGRLTKICKSYLSGANKIRAYNGWVMPVLMYTFGVLRWTQTELDALDRKVRTTMTLYRMHHPKSSVMRLYIPRKCGGRGVLSVKTMHNREIANLRTYFETMRGSPMHREVIECDKGLTPLSLAQTEWQKPVVLSTSDREAVWREKELHGRFFKALNEPHVDKKASVQWLRFGDLFGETEGFVCAIQDQVVKTRNYRKYILKDGTHDICRACRHPGESLRHVLSGCSALANTEYLHRHNQAAKILHQELALKYGLLDERLPYYKYTPVPVLERDGVRLYWDRSIITDRTILANKPDIVVVDRAQSRVFLVDITIPYDENLVRAETEKKRKYLDLAHEVSDMWHVESTEIIPIVISANGLIPVSLAQHLRRLGFRGSSLAARMQKAVLLDSARIVRRFLHLSP

SEQ ID NO: 14667 - protein, 1182 aa, Melitaea cinxia
MMEDNLERRIGPLPGGRQGASGAGAGRGSMRAASQPRRPAPPPDRSGYPPSPPVGLATTESQVTQHSLPAAGGVRRMRWTPKMNESVMRAYYRAVGRETGRTGYRAVMHREFLLLEPTLTVTEQNLADRARYIQRKGIFDAAELERFRREAAPEVEPVSTVRNEVSTQQEGVRSEAPVEVITEGAVAQKVEQMRGILQEAISETQGAPLEMRPRLSRLPLNAATRNAIEAANRLLPPYLEGSLSLEDTGSILFGAALAVHRLVGAKTQESGRATHKNSDVPAWKRRIERRINLARAIIGRLLAFRSGNTRPRIVRSVRMAFNGLGISLDQPDIADKLTERIDGLKQRIAAWGKRIRRYSERVERFRQNRLFVSDQKSFYRKLENPISSSASLKPSTVDLVAFWRNIWSGEVEHEEGPWIAAVQDACAKIEPMNPIAISTEDVSGAVRRAPNWKSPGADGLHHYWLKGLSVCHATLARQYQEAIDRKTLPNLFTTGITHLAPKSTNTADPTNYRPITCLTSIYKTLTSVLSCKISRHIGEFNILSAAQNGCRGGGRGTKELLLIDSVAGQLVRRNRRNFSAAWIDYKKAFDSVPHSWLLRVLELYKIDQAVRDFLGVCMGQWSTILCLQGERLTGADDPIRIRRGIFQGDCLSPLWFCLSLNPLSTLLERSGTGFQFRRGGTKVSHLLYMDDLKLLAPNAARLQELLKITTEFSSSIRMQLGVDKCAVVHVDRGQVTQSSQLSLELTSFKTLSEAESYRYLGMSQCIGVKEVDMKQAVCEIFFGRLTKVLRSYLSGANKVRAYNAWVMPTLLYTFGILRWTQTELDALDRRVRTTMTYHRMHHPKSSVMRLYIPRKCGGRGMLSAKTMHNREVCSLRAYFETRRDSALHGDVSMCDKGLTPLALAKENWQKPVVLSTSDRETVWMEKELHGRFYKALHAPHVDSKASVQWLRFGDLFGETEGFVCAIQDQVVKTNNYRKHVLKDGTPDFCRACRHPGESLRHVLSGCSALANTEYLHRHNQVAKILHQELALMYGLLEQRMPYYQYSPVPVLERDGVRLYWDLPIATDRTILANKPDIVVMDRARSRVFLVDITVPHDENLVKAETEKKRKYLDLAHEIVDMWGVGSAEIIPIVISANGLIPVSLAHHLRQLGIRDGSLAARMQKAVLLDSARIVRRFLSLQP

SEQ ID NO: 14668 - protein, 1182 aa, Melitaea cinxia
MMEDDLQRRIGPLPGGRQGASGAGAGRGSMRAASQPRRPAPPPDRLGYPPSPPVGLATTESQGTQHSLPAAGGVRRMRWTPKMNESVMRAYYRAVGRETGRTGYRAVMHREFLLLEPTLTVTEQNLADRARYIQRKGIFDAAELERFRREAAPEVEPVSTVRNEVSTQQEGVRSEAPVEVITEGAVAQKVEQMRGILQEAISETRGAPLEMRPRLSRLPLNAATRNAIEAANRLLPPYLEGSLSLEDTGSILFGAALAVHRLVGAKTQESGRATHKNSDVPAWKRRIERRINLARALIGRLLAFRSGNTRPRIVRSVRMAFNGLGISLDQPDIADKLTERIDGLKQRIAAWGKRIRRYSERVERFRENRLFVSDQKRFYRKLENPISSSASLKPSTVDLVAFWRNIWSGEVEHEEGPWIAAVQDACAKIEPMNPIAISTEDVSGAVRRAPNWKSPGADGLHHYWLKGLSVCHATLARQCQEAIDRKTLPNLFTTGITHLAPKSTNTADPTNYRPITCLTSIYKTLTSVLSCKISRHIGEFNILSAAQNGCRGGGRGTKELLLIDSVAGQLVRRNRRNFSAAWIDYKKAFDSVPHSWLLRVLELYKIDQAVRDFLGVCMGQWSTILCLQGERLTGADDPIRIRRGIFQGDCLSPLWFCLSLNPLSTLLERSGTGFQFRRGGTKVSHLLYMDDLKLLAPNAARLQELLKITTEFSSSIRMQLGVDKCAVVHVDRGQVTQSSQLSLELTSFKTLSEAESYRYLGMSQCIGVKEVDMKQAVCEIFFGRLTKVLRSYLSGANKVRAYNAWVMPTLLYTFGILRWTQTELDALDRRVRTTMTHHRMHHPKSSVMRLYISRKCGGRGMLSAKTMHNREVCSLRAYFETRRDSALHGDVSMCDKGLTPLALAKENWQKPVVLSTSDRETVWMEKELHGRFYKALHAPHVDSKASVQWLRFGDLFGETEGFVCAIQDQVVKTNNYRKHVLKDGTPDFCRACRHPGESLRHVLSGCSVLANTEYLHRHNQVAKILHQELALMYGLLEQRMPYYQYSPVPVLERDGVRLYWDLPIATDRTILANKPDIVVMDRARSRVFLVDITVPHDENLVKAETEKKRKYLDLAHEIVDMWGVGSAKIIPIVISANGLIPVSLAHHLRQLGIRDGSLAARMQKAVLLDSARIVRRFLSLQP

SEQ ID NO: 14669 - protein, 1182 aa, Mellicta athalia
MEDKKNGKRIGPLPGGRQGASGAGAGRGSMRAASHPRRPAPPPDRSANPPSPPDGLAPTESQGAQHSAPAAGGVRRMRWTTTMNENVMRAYYRAVGRETGRTGYRAVMHREFLLLEPTLTVTEQNLADRARYIQRKGVFDATELERFRREAAPEVEPVSAERDAVTTQQESVRSEAPVEAITEGAVSQKVELMRGILEEAISETRGAPLEQRPRLSRLPLNAATRSAIEVANRLLPPYLEGSLGLEDTGSILFAAALAVHRLVGAKTQEPGRATHKNSDVPAWKRRIERRISLARALIGRLLAFRSGNTRPRIVRSVRKAFNGLGISLDQPDIADRLTERIDGLKQRIAAWGKRIRRYSERVERFRQNRLFVSDQKRFYRKMENPIPCSSSLKPSTVDLVAFWRNIWSREVEHEEGPWIAAVQEACAKIEPMNPIAISTEDVSDAVRRAPNWKSPGADGLHHYWLKGLSVCHATLARQYQEAIDRKTLPNLLATGITHLAPKSTNTADPTNYRPITCLTSIYKTLTSVLSCKISRHIRESNILSAAQNGCRGGGRGTKELLLIDSVAGQLVRRNRRNFSAAWIDYKKAFDSVPHSWLLRVLELYKIDKAVRDFLGVCMGQWSTILCLQGERLTGADDPIRIRRGIFQGDCLSPLWFCLSLNPLSTLLERSGTGFQFRRGGTKVSHLLYMDDLKLLAPNAARLQELLKITTEFSGSIRMQLGVDKCAVVHVDRGQVTQSAQFSLELTSFKTLSEAESYRYLGMSQCIGVKEVDMKQAVCEVFFGRLTKVLRSYLSGANKVRAYNAWVMPTLLYTFGILRWTQTELDALDRRVRTTMTHHRVHHPKSSVMRLYISRKCGGRGMLSAKTMHNREVCSLRAYFEARRDSAMHGDVVVCDKGLTPLSLANENWQKPVILSTSDRETVWMEKELHGRFYKALHAPHVDSKASVQWLRFGDLFGETEGFVCAIQDQVVKTNNYRKHILKDGTPDFCRACRHPGESLRHVLSGCSVLANTEYLHRHNQAAKILHQELALMYGLLEQRMPYYQYSPVPVLERDGVRLYWDLPIATDRTILANKPDIVVMDRARSRVFLVDITIPHDENLVKAETEKKRKYLDLAHEIVDMWDVRSAEIIPIVISANGLIPVSLAHHLRQLGIRDSSLAARMQKAVLLDSARIVRRFLSLQP

SEQ ID NO: 14670 - protein, 1190 aa, Maniola jurtina
MMMEHNIRNARIGPLPGGRQGAPGAGAGRSSIRAASTTSRPALPPSRSTHPSSPPDGLAPTGPTRAQSSAPAAGGVRRMRWTSLMNENVMRAYYRATGGETGRTGYRAAMYREFLLLEPNLTVTEQNLADRARYIQRSNIFNAAELERLRREAVPEVSAPTTVQIVSQAEPVREEATTTLQDLPVEEDTGETVSLDIERMRRILEEAISEIRNAPLENRPRLSRLTLNVATRDVIEAINKMLPQHLESSTGLGDTASIIFGAALAVHRFIGAKTPGPGRAAATRRSAEPAWKKRIEHRITLARVLIGRLQSFRSGNTRPRIVRSVRVALNGCGVRLDQPDIAQKLTERIDDLKQKIAAWGNRIRRYSARVERFQQNRLFSSDQKRFYKRLECPAVCSASQRPDPADLVAFWRGVWSREVEHEEGPWIAAVEEACARIEPMNPVAISAEDVAGAVRRAPNWKSPGPDGLHHYWLKGFSVCHATLARQFQEALEQRALPSLFTTGITHLAPKSTDATDPAKYRPITCLTTIYKTLTSVLSLKISRHIDENNIMSGAQNGCRGGSRGTKELLLIDSVAGQLVKRNRRNFSAAWIDYKKAFDSVPHSWLLRVLELYKVDSAVRDFLETCMGQWSTILCLHGERLAAADDRIRIGRGIFQGDCLSPLWFCLSLNPLSTLLEGSGTGFQFRRGGTKVPHLLYMDDLKLLAPNATRLKELLSITTEFSNSIRMELGLDKCAVMHVERGQVTHSAEISLEPSNIKSLSEAESYRYLGMSQSLGVKEADMKQSVCEAFFGRLTKICKSYLSGANKVRAYNGWVMPVLMYTFGVLSWTQTELDALDRKVRATMTLYRMHHPKSSVMRLYIPRKCGGRGVLSAKTMHNREISNLRTYFETMRGSPMHREVIECDKGLTPLSLAKTEWQKPVVLSTSDRETVWKEKELHGRFFKALNEPHVDKKASVQWLRFGDLFGETEGFVCAIQDQVVKTRNYRKYILKDGTHDICRACRHPGESLRHVLSGCSALANTEYLHRHNQAAKILHQELALKYGLLDERLPYYKYTPVPVLERDGVRLYWDRSIITDRTILANKPDIVLVDRAQSRVFLVDITIPYDENLVRAETEKKRKYLDLAHEVSDMWHVESTEIIPIVISANGLIPVSLAHHLRRLGFRGSSLAARMQKAVLLDSARIVRRFLSLSS

SEQ ID NO: 14671 - protein, 1190 aa, Maniola jurtina
MMMEHNIRNARIGPLPGGRQGAPGAGAGRSSIRAASTTSRPALPPSRSTHPSSPPDGLAPTGPTRTQSSAPAAGGVRRMRWTSLMNENVMRAYYRATGGETGRTGYRAAMYREFLLLEPNLTVTEQNLADRARYIQRSNIFNAAELERLRREAVPEVSAPTTVQIVSQAEPVREEATTTLQDLPVEEDTGETVSLDIERMRRILEEAISEIRNAPLENRPRLSRLTLNVATRDVIEAINKMLPQHLESSTGLGDTASIIFGAALAVHRFIGAKTPGPGCAAATRRSAEPAWKKRIEHRITLARVLIGRLQSFRSGNTRPRIVRSVRVALNGCGVRLDQPDIAQKLTERIDDLKQKIAAWGNRIRRYSARVERFQQNRLFSSDQKRFYKRLECPAVCSTSQRPDPADLVAFWRGVWSREVEHEEGPWIAAVEEACARIEPMNPVAISAEDVAGAVRRAPNWKSPGPDGLHHYWLKGFSVCHATLARQFQEALEQRALPSLFTTGITHLAPKSTDATDPAKYRPITCLTTIYKTLTSVLSLKISRHIDENNIMSGAQNGCRGGSRGTKELLLIDSVAGQLVKRNRRNFSAAWIDYKKAFDSVPHSWLLRVLELYKVDSAVRDFLETCMGQWSTILCLHGERLAAADDRIRIGRGIFQGDCLSPLWFCLSLNPLSTLLEGSGTGFQFRRGGTKVPHLLYMDDLKLLAPNATRLKELLSITTEFSNSIKMELGLDKCAVMHVERGQVTHSAEISLEPSNIKSLSEAESYRYLGMSQSLGVKEADMKQSVCEAFFGRLTKICKSYLSGANKVRAYNGWVMPVLMYTFGVLSWTQTELDALDRKVRATMTLYRMHHPKSSVMRLYIPRKCGGRGVLSAKTMHNREISNLRTYFETMRGSPMHREVIECDKGLTPLSLAKTEWQKPVVLSTSDRETVWKEKELHGRFFKALNEPHVDKKASVQWLRFGDLFGETEGFVCAIQDQVVKTRNYRKYILKDGTHDICRACRHPGESLRHVLSGCSALANTEYLHRHNQAAKILHQELALKYGLLDERLPYYKYTPVPVLERDGVRLYWDRSIITDRTILANKPDIVLVDRAQSRVFLVDITIPYDENLVRAETEKKRKYLDLAHEVSDMWHVGSTEIIPIVISANGLIPVSLAHHLRRLGFRGSSLAARMQKAVLLDSARIVRRFLSLSP

SEQ ID NO: 14672 - protein, 1182 aa, Melitaea cinxia
MMEDNLERRIGPLPGGRQGASGAGAGRGSMRAASQPRRPAPPPDRSAYPPSPPVGLATTESQGTQHSLPAAGGVRRMRWTPKMNENVMRAYYRAVGRETGRTGYRAVMHREFLLLEPTLTVTEQNLADRARYIQLKGIFDAAELERFRREAAPEVEPVSTVRNEVSAQQEGVRSKAPMEAITEGAVAQKVEQMRGILQEAISETRGAPLEMRPRLSRLPLNAATRNAIEAANRLLPPYLEGSLSLEDTGSILFGAALAVHRLVGAKTQESGRATHKNSDVPAWKRRIERRINLARALIGRLLAFRSGNTRPRIVRSVRMAFNGLGISLDQPDIADKLTERIDGLKQRIAAWGKRIRRYSERVERFRQNRLFVSDQKRFYRKLENPISGAASLKPSTVDLVAFWRNIWSGEVEHEEGPWIAAVQDACAKIEPMNPIAISTEDVSGAVRRAPNWKSPGADDLHHYWLKGLSVCHATLARQYQEAIDRKTLPNLFTTGITHLAPKSTNTADPTNYRPITCLTSIYKTLTSVLSCKISRHIGEFNILSAAQNGCRGGGRGTKELLLIDSVAGQLVRRNRRNFSAAWIDYKKAFDSVPHSWLLRVLEMYKIDQAVRDFLGVCMGQWSTILCLQGERLTGADDPIRIRRGIFQGDCLSPLWFCLSLNPLSTLLERSGTGFQFRRGGTKVSHLLYMDDLKLLAPNAARLQELLKITTEFSSSIRMQLGVDKCAVVHVDRGQVTQSSQLSLELTSFKTLSEAESYRYLGMSQCIGVKEVDMKQAVCEIFFGRLTKVLRSYLSGANKVRAYNAWVMPTLLYTFGILRWTQTELDALDRRVRTTMTYHRVHHPKSSVMRLYIPRKCGGRGMLSAKTMHNREVCSLRAYFETRRDSALHGDVSMCDKGLTPLALAKENWQKPVVLSTSDRETVWMEKELHGRFYKALHAPHVDSKASVQWLRYGDLFGETEGFVCAIQDQVVKTNNYRKHVLKDGTPDFCRACRHPGESLRHVLSGCSALANTEYLHRHNQVAKILHQELALMYGLLEQRMPYYQYSPVPVLERDGVRLYWDLPIATDRTILANKPDIVVMDRARSRVFLVDITVPHDENLVKAETEKKRKYLDLAHEIVDMWGVGSAEIIPIVISANGLIPVSLAHHLRQLGIRDGLLAARMQKAVLLDSARIVRRFLSLQP

SEQ ID NO: 14673 - protein, 1182 aa, Melitaea cinxia
MMEDNLERRIGPLPGGRQGASGAGAGRGSMRAASQPRRPAPPPDMSAYPPSLPVGLATTESQGTQHSLPAAGGVRRMRWTPKMNENVMRAYYRAVGRETGRTGYRAVMHREFLLLEPTLTVTEQNLADRARYIQRKGIFDAAELERFRREAAPEVEPVSTVRNEVSTQQESVRSEAPVEAITEGAVAQKVEQMRGILHEAIFETRGAPLEMRPRLSRLPLNAATRHAIEAANRLLPPYLETSFSLEDTGSILFGAALAVHRLVGAKTQESGRATHKNSDVPAWKRRIERRINLARALIGRLLAFRSGNTRPRIVRSVRMAFNGLGISLDQPDIADKLTERIDGLKQRIAAWGKRIRRYSERVERFRQNRLFVSDQKRFYRKLENPISGSASLKPSTVDLVTFWRNIWSGEVEHEEGPWIAAVQDACAKIEPMNPIAISTEDVSGAVRRAPNWKSPGADGLHHYWLKGLSVCHATLARQYQEAIDRKTLPNLFTTGITHLAPKSTNTADPTNYRPITCLTSIYKTLTSVLSCKISRHIGEFNILSAAQNGCRGGGRGTKELLLIDSVAGQLVRRNRRNFSAAWIDYKKAFDSVPHSWLLRVLELYKIDQAVRDFLGVCMGQWSTILCLQGERLTGAGDPIRIRRGIFQGDCLSPLWFCLSLNPLSTLLERSGTGFQFRRGGTKVSHLLYMDDLKLLAPNAARLQELLKITTEFSSSIRMQLGVDKCAVVHVDRGQVTQSSQLSLELTSFKTLSEAESYRYLGMSQCIGVKEVDMKQAVCEIFFGRLTKVLRSYLSGANKVRAYNAWVMPTLLYTFGILRWTQTELDALDRRVRTTMTYHRVHHPKSSVMRLYISRKCGGRGMLSAKTMHNREVCSLRAYFETRRDSALHGDVSMCDKGLTPLALAKENWQKPVVLSTSDRETVWMEKELHGRFYKALHAPHVDSKASVQWLRFGDLFGETEGFVCAIQDQVVKTNNYRKHVLKDGTPDFCRACRHPGESLRHVLSGCSALANTEYLHRHNQVAKILHQELALMYGLLEQRMPYYQYSPVPVLERDGVRLYWDLPIATDRTILANKPDIVVMDRARSRVFLVDITVPHDENLVKAETEKKRKYLDLAHEIVDMWGVGSAEIIPIVISANGLIPVSLAHHLRQLGIWDGSLAARMQKAVLLDSARIVRRFLSLQP

SEQ ID NO: 14674 - protein, 864 aa, Mellicta athalia
MAFNGLGVSLNQPDIADRLTERIDGLKQRIAAWGKRIRRYSERVERFRQNRLFVSDQKRFYRKLENPIPCSAFLKPSTVDLVAFWRNIWSREVEHEEGPWIAAVQDACAKVDPMNPIAISTEDVSGAVRRAPNWKSPGADGLHHYWLKGLSVCHATLARQYQEAIDRKTLPNLFTTGITHLAPKSTNTADPTNYRPITCLSSIYKTLTSVLSCKISRHIGEFNILSAAQNGCRGGGRGTKELLLIDSVAGQLVRRNRRNFSAAWIDYKKAFDSVPHSWLLRVLELYKIDEAVRDFLGVCMGQWSTILCLQGERLTGADDPIRIRRGIFQGDCLSPLWFCLSLNPLSTLLERSGTGFQFRRGGTKVSHLLYMDDLKLLAPNAAHLQELLKITTEFSGSIRMQLGVDKCAVVHVDRGQVTQSAQFSLELTSFKTLSEAESYRYLGMSQCIGVKEVDMKQAVCEVFFGRLTKVLRSYLSGANKVRAYNTWVMPTLLYTFGILRWTQTELDALDRRVRTTMTHHRVHHPKSSVMRLYISRKCGGRGMLNAKTMHNREVCSLRAYFETRRDSAMHGDVVVCDKGLTPLSLANENWQKPVVLSTSDRETVWMEKELHGRFYKALHAPHVDSKASVQWLRFGDLFGETEGFVCAIQDQVVKTNNYRKHILKDGTPDFCRACRHPGESLRHVLSGCSALANTEYLHRHNQVAKILHQELALMYGLLEQRMPYYQYTPVPVLERDGVRLYWDLPIATDRTILANKPDIVVMDRARSRVFLVDITIPHDENLVKAETEKKRKYLDLAHEIVDMWGVGSAEIIPIVISANGLIPVSLAHHLRQLGIRDGSLAGRMQKAVLLDSARIVRRFLSLQP

SEQ ID NO: 14675 - protein, 1187 aa, Boloria selene
MENNNKNARLGPLPGGRQGAPGAGAGRDSIRAASTTNRPALPPSRPTHPSPPPEGLVPTGSSRTQTSGPAAGGVRRMRWTSQMNENVMRAYYRATGGETGRTGYRAAMYREFLLLEPTLTVTEQNLADRARYIQRSNILNATELERLRREAVPEVRTLTTEQIVPPAATGEDVLTNFHDLPIEGGTQETVALDTERMRRILEEAVSEIRSAPLENRPRLSRLTLNVATREVIEAINQLLPQHLESSIGLDDTASILFGAALAVHRFVGARTPGPERDTAARRKAQPAWKKRIERRINHARGLIGRLQSFRSGNTRPRIVRSVRIAFNGLGVRLDQPDIAQKLTERIDDLKQRIAAWGSRIRRYSERVERFQQNRLFSSDQKRFYRTLECPAVCSTSQKPSPADLVAFWRNVWSKEVQHEEGPWIAAVEEACAVIKPMSPVAISAEDVVDAVRRAPNWKSPGPDGLHHYWLKGFSVCHVTLARQFQEALEQRTLPNLFTTGITHLAPKSTDAADPAKYRPITCLTTIYKTVTSVLSSKISRHVDENNIISGAQNGCRGRSRGTKELLLIDSVAGQLVKRNRRNFSAAWIDYKKAFDSVPHSWLSRVLELYKVDSTVRNFLGKCMAQWSTILSLHGERITAADDRIRIRRGIFQGDCLSPLWFCLSLNPLSSLLESSGTGFQFRRGGTRVPHLLYMDDLKLLAPNANRLQELLKITSEFSNSIRMKLGLDKCAVLHVVRGQVTHSAEINLEPSSIRTLSEAESYRYLGMSQSIGVNEADMKQSVCEAFFGRLTKVCKSFLSGANKVRAYNGWVMPVLMYTFGVLRWTQTELDTLDRRVRTTMTLYRMHHPKSSVMRLYIPRKCGGRGLLSVKTMHNREIANLRTYFETKGESPMQREVIECDKGLTPLSLAKTEWQAPVVLSTSDRETVWKEKELHGRFFKALNEPNVDKKASVQWLRFGDLFGETEGFVCAIQDQVVKTRNYRKYILKDGTHDICRACGHPGESLRHVLSGCSALANTEYLHRHNQAAKILHQELALKHGLLDERLPYYKYTPMPVLERDGVRLYWDRSIITDRTILANKPDIVLMDRAQSRVFLVDITVPYDENLVRAETEKKRKYLDLAHEVSTMWHVGSTETIPIVISANGLIPVSLAHYLRRLGFRDSSLATRMQKAVLLDSARIVRRFLNLSP

SEQ ID NO: 14676 - protein, 1188 aa, Elymnias hypermnestra
MMMDLFSTDIRLGPLPGGRQGTSGAGAGRDSMRAASSTSSTRRPARPPRRPTNPSSPPEGLASAGTARTQNPEPAAGGVCRMRWTSLMNENVMRAYYRATGGETGRTGYRTAMYREFLLLEPNLTVTEQNLADRARYIQRSNIFSATELERLRCEAVPEVTPPATQQTAATAIVHQELENNQDLLVDGDAEGTVSLDIEKMRGILEEAISESRSAPLEGRPRLSRLTLSAATRDVIEAINKLLPQYFEGSTGLSETASILYGAALAVHRFIGVKIREPGRTANTSSAVPAWKRRIERRITHARRLIGRLQSFRSGNTRPRIVRSVRIAFNGLDVRLDQPDIAQKLTERIDDLKQKIAAWGNRIRRYSERVERFHQNRLFVSDQKRFYERLQRPASCSSSQRPASADLVAYWRSIWSLEVEHEEGSWTAAVEEACAVIQPMNPVAITPEDVVGAVRRAPNWKSPGPDGLHHYWLKGFSACHATLARQFQEAMAQKALPNLFTTGITHLAPKTSNAADPTKYRPITCLSSIYKTLTSILSRKISYHIDENNIMSVAQNGCRGGSRGTKELLLIDSVAGQLVKRNRRNFSAAWIDYKKAFDSVPHSWLLRVLELYKIDGTLRDFLGECMRQWSTILCLHGERLTAADDRIRIRRGIFQGDCLSPLWFCLSLNPLSFLLERSGTGFQFRRGGARVPHLLYMDDLKLLAPNAPRLQELLKITSDFSNSIRMEMGLDKCAVLHVERGQVSHSAEINLEPTQLKTLSETETYRYLGMSQCMGVKEADMKQSVCEVFYGRLTKILKSYLSGANKIRAYNGWVMPVLLYTFGILRWTQTELDALDRRVRTTMTFHRMHHPKSSVMRLYIPRKCGGRGLLSAKTMHNREISSLRTYFETKRESPMHLEVIECDKGLTPLSLANENWQRPAVLSTSDREAVWKGKEMHGRFFKALHEPHVNRKASVQWLRFGDLFGETEGFVCAIQDQVVKTRNYRKYILKDGTHDICRACRHPGESLRHVLSGCSALANTEYLHRHNQAAKILHQELALMYGLLDERLPYYRYQPVPVLERDGVRLYWDRSIITDRTILANKPDIVIMDRAQSRVFLVDITIPYDENLVRAETEKKRKYLDLAHEITAMWGVGSTETIPIVISANGLIPVSLAHHLRRLGFRGSSLAARMQKAVLLDSARIVRRFLSL

SEQ ID NO: 14677 - protein, 1182 aa, Melitaea cinxia
MMEDDLQRRIGPLPGGRQGASGAGAGRGSMRAASQPRRPAPPPDRSGYPPSPPVGLATTESQGTQHSLPAAGGVRRMRWTPKMNESVMRAYYRAVGRETGRTGYRAVMHREFLLLEPTLTVTEQNLADRARYIQRKGIFDAAEFERFRREAAPEVEPVSTVRNEVSAQQEGVRSEAPVEVITEGAVAQKVEQMRGILQEAISETRGAPLEMRPRLSRLPLNAATRNAIEAANRLLPPYLEGSLSLEDTGSILFGAALAVHRLVGAKTQESGRATHKNSDVPAWKRRIECRINLARALIGRLLAFRSGNTRPRIVRSVRMAFNGLGISLDQPDIADKLTERIDGLKQRIAAWGKRIRRYSERVERFRQNRLFVSDQKRFYRKLENPISSSASLKPSTVDLVAFWSSIWSGEVEHEEGPWIAAVQDACAKIEPMNPIAISTEDVSGAVRRAPNWKSPGADGLHHYWLKGLSVCHATLARQYQEAIDRKTLPNLFTTGITHLAPKSTNTADPTNYRPITCLTSIYKTLTSVLSCKISRHIGEFNILSAAQNGCRGGGRGTKELLLIDSVAGQLVRRNRRNFSAAWIDYKKAFDSVPHSWLLRVLELYKVDQAVRDFLGVCMGQWSTILCLQGERLTGADDPIRIRRGIFQGDCLSPLWFCLSLNPLSTLLERSGTGFQFRRGGTKVSHLLYMDDLKLLAPNAARLQELLKITTEFSSSIRMQLGVDKCAVVHVDRGQVTQSSQLSLELTSFKTLSEAESYRYLGMSQCIGVKEVDMKQAVCEIFFGRLTKVLRSYLSGANKVRAYNAWVMPTLLYTFGILRWTQTELDALDRRVRTTMTHHRMHHPKSSVMRLYIPRKCGGRGMLSAKTMHNREVCSLRAYFETRRDSALHGDVSMCDKGLTPLALAKENWQKPVVLSTSDRETVWMEKELHGRFYKALHAPHVDSKASVQWLRFGDLFGETEGFVCAIQDQVVKTNNYRKHVLKDGTPDFCRACRHPGESLRHVLSGCSVLANTEYLHRHNQVAKILHQELALMYGLLEQRMPYYQYSPVPVLERDGVRLYWDLPIATDRTILANKPDIVVMDRARSRVFLVDITVPHDENLVKAETEKKRKYLDLAHEIVDMWGVGSAEIIPIVISANGLIPVSLAHHLRQLGIRDGSLAARMQKAVLLDSARIVRRFLSLQP

SEQ ID NO: 14678 - protein, 882 aa, Melitaea cinxia
MLAFRSGNTRPRIVRSVRMAFNGLGISLDQPDITDKLTERIDGLQQRIAAWGKRIRRYSERVEHFRQNRLFLSDQKRFYRKLENPIPCSASLKPSTVDLVAFWRNIWSGEVEHEKGPWIAAVQDACAAIEPMNPIAISTEDVSGAVRRALNWKNPGADGLHHYWLKGLSVCHATLARQYQEAIDRKTLPNLFTTGITHLAPKSTNTADPTNYRPITCLTSIYKTLASVLSCKISRHISEFNILSAAQNGCRGGGHGTKELLLIDSVAGQLVRCNRRNFSAAWIDYKKAFDSVPHSWLLRVRELYKIDQAVRDFLGVCMGQWSTILCLQGEQLTGADDPIRIRRGIFQGDCLNPLWFCLSLNPLSTLLERSGTGFQFRRGGTKVSHLLYMDDLKLLAPNAARLQELLKITTEFSSSTSMQLGVDKCAVVHVDRGQVTQSSQLSLELTSFKTLSEAESYRYLGMSQCIGVKEVGMKQAVCEFFFGRLTKVLRSYLSGANKVRAYNAWVMPTLLYTFGILRWTQTELDALDRRVRTTMTYHRVHHPKSSVMRLYIPRKCGGRGMLSAKTMHNREVCSLRAYFETRRDSALHGDVSMCDKGLTPLALAKENWQKPVVLSTSDRETVWMEKELHGRFYKALHAPHVDSKASVQWLQFGDLFGETEGFVCAIQDQVIKTNNYRKHVLKDGTPDFCRACRHPGESLRHVLSGCSPLANTEYLHRHNQVAKILHQELALMYGLLEQRMPYYQYLPVPVLERDGVRLYWDLPIATDRTILANKPDIVVMDRARSRVFLVDITVPHDENLVKAETVKKRKYLDLAHEIVDMWGVGPAEIIPIVISANGLIPVSLAHHLRQLGIRDGSLAARMQKAVLLDSARIVRRFLSLQP

SEQ ID NO: 14679 - protein, 1095 aa, Melitaea cinxia
MRAYYRAVGRETGRTGYRAVMHREFLLLEPTLTVTEQNLADRARYIQRKGIFDATELERFRREAAPEVEPVSTVRNEVSTQQEGVRSEAPVEAITEGAVAQKVEQMRGILHEAISETRGAPLEMRPRLSRLPLNAATRHAIEAANRLLPPYLETSFSLEDTGSILFGAALAVHRLVGAKTQESGRATHKNSDVPAWKRRIERRINLARALIGRLLAFRSGNTRPRIVRSVRMAFNGLGISLDQPDIADKLTERIDGLKQRIAAWGKRIRRYSERVERFRQNRLFVSDQKRFYRKLENPISGSASLKPSTVDLVAFWRNIWSGEVEHEEGPWIAAVQDACAKIEPMNPIAISTEDVSGAVRRAPNWKSPGADGLHHYWLKGLSVCHATLARQYQEAIDRKTLPNLFTTGITHLAPKSTNTADPTNYRPITCLTSIYKTLTSVLSCKISRHIGEFNILSAAQNGCRGGGRGTKELLLIDSVAGQLVRRNRRNFSAAWIDYKKAFDSVPHSWLLRVLELYKIDQAVRDFLGVCMGQWSTILCLQGKRLTGADDPIRIRRGIFQGDCLSPLWFCLSLNPLSTLLERSGTGFQFRRGGTKVSHLLYMDDLKLLAPNAARLQELLKITTGFSSSIRMQLGVDKCAVVHVDRGQVTQSSQLSLELTSFKTLSEAESYRYLGMSQCIGVKEVDMKQAVCEIFFGRLTKVLRSYLSGANKVRAYNAWVMPTLLYTFGILRWTQTELDALDRRVRTTMTHHRMHHPKSSVMRLYIPRKCGGRGMLSAKTMHSREVCSLRAYFETRRDSALHGDVSKCDKGLTPLALAKENWQKPVVLSTSDRETVWMEKELHGRFYKALHAPHVDSKASVQWLRFGDLFGETEGFVCAIQDQVVKTNNYRKHVLKDGTPDFCRACRHPGESLRHVLSGCSALANTEYLHRHNQVAKILHQELALMYGLLEQRMPYYQYSPVPVLERDGVRLYWDLPIATDRTILANKPDIVVMDRARSRVFLVDITVPHDENLVKAETEKKRKYLDLAHEIVDMWGVGSAEIIPIVISANGLIPVSLAHHLRQLGIRDGSLAARMQKAVLLDSARIVRRFLSLQP

SEQ ID NO: 14680 - protein, 1079 aa, Elymnias hypermnestra
MNENVMRAYYRATVGETGRTGYRTAMYREFLLLEPNLTVTEQNLADRARYIQRSNIFSATELERLRCEAVPEVTPPATQQTAATAIVHQELENNQDLLVDGDAEGTVSLDIEKMRGILEEAISESRSAPLEGRPRLSRLTLSAATRDVIEAINKLLPQYFEGSTGLSETASILYGAALAVHRFIGVKIREPGRTANTSSAVPAWKRRIERRITHARRLIGRLQSFRSGNTRPRIVRSVRIAFNGLDVRLDQPDIAQKLTERIDDLKQKIAAWGNRIRRYSERVERFHQNRLFVSDQKRFYERLQRPASCSSSQRPASADLVAYWRSIWSLEVEHEEGSWTAAVEEACAVIQPMNPVAITPEDVVGAVRRAPNWKSPGPDGLHHYWLKGFSACHATLARQFQEAMAQKALPNLFTTGITHLAPKTSNAADPTKYRPITCLSSIYKTLTSILSRKISYHIDENNIMSVAQNGCRGGSRGTKELLLIDSVAGQLVKRNRRNFSAAWIDYKKAFDSVPHSWLLRVLELYKIDGTLRDFLGECMRQWSTILCLHGERLTAADDRIRIRRGIFQGDCLSPLWFCLSLNPLSFLLERSGTGFQFRRGGARVPHLLYMDDLKLLAPNAPRLQELLKITSDFSNSIRMEMGLDKCAVLHVERGQVSHSAEINLEPTQLKTLSETETYRYLGMSQCMGVKEADMKQSVCEVFYGRLTKILKSYLSGANKIRAYNGWVMPVLLYTFGILRWTQTELDALDRRVRTTMTFHRMHHPKSSVMRLYIPRKCGGRGLLSAKTMHNREISSLRTYFETKRESPMHLEVIECDKGLTPLSLANENWQRPAVLSTSDREAVWKGKEMHGRFFKALHEPHVNRKASVQWLRFGDLFGETEGFVCAIQDQVVKTRNYRKYILKDGTHDICRACRHPGESLRHVLSGCSALANTEYLHRHNQAAKILHQELALMYGLLDERLPYYRYQPVPVLERDGVRLYWDRSIITERTILANKPDIVIMDRAQSRVFLMDITIPYDENLVRAETEKKRKYLDLAHEITAMWGVGSTETIPIVISANGLIPVSLAHHLRRCCWTRIGG

SEQ ID NO: 14681 - protein, 1190 aa, Maniola hyperantus
MMMENNEMNVRIGPLPGGRQGAPGAGAGRSSIRAASTTSRPAPPPSRSTHPSSPPDGLAPTGSTRAQSSAPAAGGVRRMRWTSLMNENVMRAYYRATGGETGRTGYRAAMYREFLLLEPNLTVTEQNLADRARYIQRSNIFNATELERLRREAVPEVSAPATEQIDSQAVPVPVETNTISQDLPMEEDTEGTVSLDIERMRGILEEAISEIRSAPLENRPRLSRLTLNVATRDVIEAINKMLPQHLESSTGLGDTASILFGAALAVHRFIGAKTPGPERAAAARRSAEPAWKKRIERRITLARVLIGRLQSFRSGNTRPRIVRSVRVAFNGCGVRLDQPNIAQKLTERIDDLKQKIAAWGNRIRRYSERVERFQQNRLFLSDQKRFYKRLECPAVCSTSQRPDLANLVTFWRGVWSREVEHEEGPWIAAVEEACASIEPMNPVAISAEDVAGAVRRAPNWKSPGPDGLHHYWLKGFSVCHATLARQFQEALEQRALPSLFTTGITHLAPKSTDTTDPAKYRPITCLTTIYKTLTSVLSLKISRHVDENNIISGAQNGCRGGSRGTKELLLIDSVAGQLVKRNRRNFSAAWIDYRKAFDSVPHSWLLRVLELYKVDGTVRDFLGACMGQWSTILCLHGERLAAADDRIRIGRGIFQGDCLSPLWFCLSLNPLSTLLEGSGTGFQFRRGGTKVPHLLYMDDLKLLAPNATRLQELLNVTTDFSNSIRMELGLEKCAVMHVERGQVTHSAEMSLEPSTIRTLSEAESYRYLGMSQSLGVKETDVKQSVCEAFFGRLTKICKSYLSGANKVRAYNGWVMPVLMYTFGVLRWTQTELDALDRKVRTTMTLYRMHHPKSSVMRLYIPRKCGGRGVLSVKTMHNREIANLRTYFETMRGSPMHREVIECDKGLTPLSLAQTEWQKPVVLSTSDREAVWREKELHGRFFKALNEPHVDKKASVQWLRFGDLFGETEGFVCAIQDQVDKTRNYRKYILKDGTHDICRACRHPGESLRHVLSGCSALANTEYLHRHNQAAKILHQELALKYGLLDERLPYYKYTPVPVLERDGVRLYWDRSIITDRTILANKPDIVVVDRAQSRVFLVDITIPYDENLVRAETEKKRKYLDLAHEVSDMWHVESTEIIPIVISANGLIPVSLAHHLRRLGFRGSSLAARMQKAVLLDSARIVRRFLHLSP

SEQ ID NO: 14682 - protein, 864 aa, Melitaea cinxia
MAFNGLGISLDQPDIADKLTERIDGLKQRIAAWGKRIRRYSERVERFRQNRLFVSDQKRFYRKLENPISSSASLKPSTVDLVAFWRNIWSGEVEHEEGPWIAAVQDACAKIEPMNPIAISTEDVSGAVRRAPNWKSPGADGLHHYWLKGLSVCHATLARQYQEAIDRKTLPNLFTTGITHLAPKSTNTADPTNYRPITCLTSIYKTLTSVLSCKISRHIGEFNILSAAQNGCRGGGRGTKELLLIDSVAGQLVRRNRRNFSAAWIDYKKAFDSVTHSWLLRVLELYKIDQAVRDFLGVCMGQWSTILCLQGERLTGAGDPIRIRRGIFQGDCLSPLWFCLSLNPLSTLLERSGTGFQFRRGGTKVSHLLYMDDLKLLAPNAARLQELLKITTEFSSSIRMQLGVDKCAVVHVDRGQVTQSSQLSLELTSFKTLSEAESYRYLGMSQCIGVKEVDMKQAVCEIFFGRLTKVLRSYLSGANKVRAYNAWVMPTLLYTFGILRWTQTELDALDRRVRTTMTYHRVHHPKSSVMRLYIPRKCGGRGMLSAKTMHNREVCSLRAYFETRRDSALHGDVSMCDKGITPLALAKENWQKPVVLSTSDRETVWMEKELHGRFYKALHAPHVDSKASVQWLRFGDLFGETEGFVCAIQDQVVKTNNYRKHVLKDGTPDFCRACRHPGESLRHVLSGCSALANTEYLHRHNQVAKILHQELALMYGLLEQRMPYYQYLPVPVLERDGVRLYWDLPIATDRTILANKPDIVVMDRARSRVFLVDITVPHDENLVKAETEKKRKYLDLAHEIVDMWGVGSAEIIPIVISANGLIPVSLAHHLRQLGIRDGSLAARMQKAVLLDSARIVRRFLSLQP

SEQ ID NO: 14683 - protein, 1182 aa, Melitaea cinxia
MMEDDLQRRIGPLPGGRQGASGAGAGRGSMRAASQPRRPAPPPDRLGYPPSPPVGLATTESQGTQHSLPAAGGVRRMRWTPKMNESVMRAYYRAVGRETGRTGYRAVMHREFLLLEPTLTVTEQNLADRARYIQRKGIFDAAELERFRREAAPEVEPVSTVRNEVSTQQEGVRSEAPVEVITEGAVAQKVEQMRGILQEAISETRGAPLEMRPRLSRLPLNAATRNAIEAANRLLPPYLEGSLSLEDTGSILFGAALAVHRLVGAKTQESGRATHKNSDVPAWKRRIERRINLARALIGRLLAFRSGNTRPRIVRSVRMAFNGLGISLDQPDIADKLTERIDGLKQRIAAWGKRIRRYSERVERFRQNRLFVSDQKRFYRKLENPISSSASLKPSTVDLVAFWRNIWSGEVEHEEGPWIAAVQDACAKIEPMNPIAISTEDVSGAVRRAPNWKSPGADGLHHYWLKGLSVCHATLARQYQEAIDRKTLPNLFTTGITHLAPKSTNTADPTNYRPITCLTSIYKTLTSVLSCKISRHIGEFNILSAAQNGCRGGGRGTKELLLIDSVAGQLVRRNRRNFSAAWIDYKKAFDSIPHSWLLRVLELYKVDQAVRDFLGVCMGQWSTILSLQGERLTGADDPIRIRRGIFQGDCLSPLWFCLSLNPLSTLLERSGTGFQFRRGGTKVSHLLYMDDLKLLAPNAARLQELLKITTEFSSSIRMQLGVDKCAVVHVDRGQVTQSSQLSLELTSFKTLSEAESYRYLGMSQCIGVKEVDMKQAVCEIFFGRLTKVLRSYLSGANKVRAYNAWVMPTLLYTFGILRWTQTELDALDRRVRTTMTHHRMHHPKSSVMRLYISRKCGGRGMLSAKTMHNREVCSLRAYFETRRDSALHGDVSMCDKGLTPLALAKENWQKPVVLSTSDWETVWMEKELHGRFYKALHAPHVDSKASVQWLRFGDLFGETEGFVCAIQDQVVKTNNYRKHVLKDGTPDFCRACRHPGESLRHVLSGCSVLANTEYLHRHNQVAKILHQELALMYGLLEQRMPYYQYSPVPVLERDGVRLYWDLPIATDRTILANKPDIVVMDRARSRVFLVDITVPHDENLVKAETEKKRKYLDLAHEIVDMWGVGSAEIIPIVISANGLIPVSLAHHLRQLGIRDGSLAARMQKAVLLDSARIVRRFLSLQP

SEQ ID NO: 14684 - protein, 864 aa, Mellicta athalia
MAFNGLGVSLNQPDIADRLTERIDGLKQRIAAWGKRIRRYSERVERFRQNRLFVSDQKRFYRKLENPIPCSAFLKPSTVDLVAFWRNIWSREVEHEEGPWIAAVQDACAKVEPMNPIAISTEDVSGAVRRAPNWKSPGADGLHHYWLKGLSVCHATLARQYQEAIDRKTLPNLFTTGITHLAPKSTNTADPTNYRPITCLSSIYKTLTSVLSCKISRHIGEFNILSAAQNGCRGGGRGTKELLLIDSVAGQLVRRNRRNFSAAWIDYKKAFDSVPHSWLLRVLELYKIDEAVRDFLGVCMGQWSTILCLQGERLTGADDPIRIRRGIFQGDCLSPLWFCLSLNPLSTLLERSGTGFQFRRGGTKVSHLLYMDDLKLLAPNAARLQELLKITTEFSGSIRMQLGVDKCAVVHVDRGQVTQSAQFSLELTSFKTLSEAESYRYLGISQCIGVKEVDMKQAVCEVFFGRLTKVLRSYLSGANKVQAYNTWVMPTLLYTFGILRWTQTELDALDRRVRTTMTHHRVHHPKSSVMRLYISRKCGGRGMLNAKTMHNREVCSLRAYFETRRDSAMHGDVVVCDKGLTPLSLANENWQKPVVLSTSDRETVWMEKELHGRFYKALHAPHVDSKASVQWLRFGDLFGETEGFVCAIQDQVVKTNNYRKHILKDGTPDFCRACRHPGESLRHVLSGCSALANTEYLHRHNQVAKILHQELALMYGLLEQRMPYYQYTPVPVLERDGVRLYWDLPIATDRTILANKPDIVVMDRARSRVFLVDITIPHDENLVKAETEKKRKYLDLAHEIVDMWGVLSAEIIPIVISANGLIPVSLAHHLRQLGIRDGSLAGRMQKAVLLDSARIVRRFLSLQP

SEQ ID NO: 14685 - protein, 1181 aa, Mellicta athalia
MEDKFGKHIGPLPGGRQGASGAGAGRGSMRAASHPRRPAPPPDRSANPPSPPDGLAPTEPQGTQHSAPAAGGVRRMRWTLKMNESVMRAYYRAVGRETGRTGYRAVMHREFLLLEPTVTVTEQNLADRARFIQRKGVFDAAELERFRREAAPEDEPVSAERDAVSTQQESVRSEAPVEAITEGAVAQKVEQMRGILQEAISETRGAPLEQRPRLSRLPLNAATRSAIEAANRLLPPYLEGSLGLEDTGSILFGAALAVHRLVGAKTQEPGLATHKNSDVPAWKRRIERRISLARALIGRLLAFRSGNTRPRIVRSVRMAFNGLGVSLNQPDIADRLTERIDGLKQRIAAWGKRIRRYSERVERFRQNRLFVSDQKRFYRKLENPIPCSAFLKPSTVDLVAFWRNIWSREVEHEEGPWIAAVQDACAKVEPMNPIAISTEDVSGAVRRAPNWKSPGADGLHHYWLKGLSVCHATLARQYQEAIDRKTLPNLFTTGITHLAPKSTNTADPTNYRPITCLSSIYKTLTSVLSCKISRHIGEFNILSAAQNGCRGGGRGTKELLLIDSVAGQLVRRNRRNFSAAWIDYKKAFDSVPHSWLLRVLELYKIDETVRDFLGVCMGQWSTILCLQGERLTGADDPIRIRRGIFQGDCLSPLWFCLSLNPLSTLLERSGTGFQFRRGGTKVSHLLYMDDLKLLAPNAARLQELLKITTEFSGSIRMQLGVDKCAVVHVDRGQVTQSAQFSLELTSFKTLSEAESYRYLGMSQCIGVKEVDMKQAVCEVFFGRLTKVLRSYLSGANKVRAYNTWVMPTLLYTFGILRWTQTELDALDRRVRTTMTHHRVHHPKSSVMRLYISRKCGGRGMLNAKTMHNREVCSLRAYFETRRDSAMHGDVVVCDKGLTPLSLANENWQKPVVLSTSDRETVWMEKELHGRFYKALHAPHVDSKASVQWLRFGDLFGETEGFVCAIQDQVVKTNNYRKHILKDGTPDFCRACRHPGESLRHVLSGCSALANTEYLHRHNQVAKILHQELALMYGLLEQRMPYYQYTPVPVLERDGVRLYWDLPIATDRTILANKPDIVVMDRARSRVFLVDITIPHDENLVKAETEKKRKYLDLAHEIVDMWGVGSAEIIPIVISANGLIPVSLAHHLRQLGIRDGSLAGRMQKAVLLDSARIVRRFLSLQP

SEQ ID NO: 14686 - protein, 1189 aa, Maniola jurtina
MMDNKTRNERIGPLPGGRQGAPGAGAGRSSMRAASATSRPALPPSRSIYPSSPPDGLAPTGSTRAQSSAPAAGGVRRMRWTSLMNENVMRAYYRATGGETGRTGYRAAMYREFLLLEPNLTVTEQNLADRARYIQRSNIFNATELERLRREAVPEVSAPTAEQIVSQAAPVREETITTSQDLPVEEDTEGTVSLDIERMRGILEEAISEIRSAPLENRPRLSRLTLNVATRDVIEAINKMLPQHLESSTGLGDTASIIFGAALAVHRFIGAKTPGPGRAAATRRSAEPAWKKRIEHRITLARVLIGRLQSFRSGNTRPRIVRSVRVAFNGCGVRLDQPDIAQKLTERIDDLKQKIAAWGNRIRRYSARVERFQQNRLFSSDQKRFYKRLECPAVCSTSQRPDPADLVAFWRGVWSREVEHEEGPWIAAVEEACARIEPMNPVAISAEDVAGAVRRAPNWKSPGPDGLHHYWLKGFSVCHATLARQFQEALEQRALPSLFTTGITHLTPKSTDATDPAKYRPITCLTTIYKTLTSVLSLKISRHIDENNIMSGAQNGCRGGGRGTKELLLIDSVAGQLVKRNRRNFSAAWIDYKKAFDSVPHSWLLRVLELYKVDSAVRDFLEACMGQWSTILCLHGERLAAADDRIRIGRGIFQGDCLSPLWFCLSLNPLSTLLEGSGTGFQFRRGGTKVPHLLYMDDLKLLAPNATRLRELLNITTEFSNSIRMELGLDKCAVIHVERGQVTHSAEISLEPSNIKTLSEAESYRYLGMSQSLGVKEADMKQSVCEAFFGRLTKICKSYLSGANKVRAYNGWVMPVLMYTFGVLSWTQTELDALDRKVRTTMTLYRMHHPKSSVMRLYIPRKCGGRGVLSVKTMHNREISNLRTYFETMRGSPMHREVIECDKGLTPLSLAKTEWQKPVVLSTSDRKTVWKEKELHGRFFKALNEPHVDKKASVQWLRFGDLFGETEGFVCAIQDQVVKTRNYRKYILKDGTHDICRACRHPGESLRHVLSGCSALANTEYLHRHNQAAKILHQELALKYGLLDERLPYYRYTPVPVLERDGVRLYWDRSIITDRTILANKPDIVVVDRAQSRVFLVDITIPYDENLVRAETEKKRKYLDLAHEVSDMWHVGSTEIIPIVISANGLIPVSLAHHLRRLGFRGSSLAARMQKAVLLDSARIVRRFLNLSP

SEQ ID NO: 14687 - protein, 1182 aa, Melitaea cinxia
MMEDNLERRIGPLPGGRQGASGAGAGRGSMRAASQPRRPAPPPDMSAYPPSLPVGLATTESQGTQHSLPAAGGVRRMRWTPKMNENVMRAYYRAVGRETGRTGYRAVMHREFLLLEPTLTVTEQNLADRARYIQRKGIFDAAELERFRREAAPEVEPVSTVRNEVSTQQEGVRSEAPVEAITEGAVAQKVEQMRGILHEAISETRGAPLEMRPRLSRLPLNAATRHAIEAANRLLPPYLETSFSLEDTGSILFGAALAVHRLVGAKTQESGRATHKNSDVPAWKRRIERRINLARALIGRLLAFRSGNTRPRIVRSVRMAFNGLGISLDQPDIADKLTERIDGLKQRIAAWGKRIRRYSERVERFRQNRLFVSDQKRFYRKLENPISGSASLKPSTVDLVAFWRNIWSGEVEHEEGPWIAAVQDACAKIEPMNPIAISTEDVSGAVRRAPNWKSPGADGLHHYWLKGLSVCHATLARQYQEAIDRKTLPNLFTTGITHLAPKSTNTADPTNYRPITCLTSIYKTLTSVLSCKISRHIGEFNILSAAQNGCRGGGRGTKELLLIDSVAGQLVRRNRRNFSAAWIDYKKAFDSVPHSWLLRVLELYKIDQAVRDFLGVCMGQWSTILCLQGERLTGAGDPIRIRRGIFQGDCLSPLWFCLSLNPLSTLLERSGTGFQFRRGGTKVSHLLYMDDLKLLAPNAARLQELLKITTEFSSSIRMQLGVDKCAVVHVDRGQVTQSSQLSLELTSFKTLSEAESYRYLGMSQCIGVKEVDMKQAVCEIFFGRLTKVLRSYLSGANKVRAYNAWVMPTLLYTFGILRWTQTELDALDRRVRTTMTYHRVHHPKSSVMRLYIPRKCGGRGMLSAKTMHNREVCSLRAYFETRRDSALHGDVSMCDKGLTPLALAKENWQKPVVLSTSDRETVWMEKELHGRFYKALHAPHVDSKASVQWLRFGDLFGETEGFVCAIQDQVVKTNNYRKHVLKDGTPNFCRACRHPGESLRHVLSGCSALANTEYLHRHNQVAKILHQELALMYGLLEQRMPYYQYSPVPVLERDGVRLYWDLPIATDRTILANKPDIVVMDRARSRVFLVDITVPHDENLVKAETEKKRKYLDLAHEIVDMWGVGSAEIIPIVISANGLIPVSLAHHLRQLGIRDGSLAARMQKAVLLDSARIVRRFLSLQP

SEQ ID NO: 14688 - protein, 1138 aa, Melitaea cinxia
MSAYPPSLPVGLATAESQGTQHSLPAAGGVRRMRWTPKMNENVMRAYYRAVGRETGRTGYRAVMHREFLLLEPTLTVTEQNLADRARYIQRKGIFEAAELERFRREAAPEVEPVSTVRNEVSTQQEGVRSEAPVEAITEGTVAQKVEQMRGILHEAISETRGAPLEMRPRLSRLLLNAATRHAIEAANRLLPPYLETSFTLEDTGSILFGAALAVHRLVGAKTQESGRATHKNSDVPAWKRRIERRINLARALIGRLLAFRSGNTRPRIVRSVRMAFNGLGISLDQPDIADKLTERIDGLKQRIAAWGKRIRRYSERVERFRQNRLFVSDQKRFYRKLENPISGSAFLKPSTVDLVAFWRNIWSGEVEHEEGPWIAAVQDAYAKIEPMNPIAISTEDVSGAVRRAPNWKSPGADGLHHYWLKGLSVCHATLARQYQEAIDRKTLPNLFTTGITHLAPKYTNTADPTNYRPITCLTSIYKTLTSVLSCKISQHIGEFNILSAAQNGCRGGGRGTKELLLIDSVAGQLVRRNRRNFSAAWIDYKKAFDSVPHSWLLRVLELYKIDQAVRDFLGVCMGQWSTILCLQGERLTGAGDPIRIRRGIFQGDCLSPLWFCLSLNPLSTLLERSGTGFQFRRGGTKVSHLLYMDDLKLLAPNAARLQELLKITTEFSSSISMQLGVDKCAVVHVDRGQVTQSSQLSLELTSFKTLSEAESYRYLGMSQCIGVKEVEMKQAVCEIFFGRLTKVLRSYLSGANKARAYNAWVMPTLLYTFGILRWTQTELDALDRRVRTTMTYHRVHHPKSSVMRLYIPRKCGGRGMLSAKTMHNREVCSLRAYFETRRDSALQGDVSMCDKGLTPLALAKENWQKPVVLSTSDRETVWIEKELHGRFYKALHAPHVDSKASVQWLRFGDLFGETEGFVCAIQDQVVKTNNYRKHVLKDGTPDFCRACRHPGESLRHVLSGCSALANTEYLHRHNQVAKILHQELALMYGLLEQRMPYYQYSPVPVLERDGVRFYWDLPIATDRTILANKPDIVVMDRARSRVFLVDITVPHDENLVKAETEKKRKYLDLAHEIVDMWGVGSAEIIPIVISANGLIPVSLAHHLRQLGIRDGSLAARMQKAVLLDSARIVRRFLSLQP

SEQ ID NO: 14689 - protein, 1182 aa, Melitaea cinxia
MMEDDLQRRIGPLPGGRQGASGAGAGRGSMRAASQPRRPAPPPDRLGYPPSPPVGLATTESQGTQHSLPAAGGVRRMRWTPKMNESVMRAYYRAVGRETGRTGYRAVMHREFLLLEPTLTVTEQNLADRARYIQRKGIFDAAELERFRREAAPEVEPVSTVRNEVSTQQEGVRSEAPVEVITEGAVAQKVEQMRGILQEAISETRGAPLEMRPRLSRLPLNAATRNAIEAANRLLPPYLEGSLSLEDTGSILFGTALAVHRLVGAKTQESGRATHKNSDVPAWKRRIERRINLARALIGRLLAFRSGNTRPRIVRSVRMAFNGLGISLDQPDIADKLTERIDGLKQRIAAWGKRIRRYSERVERFRENRLFVSDQKRFYRKLENPISSSASLKPSTVDLVAFWRNIWSGEVEHEEGPWIAAVQDACAKIEPMNPIAISTEDVSGAVRRAPNWKSPGADGLHHYWLKGLSVCHATLARQYQEAIDRKTLPNLFTTGITHLAPKSTNTADPTNYRPITCLTSIYKTLTSVLSCKISRHIGEFNILSAAQNGCRGGGRGTKELLLIDSVAGQLVRRNRRNFSAAWIDYKKAFDSVPHSWLLRVLELYKIDQAVRDFLGVCMGQWSTILCLQGERLTGADDPIRIRRGIFQGDCLSPLWFCLSLNPLSTLLERSGTGFQFRRGGTKVSHLLYMDDLKLLAPNAARLQELLKITTEFSSSIRMQLGVDKCAVVHVDRGQVTQSSQLSLELTSFKTLSEAESYRYLGISQCIGVKEVDMKQAVCEIFFGRLTKVLRSYLSGANKVRAYNAWVMPTLLYTFGILRWTQTELDALDRRVRTTMTHHRMHHPKSSVMRLYISRKCGGRGMLSAKTIHNREVCSLRAYFETRRDSALHGDVSMCDKGLTPLALAKENWQKPVVLSTSDRETVWMEKELHGRFYNALHAPHVDSKASVQWLRFGDLFGETEGFVCAIQDQVVKTNNYRKHVLKDGTPDFCRACRHPGESLRHVLSGCSVLANTEYLHRHNQVAKILHQELALMYGLLEQRMPYYQYSPVPVLERDGVRLYWDLPIATDRTILANKPDIVVMDRARSRVFLVDITVPHDENLVKAETEKKRKYLDLAHEIVDMWGVGSAEIIPIVISANGLIPVSLAHHLRQLEIRDGSLAARMQKAVLLDSARIVRRFLSLQP

SEQ ID NO: 14690 - protein, 1157 aa, Elymnias hypermnestra
MMMDLFCTDKRLGPLPGGRQGTSGAGAGRDSMRAASSTSSTRRPARPPRRPTNPSSPPEGLASAGTARTQNPEPAAGGVRRMRWTSLMNENVMRAYYRATGGETGRTGYRTAMYREFLLLEPNLTVTEQNLADRARYIQRSNIFSATELERLRCEAVPEVTPPATQQTAATAIVHQELENNQDLLVDGDAEGTVSLDIEKMRGILEEAISESRSAPLEGRPRLSRLTLSAATRDVIEAINKLLPQYFEGSTGLSETASILYGAALAVHRFIGVKIREPGRTANTSSAVPAWKRRIERRITHARRLIGRLQSFRSGNTRPRIVRSVRIAFNGLDVRLDQPDIAQKLTERIDDLKQKIAAWGNRIRRYSERVERFHQNRLFVSDQKRFYERLQRPASCSSSQRPASADLVAYWRSIWSLEVEHEEGSWTAAVEEACAVIQPMNPVAITPEDVVGAVRRAPNWKSPGPDGLHHYWLKGFSACHATLARQFQEAMAQKALPNLFTTGITHLAPKTSNAADPTKYRPITCLSSIYKTLTSILSRKISYHIDENNIMSVAQNGCRGGSRGTKELLLIDSVAGQLVKRNRRNFSAAWIDYKKAFDSVPHSWLLRVLELYKIDGTLRDFLGECMRQWSTILCLHGERLTAADDRIRIRRGIFQGDCLSPLWFCLSLNPLSFLLERSGTGFQFRRGGARVPHLLYMDDLKLLAPNAPRLQELLKITSDFSNSIRMEMGLDKCAVLHVERGQVSHSAEINLEPTQLKTLSETETYRYLGMSQCMGVKEADMKQSVCEVFYGRLTKILKSYLSGANKIRAYNGWVMPVLLYTFGILRWTQTELDALDRRVRTTMTFHRMHHPKSSVMRLYIPRKCGGRGLLSAKTMHNREISSLRTYFETKRESPMHLEVIECDKGLTPLSLANENWQRPAVLSTSDREAVWKGKEMHGRFFKALHEPHVNRKASVQWLRFGDLFGETEGFVCAIQDQVVKTRNYRKYILKDGTHDICRACRHPGESLRHVLSGCSALANTEYLHRHNQAAKILHQELALMYGLLDERLPYYRYQPVPVLERDGVRLYWDRSIITDRTILANKPDIVIMDRAQSRVFLVDITIPYDENLVRAETEKKRKYLDLAHEITAMWGVGSAETIPIVISANGLIPVSLAYHLR

SEQ ID NO: 14691 - protein, 1187 aa, Curetis bulis
MLVRGSAFSGNSVLIKIGAKMEKRSPRTPRRRPGRTQNTGTMVQPPDQVPEPHSSVRLVPAGSQTQQEVPAAGGTRRIRWSKQMNENVMRAYYRATRGETDVTAYRSRMHREFLNLEPSTIVTDQNLADRVRFIQRSSIFNAAELEQLRREVVSSTPEPRTTEQTVTAELPNCEPETSSSLVETDVEESTPQNVEYMGKLLNEAIVEIQNTPLERRPKLPRISINASTQKYIEGINNLLPPYLEGSTDLVETTSILFGAALATCRIVGAKISVAGHVTPRPNVTPAWKQRIERRIAKTRVLIGKLHSFRAGNSRPRVMRFVREAFVGTNIDLSQVKNIESALTERIDFWKQRVAAWAKRIRRYSERVERYHTNRLFRSDQRRFYRSMEHPEPSTDDRLPRHDDVVSFWRALWSGPVDYVEDSWILSIETSCAAISPMEPITISQEDITTAVRRAPNWRSPGPDGLHNYWLKGFSACHMTLARQFQEALDHKMFPNLLTTGITHLVPKSNDTMDTKNYRPITCLPTIYKALTSVLSVKISSHLQANSIMSDAQNGCRSGSRGSKELLLIDAVVGKLVKRNRRNFSAAWIDYKKAFDSVPHSWLRRVLELYKIDKTIRDFRGTCMGQWRTVLSLHGKLMSAAADHIEIKRGIFQGDCLSPLWFCLCLNPLSRLLEGSGVGFQFRRGGTRVSHLLYMDDLKLLAPNAPALQKLLKLTTDFSSSIRMELGVEKCAILHVERGRVTHCQGIANGPMSIRTLDETGTYRYLGLSQCIDVKEADMKQSVSGAFYERLTKVFKSSLSGGNKIRAYNSWVMPVLLYTFGTLRWTQTELEALDRRVRTIMTFHRLHHPKSSVMRLYIPRKRGGRGLLSAKTMHNREICSLRNYFMSKMSSDVHAQVISCDKGLTPLNLASENWQEPVVPSTSQRESVWKAKELHGRFMKVLHERHVDFKASVNWLSTGDLFGETEGFVCAIQDQVIKTNNYRKYILKDGTVDVCRACRHPGESLRHVLSGCSALSNTEYLHRHNQVARILHQELALKYCLLPGRVPYYMYSPEPVLESDCVRLYWDRSIITDRTVLANKPDIVIVDRTQSKVFLVDITIPYDENLVRAETEKKRKYLDLAHEVTDMWQVGSTEIIPIVISANGLIPTSLAQYLSRLGFSHSSLPSQMQKAVLLDSARIVRRFLSLGP

SEQ ID NO: 14692 - protein, 1182 aa, Melitaea cinxia
MMEDDLQRRIGPLPGGRQGASGAGAGRGSMRAASQPRRPAPPPDRSGYPPSPPVGLATTESQGTQHSLPAAGGVRRMRWTPKMNESVMRAYYRAVGRETGRTGYRAVMHREFLLLEPTLTVTEQNLADRARYIQRKGIFDAAELERFRREAAPEVEPVSTVRNEVSTQQEGVRSEAPVEVITEGAVAQKVEQMRGILLEAISETRGAPLEMRPRLSCLPLNAATRNAIEAANRLLPPYLEGSLSLEDTGSILFGAALAVHRLVGVKTQESGRATHKNSDVPAWKRRIERRINLARALIGRLLAFRSGNTRPRIVRSVRMAFNGLGISLDQPDIADKLTERIDGLKQRIAAWGKRIRRYSERVERFRQNRLFVSDQKRFYRKLENPISSSASLKPSTVDLVAFWRNIWSGEVEHEEGPWIAAVQDACAKIEPMNPIAISTEDVSGAVRRAPNWKSPGADGLHHYWLKGLSVCHATLARQYQEAIDRKTLPNLFTTGISHLAPKSTNTADPTNYRPITCLTSIYKTLTSVLSCKISRHIGEFNILSAAQNGCRGGGRGTKELLLIDSVAGQLVRRNRRNFSAAWIDYKKAFDSVPHSWLLRVLELYKVDQAVRDFLGVCMGQWSTILCLQGERLTGADDPIRIRRGIFQGDCLSPLWFCLSLNPLSTLLERSGTGFQFRRGGTKVSHLLYMDDLKLLAPNAARLQELLKITTEFSSSIRMQLGVDKCAVVHVDRGQVTQSSQLSLELTSFKTLSEAESYRYLGMSQCIGVKEVDMKQAVCEIFFGRLTKVLRSYLSGANKVRAYNAWVMPTLLYTFGILRWTQTELDALDRRVRTTMTHHRMHHPKSSVMRLYIPRKCGGRGMLSAKTMHNREVCSLRAYFETRRDSALHGDVSMCDKGLTPLALAKENWQKPVVLSTSDRETVWMEKELHGRFYKALHAPHVDSKASVQWLRFGDLFGETEGFVCAIQDQVVKTNNYRKHVLKDGTPDFCRACRHPGESLRHVLSGCSVLANTEYLHRHNQVAKILHQELALMYGLLEQRMPYYQYSPVPVLERDGVRLYWDLPIATDRTILANKPDIVVMDRARSRVFLVDITVPHDENLVKAETEKKRKYLDLAHEIVDMWGVGSAEIIPIVISANGLIPVSLAHHLRQLGIRDGSLAARMQKAVLLDSARIVRRFLSLQP

SEQ ID NO: 14693 - protein, 1182 aa, Melitaea cinxia
MMEDDLQRRIGPLPGGRQGASGAGAGRGSMRAASQPRRPAPLPDRSGYPPSPPVGLATTESQGTQHSLPAAGGVRRMRWTPKMNESVMRAYYRAVGRETGRTGYRAVMHREFLLLEPTLTVTEQNLADRARYIQRKGIFDAAELERFRREAAPEVEPVSTVRNEVSTQQEGVRSEALVEVITEGAVAQKVEQMRGILLEAISETRGAPLEMRPRLSRLPLNAATRNAIEAANRLLPPYLEGSLSLEDTGSILFGAALAVHRLVGVKTQESGRATHKNSDVPAWKRRIERRINLARALIGRLLAFRSGNTRPRIVRSVRMAFNGLGISLDQPDIADKLTERIDGLKQRIAAWGKRIRRYSERVERFRQNRLFVSDQKRFYRKLENPISSSASLKPSTVDLVAFWRNIWSGEVEHEEGPWIAAVQDACAKIEPMNPIAISTEDVSGAVRRAPNWKSPGADGLHHYWLKGLSVCHATLARQYQEAIDRKTLPNLFTTGISHLAPKSTNTADPTNYRPITCLTSIYKTLTSVLSCKISRHIGEFNILSAAQNGCRGGGRGTKELLLIDSVAGQLVRRNRRNFSAAWIDYKKAFDSVPHSWLLRVLELYKVDQAVRDFLGVCMGQWSTILCLQGERLTGADDPIRIRRGIFQGDCLSPLWFCLSLNPLSTLLERSGTGFQFRRGGTKVSHLLYMDDLKLLAPNAARLQELLKITTEFSSSIRMQLGVDKCAVVHVDRGQVTQSSQLSLELTSFKTLSEAESYRYLGMSQCIGVKEVDMKQAVCEIFFGRLTKVLRSYLSGANKVRAYNAWVMPTLLYTFGILRWTQTELDALDRRVRTTMTHHRMHHPKSSVMRLYIPRKCGGRGMLSAKTMHNREVCSLRAYFETRRDSALHGDVSMCDKGLTPLALAKENWQKPVVLSTSDRETVWMEKELHGRFYKALHAPHVDSKASVQWLRFGDLFGETEGFVCAIQDQVVKTNNYRKHVLKDGTPDFCRACRHPGESLRHVLSGCSVLANTEYLHRHNQVAKILHQELALMYGLLEQRMPYYQYSPVPVLERDGVRLYWDLPIATDRTILANKPDIVVMDRARSRVFLVDITVPHDENLVKAETEKKRKYLDLAHEIVDMWGVGSAEIIPIVISANGLIPVSLAHHLRQLGIRDGSLAARMQKAVLLDSARIVRRFLSLQP

SEQ ID NO: 14694 - protein, 1183 aa, Melitaea cinxia
MMEDDLQRRIGPLPGGRQGASGAGAGRGSMRAASQPRRPAPPPDRSGYPPSPPVGLATTESQGTQHSLPAAGGVRRMRWTPKMNESVMRAYYRAVGRETGRTGYRAVMHREFLLLEPTLTVTEQNLADRARYIQRKGIFDAAELERFRREAAPEVEPVSTVRNEVSAQQEGVRSEAPVEVITEGAVAQKVEQMRGILQEAISETRGAPLEMRPRLSRLPLNAATRNAIEAANRLLPPYLEGSLSLEDTGSILFGAALAVHRLVGAKTQESGRATHKNSDVPAWKRRIERRINLARALIGRLLAFRSGNTRPRIVRSVRMAFNGLGISLDQPDIIADKLTERIDGLKQRIAAWGKRIRRYSERVERFRQNRLFVSDQKRFYRKLENPISSSASLKPSTVDLVAFWRNIWSGEVEHEEGPWIAAVQDACAKIEPMNPIAISTEDVSGAVRRAPNWKSPGADGLHHYWLKGLSVCHATLARQYQEAIDRKTLPNLFTTGITHLAPKSTNTADPTNYRPITCLTSIYKTLTSVLSCKISRHIGEFNILSAAQNGCRGGGRGTKELLLIDSVAGQLVRRNRRNFSAAWIDYKKAFDSVPHSWLLRVLELYKVDQAVRDFLGVCMGQWSTILCLQGERLTGADDPIRIRRGIFQGDCLSPLWFCLSLNPLSTLLERSGTGFQFRRGGTKVSHLLYMDDLKLLAPNAARLQELLKITTEFSSSIRMQLGVDKCAVVHVDRGQVTQSSQLSLELTSFKTLSEAESYRYLGMSQCIGVKEVDMKQAVCEIFFGRLTKVLRSYLSGANKVRAYNAWVMPTLLYTFGILRWTQTELDALDRRVRTTMTHHRMHHPKSSVMRLYIPRKCGGRGMLSAKTMHNREVCSLRAYFETRRDSALHGDVSMCDKGLTPLALAKENWQKPVVLSTSDRETVWMEKELHGRFYKALHAPHVDSKASVQWLRFGDLFGETEGFVCAIQDQVVKTNNYRKHVLKDGTPDFCRACRHPGESLRHVLSGCSVLANTEYLHRHNQVAKILHQELALMYGLLEQRMPYYQYSPVPVLERDGVRLYWDLPIATDRTILANKPDIVVMDRARSRVFLVDITVPHDENLVKAETEKKRKYLDLAHEIVDMWGVGSAEIIPIVISANGLIPVSLAHHLRQLGIRDGSLAARMQKAVLLDSARIVRRFLSLQP

SEQ ID NO: 14695 - protein, 1181 aa, Mellicta athalia
MEDKFGKRIGPLPGGRQGASGAGAGRGSMRAASHPRRPAPPPDRSANPPSPPDGLAPTEPQGTQHSAPAAGGVRRMRWTLKMNESVMRAYYRAVGRETGRTGYRAVMHREFLLLEPTVTVTEQNLADRARFIQRKGVFDAAELERFRREAAPEDEPVSAERDAVSTQQESVRSEAPVEAITEGAVAQKVEQMRGILQEAISETRGAPLEQRPRLSRLPLNAATRSAIEAANRLLPPYLEGSLGLEDTGSILFGAALAVHRLVGAKTQEPGLATHKNSDVPAWKRRIERRISLARALIGRLLAFRSGNTRPRIVRSVRMAFNGLRVSLNQPDIADRLTERIDGLKQRIAAWGKRIRRYSERVERFRQNRLFVSDQKRFYRKLENPIPCSAFLKPSTVDLVAFWRNIWSREVEHEEGPWIAAVQDACAKVDPMNPIAISTEDVSGAVRRAPNWKSPGADGLHHYWLKGLSVCHATLARQYQEAIDRKTLPNLFTTGITHLAPKSTNTADPTNYRPITCLSSIYKTLTSVLSCKISRHIGEFNILSAAQNGCRGGGRGTKELLLIDSVAGQLVRRNRRNFSAAWIDYKKAFDSVPHSWLLRVLELYKIDEAVRDFLGVCMGQWSTILCLQGERLTGADDPIRIRRGIFQGDCLSPLWFCLSLNPLSTLLERSGTGFQFRRGGTKVSHLLYMDDLKLLAPNAAHLQELLKITTEFSGSIKMQLGVDKCAVVHVDRGQVTQSAQFSLELTSFKTLSEAESYRYLGMSQCIGVKEVDMKQAVCEVFFGRLTKVLRSYLSGANKVRAYNTWVMPTLLYTFGILRWTQTELDALDRRVRTTMTHHRVHHPKSSVMRLYISRKCGGRGMLNAKTMHNREVCSLRAYFETRRDSAMHGDVVVCDKGLTPLSLANENWQKPVVLSTSDRETVWMEKELHGRFYKALHAPHVDSKASVQWLRFGDLFGETEGFVCAIQDQVVKTNNYRKHILKDGTPDFCRACRHPGESLRHVLSGCSALANTEYLHRHNQVAKILHQELALMYGLLEQRMPYYQYTPVPVLERDGVRLYWDLPIATDRTILANKPDIVVMDRARSRVFLVDITIPHDENLVKAETEKKRKYLDLAHEIVDMWGVGSAEIIPIVISANGLIPVSLAHHLRQPGIRDGSLAGRMQKAVLLDSARIVRRFLSLQP

SEQ ID NO: 14696 - protein, 1106 aa, Mellicta athalia
MRWTPKMNESVMRAYYRAVGRETGRTGYRAVMHREFLLLEPTVTVTEQNLADRARYIQRKGVFDAAELERFRREAAPEVEPVSAERDAVTTQQESVRSEAPVEAITEEAVSQKIEQMRGILEEAISETRGVPLELRPRLSRLPLNAATRRAIEAANRLLPPYLEGSLGLEDTGSILFGAALAVHRLVGAKTQEPGRATHKNSDVPAWKRRIERRISLARALIGRLLAFRSGNTRPRIVRSVRMAFNGLGDSLDQPDIADRLTERIDGLKQRIAAWGKRIRRYSERVERFRQNRIFVSDQKRFYRKLENPTPCSASLKPSTVDLVAFWRNIWSREVEHEEGPWIAAVQDACAKIEPMNPIAISTEDVSDAVRRAPNWKSPGADGLHHYWLKGLSVCHATLARQYQEAIDRKTLPNLFATGITHLAPKSNNTADPTNYRPITCLTSIYKTLTSVLSCKISRHISESNILSAAQNGCRGGGRGTKELLLIDSVAGQLVRRNRRNFSAAWIDYKKAFDSVPHSWLLRVLELYKIDKAVRDFLGVCMGQWSTILCIQGERLTGADDPIRIRRGIFQGDCLSPLWFCLSLNPLSTLLERSGTGFQFRRGGTKVSHLLYMDDLKLLAPNAARLQELLKITMEFSGSIRMQLGVDKCAVVHVDRGQVTQSAQFSLELTSFKTLSEAEAYRYLGMSQCIGVKEADMKQAVCEVFFGRLTKVLRSYLSGANKVRAYNAWVMPTLLYTFGILRWTQTELDALDRRVRTTMTHHRVHHPKSSVMRLYISRKRGGRGMLSAKTMHNREVCSLRAYFEARRDSAMHGDVVVCDKGLTPLSLAKENWQKPVVLSTSDRETVWMEKELHGRFYKALHAPHVDSKASMQWLRFGDLFGETEGFICAIQDQVVKTNNYRKHILKDGTPDFCRACRHPGESLRHVLSGCSVLANTEYLHRHNQAAKILHQELALMYGLLEQRMPYYQYSPVPVLERDGVRLYWDLPIATDRTILANKPDIVVMDRARSRVFLVDITIPHDENLVKAETEKKRKYLDLAHEIVDMWDVRSAEIIPIVISANGLIPVSLAHHLRQLGIRDSSLAARMQKAVLLDSARIVRRFLSLQP

SEQ ID NO: 14697 - protein, 1189 aa, Maniola jurtina
MMDNKIRNERIGPLPGGRQGAPGAGAGRSSMRAASATSRPALPPSRSTYPSSPPDGLAPTGSTRAQSSAPAAGGVRRMRWTSLMNENVMRAYYRATGGETGRTGYRAAMYREFLLLEPNLTVTEQNLADRARYIQRSNIFNATELERLRREAVPEVSAPTAEQIVSQAAPVREETITTSQDLPVEEDTEGTVSLDIERMRGILEEAISEIRSAPLENRPRLSRLTLNVATRDVIEAINKMLPQHLESSTGLGDTASIIFGAALAVHRFIGAKTPGPGRAAATRRSAEPAWKKRIKHRITLARVLIGRLQSFRSGNTRPRIVRSVRVAFNGCGVRLDQPDIAQKLTERIDDLKQKIAAWGNRIRRYSARVERFQQNRLFSSDQKRFYKRLECPAVCSTSQRPDPADLVAFWRGVWSREVEHEEGPWIAAVEEACARIEPMNPVAISAEDVAGAVRRAPNWKSPGPDGLHHYWLKGFSVCHATLARQFQEALEQRALPSLFTTGITHLTPKSTDAADPAKYRPITCLTTIYKTLTSVLSLKISRHIDGNNIMSGAQNGCRGGGRGTKELLLIDSVAGQLVKRNRRNFSAAWIDYKKAFDSVPHSWLLRVLELYKVDSAVRDFLEACMGQWSTILCLHGERLAAADDRIRIGRGIFQGDCLSPLWFCLSLNPLSTLLEGSGTGFQFRRGGTKVPHLLYMDDLKLLAPNATRLRELLNITTEFSNSIRMELGLDKCAVIHVERGQVTHSAEISLEPSNIKTLSEAESYRYLGMSQSLGVKEADMKQSVCEAFFGRLTKICKSYLSGANKVRAYNGWVMPVLMYTFGVLSWTQTELDALDRKVRTNMTLYRMHHPKSSVMRLYIPRKCGGRGGLSVKTMHNREISNLRTYFETMRGSPMHREVMECDKGLTPLSLAKTEWQKPVVLSTSHRETVWKEKELHGRFFKALNEPHVDKKASVQWLRFGDLFGETEGFVCAIQDQVVKTRNYRKYILKDGTHDICRACRHPGESLRHVLSGCSALANTEYLHRHNQAAKILHQELALKYGLLDERLPYYRYTPVPVLERDGVRLYWDRSIITDRTILANKPDIVVVDRAQSRVFLVDITIPYDENLVRAETEKKRKYLDLAHEVSDMWHVESTEIIPIVISANGLIPVSLAHHLRRLGFRGSSLAARMQKAVLLDSARMVRRFLNLSP

SEQ ID NO: 14698 - protein, 1187 aa, Thymelicus sylvestris
MMMERNENARIGPLPGGRQGASGAGAGRGSMRSASHTSRLPLPPRQPAEPSSPPEGLAPTGSSTQSSGPATGGVRRMRWTSHMNENVMRAYYRATEGETGRTGYRAAMYREFLLLEPTLTVTEQNLADRARYIQRSNIFSATELERLRREAVPEVTTPTTEQIVSLADPVREETDANAQDLPVEEDTEVTVSLDIERMRRILGEAISEIQSAPVQNRPRLSRLTLNVATRDVIEAINQMLPQYLERSTGLDDTASILFGAALAVHRLMGVKTQERWHSTPRRNAEPAWKKRIERRITLARALIGRLRSFRSGNTRPRIVRSVRIAFDGLGVRLDQPDIDQKLTERIDDLKQKIAAWGSRIRRYSERVKRFQQNRLFSSDQKRFYKKLESPAVCSTSQQPSPADLIAFWRSAWSREVEHEEGPWIAAVEEACASIEQMNPVAISPEDVAGAVRRAANWKSPGPDGLHHYWLKGFSLCHATLARQFQDALEQRTLPSLFTTGITHLAPKSTDAADPAKYRPITCLTTIYKTLTSVLSIKISRHVDENSIISGAQNGCRGGSRGTKELLLIDSVAGQLVKRNRRNFSAAWIDYKKAFDSVPHSWLLRVLELYKVDSTVQDFLRECMGQWSTILCLHGERLAAADDRIRIRRGIFQGDCLSPLWFCLSLNPLSSLLERSGTGFQFRRGGTKVPHLLYMDDLKLLAPNATRLRELLNITTEFSSSIRMELGLDKCAVLHVERGQVTHSAEINLEPTSIRTLSEPESYRYLGMSQSVGVHEAGMKQSVCEAFLGRLTKVCKSYLSGANKVRAYNGWVVPVLMYTFGVLRWTQTELDALDRKVRTTMTLYRMHHPKSSVMRLYIPRKCGGRGVLSVKTMHNREISNLRTYFETKRESPMHRDVIECDKGLTPLSLAKPEWQKPVVLSTSDRETVWKEKELHGRFFKALHEPYVDKKASVQWLRFGDLFGETEGFVCAIQDQVVKTRNYRKYILKDGTTDICRACRHPGESLRHVLSGCSALANTEYLHRHNQAAKILHQELALKYCLLDERVPYYRYTPTPVLERDGVRLYWDRSIITDRTILANKPDIVLMDRAQSRVFLVDITIPHDENLVRAETEKKRKYLDLAHEVSSMWHVESTEIIPIVISVNGLIPVSLAHHMRRLGFRGSSLAAKMQKAVLLDSARIVRRFLSLSP

SEQ ID NO: 14699 - protein, 1106 aa, Melitaea cinxia
MRWTPKMNESVMRAYYRAVGRETGRTGYRAVMHREFLLLEPTLTVTEQNLADRARYIQRKGIFDAAELERFRREAAPEVEPVSTVRNEVSTQQEGVRSEAPVEVITEGAVAQKVEQMRGILQEAISETRGAPLEMRPRLSRLPLNAATRNAIETANRLLPPYLEGSLSLEDTGSILFGAALAVHRLVGAKTQESGRATHKNSDVPAWKRRIERRINLARALIGRLLAFRSGNTRPRIVRSVRMAFNGLGISLDQPDIADKLTERIDGLKQRIAAWGKRIRRYSERVERFRQNRLFVSDQKRFYRKLENPISSSASLKPSTVDLVAFWRNIWSGEVEHEEGPWIAAVQDACAKIEPMNPIAISTEDVSGAVRRAPNWKSPGADGLHHYWLKGLSVCHATLARQYQEAIDRKTLPNLFTTGITHLAPKSTNTADLTNYRPITCLTSIYKTLTSVLSCKISRHIGEFNILSAAQNGCRGGGRGTKELLLIDSVAGQLVRRNRRNFSAAWIDYKKAFDSVPHSWLLRVLELYKVDQAVRDFLGVCLGQWSTILCLQGERLTGADDPIRIRRGIFQGDCLSSLWFCLSLNPLSTLLERSGTGFQFRRGGTKVSHLLYMDDLKLLAPNAARLQELLKITTEFSSSIRMQLGVDKCAVVHVDRGQVTQSSQLSLELTSFKTLSEAESYRYLGMSQCIGVKEVDMKQAVCEIFFGRLTKVLRSYLSGANKVRAYNAWVMPTLLYTFGILRWTQTELDALDRRVRTTMTHHRMHHPKSSVMRLYIPRKCGGRGMLSAKTMHNREVCSLRAYFETRRDSALHGDVSMCDKGLTPLALAKENWQKPVVLSTSDRETVWMEKELHGRFYKALHAPHVDSKASVQWLRFGDLFGETEGFVCAIQDQVVKTNNYRKHVLKDGTPDFCRACRHPGESLRHVLSGCSVLANTEYLHRHNQVAKILHQELALMYGLLEQRMPYYQYSPVPVLERDGVRLYWDLPIATDRTILANKPDIVVMDRARSRVFLVDITVPHDENLVKAETEKKRKYLDLAHEIVDMWGVGSAEIIPIVISANGLIPVSLAHHLRQLGIRDGSLAARMQKAVLLDSARIVRRFLSLQP

SEQ ID NO: 14700 - protein, 1181 aa, Mellicta athalia
MEDKFGKRIGPLPGGRQGASGAGAGRGSMRAASHPRRPAPLPDRSANPPSPPYGLAPTEPQGTQHSAPAAGGVRRMRWTLKMNESVMRAYYRAVGRETGRTGYRAVMHREFLLLEPTVTVTEQNLADRARFIQRKGVFDAAELERFRREAAPEDEPVSAERDAVSTQQESVRSEAPVEAITEGAVAQKVEQMRGILQEAISETRGAPLEQRPRLSRLPLNAATRSAIEAANRLLPPYLEGSLGLEDTGSILFGAALAVHRLVGAKTQEPGLATHKNSDVPAWKRRIERRISLARALIGRLLAFRSGNTRPRIVRSVRMAFNGLGVSLNQPDIADRLTERIDGLKQRIAAWGKRIRRYSERVERFRQNRLFVSDQKRFYRKLENPIPCSAFLKPSTVDLVAFWRNIWSREVEHEEGPWIAAVQDACAKVEPMNPIAISTEDVSGAVRRAPNWKSPGADGLHHYWLKGLSVCHATLARQYQEAIDRKTLPNLFTTGITHLAPKSTNTADPTNYRPITCLSSIYKTLTSVLSCKISRHIGEFNILSAAQNGCRGGGRGTKELLLIDSVAGQLVRRNRRNFSAAWIDYKKAFDSVPHSWLLRVLELYKIDEAVRDFLGVCMGQWSTILCLQGERLTGADDPIRIRRGIFQGDCLSPLWFCLSLNPLSTLLERSGTGFQFRRGGTKVSHLLYMDDLKLLAPNAARLQELLKITTEFSGSIRMQLGVDKCAVVHVDRGQVTQSAQFSLELTSFKTLSEAESYRYLGMSQCIGVKEVDMKQAVCEVFFGRLTKVLRSYLSGANKVRAYNTWVMPTLLYTFGILRWTQTDLDALDRRVRTTMTHHRVHHPKSSVMRLYISRKCGGRGMLNAKTMHNREVCSLRAYFETRRDSAMHGDVVVCDKGLTPLSLANENWQKPVVLSTSDRETVWMEKELHGRFYKALHAPHVDSKASVQWLRFGDLFGETEGFVCAIQDQVVKTNNYRKHILKDGTPDFCRACRHPGESLRHVLSGCSALANTEYLHRHNQVAKILHQELALMYGLLEQRMPYYQYTPVPVLERDGVRLYWDLPIATDRTILANKPDIVVMDRARSRVFLVDITIPHDENLVKAETEKKRKYLDLAHEIVDMWGVGSAEIIPIVISANGLIPVSLAHHLRQLGIRDGSLAGRMQKAVLLDSARIVRRFLSLQP

SEQ ID NO: 14701 - protein, 1190 aa, Maniola jurtina
MMMEHNIRNARIGPLPGGRQGAPGAGAGRSSIRAASTTSRPALPPSRSTHPSSPPDGLAPTGPTRAQSSAPAAGGVRRMRWTSLMNENVMRAYYRATGGETGRTGYRAAMYREFLLLEPNLTVTEQNLADRARYIQRSNIFNAAELERLRREAVPEVSAPTTVQIVSQAEPVREEATTTLQDLPVEEDTGETVSLDIERMRRILEEAISEIRNAPLENRPRLSRLTLNVATRDVIEAINKMLPQHLESSTGLGDTASIIFGAALAVHRFIGAKTPGPGRAAATRRSAEPAWKKRIEHRITLARVLIGRLQSFRSGNTRPRIVRSVRVALNGCGVRLDQPDIAQKLTERIDDLKQKIAAWGNRIRRYSARVERFQQNRLFSSDQKRFYKRLECPAVCSTSQRPDPADLVAFWRGVWSREVEHEEGPWIAAVEEACARIEPMNPVAISAEDVAGAVRRAPNWKSPGPDGLHHYWLKGFSVCHATLARQFQEALEQRALPSLFTTGITHLAPKSTDATDPAKYRPITCLTTIYKTLTSVLSLKISRHIDENNIMSGAQNGCRGGGRGTKELLLIDSVAGQLVKRNRRNFSAAWIDYKKAFDSVPHSWLLRVLELYKVDSAVRDFLETCMGQWSTILCLHGERLAAADDRIRIGRGIFQGDCLSPLWFCLSLNPLSTLLEGSGTGFQFRRGGTKVPHLLYMDDLKLLAPNATRLKELLSITTEFSNSIKMELGLDKCAVMHVERGQVTHSAEISLEPSNIKSLSEAESYRYLGMSQSLGVKEADMKQSVCEAFFGRLTKICKSYLSGANKVRAYNGWVMPVLMYTFGVLSWTQTELDALDRKVRATMTLYRMHHPKSSVMRLYIPRKCGGRGVLSAKTMHNREISNLRTYFETMRGSPMHREVIECDKGLTPLSLAKTEWQKPVILSTSDRETVWKEKELHGRFFKALNEPHVDKKASVQWLRFGDLFGETEGFVCAIQDQVVKTRNYRKYILKDGTHDICRACRHPGESLRHVLSGCSALANTEYLHRHNQAAKILHQELALKYGLLDERLPYYKYTPVPVLERDGVRLYWDRSIITDRTILANKPDIVLVDRAQSRVFLVDITIPYDENLVRAETEKKRKYLDLAHEVSDMWHVESTEIIPIVISANGLIPVSLAHHLRRLGFRGSSLAARMQKAVLLDSARIVRRFLSLSP

SEQ ID NO: 14702 - protein, 1188 aa, Boloria selene
MMENKNKNARLGPLPGGRQGAPGAGAGRDSIRATSTINRPALPPSRPTHPSPPPEGLVPTGSSRTQTSGPAAGGVRRMRWTSQMNENVMRAYYRATGGETGRTGYRAAMYREFLLLEPTLTVTEQNLADRARYIQRSNILNATELERLRREAVPEVRTLTTEQIVPPAATGEDVLTNFHDLPIEGGTQETVALDTERMRRILEEAVSEIRSAPLENRPRLSRLTLNVATREIIEAINQLLPQHQESSIGLEDTASILFGAALAVHRFVGARTPGPERDTAARRKAQPAWKKRIERRINHARGLIGRLQSFRSGNTRPRIVRSVRIAFDGLGVRLDQPDIAQKLTERIDDLKQRIAAWGSRIRRYSERVERFQQNRLFSSDQKRFYRTLECPAVCSTSQKPSPADLVAFWRNVWSTEVQHEEGPWIAAVEEACAVIKPMSPVAISAEDVVDAVRRAPNWKSPGPDGLHHYWLKGFSVCHATLARQFQEALEQRTLPNLFTTGITHLAPKSTDAADPAKYRPITCLTTIYKTLTSVLSSKISRHVDENNIISGAQNGCRGRSRGTKELLLIDSVAGQLVKRNRRNFSAAWIDYKKAFDSVPHSWLSRVLELYKVDSTVRNFLGKCMGQWSTILSLHGERITAADDRIRIRRGIFQGDCLSPLWFCLSLNPLSSLLESSGTGFQFRRGGTRVPHLLYMDDLKLLAPNANRLQELLKITSEFSNSIRMKLGLDKCAVLHVVRGQVTHSAEINLEPSSIRTLSEAESYRYLGMSQSIGVNEADMKQSVCEAFFGRLTKVCKSFLSGANKVRAYNGWVMPVLMYTFGVLRWTQTELDILDRRVRTTMTLYRMHHPKSSVMRLYIPRKCGGRGLLSVKTMHNREIANLRTYFETKRESPMHREVVECDKGLTPLSLAKTEWQAPVVLSTSNRETVWKEKELHGRFFKALNEPNVDKKASVQWLRFGDLFGETEGFVCAIQDQVVKTRNYRKYILKDGTHDICRACGHPGESLRHVLSGCSALANTEYLHRHNQAAKILHQELALKHGLLNERLPYYKYTPMPVLERDGVRLYWDRSIITDRTILANKPDIVLMDRAQSRVFLMDITVPYDENLVRAETEKKRKYLDLAHEVSTMWHVESTEIIPIVISANGLIPVSLAHYLRRLGFRDSSLAARLQKAVLLDSARIVRRFLNLSP

SEQ ID NO: 14703 - protein, 1165 aa, Elymnias hypermnestra
MMMDLFCTDKRLGPLPGGRQGTSGAGAGRDSMRAASSTSSTRRPARPPRRPTNPSSPPEGLASAGTARTQNPEPAAGGVRRMRWTSLMNENVMRAYYRATGGETGRTGYRTAMYREFLLLEPNLTVTEQNLADRARYIQRSNIFSATELERLRCEAVPEVTPPATQQTAATAIVHQELENNQDLLVDGDAEGTVSLDIEKMRGILEEAISESRSAPLEGRPRLSRLTLSAATRDVIEAINKLLPQYFEGSTGLSETASILYGAALAVHRFIGVKIREPGRTANTSSAVPAWKRRIERRITHARRLIGRLQSFRSGNTRPRIVRSVRIAFNGLDVRLDQPDIAQKLTERIDDLKQKIAAWGNRIRRYSERVERFHQNRLFVSDQKRFYERLQRPASCSSSQRPASADLVAYWRSIWSLEVEHEEGSWTAAVEEACAVIQPMNPVAITPEDVVGAVRRAPNWKSPGPDGLHHYWLKGFSACHATLARQFQEAMAQKALPNLFTTGITHLAPKTSNAADPTKYRPITCLSSIYKTLTSILSRKISYHIDENNIMSVAQNGCRGGSRGTKELLLIDSVAGQLVKRNRRNFSAAWIDYKKAFDSVPHSWLLRVLELYKIDGTLRDFLGECMRQWSTILCLHGERLTAADDRIRIRRGIFQGDCLSPLWFCLSLNPLSFLLERSGTGFQFRRGGARVPHLLYMDDLKLLAPNAPRLQELLKITSDFSNSIRMEMGLDKCAVLHVERGQVSHSAEINLEPTQLKTLSETETYRYLGMSQCMGVKEADMKQSVCEVFYGRLTKILKSYLSGANKIRAYNGWVMPVLLYTFGILRWTQTELDALDRRVRTTMTFHRMHHPKSSVMRLYIPRKCGGRGLLSAKTMHNREISSLRTYFETKRESPMHLEVIECDKGLTPLSLANENWQRPAVLSTSDREAVWKGKEMHGRFFKALHEPHVNRKASVQWLRFGDLFGETEGFVCAIQDQVVKTRNYRKYILKDGTHDICRACRHPGESLRHVLSGCSALANTEYLHRHNQAAKILHQELALMYGLLDERLPYYRYQPVPVLERDGVRLYWDRSIITDRTILANKPDIVIMDRAQSRVFLVDITIPYDENLVRAETEKKRKYLDLAHEITAMWGVGSTETIPIVISANGLIPISLVQCKRRCCWTRLG

SEQ ID NO: 14704 - protein, 1081 aa, Maniola hyperantus
MYREFLLLEPNLTVTEQNLADRARYIQRSNIFNATELERLRREAVPEVSAPATEQIDSQAVPVPVETNTISQDLPVEEDTEGTVSLDIERMRGILEEAISEIRSAPLENRPRLSRLTLNVATRDVIEAINKMLPQHLESSTGLGDTASILFGAALAVHRFIGAKTPGPERAAAARRSAEPAWKRRMERRITLARVLIGRLQSFRSGNTRPRIVRSVRVAFNGCGVRLDQPNIAQKLTERIDDLKQKIAAWGNRIRRYSERVERFQQNRLFLSDQKRFYKRLECPAVCSTSQRPDPADLVTFWRGVWSREVEHEEGPWIAAVEEACASIEPMNPVAISAEDVAGAVRRAPNWKSPGPDGLHHYWLKGFSVCHATLARQFQEALEQRALPSLFTTGITHLAPKSTDTTDPAKYRPITCLTTIYKTLTSVLSLKISRHVDENNIISGAQNGCRGGSRGTKELLLIDSVAGQLVKRNRRNFSAAWIDYRKAFDSVPHSWLLRVLELYKVDGTVRDFLGECMGQWSTILCLHGERLADADDRIRIGRGIFQGDCLSPLWFCLSLNPLSTLLEGSGTGFQFRRGGTKVPHLLYMDDLKLLAPNATRLQELLNVTTDFSNSIRMELGLDKCAVMHVERGQVTHSAEMSLEPSTIRTLSEAESYRYLGMSQSLGVKETDVKQSVCEAFFGRLTKICKSYLSGANKIRAYNGWVMPVLMYTFGVLRWTQTELDALDRKVRTTMTLYRMHHPKSSVMRLYIPRKCGGRGVLSVKTMHNREIANLRTYFETMRGSPMHREVIECDKGLTPLSLAQTEWQEPVVLSTSDREAVWREKELHGRFFKALNEPHVDKKASVQWLRFGDLFGETEGFVCAIQDQVVKTRNYRKYILKDGTHDICRACRHPGESLRHVLSGCSALANTEYLHRHNQAAKILHQELALMYGLLDERLPYYKYTPVPVLERDGVRLYWDRSIITDRTILANKPDIVVVDRAQSRVFLVDITIPYDENLVRAETEKKRKYLDLAHEISDMWHVESTEIIPIVISANGLIPVSLAQHLRRLGFRGSSLAARMQKAVLLDSARIVRRFLHLSP

SEQ ID NO: 14705 - protein, 1106 aa, Melitaea cinxia
MRWTPKMNESVMRAYYRAVGRETGRTGYRAVMHREFLLLEPTLTVTEQNLADRARYIQRKGIFDAAELERFRREAAPEVEPVSTVRNEVSAQQEGVRSEAPVEVITEGAVAQKVEQMRGILQEAISETRGAPLEMRPRLSRLPLNAATRNAIEAANRLLPSYLEGSLSLEDTGSILFGAALAVHRLVGAKTQESGRATHKNSDVPAWKRRIERRINLARALIGRLLAFRSGNTRPRIVRSVRMAFNGLGISLDQPDIADKLTERIDGLKQRIAAWGKRIRRYSERVERFRQNRLFVSDQKRFYRKLENPISGSASLKPSTVDLVAFWRNIWSGEVEHEEGPWIAAVQDACAKIEPMNPIAISTEDVSGAVRRAPNWKSPGADGLHHYWLKGLSVCHATLARQYQEAIDRKTLPNLFTTGITHLAPKSTNTADPTNYRPITCLTSIYKTLTSVLSCKISRHIGEFNILSAAQNGCRGGGRGTKELLLIDSVAGQLVRRNRRNFSAAWIDYKKAFDSVPHSWLLRVLELYKIDQAVRDFLGVCMGQWSTILCLQGERLTDADDPIRIRRGIFQGDCLSPLWFCLSLNPLSTLLERSGTGFQFRRGGTKVSHLLYMDDLKLLAPNAARLQELLKITTEFSSSIRMQLGVGKCAVVHVDRGRVTQSSQLSLELTSFKTLSEAESYRYLGMSQCIGVKEVDMKQAVCEIFFGRLTKVLRSYLSGANKVRAYNAWVMPTLLYTFGILRWTQTELDALDRRVRTTMTHHRMHHPKSSVMRLYIPRKCGGRGMLSAKTMHNREVCSLRAYFETRRDSPLHGDVSMCDKGLTPLALAKENWQKPVVLSTSDRETVWMEKELHGRFYKALHAPHVDSKASVQWLRFGDLFGETEGFVCAIQDQVVKTNNYRKHVLKDGTPDFCRACRHPGESLRHVLSGCSALANTEYLHRHNQVAKILHQELALMYGLLEQRMPYYQYSPVPVLERDGVRLYWDLPIATDRTILANKPDIVVMDRARSRVFLVDITVPHDENLVKAETEKKRKYLDLAHEIVDMWGVGSAEIIPIVISASGLIPVSLAHHLRQLGIRDGSLAARMQKAVLLDSARIVRRFLSLQP

SEQ ID NO: 14706 - protein, 1181 aa, Mellicta athalia
MEDKFGKRIGPLPGGRQGASGAGAGRGSMRAASHPRRPAPPPDRSANPPSPPDGLAPTEPQGTQHSAPAAGGVRRMRWTLKMNESVMRAYYRAVGRETGRTGYRAVMHREFLLLEPTVTVTEQNLADRARFIQRKGVFDAAELERFRREAAPEDEPVSAERDAVSTQQESVRSEAPVEAITEGAVAQKVEQMRGILQEAISETRGAPLEQRPRLSRLPLNAATRSAIEAANRLLPPYLEGSLGLEDTGSILFGAALAVHRLVGAKTQEPGLATHKNSDVPAWKRRIERRISLARALIGRLLAFRSGNTRPRIVRSVRMAFNGLGVSLNQPDIADRLTERIDGLKQRIAAWGKRIRRYSERVERFRQNRLFVSDQKRFYRKLENPIPCSAFLKPSTVDLVAFWRNIWSREVEHEEGPWIAAVQDAYAKVEPMNPIAISTEDVSGAVRQAPNWKSPGADGLHHYWLKGLSVCHATLARQYQEAIDRKTLPNLFTTGITHLAPKSTNTVDPTNYRPITCLSSIYKTLTSVLSCKISRHIGEFNILSAAQNGCRGGGRGTKELLLIDSVAGQLVRRNRRNFSAAWIDYKKAFDSVPHSWLLRVLELYKIDEAVREFLGVCMGQWSTILCLQGERLTGADDPIRIRRGIFQGDCLSPLWFCLSLNPLSTLLERSGTGFQFRRGGTKVSHLLYMDDLKLLAPNAARLQELLKITTEFSGSIRMQLGVDKCAVVHVDRGQVTQSAQFSLELTSFKTLSEAKSYRYLGMSQCIGVKEVDMKQAVCEVFFGRLTKVLRSYLSGANKVRAYNTWVMPTLLYTFGILRWTQTELDALDRRVRTTMTHHRVHHPKSSVMRLYISRKCGGRGMLNAKTMHNREVCSLRAYFETRRDSAMHGDVVVCDKGLTPLSLANENWQKPVVLSTSDRETVWMEKELHGRFYKALHAPHVDSKASVQWLRFGDLFGETEGFVCAIQDQVVKTNNYRKHILKDGTPDFCRACRHPGESLRHVLSGCSALANTEYLHRHNQVAKILHQELALMYGLLEQRMPYYQYTPVPVLERDGVRLYWDLPIATDRTILANKPDIVVMDRARSRVFLVDITIPHDENLVKAETEKKRKYLDLAHEIVDMWGVGSAEIIAIVISANGLIPVSLAHHLRQLGIRDGSLAGRMQKAVLLDSARIVRRFLSLQP

SEQ ID NO: 14707 - protein, 1181 aa, Mellicta athalia
MEDKFGKRIGPLPGGRQGASGAGAGRGSMRAASHPRRPAPPPDRSANPPSPPDGLAPTEPQGTQHSAPAAGGVRRMRWTLKMNESVMRAYYRAVGRETGRTGYRAVMHREFLLLEPTVTVTEQNLADRARFIQRKGVFDAAELERFRREAAPEDEPVSAERDAVSTQQESVRSEAPVEAITEGAVAQKVEQMRGILQEAISETRGAPLEQRPRLSRLPLNAATRSAIEAANRLLPPYLEGSLGLEDTGSILFGAALAVHRLVGAKTQEPGLATHKNSDVPAWKRRIERRISLARALIGRLLAFRSGNTRPRIVRSVRMAFNGLGVSLNQPDIADRLTERIDGLKQRIAAWGKRIRRYSERVERFRQNRLFVSDQKRFYRKLENPIPCSAFLKPSTVDLVAFWRNIWSREVEHEEGPWIAAVQDACAKVEPMNPIAISTEDVSGAVRRAPNWKSPGADGLHHYWLKGLSVCHATLARQYQEAIDRKTLPNLFTTGITHLAPKSTNTADPTNYRPITCLSSIYKTLTSVLSCKISRHIGEFNILSAAQNGCRGGGRGTKELLLIDSVAGQLVRRNRRNFSAAWIDYKKAFDSVPHSWLLRVLELYKIDEAVRDFLGVCMGQWSTILCLQGERLTGADDPIRIRRGIFQGDCLSPLWFCLSLNPLSTLLERSGTGFQFRRGGTKVSHLLYMDDLKLLAPNAARLQELLKITTEFSGSIRMQLGVDKCAVVHVDRGQVTQSAQFSLELTSFKTLSEAESYRYLGMAQCIGVKEVDMKQAVCEVFFGRLTKVLRSYLSDANKVRAYNTWVMPTLLYTFGILRWTQTELDALDRRVRTTMTHHRVHHPKSSVMRLYISRKCGGRGMLNAKTMHNREVCSLRAYFETRRDSAMHGDVVVCDKGLTPLSLANENWQKPVVLSTSDRETVWMEKELHGRFYKALHAPHVDSKASVQWLRFGDLFGETEGFVCAIQDQVVKTNNYRKHILKDGTPDFCRACRHPGESLRHVLSGCSALANTEYLHRHNQVAKILHQELALMYGLLEQRMPYYQYTPVPVLERDGVRLYWDLPIATDRTILANKPDIVVMDRARSRVFLVDITIPHDENLVKAETEKKRKYLDLAHEIVDMWGVGSAEIIPIVISANGLIPVSLAHHLRQLGIRDGSLAGRMQKAVLLDSARIVRRFLSLQP

SEQ ID NO: 14708 - protein, 1190 aa, Maniola jurtina
MMMEHNIRNARIGPLPGGRQGAPGAGAGRSSIRAASTTSRPALPPSRSTHPSSPPDGLAPTGPTRAQSSAPAAGGVRRMRWTSLMNENVMRAYYRATGGETGRTGYRAAMYREFLLLEPNLTVTEQNLADRARYIQRSNIFNAAELERLRREAVPEVSAPTTVQIVSQAEPVREEATTTLQDLPVEEDTGETVSLDIERMRRILEEAISEIRNAPLKNRPRLSRLTLNVATRDVIEAINKMLPQHLESSTGLGDTASIIFGAALAVHRFIGAKTPGPGRAAATRRSAEPAWKKRIEHRITLARVLIGRLQSFRSGNTRPRIVRSVRVALNGCGVRLDQPDIAQKLTERIDDLKQKIAAWGNRIRRYSARVERFQQNRLFSSDQKRFYKRLECPAVCSASQRPDPADLVAFWRGVWSREVEHEEGPWIAAVEEACARIEPMNPVAISAEDVAGAVRRAPNWKSPGPDGLHHYWLKGFSVCHATLARQFQEALEQRALPSLFTTGITHLAPKSTDATDPAKYRPITCLTTIYKTLTSVLSLKISRHIDENNIMSGAQNGCRGGSRGTKELLLIDSVAGQLVKRNRRNFSAAWIDYKKAFDSVPHSWLLRVLELYKVDSAVRDFLETCMGQWSTILCLHGERLAAADDRIRIGRGIFQGDCLSPLWFCLSLNPLSTLLEGSGTGFQFRRGGTKVPHLLYMDDLKLLAPNATRLKELLSITTEFSNSIRMELGLDKCAVMHVERGQVTHSAEISLEPSNIKSLSEAESYRYLGMSQSLGVKEADMKQSVCEAFFGRLTKICNSYLSGANKVRAYNGWVMPVLMYTFGVLSWTQTELDALDRKVRATMTLYRMHHPKSSVMRLYIPRKCGGRGVLSAKTMHNREISNLRTYFETMRGSPMHREVIECDKGLTPLSLAKTEWQKPVVLSTSDRETVWKEKELHGRFFKALNEPHVDKKASVQWLRFGDLFGETEGFVCAIQDQVVKTRNYRKYILKDGTHDICRACRHPGESLRHVLSGCSALANTEYLHRHNQAAKILHQELALKYGLLDERLPYYKYTPVPVLERDGVRLYWDRSIITDRTILANKPDIVLVDRAQSRVFLVDITIPYDENLVRAETEKKRKYLDLAHEVSDMWHVESTEIIPIVISANGLIPVSLAHHLRRLGFRGSSLAARMQKAVLLDSARIVRRFLSLSP

SEQ ID NO: 14709 - protein, 1190 aa, Maniola jurtina
MMMEHNIRNARIGPLPGGRQGAPGAGAGRSSIRAASTTSRPALPPSRSTHPSSPPDGLAPTGPTRAQSSAPAAGGVRRMRWTSLMNENVMRAYYRATGGETGRTGYRAAMYREFLLLEPNLTVTEQNLADRARYIQRSNIFNAAELERLRREAVPEVSAPTTVQIVSQAEPVREEATTTLQDVPVEEDTGETVSLDIERMRRILEEAISEIRNAPLENRPRLSRLTLNVATRDVIEAINKMLPQHLESSTGLGDTASIIFGAALAVHRFIDAKTPGPGRAAATRRSAEPAWKKRIEHRITLARVLIGRLQSFRSGNTRPRIVRSVRVALNGCGVRLDQPDIAQKLTERIDDLKQKIAAWGNRIRRYSARVERFQQNRLFSSDQKRFYKRLECPAVCSTSQRPDPADLVAFWRGVWSREVEHEEGPWIAAVEEACARIEPMNPVAISAEDVAGAVRRAPNWKSPGPDGLHHYWLKGFSVCHATLARQFQEALEQRALPSLFTTGITHLAPKSTDATDPAKYRPITCLTTIYKALTSVLSLKISRHIDENNIMSGAQNGCRGGSRGTKELLLIDSVAGQLVKRNRRNFSAAWIDYKKAFDSVPHSWLLRVLELYKVDSAVRDFLETCMGQWSTILCLHGERLAAADDRIRIGRGIFQGDCLSPLWFCLSLNPLSTLLEGSGTGFQFRRGGTKVPHLLYMDDLKLLAPNATRLKELLSITTEFSNSIKMELGLDKCAVMHVERGQVTHSAEISLEPSNIKSLSEAESYRYLGMSQSLGVKEADMKQSVCEAFFGRLTKICKSFLSGANKVRAYNGWVMPVLMYTFGVLSWTQTELDALDRKVRATMTLYRMHHPKSSVMRLYVPRKCGGRGVLSAKTMHNREISNLRTYFETMRGSPMHREVIECDKGLTPLSLAKTEWQKPVVLSTSDRETVWKEKELHGRFFKALNEPHVDKKASVQWLRFGDLFGETEGFVCAIQDQVVKTRNYRKYILKDGTHDICRACRHPGESLRHVLSGCSALANTEYLHRHNQAAKILHQELALKYGLLDERLPYYKYTPVPVLERDGVRLYWDRSIITDRTILANKPDIVLVDRAQSRVFLVDITIPYDENLVRAETEKKRKYLDLAHEVSDMWHVESTEIIPIVISANGLIPVSLAHHLRRLGFRGSSLAARMQKAVLLDSARIVRRFLSLSP

SEQ ID NO: 14710 - protein, 751 aa, Maniola jurtina
MSPVAISAEDVAGAVRRAPNWKSPGPDGLHHYWLKGFSVCHATLARQFQEALEQRALPSLFTTGITHLAPKSTDATDPAKYRPITCLTTIYKTLTSVLSLKISRHIDENNIMSGAQNGCRGGSRGTKELLLIDSVAGQLVKRNRRNFSAAWIDYKKAFDSVPHSWLLRVLELYKVDSAVRDFLEACMGQWSTILCLHGERLAAADDRIRIGRGIFQGDCLSPLWFCLSLNPLSTLLEGSGTGFQFRRGGTKVPHLLYMDDLKLLAPNATRLKELLNITTEFSKSIKMELGLDKCAVIHVERGQVTHSAEISLEPSNIKTLSEAESYRYLGMSQSLGVKEADMKQSVCEAFFGRLTKICKSYLSGANKVRAYNGWVMPVLMYTFGVLSWTQTELDALDRKVRTTMTLYRMHHPKSSVMRLYIPRKCGGRGVLSVKTMHNREISNLRTYFETMRGSPMHRDVIECDKGLTPLSLAKTEWQKPVVLSTSDRETVWKEKELHGRFFKALNEPHVDKKASVQWLRFGDLFGETEGFVCAIQDQVVKTRNYRKYILKDGTQDICRACRHPGESLRHVLSGCSALANTEYLHRHNQAAKILHQELALKYGLLDERLPYYRYTPVPVLERDGVRLYWDRSIITDRTILANKPDIVVVDRAQSRVFLVDITIPYDENLVRAETEKKRKYLDLAHEVSDMWHVESTEIIPIVISANGLIPVSLAHHLRRLGFRGSSLAVRMQKAVLLDSARIVRRFLNLSP

SEQ ID NO: 14711 - protein, 1188 aa, Boloria selene
MMENKNKNARLGPLPGGRQGAPGAGAGRDSIRAASTINRPALPPSRPTHPSPPPEGLVPTGSSRTQTSGPAAGGVRRMRWTSQMNENVMRAYYRATGGETGRTGYRAAMYREFLLLEPTLTVTEQNLADRARYIQRSNILNATELERLRREAVPEVRTLTTEQIVPPAATGEDVLTNFHDLPIEGGTQETVALDTERMRRILEEAVSEIRSAPLENRPRLSRLTLNVATREIIEAINQLLPQHLESSIGLEDTASILFGAALAVHRFVGARTPGPERDTAARRKAQPAWKKRIERRINHARGLIGRLQSFRSGNTRPRIVRSVRIAFDGLGVRLDQPDIAQKLTERIDDLKQRIAAWGSRIRRYSERVERFQQNRLFSSDQKRFYRTLECPAVCSTSQKPSPADLVAFWRNVWSTEVQHEEGPWIAAVEEACAVIKPMSPVAISAEDVVDAVRRAPNWKSPGPDGLHHYWLKGFSVCHATLARQFQEALEQRTLPNLFTTGITHLAPKSTDAADPAKYRPITCLTTIYKTLTSVLSSKISRHVDEDNIISGAQNGCRGRSRGTKELLLIDSVAGQLVKRNRRNFSAAWIDYKKAFDSVPHSWLSRVLELYKVDSTVRNFLGKCMGQWSTILSLHGERITAADDRIRIRRGIFQGDCLSPLWFCLSLNPLSSLLESSGTGFQFRRGGTRVPHLLYMDDLKLLAPNANRLQELLKITSEFSNSIRMKLGLDKCAVLHVVRGQVTHSAEINLEPSSIRTLSEAESYRYLGMSQSIGVNEADMKQSVCEAFFGRLTKVCKSFLSGANKVRAYNGWVMPVLMYTFGVLRWTQTELDILDRRVRTTMTLYRMHHPKSSVMRLYIPRKCGGRGLLSVKTMHNREIANLRTYFETKRESPMHREVVECDKGLTPLSLAKTEWQAPVVLSTSNRETVWKEKELHGRFFKALNEPNVDKKASVQWLRFGDLFGETEGFVCAIQDQVVKTRNYRKYILKDGTHDICRACGHPGESLRHVLSGCSALANTEYLHRHNQAAKILHQELALKHGLLNERLPYYKYTPMPVLERDGVRLYWDRSIITDRTILANKPDIVLMDRAQSRVFLMDITVPYDENLVRAETEKKRKYLDLAHEVSTMWHVESTEIIPIVISANGLIPVSLAHYLRRLGFRDSSLAARLQKAVLLDSARIVRRFLNLSP

SEQ ID NO: 14712 - protein, 1097 aa, Elymnias hypermnestra
MRRTSLMNENVMRGRTGYRTAMHREFLLLEPNLTVTEQNLADRARYIQRSNIFSAIELERLRREVVPEVTSPATEHIAATAIVHQELENNQDLLVDGDTEGTVSLDIEKMRGILEEAISESRSAPLEGRPRLSRLTLNAATRDVIEAVNKMLPQYLEGSTGLSETASILFGAALAVHRFIGVKIREPGRTTNTSSAVPAWKRRIERRITHARRLIGRLQSFGSGNTRPRIVRSVRIAFNGLDVRLNQPDIAQKLTERIDDLKQKIAAWGNRIRRYSERVERFHQNRLFASDQKRFYERMQRSASCSSSQRPASADLVAYWRGIWSLEVEHEESSWTAAVEEACAVIQPMNPVAISPEDVVGAVRRAPNWKSPGPDGLHHYWLKGFSACHATLARQFQGAIAQKALPNLFTTGITHLAPKTTNAADPTKYRPITCLSSIYKTLTSILSRKISYHIDENNIMSVAQNGCRGGSRGTKELLLIDSVAGQLVKRNRRNFSAAWIDYKKAFDSVPHSWLLRVLELYKIDGTLRDFLGECMRQWSTILCLHGERLTAADDRIRIRRGIFQGDCLSPLWFCLSLNPLSFLLERSGTGFQFRRGGARVPHLLYMDDLKLLAPNAPRLQELLKITSDFSNSIRMEMGLDKCAVLHVERGQVSHSAEINLEPTQLKTLSETETYRYLGMSQCMGVKEADMKQSVCEVFYGRLTKILKSYLSGANKIRAYNGWVMPVLLYTFGILRWTQTELDALDRRVRTTMTFHRMHHPKSSVMRLYIPRKCGGRGLLSAKTMHNREISSLRTYFETKRESPMHLEVIECDKGLTPLSLANENWQRPAVLSTSDREAVWKGKEMHGRFFKALHEPHVNRKASVQWLRFGDLFGETEGFVCAIQDQVVKTRNYRKYILKDGTHDICRACRHPGESLRHVLSGCSALANTEYLHRHNQAAKILHQELALMYGLLDERLPYYRYQPVPVLERDGVRLYWDRSIITDRTILANKPDIVIMDRAQSRVFLVDITIPYDENLVRAETEKKRKYLDLAHEITAMWGVGSTETIPIVISANGLIPVSLAHHLRRLGFRGSSLAARMQKAVLLDSARIVRRFLSL

SEQ ID NO: 14713 - protein, 864 aa, Melitaea cinxia
MAFNGLGISLDQPDIADKLTERIDGLKQRIAAWGKRIRRYSERVERFRQNRLFVSDQKRFYRKLENPISGSASLKPSTVDLVAFWRNIWSGEVEHEEGPWIAAVQDACAKIEPMNPIAISTEDVSGAVRRAPNWKSPGADGLHHYWLKGLSVCHATLARQYQEAIDRKTLPNLFTTGITHLAPKSTNTADPTNYRPITCLTSIYKTLTSVLSCKISRHIGEFNILSAAQNGCRGGGRGTKELLLIDSVAGQLVRRNRRNFSAAWIDYKKAFDSVPHSWLLRVLELYKIDQAVRDFLGVCMGQWSTILCLQGERLTGAGDPIRIRRGIFQGDCLSPLWFCLSLNPLSTLLERSGTGFQFRRGGTKVSHLLYMDDLKLLAPNAARLQELLKITTEFSSSIRMQLGVDKCAVVHVDRGQVTQSSQLSLELTSFKTLSEAESYRYLGMSQCIGVKEVDMKQAVCEIFFGRLTKVLRSYLSGANKVRAYNAWVMPTLLYTFGILRWTQTELDALDRRVRTTMTYHRVHHPKSSVMRLYIPRKCGGRGMLSAKTMHNREVCSLRAYFETRRDSALHGDVSMCDKGLTPLALAKENWQKPVVLSTSDRETVWMEKELHGRFYKALHAPHVDSKASVQWLRFGDLFGETEGFVCAIQDQVVKTNNYRKHVLKDGTPDFCRACRHPGESLRHVLSGCSALANTEYLHRHNQVAKILHQELALMYGLLEQRMPYYQYSPVPVLERDGVRLYWDLPIATDRTILANKPDIVVMDRARSRVFLVDITVPHDENLVKAETEKKRKYLDLAHEIVDMWGVGSAEIIPIVISANGLIPVSLAHHLRQLGIRDGSLAARMQKAVLLDSARIVRRFLSLQP

SEQ ID NO: 14714 - protein, 1182 aa, Melitaea cinxia
MMEDNLERRIGPLPGGRQGASGAGAGRGSMRAASQPRRPAPPPDMSAYPPSLPVGLATTESQGTQHSLPAAGGVRRMRWTPKMNENVMRAYYRAVGRETGRTGYRAVMHREFLLLEPTLTVTEQNLADRARYIQRKGIFDAAELERFRREAAPEVEPVSTVRNEVSTQQESVRSEAPVEAITEGAVAQKVEQMRGILHEAIFETRGAPLEMRPRLSRLPLNAATRHAIEAANRLLPPYLETSFSLEDTGSILFGAALAVHRLVGAKTQESGRATHKNSDVPAWKRRIERRINLARALIGRLLAFRSGNTRPRIVRSVRMAFNGLGISLDQPDIADKLTERIDGLKQRIAAWGKRIRRYSERVERFRQNRLFVSDQKRFYRKLENPISGSASLKPSTVDLVTFWRNIWSGEVEHEEGPWIAAVQDACAKIEPMNPIAISTEDVSGAVRRAPNWKSPGADGLHHYWLKGLSVCHATLARQYQEAIDRKTLPNLFTTGITHLAPKSTNTADPTNYRPITCLTSIYKTLTSVLSCKISRHIGEFNILSAAQNGCRGGGRGTKELLLIDSVAGQLVRRNRRNFSAAWIDYKKAFDSVPHSWLLRVLELYKIDQAVRDFLGVCMGQWSTILCLQGERLTGAGDPIRIRRGIFQGDCLSPLWFCLSLNPLSTLLERSGTGFQFRRGGTKVSHLLYMDDLKLLAPNAARLQELLKITTEFSSSIRMQLGVDKCAVVHVDRGQVTQSSQLSLELTSFKTLSEAESYRYLGMSQCIGVKEVDMKQAVCEIFFGRLTKVLRSYLSGANKVRAYNAWVMPTLLYTFGILRWTQTELDALDRRVCTTMTYHRVHHPKSSVMRLYIPRKCGGRGMLSAKTMHNREVCSLRAYFETRRDSALHGDVSMCDKGLTPLALAKENWQKPVVLSTSDRETVWMEKELHGRFYKALHAPHVDSKASVQWLRFGDLFGETEGFVCAIQDQVVKTNNYRKHVLKDGTPDFCRACRHPGESLRHVLSGCSALANTEYLHRHNQVAKILHQELALMYGLLEQRMPYYQYSPVPVLERDGVRLYWDLPIATDRTILANKPDIVVMDRARSRVFLVDITVPHDENLVKAETEKKRKYLDLAHEIVDMWGVGSAEIIPIVISANGLIPVSLAHHLRQLGIRDGSLAARMQKAVLLDSARIVRRFLSLQP

SEQ ID NO: 14715 - protein, 990 aa, Mellicta athalia
MRGILQEAISETRGAPLEQRPRLSRLPLNAATRSAIEAANRLLPPYLEGSLGLEDTGSILFGAALAVHRLVGAKTQEPGLATHKNSDVPAWKRRIERRISLARALIGRLLAFRSGNTRPRIVRSVRMAFNGLGVSLNQPDIADRLTERIDGLKQRIAAWGKRIRRYSERVERFRQNRLFVSDQKRFYRKLENPIPCSAFLKPSTVDLVAFWRNIWSREVEHEEGPWIAAVQDACAKVDPMNPIAISTEDVSGAVRRAPNWKSPGADGLHHYWLKGLSVCHATLARQYQEAIDRKTLPNLFTTGITHLAPKSTNTADPTNYRPITCLSSIYKTLTSVLSCKISRHIGEFNILSAAQNGCRGGGRGTKELLLIDSVAGQLVRRNRRNFSAAWIDYKKAFDSVPHSWLLRVLELYKIDEAVRDFLGVCMGQWSTILCLQGERLTGADDPIRIRRGIFQGDCLSPLWFCLSLNPLSTLLERSGTGFQFRRGGTKVSHLLYMDDLKLLAPNAAHLQELLKITTEFSGSIRMQLGVDKCAVVHVDRGQVTQSAQFSLELTSFKTLSEAESYRYLGMSQCIGVKEVDMKQAVCEVFFGRLTKVLRSYLSGANKVRAYNTWVMPTLLYTFGILRWTQTELDALDRRVRTTMTHHRVHHPKSSVMRLYIPRKCGGRGMLNAKTMHNREVCSLRAYFETRRDSAMHGDVVVCDKGLTPLSLANENWQKPVVLSTSDRETVWMEKELHGRFYKALHAPHVDSKASVQWLRFGDLFGETEGFVCAIQDQVVKTNNYRKHILKDGTPDFCRACRHPGESLRHVLSGCSALANTEYLHRHNQVAKILHQELALMYGLLEQRMPYYQYTPVPVLERDGVRLYWDLPIATDRTILANKPDIVVMDRARSRVFLVDITIPHDENLVKAETEKKRKYLDLAHEIVDMWGVGSAEIIPIVISANGLIPVSLAHHLRQLGIRDGSLAGRMQKAVLLDSARIVRRFLSLQP

SEQ ID NO: 14716 - protein, 1190 aa, Maniola jurtina
MMMEQNIRNARIGPLPGGRQGAPGAGAGRSSIRAASTTSRPALPPSRSTHPSSPPDGLAPTGPTRAQSSAPAAGGVRRMRWTSLMNENVMRAYYRATGGETGRTGYRAAMYREFLLLEPNLTVTEQNLADRARYIQRSNIFNAAELERLRREAVPEVSAPTTVQIVSQAEPVREEATTTLQDLPVEEDTGETVSLDIERMRRILEEAISEIRYAPLENRPRLSRLTLNVATRDVIEAINKMLPQHLESSTGLGDTASIIFGAALAVHRFIGAKTPGPGRAAATRRSAEPAWKKRIEHRITLARVLIGRLQSFRSGNTRPRIVRSVRVALNGCGVRLDQPDIAQKLTERIDDLKQKIAAWGNRIRRYSVRVERFQQNRLFSSDQKRFYKRLECPAVCSTSQRPDPADLVAFWRGVWSREVEHEEGPWIAAVEEACARIEPMNPVAISAEDVAGAVRRAPNWKSPGPDGLHHYWLKGFSVCHATLARQFQEALEQRALPSLFTTGITHLAPKSTDATDPAKYRPITCLTTIYKTLTSVLSLKISRHIDENNIMSGAQNGCRGGSRGTKELLLIDSVAGQLVKRNRRNFSAAWIDYKKAFDSVPHSWLLRVLELYKVDSAVRDFLETCMGQWSTILCLHGERLAAADDRIRIGRGIFQGDCLSPLWFCLSLNPLSTLLEGSGTGFQFRRGGTKVPHLLYMDDLKLLAPNATRLKELLSITTEFSNSIKMELGLDKCAVMHVERGQVTHSAEISLEPSNIKSLSEAESYRYLGMSQSLGVREADMKQSVCEAFFGRLTKICKSYLSGANKVRAYNGWVMPVLMYTFGVLSWTQTELDALDRKVRATMTLYRMHHPKSSVMRLYIPRKCGGRGVLSAKTMHNREISNLRTYFETMRGSPMHREVIECDKGLTPLSLAKTEWQKPVVLSTSDREAVWKEKELHGRFLKALNEPHVDKKASVQWLRFGDLFGETEGFVCAIQDQVVKTRNYRKYILKDGTHDICRACRHPGESLRHVLSGCSALANTEYLHRHNQAAKILHQELALKYGLLDERLPYYKYTPVPVLERDGVRLYWDRSIITDRTILANKPDIVVVDRAQSRVFLVDITIPYDENLVRAETEKKRKYLDLAHEVSDMWHVESTEIIPIVISANGLIPVSLAHHLRRLGFRGSSLAARMQKAVLLDSARIVRRFLNLSP

SEQ ID NO: 14717 - protein, 1189 aa, Maniola jurtina
MMDNKTRNERIGPLPGGRQGAPGAGAGRGSMRAASATSRPALPPSRSTYPSSPPDGLAPTGSTRAQSSAPAAGGVRRMRWTSLMNENVMRAYYRATGGETGRTGYRAAMYREFLLLEPNVTVTEQNLADRARYIQRSNIFNATELERLRREAVPEVSAPTAEQIVSQAAPVREETITTSQDLPVEEDTEGTVSLDIERMRGILEEAISEIRSAPLENRPRLSRLTLNVATRDVIEAINKMLPQHLESSTGLGDTASIIFGAALAVHRFIGAKTPGPGRAAATRRSAEPAWKKRIEHRITLARVLIGRLQSFRAGNTRPRIVRSVGVAFNGCGVRLDQPDIAQKLTERIDDLKQKIAAWGNRIRRYSARVERFQQNRLFSSDQKRFYKRLECPAVCSTSQRPDPADLVAFWRGVWSREAEHEEGPWMAAVEEACARIEPMNPVAISAEDVAGAVRRAPNWKSPGPDGLHHYWLKGFSVCHATLARQFQEALEQRALPSLFTTGITHLAPKSTDATDPAKYRPITCLTTIYKTLTSVLSLKISRHIDENNIMSGAQNGCRGGSRGTKELLLIDSVAGQLVKRNRRNFSAAWIDYKKAFDSVPHSWLLRVLELYKVDSTARDFLEACMGQWSTILCLHGERLAAADDRIRIGRGIFQGDCLSPLWFCLSLNPLSTLLEGSGTGFQFRRGGTKVPHLLYMDDLKLLAPNATRLRELLNITTEFSNSIRMELGLDKCAVIHVERGQVTHSAEISLEPSNIKTLSEAESYRYLGMSQSLGVKEADMKQSVCEAFFGRLTKICKSYLSGANKVRAYNGWVMPVLMYTFGVLSWTQTELDALDRKVRTTMTLYRMHHPKSSVMRLYIPRKCGGRGVLSVKTMHNREISNLRTYFETMRGSPMHREVIECDKGLTPLSLAKTEWQKPVVLSTSDRETVWKEKELHGRFFKALNEPHVDKKASVQWLRFGDLFGETEGFVCAIQDQVVKTRNYRKYILKDGTHDICRACRHPGESLRHVLSGCSALANTEYLHRHNQAAKILHQELALKYGLLDERLPYYRYTPVPVLERDGVRLYWDRSIITDRTILANKPDIVVVDRAQSRVFLVDITIPYDENLVRAETEKIRKYLDLAHEVSDMWHVESTEIVPIVISANGLIPVSLAHHLRRLGIRGSSLAARMQKAVLLDSARIVRRFLNLSP

SEQ ID NO: 14718 - protein, 1188 aa, Elymnias hypermnestra
MMMDLFCTDKRLGPLPGGRQGTSGAGAGRDSMRAASSTSSTRRPARPPRRPTNPSSPPEGLASAGTARTQNPEPAAGGVRRMRWTSLMNENVMRAYYRATGGETGRTGYRTAMYREFLLLEPNLTVTEQNLADRARYIQRSNIFSATELERLRCEAVPEVTPPATQQTAATAIVHQELENNQDLLVDGDAEGTVSLDIEKMRGILEEAISESRSAPLEGRPRLSRLTLSAATRDVIEAINKLLPQYFEGSTGLSETASILYGAALAVHRFIGVKIREPGRTANTSSAVPAWKRRIERRITHARRLIGRLQSFRSGNTRPRIVRSVRIAFNGLDVRLDQPDIAQKLTERIDDLKQKIAAWGNRIRRYSERVERFHQNRLFVSDQKRFYERLQRPASCSSSQRPASADLVAYWRSIWSLEVEHEEGSWTAAVEEACAVIQPMNPVAITPEDVVGAVRRAPNWKSPGPDGLHHYWLKGFSACHATLARQFQEAMAQKALPNLFTTGITHLAPKTSNAADPTKYRPITCLSSIYKTLTSILSRKISYHIDENNIMSVAQNGCRGGSRGTKELLLIDSVAGQLVKRNRRNFSAAWIDYKKAFDSVPHSWLLRVLELYKIDGTLRDFLGECMRQWSTILCLHGERLTAADDRIRIRRGIFQGDCLSPLWFCLSLNPLSFLLERSGTGFQFRRGGARVPHLLYMDDLKLLAPNAPRLQELLKITSDFSNSIRMEMGLDKCAVLHVERGQVSHSAEINLEPTQLKTLSETETYRYLGMSQCMGVKEADMKQSVCEVFYGRLTKILKSYLSGANKIRAYNGWVMPVLLYTFGILRWTQTELDALDRRVRTTMTFHRMHHPKSSVMRLYIPRKCGGRGLLSAKTMHNREISSLRTYFETKRESPMHLEVIECDKGLTPLSLANENWQRPAVLSTSDREAVWKGKEMHGRFFKALHEPHVNRKASVQWLRFGDLFGETEGFVCAIQDQVVKTRNYRKYILKDGTHDICRACRHPGESLRHVLSGCSALANTEYLHRHNQAAKILHQELALMYGLLDERLPYYRYQPVPVLERDGVRLYWDRSIITDRTILANKPDIVIMDRAQSRVFLVDITIPYDENLVRAETEKKRKYLDLAHEITAMWGVESTETIPIVISANGLIPVSLAHHLRRLGFRGSSLAARMQKAVLLDSARIVRRFLSL

SEQ ID NO: 14719 - protein, 1080 aa, Maniola hyperantus
MMMDNNIRNVRIGPLPGGRQGAPGAGAGRSSIRAASITTSRPAPLPSRPTNPSSPPEGLAPTGSTRAQFSAPAAGGVRRMRWTSLMNENVMRAYYRATGGETGRTGYRAAMYREFLLLEPNLTVTEQNLADRARYIQRSNIFNATELERLRREAVPEVSAPTTEQIDSQAVPAPEETNTISQDLPVEDGTEETVSLDIERMRGILEEAISEIRSAPLESRPRLSRLTLNVATRDVIEAINKMLPQHLESSTGLGDTASILFGAALAVHRFIGAKTPGPGRAAAARRSAEPAWKKRIERRITLARVLIGRLQSFRSGNTRPRIVRSVGIAFNGCGVRLDQPDIVQKLTERIDDLKQKIAAWGNRIRRYSERVERFQQNRLFLSDQKRFYKRLECPAVCSTSQRPDPADLVTFWRGVWSREVEHEEGPWIEAIEEACASIEPMNPIAISTEDVAGAVRRAPNWKSPGPDGLHHYWLKGFSVCHATLARQFQEALEQRTLSSLFTTGITHLAPKSTDTTDPAKYRPITCLTTIYKTLTSVLSLKISRHVDENNIISGAQNGCRGGSRGTKELLLIDSVAGQLVKRNRRNFSAAWIDYRKAFDSVPHSWLLRVLELYKVDGTVRDFLGECMGQWSTILCLHGERLADADDRIRIGRGIFQGDCLSPLWFCLSLNPLSTLLEGSGTGFQFRRGGTKVPHLLYMDDLKLLAPNATRLQELLNVTTDFSNSIRMELGLDKCAVMHVERGQVTHSAEMSLEPSTIRTLSEAESYRYLGMSQSLGVKETDVKQSVCEAFFGRLTKICKSYLSGANKIRAYNGWVMPVLMYTFGVLRWTQTELDALDRKVRTTMTLYRMHHPKSSVMRLYIPRKCGGRGVLSVKTMHNREIANLRTYFETMRGSPMHREVIECDKGLTPLSLAQTEWQKPVVLSTSDREAVWREKELHGRFFKALNEPHVDKKASVQWLRFGDLFGETEGFVCAIQDQVVKTRNYRKYILKDGTHDICRACRHPGESLRHVLSGCSALANTEYLHRHNQAAKILHQELALKYGLLDERLPYLHTGAGTRARRSPALLGPVHHHGQDYSSE

SEQ ID NO: 14720 - protein, 1182 aa, Melitaea cinxia
MMEDDLQRRIGPLPGGRQGASGAGAGRGSMRAASQPRRPAPPPDRSGYPPSPPVGLATTESQGTQHSLPAAGGVRRMRWTPKMNESVMRAYYRAVGRETGRTGYRAVMHREFLLLEPTLTVTEQNLADRARYIQRKGIFDAAELERFRREAAPEVEPVSTVRNEVSTQQEGVRSEAPVEVITEGAVAQKVEQMRGILQEAISETRGAPLEMRPRLSRLPLNAATRNAIEAANRLLPPYLEGSLSLEDTGSILFGAALAVHRLVGAKTQESGRATHKNSDVPAWKRRIERRINLARALIGRLLAFRSGNTRPRIVRSVRMAFNGLGISLDQPDIADKLTERIDGLKQRIAAWGKRIRRYSERVERFRQNRLFVSDQKRFYRKLENPISSSASLKPSTVDLVAFWRNIWSGEVEHEEGPWIAAVQDACAKIEPMNPIAISTEDVSGAVRRAPNWKSPGADGLHHYWLKGLSVCHATLARQYQEAIDRKTLPNLFTTGITHLAPKSTNTADPTNYRPITCLTSIYKILTSVLSCKISRHIGEFNILSAAQNGCRGGGRGTKELLLIDSVAGQLVRRNRRNFSAAWIDYKKAFDSVPHSWLLRVLELYKVDQAVRDFLGVCMGQWSTILCLQGERLTGADDPIRIRRGIFQGDCLSPLWFCLSLNPLSTLLERSGTGFQFRRGGTKVSHLLYMDDLKLLAPNAARLQELLKITTEFSSSIRMQLGVDKCAVVHVDRGQVTQSSQLSLELTSFKTLSEAESYRYLGMSQCIGVKEVDMKQAVCEIFFGRLTKVLRSYLSGANKVRAYNAWVMPTLLYTFGILRWTQTELDALDRRVRTTMTHHRMHHPKSSVMRLYIPRKCGGRGMLSAKTMHNREVCSLRAYFETRRDSALHGDVSMCDKGLTPLALAKENWQKPVVLSTSDRETVWMEKELHGRFYKALHAPHVDSKASVQWLRFGDLFGETEGFVCAIQDQVVKTNNYRKHVLKDGTPDFCRACRHPGESLRHVLSGCSVLANTEYLHRHNQVAKILHQELALMYGLLEQRMPYYQYSPVPVLERDGVRLYWDLPIATDRTILANKPDIVVMNRARSRVFLVDITVPHDENLVKAETEKKRKYLDLAHEIVDMWGVGSAEIIPIVISANGLIPVSLAHHLRQLGIRDGSLAARMQKAVLLDSARIVRRFLSLQP

SEQ ID NO: 14721 - protein, 990 aa, Melitaea cinxia
MRGILQEAISETRGAPLEMRPRLSRLPLNAATRNAIEAANRLLPPYLEGSLSLEDTGSILFGAALAVHRLVGAKTQESGRATHKNSDVPAWKRRIERRINLARALIGRLLAFRSGNTRPRIVRSVRMAFNGLGISLDQPDIADKLTERIDGLKQRIAAWGKRIRRYSEKVERFRQNRLFVSDQKRFYRKLENPISSSASLKPSTVDLVAFWHNIWSGEVEHEEGPWIAAVQDACAKIEPMNPIAISTEDVSGAVRRAPNWKSPGADGLHHYWLKGLSVCHATLARQYHEAIDRKTLPNLFTTGITHLAPKSTNTADPTNYRPITCLTSIYKTLTSVLSCKISRHIGEFNILSAAQNGCRGGGRGTKELLLTDSVAGQLVRRNRRNFSAAWIDYKKAFDSVPHSWLLRVLELYKVDQAVRDFLGVCMGQWSTILCLQGERLTGADDPIRIRRGIFQGDCLSPLWFCLSLNPLSTLLERSGTGFQFRRGGTKVSHLLYMDDLKLLAPNAARLQELLKITTEFSSSIRMQLGVDKCAVVHVDRGQVTQSSQLSLELTSYKTLSEAESYRYLGMSQCIGVKEVDMKQAVCEIFFGRLTKVLRSYLSGANKVRAYNAWVMPTLLYTFGILRWTQTELDALDRRVRTTMTHHRMHHPKSSVMRLYIPRKCGGRGMLSAKTMHNREVCSLRAYFETRRDSALHGDVSMCDKGLTPLALAKENWQKPVVLSTSDRETVWMEKELHGRFYKALHAPHVDSKASVQWLRFGDLFGETEGFVCAIQDQVVKTNNYRKHVLKDGTPDFCRACRHPGESLRHVLSGCSVLANTEYLHRHNQVAKILHQELALMYGLLEQRMPYYQYSPVPVLERDGVRLYWDLPIATDRTILANKPDIVLMDRARSRVFLVDITVPHDENLVKAETEKKRKYLDLAHEIVDMWGVGSAEIIPIVISANGLIPVSLAHHLRQLGIRDGSLAARMQKAVLLESARIVRRFLSLQP

SEQ ID NO: 14722 - protein, 1181 aa, Mellicta athalia
MEDKFGKRIGPLPGGRQGASGAGAGRGSMRAASHPRRPAPPPDRSANPPSPPDGLVPTEPQGTQHSAPAAGGVRRMRWTLKMNESVMRAYYRAVGRETGRTGYRAVMHREFLLLEPTVTVTEQNLADRARFIQRKGVFDAAELERFRREAAPEDEPVSAERDAVSTQQESVRSEAPVEAITEGAVAQKVEQMRGILQEAISETRGAPLEQRPRLSRLPLNAATRSAIEAANRLLPPYLEGSLGLEDTGSILFGAALAVHRLVGAKTQEPGLATHKNSDVPAWKRRIERRISLARALIGRLLAFRSGNTRPRIVRSVRMAFNGLGVSLNQPDIADRLTERIDGLKQRIAAWGKRIRRYSERVERFRQNRLFVSDQKRFYRKLENPIPCSAFLKPSMVDLVAFWRNIWSREVEHEEGPWIAAVQDACAKVEPMNPIAISTEDVSGAVRRAPNWKSPGADGLHHYWLKGLSVCHATLARQYQEAIDRKTLPNLFTTGITHLAPKSTNTADPTNYRPITCLSSIYKTLTSVLSCKISRHIGEFNILSAAQNGCRGGGRGTKELLLIDSVAGQLVRRNRRNFSAAWIDYKKAFDSVPHSWLLRVLELYKIDEAVRDFLGVCMGQWSTILCLQGERLTGADDPIRIRRGIFQGDCLSPLWFCLSLNPLSTLLERSGTGFQFRRGGTKVSHLLYMDDLKLLAPNAAHLQELLKITTEFSGSIRMQLGVDKCAVVHVDRGQVTQSAQFSLELTSFKTLSEAESYRYLGMSQCIGVKEVDMKQAVCEVFFGRLTKVLRSYLSGANKVRAYNTWVMPTLLYTFGILRWTQTELDALDRRVRTTMTHHRVHHPKSSVMRLYISRKCGGRGMLNAKTMHNREVCSLRAYFETRRDSAMHGDVVVCDKGLTPLSLANENWQVPVVLSTSDRETVWMEKELHGRFYKALHAPHVDSKASVQWLRFGDLFGETEGFVCAIQDQVVKTNNYRKHILKDGTPDFCRACRHPGESLRHVLSGCSTLANTEYLHRHNQVAKILHQELALMYGLLEQRMPYYQYTPVPVLERDGVRLYWDLPIATDRTILANKPDIVVMDRARSRVFLVDITIPHDENLVKAETEKKRKYLDLAHEIVDMWGVGSAEIIPIVISANGLIPVSLAHHLRQLGIRDGSLAGRMQKAVLLDSARIVRRFLSLQP

SEQ ID NO: 14723 - protein, 1163 aa, Curetis bulis
MDHSAHEPQERLGRQITKASVYPSNRAPQSYPPDSLAPAGSHTLQQVPASGGMRRMRWTKTNNENVMRAYYSATKGETDVTAYRPTMHRIFLQLEPTKTATEQNLADRVRFIQRSSIFSATELDQLQREVVPLEPETTVEAQTSANQVYENTDSEGAPVGADSEETTTLDVEQIGGVLDEAIAEVLTTPLEERPRLPRIHFNAATQNVIEAINNLLPTYLQGSTGLEDTNSILFGAALATCRFVGVKVSRTGHVTHGHNMTPAWKQRIERRIARARVLIGKLLCFRQGNTRPRVMRFVKEAFAGTDVDLVYQSAYSVLTERIDFLKQRIAAWGKRIRRYSERVERYQTNRQFRTDQKRFYRSLVRPESAADAQQPRSDDLVSFWRRLWSRSESHAEGTWIRSIEATCASIVPMSPIFISEEDVAASVKRAPNWKSPGLDGLQNYWLKGFSTCHSVLARQYQESLERTALPNLFTTGITHLVPKADDTTDPSNYRPITCLSTIYKTLTSILCIKMWTHLELNGVLSDAQNGCRAGSRGSKELLLIDSVAGQLVKRNRRNFSAAWIDYKKAFDSVPHSWLSRVLDLYKIDATVRNFLGACMGQWSTFLSLHGERMTATGDRIKIERGIFQGDCLSPLWFCLCLNPLSRLLEDSGAGFQFRRGGTRVSHLFYMDDLKLLAPTAPDLEKLLKIAVEFSSSINMELGINKCAIIHVEKGRIIQSDGLNVGSLSIRTLDETDAYRYLGMNQCLGVRETDVKQSVCDAFYGRLTKILKSSLSGVNKICAFNGWVMPVLLYTFGVLKWTQTELEALDRKVRTTMTYYRMHHPKSSIMRLYIPRKRGGRGLLSAKTMHNREICSLRTYFLSKAGRDMHAQVISCDKGLTPLNLANENWQDPTVLSTSQREAVWKGKELHGRFKKVLHESHVDFKASVNWLRFGDLFGETEGFVCAIQDQVIKTNNYRKYILKDGTVDICRACRHPGESLRHVLSGCSALSNTEYLHRHNQVARILHQELALKYNLLPGRVPYYTYSPEPVLENDCVRLYWDRSIITDRTVLANKPDIVIIDQALSKVFLVDITIPFDENLVRAETEKKRKYLDLAHEVTDMWQVGSTDIIPIVISANGLIPTSLAQNLRRLGFRSSSLPAQMQKAVLLDSARIVRRFLSLGP

SEQ ID NO: 14724 - protein, 1190 aa, Maniola hyperantus
MMMEKNEMSVRIGPLPGGRQGAPGAGAGRSSIRAASTISRPAPPPSRSTHPSSPPDGLAPTGSTRAQSSAPAAGGVRRMRWTSLMNENVMRAYYRATGGETGRTGYRAAMYREFLLLEPNLTVTEQNLADRARYIQRSNIFNAAELERLRREAVPEVSAPVTEQIDSQAVPVPEETNTISQDLPVEEDTEGTVSLDIERMRGILEEAISEIRSAPLENRPRLSRLTLNVATRDVIEAINKMLPQHLESSTGLGDTASILFGAALAVHRFIGAKTPGPERAAAARRSAEPAWKKRIERRITLARVLIGRLQSFRSGNTRPRIVRSVRVAFNGCGVRLDQPNIAQKLTERIDDLKQKIAAWGNRIRRYSERVERFQQNRLFLSNQKRFYKRLECPAVCSTSQRPDPADLVTFWRGVWSREVEHEEGPWIAAVEEACASIEPMNPVAISAEDVAGAVRRAPNWKSPGPDGLHHYWLKGFSVCHATLARQFQEALEQRALPSLFTTGITHLAPKSTDTTDPAKYRPITCLTTIYKTLTSVLSLKISRHVDENNIISGAQNGCRGGSRGTKELLLIDSVAGQLVKRNRRNFSAAWIDYRKAFDSVPHSWLLRVLELYKVDGTVRDFLGACMGQWSTILCLHGERLAAADDRIRIGRGIFQGDCLSPLWFCLSLNPLSTLLEGSGTGFQFRRGGTKVPHLLYMDDLKLLAPNATRLQELLNVTTDFSNSIRMELGLDKCAVMHVERGQVTHLAEVSLEPSTIRTLSEAESYRYLGMSQSLGVKETDVKQSVCEAFFGRLTKICKSYLSGANKVRAYNGWVMPVLMYTFGVLRWTQTELDALDRKVRTTMTLYRMHHPKSSVMRLYIPRKCGGRGVLSVKTMHNREIANLRTYFETMRGSPMHREVIECDKGLTPLSLAQTEWQKPVVLSTSDREAVWREKELHGRFFKALNEPHVDKKASVQWLRFGDLFGETEGFVCAIQDQVVKTRNYRKYILKDGTHDICRACRHPGESLRHVLSGCSALANTEYLHRHNQAAKILHQELALKYGLLDERLPYYKYTPVPVLERDGVRLYWDRSIITDRTILANKPDIVVVDRAQSRVFLVDITIPYDENLVRAETEKKRKYLDLAHEVSDMWHVESTEIIPIVISANGLIPVSLAHHLRRLGFCGSSLAARMQKAVLLDSARIVRRFLHLSP

SEQ ID NO: 14725 - protein, 1182 aa, Melitaea cinxia
MMENNLERRIGPLPGGRQGASGAGAGRGSMRAASQPRRPAPPPDRSGYPPSPPVGLATTESQGTQHSLPAAGGVRRMRWTPKMNESVMRAYYRAVGRETGRTGYRAVMHREFLLLEPTLTVTEQNLADRARYIQRKGIFDAAELERFRREAAPEVEPVSTVRNEVSTQQEGVRSEAPVEMITEGAVTQKVEQMRGILQEAISETRGAPLEMRPRLSRLPLNAATRNAIEAANRLLPPYLEGSLSLEDTGSILFGAALAVHRLVGAKTQESGRATHKNSDVPAWKRRIERRINLARALIGRLLAFRSGNTRPRIVRSVRMAFNGLGISLDQPDIADKLTERIDGLKQRIAAWGKRIRRYSERVERFRQNRLFVSDQKRFYRKLENPISSSASLKPSTVDLVAFWRNIWSGEVEHEEGPWIAAVQDACAKIEPMNPIAISTEDVSGAVRRALNWKSPGADGLHHYWLKGLSVCHATLARQYQEAIDRKTLPNLFTTGITHLAPKSTNTADPTNYRPITCLTSIYKTLTSVLSCKISRHIGEFNILSAAQNGCRGGGRGTKELLLIDSVAGQLVRRNRRNFSAAWIDYKKAFDSVPHSWLLRVLELYKVDQAVRDFLGVCMGQWSTILCLQGERLTGADDPIRIRRGIFQGDCLSPLWFCLSLNPLSTLLERSGTGFQFRRGGTKVSHLLYMDDLKLLAPNAARLQELLKITTEFSSSIRMQLGVDKCAVVHVDRGQVTQSSQLSLELTSFKTLSEAESYRYLGMSQCIGVKEVDMKQAVCEIFFGRLTKVLRSYLSGANKVRAYNAWVMPTLLYTFGILRWTQTELDALDRRVRTTMTHHRMHHPKSSVMRLYIPRKCGGRGMLSAKTMHNREVCSLRAYFETRRDSALHGDVSMCDKGLTPLALAKENWQKPVVLSTSDRETVWMEKELHGRFYKALHAPHVDSKASVQWLRFGDLFGETEGFVCAIQDQVVRTNNYRKHVLKDGTPDFCRACRHPGESLRHVLSGCSALANTEYLHRHNQVAKILHQELALMYGLLEQRMPYYQYSPVPVLERDGVRLYWDLPIATDRTILANKPDIVVMARARSRVFLVDITVPHDENLVKAETEKKRKYLDLAHEIVDMWGVGSAEIIPIVISANGLIPVSLAHHLRQLGIRDGSLAARMQKTVLLDSARIVRRFLSLQP

SEQ ID NO: 14726 - protein, 1189 aa, Maniola jurtina
MMDNKTRNERIGPLPGGRQGAPGAGAGRGSMRAASATSRPALPPSRSTYPSSPPDGLAPTGSTRAQSSAPAAGGVRRMRWTSLMNENVMRAYYRATGGETGRTGYRAAMYREFLLLEPNLTVTEQNLADRARYIQRSNIFNATELERLRREAVPEVSAPTAEQIVSQAAPVREETITTSQDLPVEEDTEGTVSLDIERMRGILEEAISEIRSAPLENRPRLSRLTLNVATRDVIEAINKMLPQHLESSTGLGDTASIIFGAALAVHRFIGAKTPGPGRAAATRRSAEPAWKKRIEHRITLARVLIGRLQSFRAGNTRPRIVRSVRVACNGCGVRLDQPDIAQKLTERIDDLKQKIAAWGNRIRRYSARVERFQQNRLFSSDQKRFYKRLECPAVCSTSQRPDPADLVAFWRGVWSREAEHEEGPWIAAVEEACARIEPMNPVAISAEDVAGAVRRAPNWKSPGPDGLHHYWLKGFSVCHATLARQFQEALEQRALPSLFTTGITHLAPKSTDAIDPAKYRPITCLTTIYKTLTSVLSLKISRHIDENNIMSGAQNGCRGGSRGTKELLLIDSVAGQLVKRNRRNFSAAWIDYKKAFDSVPHSWLLRVLELYKVDSTVRDFPEACMGQWSTILCLHGERLAAADDRIRIGRGIFQGDCLSPLWFCLSLNPLSTLLEGSGTGFQFRRGGTKVPHLLYMDDLKLLAPNATRLRELLNITTEFSNSIRMELGLDKCAVIHVERGQVTHSAEISLEPSNIKTLSEAESYRYLGMSQSLGVKEADMKQSVCEAFFGRLTKICKSYLSGANKVRAYNGWVMPVLMYTFGVLSWTQTELDALDRKVRTTMTLYRMHHPKSSVMRLYIPRKCGGRGVLSVKTMHNREISNLRTYFETMRGSPMHREVIECDKGLTPLSLAKTEWQKPVVLSTSDRETVWKEKELHGRFFKALNEPHVDKKASVQWLRFGDLFGETEGFVCAIQDQVVKTRNYRKCILKDGTHDICRACRHPGESLRHVLSGCSALANTEYLHRHNQAAKILHQELALKYGLLDERLPYYRYTPVPVLERDGVRLYWDRSIITDRTILANKPDIVVVDRAQSRVFLVDITIPYDENLVRAETEKKRKYLDLAHEVSDMWHVESIEIIPIVISANGLIPVSLAHHLRRLGFRGSSLAARMQKAVLLDSARIVRRFLNLSP

SEQ ID NO: 14727 - protein, 1190 aa, Maniola jurtina
MMMEHNIRNARIGPLPGGRQGAPGAGAGRSSIRAASTTSRPALPPSRSTHPSSPPDGLAPTGPTRTQSSAPAAGGVRRMRWTSLMNENVMRAYYRATGGETGRTGYRAAMYREFLLLEPNLTVTEQNLADRARYIQRSNIFNAAELERLRREAVPEVSAPTTVQIVSQAEPVREEATTTLQDLPVEEDTGETVSLDIERMRRILEEAISEIRNAPLENRPRLSRLTLNVATRDVIEAINKMLPQHLESSTGLGDTASIIFGAALAVHRFIGAKTPGPGRAAATRRSAEPAWKKRIEHRITLARVLIGRLQSFRSGNTRPRIVRSVRVALNGCGVRLDQPDIAQKLTERIDDLKQKIAAWGNRIRRYSARVERFQQNRLFSSDQKRFYKRLECPAVCSTSQRPDPADLVAFWRGVWSREVEHEEGPWIAAVEEACARIEPMNPVAISAEDVAGAVRRAPNWKSPGPDGLHHYWLKGFSVCHATLARQFQEALEQRALPSLFTTGITHLAPKSTDATDPAKYRPITCLTTIYKTLTSVLSLKISRHIDENNIMSGAQNGCRGGSRGTKELLLIDSVAGQLVKRNRRNFSAAWIDYKKAFDSVPHSWLLRVLELYKVDSAVRDFLETCMGQWSTILCLHGERLAAADDRIRIGRGIFQGDCLSPLWFCLSLNPLSTLLEGSGTGFQFRRGGTKVPHLLYMDDLKLLAPNATRLKELLSITTEFSNSIKMELGLDKCAVMHVERGQVTHSAEISLEPSNIKSLSEAESYRYLGMSQSLGVKEADMKQSVCEAFFGRLTKICKSYLSGANKVRAYNGWVMPVLMYTFGVLSWTQTELDALDRKVRATMTLYRMHHPKSSVMRLYIPRKCGGRGVLSAKTMHNREISNLRTYFETMRGSPMHREVIECDKGLTPLSLAKTEWQKPVVLSTSDRETVWKEKELHGRFFKALNEPHVDKKASVQWLRFGDLFGETEGFVCAIQDQVVKTRNYRKYILKDGTHDICRACRHPGESLRHVLSGCSALANTEYLHRHNQAAKILHQELALKYGLLDERLPYYKYTPVPVLERDGVRLYWDRSIITDRTILANKPDIVLVDRAQSRVFLVDITIPYDENLVRAETEKKRKYLDLAHEVSDMWHVESTEIIPIVISANGLIPVSLAHHLRRLGFRGSSLAARMQKAVLLDSARIVRRFLSLSP

SEQ ID NO: 14728 - protein, 991 aa, Maniola jurtina
MRGILEEAISEIRSAPLENRPRLSRLTLNVATRDAIEAINKMLPQHLEGSTGLGDTASIIFGAALAVHRFIGAKTPGPGRAAATRRSAEPTWKKRIEHRITLARVLIGRLQSFRSGNTRPRIVRSVRVAFNGCGVRLDQPDIAQKLTERIDDLKQKIAAWGNRIRRYSARVERFQQNRLFSSDQKRFYKRLECPAVCSTSQRPDPADLVAFWRGVWSREVEHEEGPWIAAVEEACARIEPMNPVAISAEDVAGAVRRAPNWKSPGPDGLHHYWLKGFSVCHATLARQFQEALEQRALPSLFTTGITHLAPKSTDATDPAKYRPITCLTSIYKTLTSVLSLKISRHIDENNIMSGAQNGCRGGGRGTKELLLIDSVAGQLVKRNRRNFSAAWIDYKKAFDSVPHSWLLRVLELYKVDSAVRDFLEACMGQWSTILCLHGERLAAADDRIRIGRGIFQGDCLSPLWFCLSLNPLSTLLEGSGTGFQFRRGGTKVPHLLYMDDLKLLAPNATRLRELLNITTEFSNSIRMELGLDKCAVIHVERGQVTHSAEISLEPSNIKTLSEAESYRYLGMSQSLGVKEADMKQSVCEAFFGRLTKICKSYLSGANKVRAYNGWVMPVLIYTFGVLSWTQTELDALDRKVRTTMTLYRMHHPKSSVMRLYIPRKCGGRGVLSVKTMHNREISSLRTYFETMRGSPMHREVIECDKGLTPLSLAKTEWQKPVVLSTSDRETVWKEKELHGRFFKALNEPHVDKKASVQWLRFGDLFGETEGFVCAIQDQVVKTRNYRKYILKDGTHDICRACRHPGESLRHVLSGCSALANTEYLHRHNQAAKILHQELALKYGLLDERLPYYRYTPVPVLERDGVRLYWDRSIITDRTILANKPDIVVVDRAQSRVFLVDITIPYDENLVRAETEKKRKYLDLAHEVSDMWHVESTEIIPIVISANGLIPVSLAHHLRRLGFRGSSLAARMQKAVLLDSARIVRRFLNLSP

SEQ ID NO: 14729 - protein, 1182 aa, Melitaea cinxia
MMEDDLQRRIGPLPGGRQGASGAGAGRGSMRAASQPRRPAPPPDRSGYPPSPPVGLATTESQGTQHSLPAAGGVRRMRWTPKMNESVMRAYYRAVGRETGRTGYRAVMHREFLLLEPTLTVTEQNLADRARYIQRKGIFDAAELERFRREAAPEVEPVSTVCNEVSTQQEGVRSEAPVEVITEGAVAQKVEQMRGILQEAISETRGAPLEMRPRLSRLPLNVATRNAIEAANRLLPPYLEGSLSLEDTGSILFGAALAVHRLVGAKTQESGRATHKNSDVPAWKRRIERRINLARALIGRLLAFRSGNTRPRIVRSVRMAFNGLGISLDQPDIADKLTERIDGLKQRIAAWGKRIRRYSERVERFRQNRLFVSDQKRFYRKLENPISSSASLKPSTVDLVAFWRNIWSGEVEHEEGPWIAAVQDACAKIEPMNPIAISTEDVSGAVRRAPNWKSPGADGLHHYWLKGLSVCHATLARQYQEAIDRKTLPNLFTTGITHLAPKSTNTADPTNYRPITCLTSIYKTLTSVLSCKISRHIGEFNILSAAQNGCRGGGRGTKELLLIDSVAGQLVRRNRRNFSAAWIDYKKAFDSVPHSWLLRVLELYKVDQAVRDFLGVCMGQWSTILCLQGERLTGADDPIRIRRGIFQGDCLSPLWFCLSLNPLSTLLERSGTGFQFRRGGTKVSHLLYMGDLKLLAPNAARLQELLKITTEFSSSIRMQLGVDKCAVVHVDRGQVTQSSQLSLELTSFKTLSEAESYRYLGMSQCIGVKEVDMKQAVCEIFFGRLTKVLRSYLSGANKVRAYNAWVMPTLLYTFGILRWTQTELDALDRRVRTTMTHHRMHHPKSSVMRLYIPRKCGGRGMLSAKTMHNREVCSLRAYFEMRRDSALHGDVSMCDKGLTPLALAKENWQKPVVLSTSDRETVWMEKELHGRFYKALHAPHVDSKASVQWLRFGDLFGETEGFVCAIQDQVVKTNNYRKHVLKDGTPDFCRACRHPGESLRHVLSGCSVLANTEYLHRHNQVAKILHQELALMYGLLEQRMPYYQYSPVPVLERDGVRLYWDLPIATDRTILANKPDIVVMDRARSRVFLVDITVPHDENLVKAETEKKRKYLDLAHEIVDMWGVGSAEIIPIVISANGLIPVSLAHHLRQLGIRDGSLAARMQKAVLLDSARIVRRFLSLQP

SEQ ID NO: 14730 - protein, 1182 aa, Melitaea cinxia
MMEDDLQRRIGPLPGGRQGASGAGAGRGSMRAASQPRRPAPPPDRLGYPPSPPVGLATTESQGTQHSLPAAGGVRRMRWTPKMNESVMRAYYRAVGRETGRTGYRAVMHREFLLLEPTLTVTEQNLADRARYIQRKGIFDAAELERFRREAAPEVEPVSTVRNEVSTQQEGVRGEAPVEVITEGAVAQKVEQMRGILQEAISETRGAPLEMRPRLSRLPLNAATRNAIEAANRLLPPYLEGSLSLEDTGSILFGAALAVHRLVGAKTQESGRATHKNSDVPAWKRRIERRINLARALIGRLLAFRSGNTRPRIVRSVRMAFNGLGISLDQPDIADKLTERIDGLKQRIAAWGKRIRRYSERVERFRQNRLFVSDQKRFYRKLENPISSSASLKPSTVDLVAFWRNIWSGEVEHEEGPWIAAVQDACAKIEPMNPIAISTEDVSGAVRRAPNWKSPGADGLHHYWLKGLSVCHATLARQYQEAIDRKTLPNLFTTGITHLAPKSTNTADPTNYRPITCLTSIYKTLTSVLSCKISRHIGEFNILSAAQNGCRGGGRGTKELLLIDSVAGQLVRRNRRNFSAAWIDYKKAFDSVPHSWLLRVLELYKVDQAVRDFLGVCMGQWSTILSLQGERLTGADDPIRIRRGIFQGDCLSPLWFCLSLNPLSTLLERSGTGFQFRRGGTKVSHLLYMDDLKLLAPNAARLQELLKITTEFSSSIRMQLGVDKCAVVHVDRGQVTQSSQLSLELTSFKTLSEAESYRYLGMSQCIGVKEVDMKQAVCEIFFGRLTKVLRSYLSGANKVRAYNAWVMPTLLYTFGILRWTQTELDALDRRVRTTMTHHRMHHPKSSVMRLYISRKCGGRGMLSAKTMHNREVCSLRAYFETRRDSALHGDVSMCDKGLTPLALAKENWQKPVVLSTSDRETVWMEKELHGRFYKALHAPHVDSKASVQWLRFGDLFGETEGFVCAIQDQVVKTNNYRKHVLKDGTPDFCRACRHPGESLRHVLSGCSVLANTEYLHRHNQVAKILHQELALMYGLLEQRMPYYQYPPVPVLERDGVRLYWDLPIATDRTILANKPDIVVMDRARSRVFLVDITVPHDENLVKAETEKKRKYLDLAHEIVDMWGVGSAEIIPIVISANGLIPVSLAHHLRQLGIRDGSLAARMQKAVLLDSARIVRRFLSLQP

SEQ ID NO: 14731 - protein, 1112 aa, Maniola jurtina
MRWTSLMNENVMRAYYRATGGETGRTGYRAAMYREFLLLEPNLTVTEQNLADRARYIQRSNIFNATELERLRREAVPEVSAPTAEQIVSQAAPVREETITASQDLPVEEDTEGTVSLDIERMRGILEEAISEIRSAPLENRPRLSRLTLNVATRDVIEAINKMLPQHLESSTGLGDTASIIFGAALAVHRFIGAKTPGPGRAAATRRSAEPAWKKRIEHRITLARVLIGRLQSFRSGNTRPRIVRSVRVAFNGCGVRLDQPDIAQKLTERIDDLKQKIAAWGNRIRRYSARVERFQQNRLFSSDQKRFYKRLECPAVCSTSQRPDPADLVAFWRGVWSREVEHEEGPWIAAVEEACARIEPMNPVAISAEDVAGAVRRAPNWKSPGPDGLHHYWLKGFSVCHATLARQFQEALEQRALPSLFTTGITHLTPKSTDATDPAKYRPITCLTTIYKTLTSVLSLKISRHIDENNIMSGAQNGCRGGGRGTKELLLIDSVAGQLVKRNRRNFSAAWIDYKKAFDSVPHSWLLRVLELYKVDSAVRDFLEACMGQWSTILCLHGERLAAADDRIRIGRGIFQGDCLSPLWFCLSLNPLSTLLEGSGTGFQFRRGGIKVPHLLYMDDLKLLAPNATRLRELLNITTEFSNSIRMELGLDKCAVIHVERGQVTHSAEISLEPSNIKTLSEAESYRYLGMSQSLGVKEADMKQSVCEAFFGRLTKICKSYLSGANKVRAYNGWVMPVLMYTFGVLSWTQTELDALDRKVRTTMTLYRMHHPKSSVMRLYIPRKCGGRGVLSVKTMHNREISNLRTYFETMRGSPMHREVIECDKGLTPLSLAKTEWQKPVVLSTSDRETVWKEKELHGRFFKALNEPHVDKKASVQWLRFGDLFGETEGFVCAIQDQVVKTRNYRRYILKDGTHDICRACRHPGESLRHVLSGCSALANTEYLHRHNQAAKILHQELALKYGLLDERLPYYRYTPVPVLERDGVRLYWDRSIITDRTILANKPDIVVVDRAQSRVFLVDITIPYDENLVRAETEKKRKYLDLAHEVSDMWHVESTEIIPIVISANGLIPVSLAHHLRRLGFRGSSLAARMQKAVLLDSARIVRRFLNLSP

SEQ ID NO: 14732 - protein, 1190 aa, Maniola jurtina
MMMEHNIRNTRIGPLPGGRQGAPGAGAGRSSIRAASTTSRPALPPSRSTHPSSPPDGLALTGPTRAQSSAPAAGGVRRMRWTSLMNENVMRAYYRATGGETGRTGYRAAMYREFLLLEPNLTVTEQNLADRARYIQRSNIFNAAELERLRREAVPEVSAPTTVQIVSQAEPVREEATTTLQDLPVEEDTGETVSLDIERMRRILEEAISEIRNAPLENRPRLSRLTLNVATRDVIEAINKMLPQHLESSTGLGDTASIIFGAALAVHRFIGAKTPGPGRAAATRRSAEPAWKKRIEHRITLARVLIGRLQSFRSGNTRPRIVRSVRVALNGCGVRLDQPDIAQKLTERIDDLKQKIAAWGNRIRRYSARVERFQQNRLFSSDQKRFYKRLECPAVCSTSQRPDPADLVAFWRGVWSREVEHEEGPWIAAVEEACAGIEPMNPVAISAEDVAGAVRRAPNWKSPGPDGLHHYWLKGFSVCHATLARQFQEALEQRALPSLFTTGITHLAPKSTDATDPAKYRPITCLTTIYKTLTSVLSLKISRHIDENNIMSGAQNGCRGGSRGTKELLLIDSVAGQLVKRNRRNFSAAWIDYKKAFDSVPHSWLLRVLELYKVDSAVRDFLETCMGQWSTILCLHGERLAAADDRIRIGRGIFQGDCLSPLWFCLSLNPLSTLLEGSGTGFQFRRGGTKVPHLLYMDDLKLLAPNATRLKELLSITTEFSNSIKMELGLDKCAVMHVERGQVTHSAEISLEPSNIKSLSEAESYRYLGMSQSLGVKEADMKQSVCEAFFGRLTKICKSYLSGANKVRAYNGWVMPVLMYTFGVLSWTQTELDALDRKVRATMTLYRMHHPKSSVMRLYIPRKCGGRGVLSAKTMHNREISNLRTYFETMRGSPMHREVIECDKGLTPLSLAKTEWQKPVVLSTTDRETVWKEKELHGRFFKALNEPHVDKKASVQWLRFGDLFGETEGFVCAIQDQVVKTRNYRKYILKDGTHDICRACRHPGESLRHVLSGCSALANTEYLHRHNQAAKILHQELALKYGLLDERLPYYKYTPVPVLERDGVRLYWDRSIITDRTILANKPDIVLVDRAQSRVFLVDITIPYDENLVRAETEKKRKYLDLAHEVSDMWHVGSTEIIPIVISANGLIPVSLAHHLRRLGFRGSSLAARMQKAVLLDSARIVRRFLSLSP

SEQ ID NO: 14733 - protein, 1321 aa, Maniola jurtina
MPKSIKNEPYTNSLYPSLSQLPIHDTNTMSLEINTLLKLILTFDTAETQQVYRFVRSCDSAFLLADAEKERILLVYALNNITGTCASDVTLDNIGSHGRQWISGTQLIIIIIIIIMCVAATHPPPPPPPPFNMMDNKTRNERIGPLPGGRQGAPGAGAGRGSMRAASATSRPALPPSRSTYPSSPPDGLAPTGSTRARSSAPAAGGVRRMRWTSLMNENVMRAYYRATGGETGRTGYRAAMYREFLLLEPNLTVTEQNLADRARYIQRSNIFNATELERLRREAVPEVSAPTAEQIVSQAAPVREETITTSQDLPVEEDTEGTVSLDIERMRGILEEAISEIRSAPLENRPRLSRLTLNVATRDVIEAINKMLPQHLEGSTGLGDTASIIFGAALAVHRFIGAKTPGPGRAAATRRSAEPTWKKRIEHRITLARVLIGRLQSFRSGNTRPRIVRSVRVAFNGCGVRLDQPDIAQKLTERIDDLKQKIAAWGNRIRRYSARVERFQQNRLFSSDQKRFYKRLECPAVCSTSQRPDPADLVAFWRGVWSREVEHEEGPWIAAVEEACARIEPMNPVAISAEDVAGAVRRAPNWKSPGPDGLHHYWLKGFSVCHATLARQFQEALEQRALPSLFTTGITHLAPKSTDATDPAKYRPITCLTSIYKTLTSVLSLKISRHIDENNIMSGAQNGCRGGGHGTKELLLIDSVAGQLVKRNRRNFSAAWIDYKKAFDSVPHSWLLRVLELYKVDSAVRDFLEACMGQWSTILCLHGERLAAADDRIRIGRGIFQGDCLSPLWFCLSLNPLSTLLEGSGTGFQFRRGGTKVPHLLYMDDLKLLAPNATRLRELLNITTEFSNSIRMELGLDKCAVIHVERGQVTHSAEISLEPSNIKTLSEAESYRYLGMSQSLGVKEADMKQSVCEAFFGRLTKICKSYLSGANKVRAYNGWVMPVLMYTFGVLSWTQTELDALDRKVRTTMTLYRMHHPKSSVMRLYIPRKCGGRGVLSVKTMHNREISSLRTYFETMRGSPMHREVIECDKGLTPLSLAKTEWQKPVVLSTSDRETVWKEKELHGRFFKALNEPHVDKKASVQWLRFGDLFGETEGFVCAIQDQVVKTRNYRKYILKDGAHDICRACRHPGESLRHVLSGCSALANTEYLHRHNQAAKILHQELALKYGLLDERLPYYRYTPVPVLERDGVRLYWDRSIITDRTILANKPDIVVVDRAQSRVFLVDITIPYDENLVRAETEKKRKYLDLAHEVSDMWHVESTEIIPIVISANGLIPVSLAHHLRRLGFRGSSLAARMQKAVLLDSARIVRRFLNLSP

SEQ ID NO: 14734 - protein, 1187 aa, Boloria selene
MENNNKNARLGPLPGGRQGAPGAGAGRDSIRAASTTNRPALPPSRPTHPSPPPVGLVPTGSSGTQTSGPAAGGVRRMRWTSQMNENVMRAYYRATGGETGRTGYRAAMYREFLLLEPTLTVTEQNLADRARYIQRSNILNATELERLRREAVPEVRTLTTEQIVPPAATGEDVLTNFHDLPIEGGTQETVALDTERTRRILEEVVSEIRSAPLENRPRLSRLTLNVATREVIEAINQLLPQHLESSIGLDDTASILFGAALAVHRFVGARTPGPERDTAARRKAQPAWKKRIERRINHARGLIGRLQSFRSGNTRPRIVRSVRIAFNGLGVRLDQPDIAQKLTERIDDLKQRIAAWGSRIRRYSERVERFQQNRLFSSDQKRFYRTLECPAVCSTSQKPSPADLVAFWRNVWSKEVQHEEGPWIAAVEEACAVIKPMSPVAISAEDVVDAVRRAPNWKSPGPDGLHHYWLKGFSVCHVTLARQFQEALEQRTLPNLFTTGITHLAPKSTDAADPAKYRPITCLTTIYKTLTSVLSSKISCHVDENNIISGAQNGCRGRSRGTKELLLIDSVAGQLVKRNRRNFSAAWIDYKKAFDSVPHSWLSRVLELYKVDSTVRNFLGKCMGQWSTILSLHGERITAADDRIRIRRGIFQGDCLSPLWFCLSLNPLSSLLESSGTGFPFRRGGTRVPHLLYMDDLKLLAPNANRLQELLKITSEFSNSIRMKLGLDKCAVLHVVRGQVTHSAEINLEPSSIRTLSEAESYRYLGMSQSIGVNEADMKQSVCEAFFGRLTKVCKSFLSGANKVRAYNGWVMPVLMYTFGVLRWTQTELDTLDRRVRTTMTLYRIHHPKSSVMRLYIPRKCGGRGLLSVKTMHNREIANLRTYFETKGESPMHREVVECDKGLTPLSLAKTEWQAPVVLSTSDRETVWKEKELHGRFFKALNEPNVDKKASVQWLRFVDLFGETEGFVCAIQDQVVKTRNYRKYILKDGTHDICRACGHPGESLRHVLSGCSALANTEYLHRHNQAAKILHQELALKHGLLDERLPYYKYTPMPVLERDGVRLYWDRSIITDRTILANKPDIVLMDRAQSRVFLVDITVPYDENLVRAETEKKRKYLDLAHEVSTMWHVGSTETIPIVISANGLIPVSLAHYLRRLGFRDSSVAARMQKAVLLDSARIVRRFLNLSP

SEQ ID NO: 14735 - protein, 1188 aa, Elymnias hypermnestra
MMMDLFYTDKRLGPLPGGRQGTSGAGAGRDSMRAASSTSSTRRPARPPRRPTNPSSPPEGLASAGTARTQNPEPAAGGVRRMRWTSLMNENVMRAYYRATGGETGRTGYRTAMYREFLLLEPNLTVTEQNLADRARYIQRSNIFSATELERLRCEAVPEVTPPATQQTAATAIVHQELENNQDLLVDGDAEGTVSLDIEKMRGILEEAISECRSAPLEGRPRLSRLTLSAATRDVIEAINKLLPQYFEGSTGLSETASILYGAALAVHRFIGAKIREPGRTANTSSAVPAWKRRIERRITHARRLIGRLQSFRSGNTRPRIVRSVRIAFNGLDVRLDQPDIAQKLTERIDDLKQKIAAWGNRIRRYSERVERFHQNRLFVSDQKRFYERLQRPASCSSSQRPASADLVAYWRSIWSLEVEHEEGSWTAAVEEACAVIQPMNPVAITPEDVVGAVRRAPNWKSPGPDGLHHYWLKGFSACHATLARQFQEAMAQKALPNLFTTGITHLAPKTSNAADPTKYRPITCLSSIYKTLTSILSRKISYHIDENNIMSVAQNGCRGGSRGTKELLLIDSVAGQLVKRNRRNFSAAWIDYKKAFDSVPHSWLLRVLELYKIDGTLRDFLGECMRQWSTILCLHGERLTAADDRIRIRRGIFQGDCLSPLWFCLSLNPLSFLLERSGTGFQFRRGGARVPHLLYMDDLKLLAPNAPRLQELLKITSDFSNSIRMEMGLDKCAVLHVERGQVSHSAEINLEPTQLKTLSETETYRYLGMSQCMGVKEADMKQSVCEVFYGRLTKILKSYLSGANKIRAYNGWVMPVLLYTFGILRWTQTELDALDRRVRTTMTFHRMHHPKSSVMRLYIPRKCGGRGLLSAKTMHNREISSLRTYFETKRESPMHLEVIECDKGLTPLSLANENWQRPAVLSTSDREAVWKGKEMHGRFFKALHEPHVNRKASVQWLRFGDLFGETEGFVCAIQDQVVKTRNYRKYILKDGTHDICRACRHPGESLRHVLSGCSALANTEYLHRHNQAAKILHQELALMYGLLDERLPYYRYQPVPVLERDGVRLYWDRSIITDRTILANKPDIVIMDRAQSRVFLVDITIPYDENLVRAETEKKRKYLDLAHEITAMWGVGSTETIPIVISANGLIPVSLAHHLRRLGFRGSSLAARMQKAVLLDSARIVRRFLSL

SEQ ID NO: 14736 - protein, 751 aa, Thymelicus sylvestris
MNPVAISPEDVAGAVRRAANWKSPGPDGLHHYWLKGFSLCHATLARQFQDALEQRTLPSLFTTGITHLAPKSTDAADPAKYRPITCLTTVYKTLTSVLSIKISRHVDENSIISGAQNGCRGGSRGTKELLLIDSVAGQLVKRNRRNFSAAWIDYKKAFDSVPHSWLLRVLELYKVDSTVQDFLRECMGQWSTILCLHGERLAAADDRIRIRRGIFQGDCLSPLWFCLSLNPLSSLLERSGTGFQFRRGGTKVPHLLYMDDHKLLAPNATRLRELLNITTEFSSSIRMELGLDKCAVLHVERGQVTHSAEINLEPTSIRTLSEPESYRYLGMSQSVGVHEADMKQSVCEAFLGRLTKVCKSYLSGANKVRAYNGWVVPVLMYTFGVLRWTQTELDALDRKVRTTMTLYRMHHPKSSVMRLYIPRKCGGRGVLSVKTMHNREISNLRTYFETKRESPMHRDVIECDKGLTPLSLAKPEWQKPVVLSTSDRETVWKEKELHGRFFKALHEPYVDKKASVQWLRFGDLFGETEGFVCAIQDQVVKTRNYRKYILKDGTTDICRACRHPGESLRHVLSGCSALANTEYLHRHNQAAKILHQELALKYGLLDERVPYYRYTPTPVLERDGVRLYWDRSIITDRTILANKPDIVLMDRAQSRVFLVDITIPHDENLVRAETEKKRKYLDLAHEVSSMWHVESTEIIPIVISANGLIPVSLAHHMRRLGFRGSSLAAKMQKAVLLDSARIVRRFLSLSP

SEQ ID NO: 14737 - protein, 1181 aa, Maniola hyperantus
MMMDNNIRNVRIGPLPGGRQGAPGAGAGRSSIRAASITTSRPAPLPSRPTNPSSPPEGLAPTGSTRAQFSAPAAGGVRRMRWTSLMNENVMRAYYRATGGETGRTGYRAAMYREFLRLEPNLTVTEQNLADRARYIQRSNIFNATELERLRREAVPEVSAPTTEQIDSQAVPAPEETNTISQDLPVEDGTEETVSLDIERMRGILEEAISEIRSAPLESRPRLSRLTLNVATRDVIEAINKMLPQHLESSTGLGDTASILFGAALAVHRFIGAKTPGPGRAAAARRSAEPAWKKRIERRITLARVLIGRLQSFRSGNTRPRIVRSVGIAFNGCGVRLDQPDIAQKLTERIDDLKQKIAAWGNRIRRYSERVERFQQNRLFLSDQKRFYKRLECPAVCSASQRPDPADLVTFWRGVWSREVEHEEGPWIAAIEEACASIEPMNPIAISTEDVAGAVRRAPNWKSPGPDGLHHYWLKGFSVCHATLARQFQEALEQRTLPSLFTTGITHLAPKSTDTTDPAKYRPITCLTTIYKTLTSVLSLKISRHVDENNIISGAQNGCRGGSRGTKELLLIDSVAGHLVKRNRRNFSAAWIDYRKSFDSVPHSWLLRVLELYKVDGTVRDFLGECMGQWSTILCLHGERLADADDRIRIGRGIFQGDCLSPLWFCLSLNPLSTLLEGSGTGFQFRRGGTKVPHLLYMDDLKLLAPNATRLQELLNVTTDFSNSIRMELGLDKCAVMHVERGQVTHSAEMSLEPSTIRTLSEAESYRYLGMSQSLGVKETDVKQSVCEAFFGRLTKICKSYLSGANKIRAYNGWVMPVLMYTFGVLRWTQTELDALDRKVRTTMTLYRMHHPKSSVMRLYIPRKCGGRGVLSVKTMHNREIANLRTYFETMRGSPMHRDVIECDKGLTPLSLAQTEWQKPVVLSTSDREAVWREKELHGRFFKALNEPHVDKKASVQWLRFGDLFGETEGFVCAIQDQVVKTRNYRKYILKDGTHDICRACRHPGESLRHVLSGCSALANTEYLHRHNQAAKILHQELALKYGLLDERLPYYKYTPVPVLERDGVRLYWDRSIITDRTILANKPDIVVVDRAQSRVFLVDITIPYDENLVRAETEKKRKYLDLAHEVSDMWHVESTEIIPIVISANGLIPVSLAQHLRRLGFRGSSLAARMQKRSCWTRLG

SEQ ID NO: 14738 - protein, 864 aa, Melitaea cinxia
MAFNGLGISLDQPDIADKLTERIDGLKQRIAAWGKRIRRYSERVERFRQNRLFVSDQKRFYRKLENPISSSASLKPSTVDLVAFWRNIWSGEVEHEEGPWIAAVQDACAKIEPMNPIAISTEDVSGAVRRAPNWKSPGADGLHHYWLKGLSVCHATLARQYQEAIDRKTLPNLFTTGISHLAPKSTNTADPTNYRPITCLTSIYKTLTSVLSCKISRHIGEFNILSAAQNGCRGGGRGTKELLLIDSVAGQLVRRNRRNFSAAWIDYKKAFDSVPHSWLLRVLELYKVDQAVRDFLGVCMGQWSTILCLQGERLTGADDPIRIRRGIFQGDCLSPLWFCLSLNPLSTLLERSGTGFQFRRGGTKVSHLLYMDDLKLLAPNAARLQELLKITTEFSSSIRMQLGVDKCAVVHVDRGQVTQSSQLSLELTSFKTLSEAESYRYLGMSQCIGVKEVDMKQAVCEIFFGRLTKVLRSYLSGANKVRAYNAWVMPTLLYTFGILRWTQTELDALDRRVRTTMTHHRMHHPKSSVMRLYIPRKCGGRGMLSAKTMHNREVCSLRAYFETRRDSALHGDVSMCDKGLTPLALAKENWQKPVVLSTSDRETVWMEKELHGRFYKALHAPHVDSKASVQWLRFGDLFGETEGFVCAIQDQVVKTNNYRKHVLKDGTLDFCRACRHPGESLRHVLSGCSVLANTEYLHRHNQVAKILHQELALMYGLLEQRMPYYQYSPVPVLERDGVRLYWDLPIATDRTILANKPDIVVMDRARSRVFLVDITVPHDENLVKAETEKKRKYLDLAHEIVDMWGVGSAEIIPIVISANGLIPVSLAHHLRQLGIWDGSLAARMQKAVLLDSARIVRRFLSLQP

SEQ ID NO: 14739 - protein, 1182 aa, Melitaea cinxia
MMEDNLERRIGPLPGGRQGASGAGAGRGSMRAASQPRRPAPPPDRSGYPPSPPVGLATTESQGTQHSLPAAGGVRRMRWTPKMNESVMRAYYRAVGRETGRTGYRAVMHREFLLLEPTLTVTEQNLADRARYIQRKGIFDAAELERFRREAAPEVEPVSTVRNEVSTQQEGVRSEAPVEVITEGAVAQKVEQMRGILQEAISETQGAPLEMRPRLSRLPLNAATRNAIEAANRLLPPYLEGSLSLEDTGSILFGAALAVHRLVGAKTQESGRATHKNSDVPAWKRRIERRINLARALIGRLLAFRSGNTRPRIVRSVRMAFNGLGISLDQPDIADKLTERIDGLKQRIAAWGKRIRRYSERVERFRQNRLFVSDQKRFYRKLENPISSSASLKPSTVDLVAFWRNIWSGEVEHEEGPWIAAVQDACAKIEPMNPIAISTEDVSGAVRRAPNWKSPGADGLHHYWLKGLSVCHATLARQYQEAIDRKTLPNLFTTGITHLAPKSTNTADPTNYRPITCLTSIYKTLTSVLSCKISRHIGEFNILSAAQNGCRGGGRGTKELLLIDSVAGQLVRRNRRNFSAAWIDYKKAFDSVPHSWLLRVLELYKIDQAVRDFLGVCMGQWSTILCLQGERLTGADDPIRIQRGIFQGDCLSPLWFCLSLNPLSTLLERSGTGFQFRRGGTKVSHLLYMDDLKLLAPNAARLQELLKITTEFSSSIRMQLGVDKCAVVHVDRGQVTQSSQLSLELTSFKTLSEAESYRYLGMSQCIGVKEVDMKQAVCEIFFGRLTKVLRSYLSGANKVRAYNAWVMPTLLYTFGILRWTQTELDALDRRVRTTMTYHRMHHPKSSVMRLYIPRKCGGRGMLSAKTMHNREVCSLRAYFETRRDSALHGDVSMCDKGLTPLALAKENWQKPVVLSTSDRETVWMEKELHGRFYKALHAPHVDSKASVQWLRFGDLFGETEGFVCAIQDQVVKTNNYRKHVLKDGTPDFCRACRHPGESLRHVLSGCSALANTEYLHRHNQVAKILHQELALMYGLLEQRMPYYQYSPVPVLERDGVRLYWDLPIATDRTILANKPDIVVMDRARSRVFLVDITVPHDENLVKAETEKKRKYLDLAHEIVDMWGVGSAEIIPIVISANGLIPVSLAHHLRQLGIRDGSLAARMQKAVLLDSARIVRRFLSLQP

SEQ ID NO: 14740 - protein, 1181 aa, Mellicta athalia
MEDKFGKRIGPLPGGRQGASGAGAGRGSMRAASHPRRPAPPPDRSANPPSPPDGLAPTEPQGTQHSAPAAGGVRRMRWTLKMNESVMRAYYRAVGRETGRTGYRAVMHREFLLLEPTVTVTEQNLADRARFIQRKGVFDAAELERFRREAAPEDEPVSAERDAVSTQQESVRSEAPVEAITEGAVAQKVEQMRGILQEAISETRGAPLEQRPRLSRLPLNAATRSAIEAANRLLPPYLEGSLGLEDTGSILFGAALAVHRLVGAKTQEPGLATHKNSDVPAWKRRIERRISLTRALIGRLLAFRSGNTRPRIVRSVRMAFNGLGVSLNQPDIADRLTERIDGLKQRIAAWGKRIRRYSERVERFRQNRLFVSDQKRFYRKLENPIPCSAFLKPSTVDLVAFWRNIWSREVEHEEGPWIAAVQDACAKVEPMKPIAISTEDVSGAVRRAPNWKSPGADGLHHYWLKGLSVCHATLARQYQEAIDRKTLPNLFTTGITHLAPKSTNTADPTNYRPITCLSSIYKTLTSVLSCKISRHIGEFNILSAAQNGCRGGGRGTKELLLIDSVAGQLVRRNRRNFSAAWIDYKKAFDSVPHSWLLRVLELYKIDEAVRDFLGVCMGQWSTILCLQGERLTGADDPIRIRRGIFQGDCLSPLWFCLSLNPLSTLLERSGTGFQFRRGGTKVSHLLYMDDLKLLAPNAARLQELLKITTEFSGSIRMQLEVDKCAVVHVDRGQVTQSAQFSLELTSFKTLSEAESYRYLGMSQCIGVKEVDMKQAVCEVFFGRLTKVLRSYLSGANKVRAYNTWVMPTLLYTFGILRWNQTDLDALDRRVRTTMTHHRVHHPKSSVMRLYISRKCGGRGMLNAKTMHNREVCSLRAYFETRRDSAMHGDVVVCDKGLTPLSLANENWQKPVVLSTSDRETVWMEKELHGRFYKALHAPHVDSKASVQWLRFGDLFGETEGFVCAIQDQVVKTNNYRKHILKDGTPDFCRACRHPGESLRHVLSGCSALANTEYLHRHNQVAKILHQELALMYGLLEQRMPYYQYTPVPVLERDGVRLYWDLPIATDRTILANKPDIVVMDRARSRVFLVDITIPHDENLVKAETEKKRKYLDLAHEIVDMWGVGSAEIIPIVISANGLIPVSLAHHLRQLGIRDGSLAGRMQKAVLLDSARIVRRFLSLQP

SEQ ID NO: 14741 - protein, 1181 aa, Mellicta athalia
MEDKFGKRIGPLPGGRQGASGAGAGRGSMRAASHPRRPAPPPDRSANPPSPPDGLAPTEPQGTQHSAPAAGGVRRMRWTLKMNESVMRAYYRAVGRETGRTGYRAVMHREFLLLEPTVTVTEQNLADRARFIQRKGVFDAAELERFRREAAPEDEPVSAERDAVSTQQESVRSEAPVEAITEGAVTQKVEQMRGILQEAISETRGAPLEQRPRLSRLPLNAATRSAIEAANRLLPPYLEGSLGLEDTGSILFGAALAVHRLVGAKTQEPGLATHKNSDVPAWKRRIERRISLARALIGRLLAFRSGNTRPRIVRSVRMAFNGLGVSLNQPDIADRLTERIDGLKQRIAAWGKRIRRYSERVERFRQNRLFVSDQKRFYRKLENPIPCSAFLKPSTVDLVAFWRNIWSREVEHEEGPWIAAVQDACAKVEPMNPIAISTEDVSGAVRRAPNWKSPGADGLHHYWLKGLSVCHATLARQYQEAIDRKTLPNLFTTGITHLAPKSTNTADPTNYRPITCLSSIYKTLTSVLSCKISRHIGEFNILSAAQNGCRGGGRGTKELLLIDSVAGQLVRRNRRNFSAAWIDYKKAFDSVPHSWLLRVLELYKIDEAVRDFLGVCMGQWSTILCLQGERLTGADDPIRIRRGIFQGDCLSPLWFCLSLNPLSTLLERSGTGFQFRRGGTKVSHLLYMDDLKLLAPNAAHLQELMKITTEFSGSIRMQLGVDKCAVVHVDRGQVTQSAQFSLELTSFKTLSEAESYRYLGMSQCIGVKEVDMKQAVCEVFFGRLTKVLRSYLSGANKVRAYNTWVMPTLLYTFGILRWTQTELDALDRRVRTTMTHHRVHHPKSSVMRLYVSRKCGGRGMLNAKTMHNREVCSLRAYFETRRDSAMHGDVVVCDKGLTPLSLANENWQKPVVLSTSDRETVWMEKELHGRFYKALHAPHVDSKASVQWLRFGDLFGETEGFVCAIQDQVVKTNNYRKHILKDGTPDFCRACRHPGESLRHVLSGCSALANTEYLHRHNQVAKILHQELALMYGLLEQRTPYYQYTPVPVLERDGVRLYWDLPIATDRTILANKPDIVVMDRARSRVFLVDITIPHDENLVKAETEKKRKYLDLAHEIVDMWGVGSAEIIPIVISANGLIPVSLAHHLRQLGIRDGSLTGRMQKAVLLDSARIVRRFLSLQP

SEQ ID NO: 14742 - protein, 1189 aa, Maniola jurtina
MMDNKTRNERIGPLPGGRQGAPGAGAGRGSMRAASATSRPALPPSRSTYPSSPPDGLAPTGSTRARSSAPAAGGVRRMRWTSLMNENVMRAYYRATGGETGRTGYRAAMYREFLLLEPNLTVTEQNLADRARYIQRSNIFNATELERLRREAVPEVSAPTAEQIVSQAASVREETITTSQDLPVEEDTEGTVSLDIERMRGILEEAISEIRSAPLENRPRLSRLTLNVATRDVIEAINKMLPQHLEGSTGLGDTASIIFGAALAVHRFIGAKTPGPGRAAATRRSAEPAWKKRIEHRITLARVLIGRLQSFRSGNTRPRIVRSVRVAFNGCGVRLDQPDIAQKLTERIDDLKQKIAAWGNRIRRYSARVERFQQNRLFSSDQKRFYKRLECPAVCSTSQRPDPADLVAFWRGVWSREVEHEEGPWIAAVEEACARIEPMNPVAISAEDVAGAVRRAPNWKSPGPDGLHHYWLKGFSVCHATLARQFQEALEQRALPSLFTTGITHLAPKSTDATDPAKYRPITCLTTIYKTLTSVLSLKISRHIDENNIMSGAQNGCRGGGRGTKELLLIDSVAGQLVKRNRRNFSAAWIDYKKAFDSVPHSWLLRVLELYKVDSAVRDFLEACMGQWSTILCLHGERLAAADDRIRIGRGIFQGDCLSPLWFCLSLNPLSTLLEGSGTGFQFRRGGTKVPHLLYMDDLKLLAPNATRLRELLNITTEFSNSIRMELGLDKCAVIHVERGQVTHSAEISLEPSNIKTLSEAESYRYLGMSQSLGVKEADMKQSVCEAFFGRLTKICKSYLSGANKVRAYNGWVMPVLMYTFGVLSWTQTELDALDRKVRTTMTLYRMHHPKSSVMRLYIPRKCGGRGVLSVKTMHNREISSLRTYFETMRGSPMHREVIECDKGLTPLSLAKTEWQKPVVLSTSDRETVWKERELHGRFFKALNEPHVDKKASVQWLRFGDLFGETEGFVCAIQDQVVKTRNYRKYILKDGTHDICRACRHPGESLRHVLSGCSALANTEYLHRHNQAAKILHQELALKYGLLDERLPYYRYTPVPVLERDGVRLYWDRSIITDRTILANKPDIVVVDRAQSRVFLVDITIPYDENLVRAETEKKRKYLDLAHEVSDMWHVESTEIIPIVISANGLIPVSLAHHLRRLGFRGSSLAARMQKAVLLDSARIVRRFLNLSP

SEQ ID NO: 14743 - protein, 1083 aa, Maniola hyperantus
MYREFLLLEPNLTVTEQNLADRVRYIQRSNIFNATELERLRRETVPEVSAPTTEQIVSQAARPSVREETITTSQDLPVEEDTEETVSLDIERMRRILEETISEIRSAPLENRPRLSRLTLNVATRDVIEAINKMLPQHLESSTGLGDTASILFGAALAVHRFIGAKTPGPGRAAAARRSAEPAWKKRIERRITLARVLIGRLQSFRSGNTRPRIVRSVRVAFNGCGVRLDQPDIAQKLTERIDDLKQKIAAWGNRIRRYSERVERFQQNRLFLSDQKRFYKRLECPAVCSTSQRPDPADLVTFWRGVWSREVEHEEGPWIAAIEEACASIEPMNPIAISTEDVAGAVRRAPNWKSPGPDGLHHYWLKGFSVCHATLARQFQEALEQRTLPSLFTTGITHLAPKSTDTTDPAKYRPITCLTTIYKTLTSVLSLKISRHVDENNIISGAQNGCRGGSRGTKELLLIDSVAGQLVKRNRRNFSAAWIDYRKAFDSVPHSWLLRVLELYKVDGTVRDFFGECMGQWSTILCLHGERLADADDRIRIGRGIFQGDCLSPLWFCLSLNPLSTLLEGSGTGFQFRRGGTKVPHLLYMDDLKLLAPNATRLQELLNVTTDFSNSIRMELGLDKCAVMHVEREQVTHSAEMSLEPSTIRTLSEAESYRYLGMSQSLGVKETDVKQSVCEAFFGRLTKICKSYLSGANKIRAYNGWVMPVLMYTFGVLRWTQTELDALDRKVRTTMTLYRMHHPKSSVMRLYIPRKCGGRGVLSVKTMHNREIANLRTYFETMRRSPVHREVIECDKGLTPLSLAQTEWQKPVVLSTSDREAVWREKELHGRFFKALNEPHVDKKASVQWLRFGDLFGETEGFVCAIQDQVVKTRNYRKYILKDGTHDICRACRHPGESLRHVLSGCSALANTEYMHRHNQAAKILHQELALKYGLLDERLPYYKYTPVPVLERDGVRLYWDRSIITDRTILANKPDIVVMDRAQSRVFLVDITIPYDENLVRAETEKKRKYLDLAHEVSDMWHVESTEIIPIVISANGLIPVSLAQHLRRLGFRGSSLAARMQKAVLLDSARIVRRFLHLSP

SEQ ID NO: 14744 - protein, 990 aa, Melitaea cinxia
MRGILHEAISETRGAPLEMRPRLSRLPLNAATRHAIEAANRLLPPYLETSFSLEDTGSILFGAALAVHRLVGAKTQESGRGTHKNSDVPAWKRRIERRINLARALIGRLLAFRSGNTRPRIVRSVRMAFNGLGISLDQPDIADKLTERIDGLKQRIAAWGKRIRRYSERVERFRQNRLFVSDQKRFYRKLENPISGSASLKPSTVDLVAFWRNIWSGEVEHEEGPWIAAVQDACAKIEPMNPIAISTEDVSGAVRRAPNWKSPGADGLHHYWLKGLSVCHATLARQYQEAIDRKTLPNLFTTGITHLAPKSTNTADPTNYRPITCLTSIYKTLTSVLSCKISRHIGEFNILSAAQNGCRGGGRGTKELLLIDSVAGQLVRRNRRNFSAAWIDYKKAFDSVPHSWLLRVLELYKIDQAVRDFLGVCMGQWSTILCLQGERLTGAGDPIRIRRGIFQGDCLSPLWFCLSLNPLSTLLERSGTGFQFRRGGTKVSHLLYMDDLKLLAPNAARLQELLKITTEFSSSIRMQLGVDKCAVVHVDRGQVTQSSQLSLELTSFKTLSEAESYRYLGMSQCIGVKEVDMKQAVCEIFFGRLTKVLRSYLSGANKVRAYNAWVMPTLLYTFGILRWTQTELDALDRRVRTTMTYHRVHHPKSSVMRLYIPRKCGGRGMLSAKTMHNREVCSLRAYFETRRDSALHGDVSMCDKGLTPLALAKENWQKPVVLSTSDRETVWMEKELHGRFYKALHAPHVDSKASVQWLRFGDLFGETEGFVCAIQDQVVKTNNYRKHVLKDGTPDFCRACRHPGESLRHVLSGCSALANTEYLHRHNQVAKILHQELALMYGLLEQRMPYYQYSPVPVLERDGVRLYWDLPIATDRTILANKPDIVVMDRARSRVFLVDITVPHDENLVKAETEKKRKYLDLAHEIVDMWGVGSAEIILIVISANGLIPVSLAHHLRQLGIRDGSLAARMQKAVLLDSARIVRRFLSLQP

SEQ ID NO: 14745 - protein, 1182 aa, Melitaea cinxia
MMEDNLERRIGPLPGGRQGASGAGAGRGSMRAASQPRRPAPPPDMSAYPPSLPVGLATTESQGTQHSLPAAGGVRRMRWTPKMNENVMRAYYRAVGRETGRTGYRAVMHREFLLLEPTLTVTEQNLADRARYIQRKGIFDAAELERFRREAAPEVEPVSTVRNEVSTQQEGVRSEAPVEAITEGAVAQKVEQMRGILHEAISETRGAPLEMRPRLSRLPLNAATRHAIEAANRLLPPYLETSFSLEDTGSILFGAALAVHRLVGAKTQESGRATHKNSDVPAWKRRIERRINLARSLIGRLLAFRSGNTRPRIVRSVRMAFNGLGISLDQPDIADKLTERIDGLKQRIAAWGKRIRRYSERVERFRQNRLFLSDQKRFYRKLENPISGSASLKPSTVDLVAFWRNIWSGEVEHEEGPWIAAVQDACAKIEPMNPIAISTEDVSGAVRRAPNWKSPGADGLHHYWLKGLSVCHATLARQYQEAIDRKTLPNLFTTGITHLAPKSTNTADPTNYRPITCLTSIYKTLTSVLSCKISRHIGEFNILSAAQNGCRGGGRGTKELLLIDSVAGQLVRRNRRNFSAAWIDYKKAFDSVPHSWLLRVLELYKIDQAVRDFLGVCMGQWSTILCLQGERLTGAGDPIRIRRGIFQGDCLSPLWFCLSLNPLSTLLERSGTGFQFRRGGTKVSHLLYMDDLKLLAPNAARLQELLKITTEFSSSIRMQLGVDKCAVVHVDRGQVTQSSQLSLELTSFKTLSEAESYRYLGMSQCIGVKEVDMKQAVCEIFFGRLTKVLRSYLSGANKVRAYNAWVMPTLLYTFGILRWTQTELDALDRRVRTTMTYHRVHHPKSSVMRLYIPRKCGGRGMLSAKTMHNREVCSLRAYFQTRRDSALHGDVSMCDKGLTPLALAKENWQKPVVLSTSDRETVWMEKELHGRFYKALHAPHVDSKASVQWLRFGDLFGETEGFVCAIQDQVVKTNNYRKHVLKDGTPDFCRACRHPGESLRHVLSGCSALANTEYLHRHNQVAKILHQELALMYGLLEQRMPYYQYSPVPVLERDGVRLYWDLPIATDRTILANKPDIVVMDRARSRVFLVDITVPHDENLVKAETEKKRKYLDLAHEIVDMWGVGSAEIIPIVISANGLIPVSLAHHLRQLGIRDGSLAARMQKAVLLDSARIVRRFLSLQP

SEQ ID NO: 14746 - protein, 1182 aa, Mellicta athalia
MEDKKNGKRIGPLPGGRQGASGAGAGRGSMRAASHPRRPAPPPDRSANPPSPPDGLAPTESQGAQHSAPAAGGVRRMRWTTTMNENVMRAYYRAVGRETGRTGYRAVMHREFLLLEPTLTVTEQNLADRARYIQRKGVFDATELERFRREAAPEVEPVSAERDAVTTQQESVRSEAPVEAITEGAVSQKVELMRGILEEAISETRGAPLEQRPRLSCLPLNAATRSAIEAANRLLPPYLEGSLGLEDTGSILFAAALAVHRLVGAKTQEPGRATHKNSDVPAWKRRIERRISLARALIGRLLAFRSGNTRPRIVRSVRKAFNGLGISLDQPDIADRLTERIDGLKQRIAAWGKRIRRYSERVERFRQNRLFVSDQKRFYRKLENPIPCSSSLKPSTVDLVAFWRNIRSREVEHEEGPWIAAVQEACAKIEPMNPIAISTEDVSGAVRRAPNWKSPGVDGLHHYWLKGLSVCHATLARQYQEAIDRKTLPNLFATGITHLAPKSTNTADPTNYRPITCLTSIYKTLTSVLSCKISRHIRESNILSAAQNGCRGGGRGTKELLLIDSVAGQLVRRNRRNFSAAWIDYKKAFDSVPHSWLLRVLELYKIDKAVRDFLGVCMGQWSTILCLQGERLTGADDPIRIRRGIFQGDCLSPLWFCLSLNPLSTLLERSETGFQFRRGGTKVSHLLYMDDLKLLAPNAARLQELLKITTEFSGSIRMQLGVDKCAVVHLERGQVTQSAQFSLELTSFKTLSEAESYRYLGMSQCIGVKEVDMKQAVCEVFFGRLTKVLRSYLSGANKVRAYNAWVMPTLLYTFGILRWTQTELDALDRRVHTTMTHHRVHHSKSSVMRLYISRKCGGRGMLSAKTMHNREVCSLRAYFEARRDSAMHGDVVVCDKELTPLSLANENWQKPVILSTSDRETVWMEKELHGRFYKALHAPHVDSKASVQWLRFGDLFGETEGFVCAIQDQVVKTNNYRKHILKDGTPDFCRACRHPGESLRHVLSGCSVLANTEYLHRHNQAAKILHQELALMYGLLEQRMPYYQYSPVPVLERDGVRLYWDLPIATDRTILANKPDIVVMDRARSRVFLVDITIPHDENLVKAETEKKRKYLDLAHEIVDMWDVRSAEIIPIVISANGLIPVSLAHHLRQLGIRDSSLAARMQKALLIDSARIVRRFLSLQP

SEQ ID NO: 14747 - protein, 1189 aa, Maniola jurtina
MMDKEKRNKRIGPLPGGRQGAPGAGAGRGSMRAASATSRPALPPSRSTYPSSPPDGLAPTGSTRAQSSAPAAGGVRRMRWTSLMNENVMRAYYRATGGETGRTGYRAAMYREFLLLEPNLTVTEQNLADRARYIQRSNIFNATELERLRREAVPEVSAPTAEQIVSQATPVREETITTSQDLPVEEDTEGTVSLDIERMRGILEEAISEIRSAPLENRPRLSRLTLNVATRDVIEAINKMLPQHLESSTGLGDTASILFGAALAVHRFIGAKTLGPGRAAATRHSAEPAWKRRIEHRITLARVLIGRLQSFRSGNTRPRIVRSVRVAFNGCEVRLDQPDIAQKLTERIDDLKQKIAAWGNRIRRYSARVERFQQNRLFSSDQKRFYKRLECPAVCSTSQRPDPADLVTFWRGVWSREVEHEEGPWIAAVEEACARIEPMSPVAISAEDVAGAVRRAPNWKSPGPDGLHHYWLKGFSVCHATLARQFQEALEQRALPSLFTTGITHLAPKSTDATDPAKYRPITCLTTIYKTLTSVLSLKISRHIDENNIMSGAQNGCRGGSRGTKELLLIDSVAGQLVKRNRRNFSAAWIDYKKAFDSVPHSWLLRVLELYKVDSAVRDFLEACMGQWSTILCLHGERLAAADDRIRIGRGIFQGDCLSPLWFCLSLNPLSTLLEGSGTGFQFRRGGTRVPHLLYMDDLKLMAPNATRLKELLNITTEFSKSIKMELGLDKCAVIHVERGQVTHSAEISLEPSNIKTLSEAESYRYLGMSQSLGVKEADMKQSVCEAFFGRLTKICKSYLSGANKVRAYNGWVMPVLMYTFGVLSWTQTELDALDRKVRTTMTLYRMHHPKSSVMRLYIPRKCGGRGVLSVKTMHNREISNLRTYFETMRGSPMHRDVIECDKGLTPLSLAKTEWQKPVVLSTSDRETVWKEKELHGRFFKALNEPHVDKKASVQWLRFGDLFGETEGFVCAIQDQVVKTRNYRKYILKDGTHDICRACRHPGESLRHVLSGCSALANTEYLHRHNQAAKILHQELALKYGLLDERLPYYRYTPVPVLERDGVRLYWDRSIITDRTILANKPDIVVVDRAQSRVFLVDITIPYDENLVRAETEKKRKYLDLAHEVSDMWHVESTEIIPIVISANGLIPVSLAHHLRRLGFRGSSLAARMQKAVLLDSARIVRRFLNLSP

SEQ ID NO: 14748 - protein, 1189 aa, Maniola jurtina
MMDNKTRNERIGPLPGGRQGAPGAGAGRSSMRAASATSRPALPPSRSTYPSSPPDGLAPTGSTRAQSSAPAAGGVRRMRWTSLMNENVMRAYYRATGGETGRTGYRAAMYREFLLLEPNLTVTEQNLADRARYIQRSNIFNATELERLRREAVPEVSAPTAEQIVSQAAPVREETITTSQDLPVEEDTEGTVSLDIERMRGILEEAISEIRSAPLENRPRLSRLTLNVATRDVIEAINKMLPQHLESSTGLGDTASIIFGAALAVHRFIGAKTPGPGRAAATRRSAEPAWKKRIEHRITLARVLIGRLQSFRSGNTRPRIVRSVRVAFNGCGVRLDQPDIAQKLTERIDDLKQKIAAWGNRIRRYSARVERFQQNRLFSSDQKRFYKRLECPAVCSTSQRPDPADLVAFWRGVWSREVEHEEGPWIAAVEEACARIEPMNPVAISAEDVAGAVRRAPNWKSPGPDGLHHYWLKGFSVCHATLARQFQEALEQRALPSLFTTGITHLTPKSTDATDPAKYRPITCLTTIYKTLTSVLSLKISRHIDENNIMSGAQNGCRGGGRGTKELLLIDSVAGQLVKRNRRNFSAAWIDYKKAFDSVPHSWLLRVLELYKVDSAVRDFLEACMGQWSTILCLHGERLAAADDRIRIGRGIFQGDCLSPLWFCLSLNPLSTLLEGSGTGFQFRRGGTKVPHLLYMDDLKLLAPNATRLRELLNITTEFSNSIRMELGLDKCAVIHVERGQVTHSAEISLESSNIKTLSEAESYRYLGMSQSLGVKEADMKQSVCEAFFGRLTKICKSYLSGANKVRAYNGWVMPVLMYTFGVLSWTQTELDALDRKVRTTMTLYRMHHPKSSVMRLYIPRKCGGRGVLSVKTMHNREISNLRTYFETMRGSPMHREVMECDKGLTPLSLAKTEWQKPVVLSTSDRETVWKEKELHGRFFKALNEPHVDKKASVQWLRFGDLFGETEGFVCAIQDQVVKTRNYRKYILKDGTHDICRACRHPGESLRHVLSGCSALANTEYLHRHNQAAKILHQELALKYGLLDERLPYYRYTPVPVLERDGVRLYWDRSIITDRTILANKPDIVVVDRAQSRVFLVDITIPYDENLVRAETEKKRKYLDLAHEVSDMWHVESTEIIPIVISANGLIPVSLAHHLRRLGFRGSSLAARMQKAVLLDSARIVRRFLNLSP

SEQ ID NO: 14749 - protein, 1190 aa, Maniola jurtina
MMMDRNIRNVRIGPLPGGRQGAPGAGAGRSSIRAASTISRPALPPSRSTHPSSPPDGLAPTGSTRAQSSAPAAGGVRRMRWTSLMNENVMRAYYRATGGETGRTGYRAAMYREFLLLEPNLTVTEQNLADRARYIQRSNIFNAAELERLRREAVPEVSAPTTVQIVSQAEPVREEATTTLQDLPVEEDTGETVSLDIERMRRILEEAISEIRNAPLENRPRLSRLTLNVVTRDVIEAINKMLPQHLESSTGLGDAASIIFGAALAVHRFIGAKTPGPGRAAATRRSAEPAWKKRIEHRITLARVLIGRLQSFRSGNTRPRIVRSVRVAFNGCGVRLDQPDIAQKLTERIDDLKQKIAAWGNRIRRYSARVERFQQNRLFSSDQKRFYKRLECPAVCSTSQRPDPADLVAFWRGVWSREVEHEEGPWIAAVEEACARIEPMNPVAISAEDVAGAVRRAPNWKSPGPDGLHHYWLKGFSACHATLARQFQEALEQRALPSLFTTGITHLAPKSTDATDPAKYRPITCLTTIYKTLTSVLSLKISRHIDENNIMSGAQNGCRGGSRGTKELLLIDSVAGQLVKRNRRNFSAAWIDYKKAFDSVPHSWLLRVLELYKVDSAVRDFLEACMGQWSTILCLHGERLAAADDRIRIGRGIFQGDCLSPLWFCLSLNPLSTLLEGSGTGFQFRRGGTKVPHLLYMDDLKLLAPNATRLRELLNITTEFSNSIRMELGLDKCAVIHVERGQVTHSAEISLEPSNIKTLSEAESYRYLGMSQSLGVKEADMKQSVCEAFFGRLTKVCKSYLSGANKVRAYNGWVMPVLMYTFGVLSWTQTELDALDRKVRTTMTLYRMHHPKSSVMRLYIPRKCGGRGVLSVKTMHNREISNLRTYFETMRGSPMHREVIECDKGLTPLSLAKTEWQKPVVLSTSDRETVWKEKELHGRFFKALNEPHVDKKASVQWLRFGDLFGETEGFVCAIQDQVVKTRNYRKYILKDGTHDICRACRHPGESLRHVLSGCSALANTEYLHRHNQAAKILHQELALKYGLLDERLPYYKYTPVPVLERDGVRLYWDRSIITDRTILANKPDIVLVDRAQSRVFLVDITIPYDENLVRAETEKKRKYLDLAHEVSDMWHVESTEIIPIVISANGLIPVSLAHHLRRLGFRGSSLAARMQKAVLLDSARIVRRFLSLSP

SEQ ID NO: 14750 - protein, 1191 aa, Bicyclus anynana
MMMDNNDARIGPLPGGRQGASGAGAGRGSMRAASQTRRPALPPDRSAHPSSPPEGLALTGSIRAQSSEPAAGGVRRMKWTCDMNKNVMRAYYRATGGETGRTGYRAAMYREFLLLEPHLTVTEQNLADRARFIQRSNIFNATELERLRREAVPEVPTSSAEQIVSPAAPVREETEPMSQDLHAEEEDTEGTVFLDLERMRRILEETIAEIRNAPLENRPRLSRIALNIATRDVIEAVNKMLPQHLAGSTGLDDTASILFGAALTVHRFIGIKTKEPGRPGRSVNNIRAEPAWKRRIERRITLARGLIGRLLCFRLGNRRPRIVRSVRIAFNGLGVRLDQPDVTLKLTERIDDLKQKIAAWGNRIRRYSERVERFQQNRLFSSDQKRFYNILECPAVCSTSPQPNPADLIAFWRNIWSREVEHDEGPWISAIEETCAAIRPMNPVAISTENVVGAVRRAANWKSPGPDGLHHYWLKAFSTCHVTLARQFQEALEQGTLPNLFTTGITHLAPTTTDTVDPSKYRPITCLTTIYKTLTSVLSSKITRHVDDNNIMSGAQNGCRGGSRGTKELLLIDSVAGQLVKRNRRNFAAAWIDYKKAFDSVPHSWLLRVLELYKIDCTVQDFLRSCMGQWSTILCLHGERLAAADDRIRIRRGIFQGDCLSPLWFCLALNPLSTLLEGSGTGFQFRRGGTKVPHLLYMDDLKLLAPNATRLQELLNLTTGFSNSIRMELGLDKCAVLHVERGQVTHTVGINPDLLNIKTLSETESYRYLGMSQSIGVQEADMKQSVCEGFYRRLTKICKSYLSGANKIRAYNGWVMPVLMYTFGVLRWTQTELDVLDRRVRTTMTLYRMHHPKSSVMRLYVPRKCGGRGLLSAKTMHNREICSLRTYFETKREAPMHTEVIACDKGLTPLSLANSEWQKPVVQSISDRETVWKGKELHGRFFKALHEPHVSKKASVQWLRFGDLFGETEGFVFAIQDQVVKTRNYRKYILKDGTHDICRACRHPGESLRHVLSGCSALANTEYLHRHNQAAKILHQELALTYGLLDQRLPYYKYTPVPVLERDGVRLYWDRSIITDRTILANKPDIVVLDRAQSRVFLVDITIPYDENLVRAETEKKRKYLDLAHEVTAMWHVESTEIIPIVISANGLIPVSLAHHLRRLGFRGSSLAGKMQKAVLLDSARIVRRFLHLSP

SEQ ID NO: 14751 - protein, 1182 aa, Melitaea cinxia
MMEDNLERRIGPLPGGRQGASGAGAGRGSMRAASQPRRPAPPPDRSGYPPSPPVGLATTESQGTQHSLPAAGGVRRMRWTPKINESVMRAYYRAVGRETGRTGYRAVMHREFLLLEPTLTVTEQNLADRARYIQRKGIFDAAELERFRREAAPEVEPVSAVRNEVSTQQEGVRSEAPVEVITEGAVAQKVEQMRGILQEAISETRGAPLEMRPRLSRLPLNAATRNAIEAANRLLPPYLEGSLSLEDTGSILFGAALAVHRLVGAKTQESGRATHKNSDVPAWKRRIERRINLARALIGRLLAFRSGNTRPRIVRSVRMAFNGLGISLDQPDIADKLTERIDGLKQRIAAWGKRIRRYSERVERFRQNRLFVSDQKRFYRKLENPISSSASLKPSTVDLVAFWRNIWSGEVEHEEGPWIAAVQDACAKIEPMNPIAISTEDVSGAVRRAPNWKSPGADGLHHYWLKGLSVCHATLARQYQEAIDRKTLPNLFTTGITHLAPKSTNTADPTNYRPITCLTSIYKILTSVLSCKISRHIGEFNILSAAQNGCRGGGRGTKELLLIDSVAGQLVRRNRRNFSAAWIDYKKAFDSVPHSWLLRVLELYKVDQAVRDFLGVCMGQWSTILCLQGERLTGADDPIRIRRGIFQGDCLSPLWFCLSLNPLSTLLERSGTGFQFRRGGTKVSHLLYMDDLKLLAPNAARLQELLKITTEFSSSIRMQLGVDKCAVVHVDRGQVTQSSQLSLELTSFKTLSEAESYRYLGMSQCIGVKEVDMKQAVCEIFFGRLTKVLRSYLSGANKVRAYNAWVMPTLLYTFGILRWTQTELDALDRRVRTTMTHHRMHHPKSSVMRLYIPRKCGGRGMLSAKTMHNREVCSLRAYFETRRDSALHGDVSMCDKGLTPLALAKENWQKPVVLSTSDRETVWMEKELHGRFYKALHAPHVDSKASVQWLRFGDLFGETEGFVCAIQDQVVKTNNYRKHVLKDGTPDFCRACRHPGESLRHVLSGCSALANTEYLHRHNQVAKILHQELALMYGLLEQRMPYYQYSPVPVLERDGVRLYWDLPIATDRTILANKPDIVVMDRARSRVFLVDITVPHDENLVKAETEKKRKYLDLAHEIVDVWGVGSAEIIPIVISANGLIPVSLAHHLRQLGIRDGSLAARMQKTVLLDSARIVRRFLSLQP

SEQ ID NO: 14752 - protein, 990 aa, Melitaea cinxia
MRGILQEAISETRGAPLEMRPRLSRLPLNAATRNAIEAANRLLPSYLEGSLSLEDTGSILFGAALAVHRLVGAKTQESGRATHKNSDVPAWKRRIERRINLARALIGRLLAFRSGNTRPRIVRSVRMAFNGLGISLDQPDIADKLTERIDGLKQRIAAWGKRIRRYSERVERFRQNRLFVSDQKRFYRKLENPISGSASLKPSTVDLVAFWRNIWSGEVEHEEGPWIAAVQDACAKIEPMNPIAISTEDVNGAVRRAPNWKSPGADGLHHYWLKGLSVCHATLARQYQEAIDRKTLPNLFTTGITHLAPKSTNTADPTNYRPITCLTSIYKTLTSVLSCKISRHIGEFNILSAAQNGCRGGGRGTKELLLIDSVAGQLVRRNRRNFSAAWIDYKKAFDSVPHSWLLRVLELYKIDQAVRDFLGVCMGQWSTILCLQGERLTDADDPIRIRRGIFQGDCLSPLWFCLSLNPLSTLLERSGTGFQFRRGGTKVSHLLYMDDLKLLAPNAARLQELLKITTEFSSSIRMQLGVDKCAVVHVDRGRVTQSSQLSLELTSFKTLSEAESYRYLGMSQCIGVREVDMKQAVCEIFFGRLTKVLRSYLSGANKVRAYNAWVMPTLLYTFGILRWTQTELDALDRRVRTTMTHHRMHHPKSSVMRLYIPRKCGGRGMLSAKTMHNREVCSLRAYFETRRDSPLHGDVSMCDKGLTPLALAKENWQKPVVLSTSDRETVWMEKELHGRFYKALHAPHVDSKASVQWLRFGDLFGETEGFVCAIQDQVVKTNNYRKHVLKDGTPDFCRACRHPGESLRHVLSGCSALANTEYLHRHNQVAKILHQELALMYGLLEQRMPYYQYSPVPVLERDGVRLYWDLPIATDRTILANKPDIVVMDRARSRVFLVDITVPHNENLVKAETEKKRKYLDLAHEIVDMWGVGSAEIIPIVISASGLIPVSLAHHLRQLGIRDGSLAARMQKAVLLDSARIVRRFLSLQP

SEQ ID NO: 14753 - protein, 1181 aa, Mellicta athalia
MEDKFGKRIGPLPGGRQGASGAGAGRGSMRAASQPRRPAPPPDRSANPPSPPDGLAPTEPQGTQHSAPAAGGVRRMRWTPKMNESVMRAYYRAVGRETGRTGYRAVMHREFLLLEPTVTVTEQNLADRARYIQRKGVFDAAELERFRREAAPEDEPVSAERDAVSTQQESVRSEAPVEAITEGAVAQKVEQMRGILQEAISETRGAPLEQRPRLSRLPLNAATRSAIEAANRLLPPYLEGSLGLEDTGSILFGAALAVHRLVGAKTQEPGLATHKNSDVPAWKRRIECRISLARALIGRLLAFRSGNTRPRIVRSVRMAFNGLGVSLNQPDIADRLTERIDGLKQRIAAWGKRIRRYSERVERFRQNCLFVSDQKRFYRKLENPIPCSAFLKPSTVDLVTFWRNIWSREVEHEEGPWIAAVQDACAKVEPMNPIAISTEDVSGAVRRAPNWKSPGADGLHHYWLKGLSVCHATLARQYQEAIDRKTLPNLFTTGITHLAPKSTNTADPTNYRPITCLTSIYKTLTSVLSCKISRHIGEFNILCAAQNGCRGGGRGTKELLLIDSVAGQLVRRNRRNFSAAWIDYKKAFDSVPHSWLLRVLELYKIDEAVRDFLGVCMGQWSTILCLQGERLTGADDPIRIRKGIFQGDCLSPLWFCLSLNPLSTLLERSGTGFQFRRGGTKVSHLLYMDDLKLLAPNAARLQELLKITTEFSGSIRMQLGVDKCAVVHVDRGQVTQSAQFSLELTSFKTLCEAESYRYLGMSQCIGVKEVDMKQAVCEVFFGRLTKVLRSYLSGANKVRAYNTWFMPTLLYTFGILRWTQTELDALDRRVRTTMTHHRVHHPKSSVMRLYISRKCGGRGMLNAKTMHNREVCSLRAYFETRQDSAMHGDVVVCDKGLTPLSLANENWQKPVVLSNSDRETVWMEKELHGRFYKALHAPHVDSKASVQWLRFGDLFGETEGFVCAIQDQVVKTNNYRKHILKDGTPDFCRACRHPGESLRHVLSGCSALANTEYLHRHNQVAKILHQELALMYGLLEQRMPYYQYTPVPVLERDGVRLYWDLPIATDRTILANKPDIVVMDRARSRVFLVDITIPHDENLVKAETEKKRKYLDLAHEIVDMWGVGSAEIIPIEISANGLIPVSLAHHLRQLGIRDGSLAGRMQKAVLLDSARIVRRFLSLQP

SEQ ID NO: 14754 - protein, 1189 aa, Maniola jurtina
MMDNEIRNERIGPLPGGRQGAPGAGAGRGSMRAASATSRPALPPSRSTYPSSPPDGLAPTGSTRAQSSAPAADGVRRMRWTSLMNENVMRAYYRATGGETGRTGYRAAMYREFLLLEPNLTVTEQNLADRARYIQRSNIFNATELERLRREAVPEVSAPTAEQIVSQAAPVREETITTSQDLPVEEDTEGTVSLDIERMRGILEEAISEIRSAPLENRPRLSRLTLNVATRDVIEAINKMLPQHLESSTGLGDTASILFGAALAVHRFIGAKTLGPRRAAATRHSAEPAWKRRIEHRITLARVLIGRLQSFRSGNARPRIVRSVRVAFNGCGVRLDQPDIAQKLTERIDDLKQKIAAWGNRIRRYSARVERFQQNRLFSSDQKRFYKRLECPAVCSTSQRPDPADLVTFWRGMWSREVEHEEGPWIAAVEEACARIEPMSPVAISAEDVAGAVRRAPNWKSPGPDGLHHYWLKGFSVCHATLARQFQEALEQRALPSLFTTGITHLAPKSTDATDPAKYRPITCLTTIYKTLTSVLSLKISRHIDENNIMSGAQNGCRGGSRGTKELLLIDSVAGQLVKRNRRNFSAAWIDYKKAFDSVPHSWLLRVLELYKVDSAVRDFLEACMGQWSTILCLHGERLAAADDRIRIGRGIFQGDCLSPLWFCLSLNPLSTLLEGSGTGFQFRRGGTKVPHLLYMDDLKLLAPNATRLKELLNITTEFSKSIKMELGLDKCAVIHVERGQVTHSAEISLEPSNIKTLSEAESYRYLGMSQSLGVKEADMKQSVCEAFFGRLTKICKSYLSGANKVRAYNGWVMPVLMYTFGVLSWTQTELDALDRKVRTTMTLYRMHHPKSSVMRLYIPRKCGGRGVLSVKTMHNREISNLRTYFETMRGSPMHRDVIECDKGLTPLSLAKTEWQKPVVLSTSDRETVWKEKELHGRFFKALNEPHVDKKASVQWLRFGDLFGETEGFVCAIQDQVVKTRNYRKYILKDGTQDICRACRHPGESLRHVLSGCSALANTEYLHRHNQAAKILHQELALKYGLLDERLPYYRYTPVPVLERDGVRLYWDRSIITDRTILANKPDIVVVDRAQSRVFLVDITIPYDENLVRAETEKKRKYLDLAHEVSDMWHVESTEIIPIVISANGLIPVSLAHHLRRLGFRGSSLAVRMQKAVLLDSARIVRRFLNLSP

SEQ ID NO: 14755 - protein, 991 aa, Maniola jurtina
MRGILEEAISEIRSAPLENRPRLSRLTLNVATRDVIEAINKMLPQHLESSTGLGDTASILFGAALAVHRFIGAKTLGPGRAAATRHSAEPAWKRRIEHRITLARVLIGRLQSFRSGNTRPRIVRSVRVAFNGCGVRLDQPDIAQKLTERIDDLKQKIAAWGNRIRRYSARVERFQQNRLFSSDQKRFYKRLECPAVCSTSQRPDPADLVAFWRGVWSREVEHEEGPWIAAVKEACARIEPMSPIAISAEDVAGAVRRAPNWKSPGPDGLHHYWLKGFSVCHATLARQFQEALEQRALPNLFTTGITHLAPKSTDATDPAKYRPITCLTTIYKTLTSVLSLKISRHIDENNIMSGAQNGCRGGSRGTKELLLIDSVAGQLVKRNRRNFSAAWIDYKKAFDSVPHSWLLRVLELYKVDSAVRDFLEACMGRWSTILCLHGERLAAADDRIRIGRGIFQGDCLSPLWFCLSLNPLSTLLEGSGIGFQFRRGGTKVPHLLYMDDLKLLAPNATRLKELLNITTEFSNSIRMELGLDKCAVIHVERGQVTHSAEISLEPSNIKTLSEAESYRYLGMSQSLGVKEADMKQSVCEAFFGRLTKICKSYLSGANKVRAYNGWVMPVLMYTFGVLSWTQTELDALDRKVRTTMTLYRMHHPKSSVMRLYIPRKCGGRGVLSVKTMHNREISNLRTYFETMRGSPMHREVIECDKGLTPLSLAKTEWQKPVVLSTSDRETVWKEKELHGRFFKALNEPHVDKKASVQWLRFGDLFGETEGFVCAIQDQVVKTRNYRKYILKDGTHDICRACRHPGESLRHVLSGCSALANTEYLHRHNQAAKILHQELALKYGLLDERLPYYRYTPVPVLERDGVRLYWDRSIITDRTILANKPDIVVVDRAQSRVLLVDITIPYDENLVRAETEKKRKYLDLAHEVSDMWHVESTEIIPIVISANGLIPVSLAHHLRRLGFHGSSLAARMQKAVLLDSARIVRRFLNLSP

SEQ ID NO: 14756 - protein, 1188 aa, Boloria selene
MMENNNKNARLGPLPGGRQGAPGAGAGRDSIRAASTTNRPALPPSRPTHPSPPPEGLVPTGSSRTQTSGPAAGGVRRMRWTSQMNENVMRAYYRATGGETGRTGYRAAMYREFLLLEPTLTVTEQNLADRARYIQRSNILNATELERLRREAVPEVRTLTTEQIVPPAATGEDVLTNFHDLPIEGGTQETAALDTERMKRILEEAVSEIRSAPLENRPRLSRLTLNVATREVIEAINQLLPQHLESSIGLDDTASILFGAALAVHRFVGVRTPGPERDTAARRKAQPAWKKRIERRINHARGLIGRLQSFRSGNTRPRIVRSVRIAFNGLGVRLDQPDIAQKLTERIDDLKQRIAAWGSRIRRYSERVERFQQNRLFSSDQKRFYRTLECPAVCSTSQKPSPADLVAFWRNVWSKEVQHEEGPWIAAVEEACAVIKPMSPVAISAEDVVDAVRRAPNWKSPGPDGLHHYWLKGFSVCHVTLARQFQEALEQRTLPNLFTTGITHLAPKSTDAADPAKYRPITCLTTIYKTLTSVLSSKISRHVDENNIISGAQNGCRGRSRGTKELLLIDSVAGQLVKRNRRNFSAAWIDYKKAFDSVPHSWLSRVLELYKVDSTVRNFLGKCMGQWSTILSLHGERITAADDRIRIRRGIFQGDCLSPLWFCLSLNPLSSLLESSGTGFQFRRGGTRVPHLLYMDDLKLLAPNANRLQELLKITSEFSNSIRMKLGLDKCAVLHVVRGQVTHSAEINIEPSSIRTLSEAESYRYLGMSQSIGVNETDMKQSVCEAFFGRLTKVCKSFLSGANKVRAYNGWVMPVLMYTFGVLRWTQTELDTLDRRVRTTMTLYRMHHPKSSVMRLYIPRKCGGRGLLSVKTMHNREIANLRTYFETKGESPMHREVVECDKGLTPLSLAKTEWQAPVVLSTSDRETVWKEKELHGRFFKALNEPNVDKKASVQWLRFGDLFGETEGFVCAIQDQVVKTRNYRKYILKDGTHDICRACGHPGESLRHVLSGCSALANTEYLHRHNQAAKILHQELALKFGLLDERLPYYKYTPMPVLERDGVRLYWDRSIITDRTILANKPDIVLMDRAQSRVFLVDITVPYDENLVRAETEKKRKYLDLAHEVSTMWHVGSTETIPIVISANGLIPVSLAHYLRRLGFRDSSLAARMQKAVLLDSARIVRRFLNLSP

SEQ ID NO: 14757 - protein, 1107 aa, Elymnias hypermnestra
MRWTSLMNENVMRAYYRATGGETGRTGYRTAMHREFLLLEPNLTVTEQNLADRARYIQRSNIFSAIELERLRREVVPEVTSPATEHIAATAIVHQELENNQDLLVDGDTEGTVSLDIEKMRGILEEAISESRSAPLEGRPRLSRLTLNAATRDVIEAVNKMLPQYLEGSTGLSETASILFGAALAVHRFIGVKIREPGRTTNTSSAVPAWKRRIERRITHARRLIGRLQSFGSGNTRPRIVRSVRIAFNGLDVRLNQPDIAQKLTERIDDLKQKIAAWGNRIRRYSERVERFHQNRLFASDQKRFYERMQRSASCSSSQRPASADLVAYWRGIWSLEVEHEESSWTAAVEEACAVIQPMNPVAISPEDVVGAVRRAPNWKSPGPDGLHHYWLKGFSACHATLARQFQGAIAQKALPNLFTTGITHLAPKTTNAADPTKYRPITCLSSIYKTLTSILSRKISYHIDENNIMSVAQNGCRGGSRGTKELLLIDSVAGQLVKRNRRNFSAAWIDYKKAFDSVPHSWLLRVLELYKIDGTLRDFLGECMRQWSTILCLHGERLTAADDRIRIRRGIFQGDCLSPLWFCLSLNPLSFLLERSGTGFQFRRGGARVPHLLYMDDLKLLAPNAPRLQELLKITSDFSNSIRMEMGLDKCAVLHVERGQVSHSAEINLEPTQLKTLSETETYRYLGMSQCMGVKEADMKQSVCEVFYGRLTKILKSYLSGANKIRAYNGWVMPVLLYTFGILRWTQTELDALDRRVRTTMTFHRMHHPKSSVMRLYIPRKCGGRGLLSAKTMHNREISSLRTYFETKRESPMHLEVIECDKGLTPLSLANENWQRPAVLSTSDREAVWKGKEMHGRFFKALHEPHVNRKASVQWLRFGDLFGETEGFVCAIQDQVVKTRNYRKYILKDGTHDICRACRHPGESLRHVLSGCSALANTEYLHRHNQAAKILHQELALMYGLLDERLPYYRYQPVPVLERDGVRLYWDRSIITDRTILANKPDIVIMDRAQSRVFLVDITIPYDENLVRAETEKKRKYLDLAHEITAMWGVGSTETIPIVISANGLIPVSLAHHLRRLGFRGSSLAARMQKAVLLDSARIVRRFLSL

SEQ ID NO: 14758 - protein, 1112 aa, Maniola hyperantus
MRWTSLMNENVMRAYYRATGGETGRTGYRAAMYREFLLLEPNLTVTEQNLADRARYIQRSNIFNATELERLRREAVPEVSAPTTEQIDSQAMPAPEETNTISQDLPVEDGTEETVSLDIERMRGILEEAISEIRSAPLESRPRLSRLTLNVATRDVIEAINKMLPQHLESSTGLGDTASILFGAALAVHRFIGAKTPGPGRAAAARRSAEPAWKKRIERRITLARVLIGRLQSFRSGNTRPRIVRSVGIAFNGCGVRLDQPDIAQKLTERIDDLKQKIAAWGNRIRRYSERVERFQQNRLFLSDQKRFYKRLECPAVCSTSQRPDPADLVTFWRGVWSREVEHEEGPWIEAIEEACASIEPMNPIAISTEDVAGAVRRAPNWKSPGPDGLHHYWLKGFSVCHATLARQFQEALEQRTLPSLFTTGITHLAPKSTDTTDPAKYRPITCLTTIYKTLTSVLSLKISRHVDENNIISGAQNGCRGGSRGTKELLLIDSVAGQLVKRNRRNFSAAWIDYRKAFDSVPHSWLLRVLELYKVDGTVRDFLGECMGQWSTILCLHGERLADADDRIRIGRGIFQGDCLSPLWFCLSLNPLSTLLEGSGTGFQFRRGGTKVPHLLYMDDLKLLAPNATRLQELLNVTTDFSNSIRMELGLDKCAVMHVERGQVTHSAEMSLEPSTIRTLSEAESYRYLGMSQSLGVKETDVKQSVCEAFFGRLTKICKSYLSGVNKIRAYNGWVMPVLMYTFGVLRWTQTELDALDRKVRTTMTLYRMHHPKSSVMRLYIPRKCGGRGVLSVKTMHNREIANLRTYFETMRGSPMHREVIECDKGLTPLSLAQTEWQKPVVLSTSDREAVWREKELHGRFFKALNEPHVDKKASVQWLRFGDLFGETEGFVCAIQDQVVKTRNYRKYILKDGTHDICRACRHPGESLRHVLSGCSALANTEYLHRHNQAAKILHQELALKYGLLDERLPYYKYTPVPVLERDGVRLYWDRSIITDRTILANKPDIVVVDRAQSRVFLVDITIPYDENLVRAETEKKRKYLDLAHEVSDMWHVESTEIIPIVISANGLIPVSLAQHLRRLGFRGSSLAARMQKAVLLDSARIVRRFLHLSP

SEQ ID NO: 14759 - protein, 1182 aa, Melitaea cinxia
MMEDDLQRRIGPLPGGRQGASGAGAGRGSMRAASQPRRPAPPPDRSGYPPSPPVGLATTESQGTQHSLPAAGGVRRMRWTPKMNESVMRAYYRAVGRETGRTGYRAVMHREFLLLEPTLTVTEQNLADRARYIQRKGIFDAAELERFRREAASEVEPVSTVRNEVSTQQEGVRSEAPVEVITEGAVAQKVEQMRGILQEAISETRGAPLEMRPRLSRLPLNAATRNAIEAANRLLPPYLEGSLSLEDTGSILFGAALAVHRLVGAKTQESGRATHKNSDVPAWKRRIERRINLARALIGRLLAFRSGNTRPRIVRSVRMAFNGLGISLDQPDIADKLTERIDGLKQRIAAWGKRIRRYSERVERFRQNRLFVSDQKRFYRKLENPISSSASLKPSTVDLVAFWRNIWSGEVEHEEGPWIAAVQDACAKIEPMNPIAISTEDVSGAVRRAPNWKSPGADGLHHYWLKGLSVCHATLARQYQEAIDRKTLPNLFTTGITHLAPKSTNTADLTNYRPITCLTSIYKTLTSVLSCKISRHIGEFNILSAAQNGCRGGGRGTKELLLIDSVAGQLVRRNRRNFSAAWIDYKKAFDSVPHSWLLRVLELYKVDQAVRDFLGVCMGQWSTILCLQGERLTGADDPIRIRRGIFQGDCLSPLWFCLSLNTLSTLLERSGTGFQFRRGGTKVSHLLYMDDLKLLAPNAARLQELLKITTEFSSSIRMQLGVDKCAVVHVDRGQVTQSSQLSLELTSFKTLSEAESYRYLGMSQCIGVKEVDMKQAVCEIFFGRLTKVLRSYLSGANKVRVYNAWVMPTLLYTFGILRWTQTELDALDRRVRTTMTHHRMHHPKSSVMRLYIPRKCGGRGMLSAKTMHNREVCSLRAYFETRRDSALHGDVSMCDKGLTPLALAKENWQKPVVLSTSDRETVWMEKELHGRFYKALSAPHVDSKASVQWLRFGDLFGETEGFVCAIQDQVVKTNNYRKHVLKDGTPDFCRACRHPGESLRHVLSGCSVLANTEYLHRHNQVAKILHQELALMYGLLEQRMPYYQYSPVPVLESDGVRLYWDLPIATDRTILANKPDIVVMDRARSRVFLVDITVPHDENLVKAETEKKRKYLDLAHEIVDMWGVGSAVIIPIVISANGLIPVSLAHHLRQLGIRDGSLAARMQKAVLLDSARIVRRFLSLQP

SEQ ID NO: 14760 - protein, 1181 aa, Mellicta athalia
MEDKFGKRIGPLPGGRQGASGTGAGRGSMRAASHPRRPAPPPDRSANPSSPPDGLAPTEPQGTQHSAPAAGGVRRMRWTLKMNESVMRAYYRAVGRETGRTGYRAVMHREFLLLEPTVTVTEQNLADRARFIQRKGVFDAAELERFRREAAPEDEPVSAERDAVSTQQESVRSEAPVEAITEGAVAQKVEQMRGILQEAISETRGAPLEQRPRLSRLPLNAATRSAIEAANRLLPPYLEGSLGLEDTGSILFGAALAVHRLVGAKTQEPGLATHKNSDVPAWKRRIERRISLARALIGRLLAFRSGNTRPRIVRFVRMAFNGLGVSLNQPDIADRLTERIDGLKQRIAAWGKRIRRYSERVERFRQNRLFVSDQKRFYRKLENPIPCSAFLKPSTVDLVAFWRNIWSREVEHEEGPWIAAVQDACAKVEPMNPIAISTEDVSGAVRRAPNWKSPGADGLHHYWLKGLSVCHATLARQYQEAIDRKTLPNLFTTGITHLAPKSTNTADPTNYRPITCLSSIYKTLTSVLSCKISRHIGEFNILSAAQNGCRGGGRGTKELLLIDSVAGQLVRRNRRNFSAAWIDYKKAFDSVPHSWLLRVLELYKIDEAVRDFLGVCMEQWSTILCLQGERLTGADDPIRIRRGIFQGDCLSPLWFCLSLNPLSTLLERSGTGFQFRRGGTKVSHLLYMDDLKLLAPNAAHLQELLKITTEFSGSIRMQLGVDKCAVVHVDRGQVTQSAQFSLELTSFKTLSEAESYRYLGMSQCIGVKEVDMKQAVCEVFFGRLTKVLRSYLSGANKVRAYNTWVMPTLLYTFGILRWTQTELDALDRRVRTTMTHHRVHHPKSSVMRLYISRKCGGRGMLNAKTMHNREVCSLRAYFETRRDSAMHGDVVVCDKGLTPLSLANENWQKPVVLSTSDRETVWMEKELHGRFYKALHAPHVDSKASVQWLRFGDLFGETEGFVCAIQDQVVKTNNYRKHILKDGTPDFCRACRHPGESLRHVLSGCSALANTEYLHRHNQVAKILHQELALMYGLLEQRMPYYQYTPVPVLERDGVRLYWDLPIATDRTILANKPDIVVMDRARSRVFLVDITIPHDENLVKAETEKKRKYLDLAHEIVDMWGVGSAEIIPIVISANGLIPVSLAHHLRQLGIRDGSLAGRMQKAVLLDSARIVRRFLSLQP

SEQ ID NO: 14761 - protein, 990 aa, Mellicta athalia
MRGILQEAISETRGAPLEQRPRLSRLPLNAATRSAIEAANRLLPPYLEGSLGLEDTGSILFGAALAVHRLVGAKTQEPGLATHKNSGVPAWKRRIERRISLARALIGRLLAFRSGNTRPRIVRSVRMAFNGLGVSLNQPDIADRLTERIEGLKQRIAAWVKCIRRYSERVERFRQNRLFVSDQKRFYRKLENPIPCSAFLKPSTVDLVAFWRNIWSREVEHEEGPWIAAVQDACAKVEPMNPIAISTEDVSGAVRRAPNWKSPGADGLHHYWLKGLSVCHATLARQYQEAIDRKTLPNLFTTGITHLAPKSTNTADPTNYRPITCLSSIYKTLTSVLSCKISRHIGEFNILSAAQNGCRGGGRGTKELLLIDSVAGQLVRRNRRNFSAAWIDYKKAFDSVPHSWLLRVLELYKIDEAVRDFLGVCMGQWSTILCLQGERLTGADDPIRIRRGIFQGDCLSPLWFCLSLNPLSTLLERSGTGFQFRRGGTKVSHLLYMDDLKLLAPNAARLQELLKITTEFSGSIRMQLGVDKCAVVHVDRGQVTQSAQFSLELTSFKTLSEAESYRYLGMSQCIGVKEVDMKQAVCEVFFGRLTKVLRSYLSGANKVRAYNTWVMPTLLYTFGILRWTQTEVDALDRRVRTTMTHHRVHHPKSSVMRLYISRKCGGRGMLNAKTMHNREVCSLRAYFETRRDSAMHGDVVVCDKGLTPLSLANENWQKPVILSTSDRETVWMEKELHGRFYKALHAPHVDSKASVQWLRFGDLFGETEGFVCAIQDQVVKTNNYRKHILKDGTPDFCRACRHPGESLRHVLLGCSALANTEYLHRHNQVAKILHQELALMYGLLEQRMPYYQYTPVPVLERDGVRLYWDLPIATDRTILANKPDIVVMDRARSRVFLVDITIPHDENLVKAETEKKRKYLDLAHEIVDMWGVGSAEIIPIVISANGLIPVSLAHHLRQLGIRDGSLAGRMQKAVLLDSARIVRRFLSLQP

SEQ ID NO: 14762 - protein, 961 aa, Luehdorfia chinensis
MHRFFAELEPSIAVTEQNLADRVRYIMRSKIFDDAELERLRREAIPSSSENAVTGDAAPQAADQCADVNAAVNLPVAVDSDDEGMVAQEIEQMRSILEEAILETRNTPLESRSRLPRITLSKRNRAVVRALNPMLATYLETSRDLCETDSILFGAAMAVCRVIGAKLRKVGPATGQSSAIPAWRRRIEDRIGKARALIGRLISFRSGNNRPKIVRAVKMSFAGTNVSLSQPDIAQKLVERIDDLKQRIAAWGKRIRRYTERSRRFNQNRLFQSDQKRLFKSLERPVNCGTGLGPKQTDTVAFWRSLWSEPVNHSEGPWTEAVANQCASITCMDPVVITTGDVADAVRRAPNWKSPGLDGLHHYWLKGFVVCHAILARQFQEALDQKSLPSLFTTGVTHLVPKDQVTADPSKYRPITCLPTIYKTLTSILSVKIIRHLDSNRVVSRAQSGCRVGGRGTKEPLLIDAVIGKLVKRNRRNFSAAWIDYRKAFDSVPHSWLKRVLELYKVDCTVRDFLGQCMGQWSTILCHLGERMTAAEDRIRIRRGIFQGDCLSPIWFCLSLNPLSTLLEGSGGGFQLRRGGTKVTHLFYMDDLKLFAQNRSHLMELLRVTCDFSKSIRMELGTDKCAVLHAERGRVENSEGVGLLTIPVNIRTLSEAETYRYLGMTQNLGIDEAGMKQSVRDLFFARLTKLCNSLLSGVNKARAYNCWVMPVLMYTFGILRWTQTELNVLDRKVRTIMTSHRMHHPRSSVMRLYLPRKYGGRGFLSALTMHNREVCRLRNYFLMKSDEALCADVITCDTGLTPLSLAGEQWQDPAVQSISDRETVWKEKELHGRFYKALHEPFVDKAASLHWLRFGDLFGETEGFVCAIQDQVIKTNNYRRYILRDGTVDICRACHRPGESLRHVISGCSALSNSEYLHRHNLVAKIIHQELALKYGHVDRKLPYYKYLPEAVLESDRAKLY

SEQ ID NO: 14763 - protein, 1088 aa, Meandrusa sciron
MMDNREIRIGPLPGGRRGASGAGAGRCSMRAASRLREVGRPPDNLSHPSSPPDGLVSAGSSRTQQLAPATGGVRRMRWTIDNNKNVLRAYFRAKEGEAGGLAYRARMHRFFAELEPTITTTEQNLADRVRYILRSNLFNNNELERLRHEAVPPSDLAAAADSTVTHEAGQSAEVAEEQITAAVNPDDGGVTAQKIEEMRSTLEEAIMETRRTPLENRPRLSRIPLSKRNREVVKALNPMLVSYLATSRDLCDTESILFAAALAVCRCVGVKSPSTGRRVITQRNAIPEWRRRIENRIAEARVLIGRLISFRSGNNRPRIVRSVRKAFAGTGVRLYQPDIMQKLTERIDDLKQRIAAWGKRIRRYTERTKRFNQNRLFQSDQKRFYQSLERPEYRGTGQVPEQDAAVTFWRSLWSEPADHREGMWTEVVTRACADILPMDPIVITVDDVGEATRRAPNWKSPGIDGLHHYWLKGFVGCHGVLAQQFQEALDQKSLPDLFTTGVTHLVPKDQPTADPSKYRPITCLPTIYKTFTSILSAKIVRHLNFNGVMSYAQSGCRGGGRGAKEPLLVDAVIGKLVKRNRRNFSAAWIDYRKAFDSVPHTWLKRVLELYKIDRMVRDFLCHCMGQWSTILCLQGERMTAAENQIRIRRGIFQGDCLSPIWFCLSLNPLSTLLEDSGRGFQLRRGGTKTTHLFYMDDLKLFAPNRSQLMELLKITCDFSNDIRMELGTDKCAVIHVERGKVTNSAGLDISTPCNLRTLSEAETYRYLGMAQNISIDEADMKQSARDLFFARLTKVLNSLLSGVNKARAYNGWVMPALMYTFGILKWTQTELVALDRKVRTIMTAHRMHHPKSSVMRLYLPRKRGGRGLLSALTMHNREVCSLRNYFLTRFVGAIRTDVIMIDKGLTPLSLANEQWQDPGVQSVLDRETIWREKELHGRYYKALHEPFVDTTASLHWLRFGDLFGETEGFVCAIQDQVIKTNNYRRYILKDGTNDICRACRRPGESLRHVISGCSALSNTEYLHRHNLVARILHQELAHKYGFTDERRPYYLYTPEAVLENNRARLYWDRPVITDRTILANRPDIVVMD

SEQ ID NO: 14764 - protein, 1130 aa, Anabarilius grahami
MEDGPNRTDNTATTGTINTNKERILRECNCGWSKVTSYQGLRIHQGKAKCSNNNIQVQACTATAGQTRKAGSQDEHHSVTEPTIAPSGVEHEQPPEEKTQQPTLTQPHQFPKPANKPDLPLEMISRKNKVKWPKASESAAWKSFDLGLQAILQNSLKGNTITKLNILGDIIYTEGRERFGELQQRRATPIQQGRREKEILQLVKERRLLRKSWRKAEDNEKEGLKNLWNQLKGRLSQLRRAERIRKRRSRKEKARTRFFQDPFKYARSLLEEKKSRILNTTEEELANHIKVATGDSHRESPLGPPGYLPQPPEPTSPFDITPPKWLEVKQVVKRARMESAAGQNGVPYKVYKNCPSVLTLLWKMMCVAWKTKSIPPAWCRALTVFIPKEKDSVKINQFRGIALLNVEGKIFFSVMAKRMTSYLLSNQYIDTSCQKAGVPGFRGCVEHSMIIWNQIQAAKSNKSDLHVVWLDLENAYGSVPHQLIKFALKFFHIPTSIQSLITSYFDNLLVSFSTSNFTSGWHRVEKGIAMGCAISPILFITAFEVILSGGRQTVRGVRSSSGQRLPALLCYMDDVTTLLQTAACTNRLLKRLEELLTWARMEIKPSKSRSLSIRKGTRKDNISFSVNDEVIPRLIEQPIKSLGRHYSADLSDKHMATAVITQLVDGLNKIDESPLPGKFKVWCYQFTLFPRLMWPLKLCDITSSAVMKMDAKANCYIRKWLGLPRCLSTSALFGRKILSLPMKSISLGYKLEKVRLVLELKDSPDLVIQNAKVKVRTGRKWDASQAVQQATTRLKHQEVVGMVRHGKAGLGWGASAKMWSKATEAERKRTLVLEVVKEEEKGYRVKAVSQSQQGRWTTWEGVIDRTITWADLWKLPQARVSFLIRAIYDTLPSPQNLHQWYGIEELCQLCGQQNPSLQHVLSGCKTALTQGRYGWRHDRVLQKLAEVIEVRRLEANKTISTTSTHQPIQFVRKGGEVLGSTIRDRSLLSAGGEWELRADLGRRLKFPEQITTTSLRPDIVIWSSITKSIIMAELTVPWEDGIEAAFERKKEKYAELTSECQQAGWKAYTFPVEVGCRGYTESSTQRFLKTIGIRGPHLRKALKDMAEEAEQGSYWLWLCRKDKAWGKNGS

SEQ ID NO: 14765 - protein, 1079 aa, Ctenocephalides felis
MESETSSAIPVEVENRNNLVFIDVPLTVRFHCEACQGAPKHFSSHNGLLRHHRNTHNRNASLKFRCRCCKEEFYTLKQATRHVSRNNTCRNETEGIVENDAASYVAQRVRRTRSNSSDSEITNNDTSASRPTNVLPTIPEGIPAGASLNSVEFAEERQEERPLTILQVEMAAALNKVNDPEQFESLLDALYTRLTSKNDEQPAILEQPRPRSQYERRRRNRTNEFDPTVAARLQKLYRRNRKRAYRQVTEENSNGRCVINTEQLFQHFLATYGETGHVTTDIPEVVPTLEAATCDNPLISRFTPDEIWKRLNRCKDTAPGPDGIRYNVWKKIDPGSYIAAAVFNTARRLDYTPRNWNQSETVLITKKGDPMDISNWRPIALSNTLGKLYASTIAGRLAQWAIENNRISPSQKGFMPFEGCSEHNFLLQTIVQDARRRKTEACVAWLDLRNAFGSVPHSTLFKALQWTGLGTESIAIIKRVYQECTTKIKSSNGMTEEIPIRAGVKQGCPLSPIIFNLALEPLLRTLKESEETYKVGSQKVNVLAYADDIVLVATSESGLQKLLDLTLEISDWAGLKFNPNKCATLHVDGKNHAASPTKFRLGSNELKSLTSEESYEYLGVPTGFQTFRSAEDVIENMMKHLDRIDKAPLAPWQKFDAVNTFIVPQIEFHLRNGSVAKKALNSYDKKVKKCAKKWANLPQRASAEILYIPYKEGGFNMLPTSVLADIAQIVHATRIMTSRYEALAKSSLDALKEVVRKRTGTEPTTQLMTEYLNSSFEGVLGKPANDITSVWSRVRAAVRRLKMKINVRLELEALYVDDEKVERKNAEMKLRTAARKFYLKQLLAKPDQGKAFDIISAYNSSNHFMRDGKFTRFAEWRFVHRARLNVVPLNGCRRHGQGDKKCRRCGDSNETLPHVLNHCRPHFTTMTKRHDAIVNRLVKAAKKPDDGIIYQNQQIPGYSGLERPDIVIVDEGKKEVKIVDVTVAFENKKAAFEKARAEKIRKYSALAEYFKKKEYKTELNAFVLGSLGGYSPENVGTLISLGIGKKYCVLMKKLMVSDTIRWSRDIYIEHITGHRQYTS

SEQ ID NO: 14766 - protein, 910 aa, Ctenocephalides felis
MAAALNKVNDPEQFESLLDALYTRLTSKNDEQPAILEQPRPRSQYERRRRNRTNEFDPTVAARLQKLYRRNRKRAYRQVTEENSNGRCVINTEQLFQHFLATYGETGHVTTDIPEVVPTLEAATCDNPLISRFTPDEIWKRLNRCKDTAPGPDGIRYNVWKKIDPGSYIAAAVFNTARRLDYTPRNWNQSETVLIPKKGDPMDISNWRPIALSNTLGKLYASTIAGRLAQWAIENNRISPSQKGFMPFEGCSEHNFLLQTIVQDARRRKTEACVAWLDLRNAFGSVPHSTLFKALQWTGLGTESIAIIKRVYRECTTKIKSSNGMTEEIPIRAGVKQGCPLSPIIFNLALEPLLRTLKESEETYKVGSQKVNVLAYADDIVLVATSESGLQKLLDLTLEISDWAGLKFNPNKCATLHVDGKNHAASPTKFRLGSNELKSLTSEESYEYLGDPTGFQTFRSAEDVIENMMKHLDRIDKAPLAPWQKFDAVNTFIVPQIEFHLRNGSVAKKALNSYDKKVKKCAKKWANLPQRASAEILYIPYKEGGFNMLPTSVLADIAQIVHATRIMTSRDEALAKSSLDALKEVVRKRTGTEPTTQLMTEYLNSSFEGVLGKPANDITSVWSRVRAAVRRLKMKINVRLELEALYVDDEKVERKNAEMKLRTAARKFYLKQLLAKPDQGKAFDIISAYNSSNHFMRDGKFTQFAEWRFVHRARLNVVPLNGCRRHGQGDKKCRRCGDSNETLPHVLNHCRPHFTTMTKRHDAIVNRLVKAAKKPDDGIIYQNQQIPGYSGLERPDIVIVDEGKKEVKIVDVTVAFENKKAAFEKARAEKIRKYSALAEYFKKKEYKTELNAFVLGSLGGYSPENVGTLISLGIGKKYCVLMKKLMVSDTIRWSRDIYIEHITGHRQYTS

SEQ ID NO: 14767 - protein, 1079 aa, Ctenocephalides felis
MESETSSAIPVEVENRNNLVFIDVPLTVRFHCEACQGAPKHFSSHNGLLRHHRNTHNRNASLKFRCRCCKEEFYTLKQATRHVSRNNTCRNETEGIVENDAASYVAQRVRRTRSNSSDSEITNNDTSASRPTNVLPTIPEGIPAGASLNSVEFAEERQEERPLTILQVEMAAALNKVNDPEQFESLLDALYTRLTSKNDEQPAILEQPRPRSQYERRRRNRTNEFDPAVAARLQKLYRRNRKRAYRQVTEENSNGRCVINTEQLFQHFLATYGETGHVTTDIPEVVPTLEAATCDNPLISRFTPDEIWKRLNRCKDTAPGPDGIRYNVWKKIDPGSYIAAAVFNTARRLDYTPRNWNQSETVLIPKKGDPMDISNWRPIALSNTLGKLYASTIAGRLAQWAIENNRISPSQKGFMPFEGCSEHNFLLQTIVQDARRRKTEACVAWLDLRNAFGSVPHSTLFKALQWTGLGTESIAIIKRVYQECTTKIKSSNGMTEEIPIRAGVKQGCPLSPIIFNLALEPLLRTLKESEETYKVGSQKVNVLAYADDIVLVATSESGLQKLLDLTLEISDWAGLKFNPNKCATLHVDGKNHAASPTKFRLGSNELKSLTSEESYEYLGVPTGFQTFRSAEDVIENMMKHLDRIDKAPLAPWQKFDAVNTFIVPQIEFHLRNGSVAKKALNSYDKKVKKCAKKWANLPQRASAEILYIPYKEGGFNMLPTSVLADIAQIVHATRIMTSRDEALAKSSLDALKEVVRKRTGTEPTTQLMTEYLNSSFEGVLGKPANDITSVWSRVRAAVRRLKMKINVRLELEALYVDDEKVERKNAEMKLRTAARKFYLKQLLAKPDQGKAFDIISAYNSSNHFMRDGKFTRFAEWRFVHRARLNVVPLNGCRRHGQGDKKCRRCGDSNETLPHVLNHCRPHFTTMTKRHDAIVNRLVKAAKKPDDGIIYQNQQIPGYSGLERPDIVIVDEGKKEVKIVDVTVAFENKKAAFEKARAEKIRKYSALAEYFKKKEYKTELNAFVLGSLGGYSPENVGTLISLGIGKKYCVLMKKLMVSDTIRWSRDIYIEHITGHRQYTS

SEQ ID NO: 14768 - protein, 709 aa, Ctenocephalides felis
MDISNWRPIALSNTLGKLYASTIAGRLAQWAIENNRISPSQKGFMPFEGCSEHNFLLQTIVQDARRRKTEACVAWLDLRNAFGSVPHSTLFKALQWTGLGTESIAIIKRVYQECTTKIKSSNGMTEEIPIRAGVKQGCPLSPIIFNLALEPLLRTLKESEETYKVGSQKVNVLAYADDIVLVATSESGLQKLLDLTLEISDWAGLKFNPNKCATLHVDGKNHAASPTKFRLGSNELKSLTSEESYEYLGVPTGFQTFRSAEDVIENMMKHLDRIDKAPLAPWQKFDAVNTFIVPQIEFHLRNGSVAKKALNSYDKKVKKCAKKWANLPQRASAEILYIPYKEGGFNMLPTSVLADIAQIVHATRIMTSRDEALAKSSLDALKEVVRKRTGTEPTTQLMTEYLNSSFEGVLGKPANDITSVWSRVRAAVRRLKMKINVRLELEALYVDDEKVERKNAEMKLRTAARKFYLKQLLAKPDQGKAFDIISAYNSSNHFMRDGKFTRFAEWRFVHRARLNVVPLNGCRRHGQGDKKCRRCGDSNETLPHVLNHCRPHFTTMTKRHDAIVNRLVKAAKKPDDGIIYQNQQIPGYSGLERPDIVIVDEGKKEVKIVDVTVAFENKKAAFEKARAEKIRKYSALAEYFKKKEYKTELNAFVLGSLGGYSPENVGTLISLGIGKKYCVLMKKLMVSDTIRWSRDIYIEHITGHRQYTS

SEQ ID NO: 14769 - protein, 1068 aa, Craspedacusta sowerbii
MEDTFLCRFCERQFSSQRGTTLHERRAHEKVYHETKSLPKLSHYQWSQEERILLAYAEIQLESGKKINQVIQARPEFKHRTVESIKCERRKQAYRELLDNIRTSSLNVRTEPETKAPNAETNPTESKKGDHKQSNNNIESLTTETAPLREAVQREAQSVDLSEGELGKIFELASSGKKSELQTIIDIEFEKWRQNFPPDSITSSSNHPENKRAKMRAKHNPELGGGGETPARPPDRPTTTKSQLPKESQAGAIKEKQPNTIPPKTIKHAPGMARNKGPNNVSKRTIRRKQYARVQSLYRRNSRRCAEQVLSGEWEENVDALPMDRQRDYWKPLFESKSHLDRRSVPKPARVCLDLLNPFTEGEVRDAIKTMDNTAPGPDLLSKKQVSKIPPLSLATHFNLWLLTSTLPSPLYAASTILIPKSSHVTEPKDYRPISMASIIVRIFYRLIAKRLDRHIPISPRQKAFRRGDGLAENVFILRHIITYSKRRYIPLNLCFVDVAKAFDTVSHITIKLALTRLGIPTTIINFIMNGYENGYTRLLIKGEQSEPIHPGRGVRQGDPLSPLIFNSVMNWTLSHLDTNLGFHLPNSTTLVNHLAFADDLVILSSNPYALTTLFETLTTNLKEAGMTINRSKSATLAIKTSPKLKTWLCDPTPLIGEGDNSIPTMDATDTYKYLGIKIGVNSTWTSASERMRASLSNITRAPLKPEQRTYILRNHLQPTFTNELTLQRTSNRELKRLDTLVRMSLRRWLHLPHDTPTAPKASAGGLGITSLSTTMPHHKRSRYLALLHRAKTNNDPVLAAVTNLPYVAEEAERWLRGPKLGKQTIGSKEAAALMHENNLHMSVDGAGLRSQATVPQVNRWINDANPVATGESFVRCCQIRLNALHTRTRACRGRTGKSNLCDHCGHRDTLGHRLQTCPNAQRPRILRHNRVVNKVAEVASEHGLLTLTEPTIPTTCGNLRPDLVIYGEGKATVVDVQISADHLPLSDAYRRKVAKYDTVEIRPWVMNTTGCNEFGCIAVILNWRGAMATETANALRSVCSFNNKQLQLLSIITLEEGFKIWRFPTIF

SEQ ID NO: 14770 - protein, 709 aa, Trachythela sp.
MSCLYKLVMGVIGKRLTSWAIDNDLLSKEQKSARPSEGCYEHTFLLQSIIGEARRSHKNVFVAWLDLRNAFGSIPHSAITTTLTHIAVQLPLIEMITNSYSGATTQIRTPTGLTADIPVLSGVKQGCPLSPIIFNLTIDLILRAIKRSASDIGPAKVHDFPFSVLAYADDLVIISRKKDRLQKLLDVASSTATDLGLSFRADKCASISLTCSNCSQSSFELNEFIVQNKPIPPLDRENPYKYLGVPIGLIHDPDNIFDLVQDLTRDLESIEKSLLAPWQKLDMIRTFLQPSLTFALRAGFPKKDNLLVYRSHLVATVRRICALPSRASASYIFAHKRVGGLGLLDPTLEADVQAIIHAVKMLSCSDPTVIHIANAEVNQTVRLASRSNPTPALKSKYLSSLPDDRLNNLRYNIQSLWTRVRKSARNLGVEIKFNDNGLPILSTENSGSVLAKEASRFLHFHVQDRFASTLLALPDQGKVGRALTTDTFANGSTWQYNGLNIRFRDWRFIHRARLNCLPVNNVKSRWSNSCPKCRHCNSDETLPHVLCHCLPNMPSILRRHNSIVDRIVNAVQRGTITTDQQVRAANSRLRPDIIVEEDNKVLIIDVCCPFDNNAEALRDAEQRKLNKYEGLKQFFVDQGKQCEVFGFVIGALGSWHPANENVLRQLGMSKRYRSLFRKLCCTDAIQGSTNIYREHLGITERSLDEDNSE

SEQ ID NO: 14771 - protein, 1341 aa, Ixodes scapularis
MMHPPQGCSSVLDHGPRGATGFLASSIEESGNRCPGGDPGPLSPSFEDQGECQSPSSMTQGECTSVLTSHNESRMVDTGDSARHEGDSWRAESMATPSVSFETPACRAERPPSATELTVSACSLPGAQDSPQLAATEPTSQESPSRPDQPTREGDMLVVRFPVPKAFFCTEGSCKAAYSSTSWTSQRQSLQRHLEQEHRIMIKATQNVCSICRRVLGMRPTSHRCIAGAVRSQQPLAAAQHHRCDECEEAFPSRKGLDNHKKRHRRDTARMARVSTLPAAGTSTPVARTSSATRPEPSREPDPVELPGDLVSPEPPQDHAPGEPEGSFPTAEPAPDEGGSNSALSGSVGDSANPIIDECTLSGSVGAAANSTTDETTFSGSVGDAVDTTTDETRRELPPLNAPRAQPESSYATQVTTDRDPTEHGAAARPPDDTPQPAASADPGPGEDDYPLAVHLTAVLHLQSLPETPESWCRFQMILAEATEVAARSVKLPDQTRQDGPRRPINPEDPRAIQRLYRRNRRQAVRLITDGQSPRCAIPSAEVEAHFRGVWELRRADTSLLVEREPAGDELPLDPMTEHEVLSKARRCENTAPGDDRLTYHHWLAVDPGCRFLAAAFNICLQYRAIPDSWRQSRTILVPKKGDPAEITSWRPISLLRTASKLFSGVLAARLQAWLLEHDVLSRTQKGFLPYDGVFEHNYVLQRRMDEARTTSGDLCAAFLDFSNAFGCVPHNAIVDAVRGVGAGETFAELVQDMYYESSSSVVTNDGCTDPIPMRCGIRQGCPLSGLLFNLVVDPVIRKVQGTTADHCILAYADDLTPLARDPASLQASINLIEEEAGRLGLSLNAAKCRSLHLSGCSPVGLRGSQFLVNGTPIPVIRDFEAFAYLGRPVGFNILQDGSDVDAAIQLGTRILGSMLAPWQRLDAIKTFLYPALHHLMRTGTVGKTEWARLDEALRPLIKRTLYLPPGASNDYIYGSSRAGACGIPCAAETSDVCRVDSVFKLLTSRDPEVARMALDDLMGIVKARLRRDCDLPDAELYLSGHNEGDFRMPATQLRSVWTEGRKASGRLNVAWELGPEGASITVGSQVITPRGRSKVMHSLRFQLAQLKDARLHALPNQGKVMECVAADPAGSHFIRTGLYTRFADWRFIHRARLNLLPLNGAQPWKRGSDQRCRRCGFASETLPHVLNHCMRQSQAITQRHNNVVERVKKASAGRFTLVSENAAVGDTQLRPDLVLVRGEEAVVVDVCIPFENRKEALVQARRTKEEKYRPVIDHLRRRYQRVTVEAVVVGALGSWDPANDRFLKKLCSRSYLKRMKQMAASDTIRASRDIYAVHIAGPTR

SEQ ID NO: 14772 - protein, 1160 aa, Bradysia odoriphaga
MFQLQFFDGEFNQFQTAKFKVVENGAGGDCLFMTMLAFLRSKKLVSKESHRDLRRMIVQEAVADLDFLQIQEMKFNLEISVPFFSTLSLDDLQTDDTLQQQCLIEYSEYMSKPGSYGTLFELAIASQLFDFEAVMFLKQDNVVKCFDIGVSDDDNNGQKPKLFILFTGSPHCGHFRLLKPSTIECLKSSNRIPRGDYSIIKEDSSSFVLKKGLPPTIDSSQPEKNDKVKSNLIMCPFCCNSTKEFKGHTGLKIHITRMHPGESYKPLSVDDGKVYEDFQESLCSLRRKVRILKRIPRGARTLAAKKLSEIIDECVRTNDDRSWKKLLTFSYYALQVPKKSSKSLVSIVKRNLSNIDNSFVEGNLPVRVSDLKSRIESKVADGDIQGAVRLLSSEDTIAPMNSDTLGKLREKHPSPSRKLNFPDPPNEFSERLVVSNKEVRKAIHSFKNGSSGGIDGIRPQHLKDLVSKISGDAGINLLESITQLCNLILAGGVCSDVTEFFFGAVLCALNKKQGGMRPIAVGNTFRRLAAKLGCNAVREHVASIFSPIQMGFGIRGGCEAIIHAVRTFLSSDDNQGKVFLKIDFKNAFNSIERDEMLREVVQHTPQLYPFLWQCYAEPSLLFFGDNTILSQVGAQQGDPCSPLIFCLVIHSLISNLKSNVNVWYLDDGSLAGQPEIVLQDFKSIIEKSARVGLSINPSKCELHFCGEIDNDILKSFNNLSPGIQVIQSEVELLGAPLTLSAAKEILLKKLDNVKASFEQLKSIKSHVAYFLLKHCFWIPKLSFIVRTTPTWLFPEIVADFDQSFQSAFESITNIHFNDEKWNLCCLPTRDGGIGVRKLKDIGLPAFLSSVNGSLQLINYVLSSDFDEMEVSFYKESIEEWKISHTHLPVERHIQKQWDVMNIQSIKSSFNCVDKANAARFLASQRIESSHWLNVLPSKAIGTLLSDNTFRISVALRYGCDVCLPHDCICGEAVVNSDGIHGLACRCSAGRFARHSEFNKIMKLALASAQIPARLEPRGLNSGNEERPDGISLVPWSKGRFLTWDATCLDTLAPSYIDFTCKSAGKLAEKGALKKINRYKDLTRMENHHFVPVAIESLGPICAEGKKLISEIGAKIAEISGEPRATVFLYQRLSIALQNFNAGCVLGTFPESSGFNELFLL

SEQ ID NO: 14773 - protein, 1047 aa, Daphnia obtusa
MTSHCTNGRPVVSSGRQSPIIDSARLNEEEETPAAPPPKLTDLQRQWIDTFNSLLPEDLDGLSALSLAISSAAAERQDSAALPPTHVPAPPQRGVNRAPRRRPRYDPQDASTIQKLYRLDRNKAMTHILAEPSPYCTAEPVAIETHLATIFAGEEHPWSDPPPCVPAFDHPTTPDEFAFLTAPVTPLEVSSRLQRMKNTAPGPDGARYSGLRRVDPGCHTLALIYSWCLRAAKVPATWKESTTVLIFKAGDRDNLGNWRPLTLGNTIAKLYSGVIADRISRWAEDGQRNSPQQKGFTRHDGCLEHNFLLQSAINQARRTGQELCVAWLDLANAFPSFSHSHIFGTLNLLGLPAELIAVIQDLYTDTSTRGMTSTGLTTPIPISSGVKQGCPLSPVVFDLAMEPIIRTVTALKPLSFKLGLVDLNILAFADDLALLAKNEAALQRQLDVAAEAAEWCGLTFKPAKCATLHVARRETLDSVFTIDENPLAVLGEGQHYRHLGVPTGFRNKQTPEETLANISKDLDRLDDSLLAPWQKIDAVVTFFVPRLDFILRGADVAVKPLRLLDKKMKKNVKKWLNLPQRASAEVVYIPSPLGGAGILPFSDMRNVCAITHGYRLLTCPDSDVCETAWDTLKTAVHLKIRRVPDMDDIADYLNGSTEREMGQTNSDVPSLWSRVRICTRAIRRTVAIEWWWCATLGEMQIIVPRPEKEPDQARAHPAARRQVCQLIKTALRAAYLHRLLKKPDQGKVYSVTSLRSESNHMMKTGLYTRFVDWRFLHRARLDTMPLNGTRRFGEGSKRCRRCNHVLETLSHVLSHCKYASRPRALRHHDVVHRLARGTPAIAGTTSEDKKIPGTNSQLRPDLVVTNPLAGSISIIDVAIVFENKLEAFHLVRAGKIQKYQLLADELRTQGWEVYLNAFIVGALGGWDPANDTVIRQLRISKSYAKLMKKLIMSDTIRCSRTSMLNSSVGNANIGNLFRLATSRSTSNFPRRWILLKKPKFCLFIYFFSLFFFFLLLLFISSPPLLVPLPLSPSIPFVFTLISASLTR

SEQ ID NO: 14774 - protein, 1053 aa, Daphnia obtusa
MPVAPPRNCAAGHFDLPRRPDPVLSTSAPPPCLVQQYEPSGGRRGRRTRRRSPPLPSMASHCTNGRPVVSPGHHSPRIDSARLNEEEETPAAPPPKLTDLQRQWIDTFNSLLPDDLDGLSALSLAISSAAAERQDSAPLPPTHVPAPPQQGVNRAPRRRPRYDPQDASTIQKLYRLDRNKAMTHILAEPSPYCTAEPVAIETHLATIFAGEEHPWSDPPPCVPAFDQPTTPDEFAFLTAPVTPLEVSSRLQRMKNTAPGPDGARYSGLRRVDPGCHTLALIYSWCLRTAKVPATWKESTTVLIFKAGDRDNLGNWRPLTLGNTIAKLYSGVIADRISRWAEDGQRISPQQKGFTRHDGCLEHNFLLQSAINQARRTGQELCVAWLDLANAFPSVPHSHIFGTLNLLGLPAELIAVIQDLYTDTTTRAMTSTGLTTPIPISSGVKQGCPLSPVVFDLAMEPIIRAITALKPLSFKLGLVDLSILAFADDLALLAKNEAALQRQLDVAAETAEWCGLTFKPAKCATLHVTRRETLDSVFTIDENPLAVLGEGQHYRHLGVPTGFRNKQTPEETLANISKDLDLLEDSLLAPWQKIDAVVTFFVPRLDFILRGADVAVKPLRLLDKKMKKYVKKWLNLPQRASAEVVFVPSPLGGAGILPFSDMRNVCAVTHGYRLLTCPDSDVRETAWDTLKTAVHLKIRRVPDMEDIAAYLNGSTEDDMSRTNSDVPSLWSRVRICTRALRRTVAVEWWWCATLGEMQLIVPRPGKEPDQARAHPAARRQVCPLLKTALRAAYLQRLLRKPDQGKVYSVTSLRSESNHMMKTGLYTRFADWRFLHRARLDTMPLNGTRRFGEGSKRCRRCNHVLETLPHVLSHCKYASRPRALRHHDVVHRLARGTPAIAGTTREDNKIPGTSSQLRPDLVVTNTLARSISIIDVAIVFENQLEAFHLARAGKISKYQLLADELRTQGWDVYLNAFIVGALGGWDPANDTVIRQLRISKSYSKLMKKLIISDTIRWSREIYVEFISGKRQYREPIPTNQLPVHPQPSMAPEEDV

SEQ ID NO: 14775 - protein, 1391 aa, Daphnia obtusa
MSDSDGPGSTPPGGSRFTENITDVVYISLPIPPSTTFSCHICSTVGQKLATHNSLKKHFRSTHKGTVVVRFECHICQFELPSVKSFAAHNAEIHSRRPVSPPTVTATTPVLPISSEDIDCFLAAARHRSSSEPLPPDPFPVAIILPTVATNNLPPFLDTGLVLPHPPGLLINFGTPDLLPPPSATRFSDVPRDSPLPPPEPDPPDGHDSLWSWSGLTNVLHDVRDYPVFSGCWERGGGGRCYRPRSTPPIVTEEILTARHLLLASVVPVQPPEIPQPSVAPVSVRPLSPSATPILRNTTFTPPIDFLHAPGTSGDRWLDNETAPSSPVSDQVFPPPVPVAPPWNCAAGHFDLPRRPDPVLSTSAPPTCLVQQYEPSGGRRGKRTRRRSPPLPSMTSHCTNGRPVVSSGRQSPIIDSARLNEEEETPAAPPPKLTDLQRQWIDTFNSLLPEDLDGLSALSLAISSAAAERQDSAALPPTHVPAPPQRGVNRAPRRRPRYDPQDASTIQKLYRLDRNKAMTHILAEPSPYCTAEPVAIETHLATIFAGEEHPWSDPPPCVPAFDHPTTPDEFAFLTAPVTPLEVSSRLQRMKNTAPGPDGARYSGLRRVDPGCHTLALIYSWCLRAAKVPATWKESTTVLIFKAGDRDNLGNWRPLTLGNTIAKLYSGVIADRISRWAEDGQRNSPQQKGFTRHDGCLEHNFLLQSAINQARRTGQELCVAWLDLANAFPSFSHSHIFGTLNLLGLPAELIAVIQDLYTDTSTRGMTSTGLTTPIPISSGVKQGCPLSPVVFDLAMEPIIRTVTALKPLSFKLGLVDLNILAFADDLALLAKNEAALQRQLDVAAEAAEWCGLTFKPAKCATLHVARRETLDSVFTIDENPLAVLGEGQHYRHLGVPTGFRNKQTPEETLANISKDLDRLDDSLLAPWQKIDAVVTFFVPRLDFILRGADVAVKPLRLLDKKMKKNVKKWLNLPQRASAEVVYIPSPLGGAGILPFSDMRNVCAITHGYRLLTCPDSDVCETAWDTLKTAVHLKIRRVPDMDDIADYLNGSTEREMGQTNSDVPSLWSRVRICTRAIRRTVAIEWWWCATLGEMQIIVPRPEKEPDQARAHPAARRQVCQLIKTALRAAYLHRLLKKPDQGKVYSVTSLRSESNHMMKTGLYTRFVDWRFLHRARLDTMPLNGTRRFGEGSKRCRRCNHVLETLSHVLSHCKYASRPRALRHHDVVHRLARGTPAIAGTTSEDKKIPGTNSQLRPDLVVTNPLAGSISIIDVAIVFENKLEAFHLVRAGKIQKYQLLADELRTQGWEVYLNAFIVGALGGWDPANDTVIRQLRISKSYAKLMKKLIMSDTIRCSRDIYVEFISGKRQYRESLPVSHLPVHQQLPTALDPVEET

SEQ ID NO: 14776 - protein, 1389 aa, Daphnia obtusa
MSDSDGPSGTPPGGSRFTENITDVVYISLPIPPSTTFSCHICSTVGQKLATHNSLKKHFRSTHKGTVVVRFECHICQFELPSVKSFAAHNAEIHSRRPVSPPTVIATPPVLPISSEAIDCFLAAARHRSSSEPLPPDPFPVATILPTVATNNLPPFLDTGLVLPHPPGLLINFGPRDLLPPPSATCFSDVPRDSPLPPPEPDPPDRPDSLWSWSGLTNVLHDVRDYPVLSGCWERGGGGRCYRPRSTPPIVTEEILTARQLLLASVVPAQPPEIPQPSVAPVSVRPLSPSATPILRNTTFTPPIGFLQAPGASGDRCLDNESAPSSPVRDQVFSPPMPVAPPWNCDAGHFDLPRRPDPVLSTSAPPPCLVQQYEPSGGRRGRRTRRRSPPLPSMASHCTNGRPVVSPGHHSPRIDSARLNDEEETPAAPPPKLTDLQRRWIDTFNSLLPDDLDGLSALSLAISSAAAERQESAPLPPTHVPAPPQQGVNRAPRRRPRYDPQDASTIQKLYRLDRNKAMTHILAEPSPYCTAEPVAIETHLATIFAGEEHPWSDPPPCVPAFDQPTTPDEFAFLTAPVTPLEVSSRLQRMKNTAPGPDGARYSGLRRVDPGCHTLALIYSWCLRTAKVPATWKESTTVLIFKAGDRDNLGNWRPLTLGNTIAKLYSGVIADRISRWAEDGQRISPQQKGFTRHDGCLEHNFLLQSAINQARRTGQELCVAWLDLANAFPSVPHSHIFGTLKLLGLPAELISVIQDLYTDTTTRAMTSTGLTTPIPISSGVKQGCPLSPVVFDLAMEPIIRAITALKPLSFKLGLVDLSILAFADDLALLAKNEAALQRQLDVAAETAEWCGLTFKPAKCATLHVTRRETLDSVFTIDENPLAVLGEGQHYRHLGVPTGFRNKQTPEETLANISKDLDLLEDSLLAPWQKIDAVVTFFVPRLDFILRGADVAVKPLRLLDKKMKKSVKKWLNLPQRASAEVVFIPSPLGGAGILPFSDMRNVCAVTHGYRLLTCPDSDVRETAWDTLRTAVHLKIRRVPDMDDIAAYLNGSTEDDMSRTNSDVPSLWSRVRICTRALRRTVAVEWWWCATLGEMQLIVPRPGKEPDQARAHPAARRQVCPLLKTALRAAYLQRLLRKPDQGKVYSVTSLRSESNHMMKTGLYTRFADWRFLHRARLDTMPLNGTRRFGEGSKRCRRCNHVLETLPHVLSHCKYASRPRALRHHDVVHRLARGTPAIAGTTREDKKIPGTSSQLRPDLVVTNTLARSISIIDVAIVFENQLEAFHLARAGKISKYQLLADELRTQGWDVYLNAFIVGALGGWDPANDTVIRQLRISKSYSKLMKKLIISDTIRWSRDIYVEFISGKRQYREPIPTNQLPVHPQPSMAPEEDV

SEQ ID NO: 14777 - protein, 1476 aa, Daphnia obtusa
MSDSEGAPSDIPPGGSGFTQNVEEVVYISLPIPHSTTFSCHICTTVGQKLASHNSLKKHFRTTHKSSVVVRFECAICRFELPGVKCYAAHRAEFHPNQRVLSPTPPELAASSFPISSADIDLFLLAARQQATSDRLSPDPLPVVTPPPIVATSNSFLSSSGPSCNSHRPPGLLINFGPSETPPLPSIESFRPPTPVPPDDNGSLWSWTGLTNVLYDERLYPVTGGYWERGGGGRRRPLRPNLPLVSVPFVSEDILRARQLLIPSVAPVRSPEVSLTSVSSGSLAIDPPLPTPYLRNTMPQCRDPPAAPHVACIAPVCHSSNGAESAYSSSSDEVLSSPLPPSPNGAESAYSSSSDKVLSSPLPAVPPWNATAGHFDIPQRPARLPNFSQLPIPQFSIPRVGRSRPRMPPTSPTSAHSGQNLPVSELRSPSLLDDTPSHTAAGYFNLPQSRSSLRPLTPPHQSTSCLVQQYEDMVTLRAMAVHQPPPPVEAVPTAEPLDIDGADDYADPLDGDGFPPPPKLTDQQLQWIATFHSLLPADIEGLSALSQEIATAAAERKDVAPSNLRRDAVPTQRGTCRAPPRRQQYNPQDASEIQKLYRLDRNKAMTHILAEPSPYCAADPAAIEAHLSTIFSGTDHPWSDPPPCVPEFTQTTTPEEFTFLTAPITPREVSHRLQRMKNTAPGPDGARYAGLRRADPGCHSLALIYSRCLAQAQVPVAWKESTTVLIYKAGDRDNLNNWRPLSLGNTIAKLYSGVLADRVSRWAEDGKRISPQQKGFTRHDGCLEHNFILQSAINQARRTGQELCVAWLDLANAFPSVPHNHIFGTLTLLGLPAELIAVIRDLYTDTTTRGMTSTGLTAPIPLSAGVKQGCPLSPVVFDLAMEPIIRAVVALKPLSFKLGLIDQSTLAFADDLSLLAKNDAALQQQLDVASETADWCGLTFKPSKCATLHIHNRVTVDSVFTIDENPLAVLGEGQHYRHLGVPTGFRNKQTPDESLARIATDLNLLDASLLAPRQKIDAVVTFLVPRLDFILRGADVRVKPLSKLDKSMKKCVKKWMNLPQRASAEVVFIPSPLGGAGILPFSDMRNVCAVTHGYRLLTCPDDSVRETAWDTLKTAVQLKIRHVPTMDDVASYLNGSTEGEMAKTNGDVPSLWSRVRVCTRALRRTADIQWWWCAARGEMQLIVPRPDKVPNQARAHPAARRQVCSLIKTALRAAYLQRLLQKPDQGKVYSVTSLRSESNHMMKTGLYTRFADWRFLHRARLDTMPLNGTRRFGNGSKRCRRCNNILESLPHVLSHCKYVSRPRALRHHATVHRLAKGTPAIAGSTSEDRKIPGTNCQLRPDLVVTNAVTRSISIIDVAVVFENKYEAFQLARSGKIQKYSLLADELRSQGWDVYLNAFIIGALGGWDPDNETVIRQLRISKSYAKLMKKLIISDTIRWSRDIYVEFISGKRQYQEVAINPIPAHPHCDPAPVDHPE

SEQ ID NO: 14778 - protein, 1476 aa, Daphnia obtusa
MSDSEGAPSDIPPGGSGFTQNVEEVVYISLPIPHSTTFSCHICTTVGQKLASHNSLKKHFRTTHKSSVVVRFECAICRFELPGVKCYAAHRAEFHPNQRVLSPTPPELAASSFPISSADIDLFLLAARQQATSDRLSPDPLPVVTPPPIVATSNSFLSSSGPSCNSHRPPGLLINFGPSETPPLPSIESFRPPTPVPPDDNGSLWSWTGLTNVLYDERLYPVTGGYWERGGGGRRRPLRPNLPLVSVPFVSEDILRARQLLIPSVAPVRSPEVSLTSVSSGSLAIDPPLPTPYLRNTMPQCRDPPAAPHVACIAPVCHSSNGAESAYSSSSDEVLSSPLPPSPNGAESAYSSSSDKVLSSPLPAVPPWNATAGHFDIPQRPARLPNFSQLPIPQFSIPRVGRSRPRMPPTSPTSAHSGQNLPVSELRSPSLLDDTPSHTAAGYFNLPQSRSSLRPLTPPHQSTSCLVQQYEDMVTLRAMAVHQPPPPVEAVPTAEPLDIDGADDYADPLDGDGFPPPPKLTDQQLQWIATFHSLLPADIEGLSALSQEIATAAAERKDVAPSNLRRDAVPTQRGTCRAPPRRQQYNPQDASEIQKLYRLDRNKAMTHILAEPSPYCAADPAAIEAHLSTIFSGTDHPWSDPPPCVPEFTQTTTPEEFTFLTAPITPREVSHRLQRMKNTAPGPDGARYAGLRRADPGCHSLALIYSRCLAQAQVPVAWKESTTVLIYKAGDRDNLNNWRPLSLGNTIAKLYSGVLADRVSRWAEDGKRISPQQKGFTRHDGCLEHNFILQSAINQARRTGQELCVAWLDLANAFPSVPHNHIFGTLTLLGLPAELIAVIRDLYTDTTTRGMTSTGLTAPIPLSAGVKQGCPLSPVVFDLAMEPIIRAVVALKPLSFKLGLIDQSTLAFADDLSLLAKNDAALQQQLDVASETADWCGLTFKPSKCATLHIHNRVTVDSVFTIDENPLAVLGEGQHYRHLGVPTGFRNKQTPDESLARIATDLNLLDASLLAPWQKIDAVVTFLVPRLDFILRGADVRVKPLSKLDKSMKKCVKKWMNLPQRASAEVVFIPSPLGGAGILPFSDMRNVCAVTHGYRLLTCPDDSVRETAWDTLKTAVQLKIRHVPTMDDVASYLNGSTEGEMAKTNGDVPSLWSRVRVCTRALRRTADIQWWWCAARGEMQLIVPRPDKVPNQARAHPAARRQVCSLIKTALRAAYLQRLLQKPDQGKVYSVTSLRSESNHMMKTGLYTRFADWRFLHRARLDTMPLNGTRRFGNGSKRCRRCNNILESLPHVLSHCKYVSRPRALRHHATVHRLAKGTPAIAGSTSEDRKIPGTNCQLRPDLVVTNAVTRSISIIDVAVVFENKYEAFQLARSGKIQKYSLLADELRSQGWDVYLNAFIIGALGGWDPDNETVIRQLRISKSYAKLMKKLIISDTIRWSRDIYVEFISGKRQYQEVAINPIPAHPHCDPAPVDHPE

SEQ ID NO: 14779 - protein, 1464 aa, Daphnia pulex
MSDSDASPADDPSSDGRFAENVEEVVYISLPIPPSTTFSCHICSTVGQKLASHNSLKKHFRTTHKSSVIVKFECAICRFELPGVKSYAAHQAEFHPNQRVLSPTPPEPAVPLLPISSADIDDFLLAARQQASSARHLPEPISEATSPLEVATPISISSSSGSVHNVHRPPGLLVNFGPSETPPLISAGSSRLPSPVPSDDHSSLWSWTGLTNVLYDERAYPVIGGCWERGGGGRRHPLRPNVPSVSVPLVSAPSVSEDILHARQLLFPSVASSHSQEVPQPSVSIGSSFTESPMPTLCLRNTMASYSSDPPASSCSINAADGHFSDSVESALPSPSSEVLSSPLPPWNLAAGHFDIPQRPARPSTSSQHPILQRDLPCIPRKGRPRRHVRRCAPSKSLASAPSDQNHLVGEPVRSPSLPGDMPLHTAAGYFNLPPPQTGSRPPTPSRQSTSCPVQQYEDMVNEQAMATHQPPPVAATVVAGPLEIDGTDDHAAQLDDGAPPPPKLTDQQRQWIATFHSLLPTDLEGLSALSREITTVAAERKDQPPPNQPREARPTQRGTRRAPPRRQHYNPQDASEIQKLYRLDRNKAMTHILAEPSPHCAADPAEIETHLSTIFSGTDHPWVDPPPCVPEFTQITTPDEFTALTAPITPREVSCRLQRMKNTAPGPDGARYAGLRRADPGCHTLALIFSRCMTQAKVPAAWKESTTVLIYKAGDRENLGNWRPLSLGNTIAKLYSGVLADRISRWAEDGKRISPQQKGFTRHDGCLEHNFILQSAINQARRTGQELCVAWLDLANAFPSVPHNHIFGTLALLGLPAETIAVIQDLYTATTTRGMTSSGLTAPISISAGVKQGCPLSPVIFDLAMEPIIRAVVALKPLSFKLGFSDQSILGFADDLSLLAKSETALQQQLDVAAETANWSGLTFKPSKCATLHVIHRETVDSVFTIDENPLAVLGEGQHYRHLGVPTGFRNKQTPEETLARIGTDLDLLNASLLAPWQKIDAVVTFFVPRLDFILRGADVKVKPLKKLDKQMKKFVKNWMNLPQRASAEVVFISSPLGGAGILPFCDMRNVCAITHGYRLLTCPDEEVRETAWDTLKTAVHLKIRHTPTMDEIASFLNGSTADEMARTNGDVPSLWSRVRTCTRALRRTVDIQWWWCATRGEMQLLIPRPDQEPNQARVHPAARRQVCGLLKMALRSAYLKRLLKKPDQGKAYSVTSLRSESNHMMKSGLYTRFADWRFLHRARLDTVPLNGTRRFGNNSKRCRRCNNILETLPHVLSHCKYVSRPRALRHHAIVHRLARGTPKISGSVSEDRKIPGTSGQLRPDIVVTHTVNRTISIVDVAVVFENKYEAFQLARAGKIQKYEHLAEELRSQGWDVYLNAFVVGALGGWDPDNETVIRQLRISKSYAKLMKKLIVSDTIRWSRDIYVEFISGKRQYREDVPSNPIPVHPHYGPAVTEQPGDN

SEQ ID NO: 14780 - protein, 1068 aa, Daphnia pulex
MLASAPSDQNQLVGEPARSPSLPGDMPLHTAAGYFNLPPPQTGSRPPTPSRQSTSCPVQQYEDMVNEQAMATHQPPPVAATAAAGPLEIDGTDDHAVQLDDGAPPPPKLTDQQRQWIATFHSLLPTDLEGLSVLSREIATVAAERKDQPPPNQPREARPTQRGTRRAPPRRQHYNPQDASEIQKLYRLDRNKAMTHILAEPSPHCAADPAEIETHLSTIFSGTDHPWVDPPPCVPEFTQITTPDEFTALTAPITPREVSCRLQRMKNTAPGPDGARYAGLRRADPGCHTLALIFSRCMTQAKVPAAWKESTTVLIYKAGDRENLGNWRPLSLGNTIAKLYSGVLADRISRWAEDGKRISPQQKGFTRHDGCLEHNFILQSAINQARRTGQELCVAWLDLANAFPSVPHNHIFGTLALLGLPAETIAVIQDLYTATTTRGMTSSGLTAPISISAGVKQGCPLSPVIFDLAMEPIIRAVVALKPLSFKLGFSDQSILGFADDLSLLAKSEAALQQQLDVAAETANWSGLTFKPSKCATLHVIHRETVDSVFTIDENPLAVLGEGQHYRHLGVPTGFRNKQTPEETLARIGTDLDLLNASLLAPWQKIDAVVTFFVPRLDFILRGADVKVKPLKKLDKQMKKFVKNWMNLPQRASAEVVFISSPLGGAGILPFCDMRNVCAITHGYRLLTCPDEEVRETAWDTLKTAVHLKIRHTPTMDEVASFLNGSTADEMARTNGDVPSLWSRVRTCTRALRRTVDIQWWWCATRGELQLLIPRPDQEPNQARVHPAARRQVCGLLKMALRSAYLKRLLKKPDQGKAYSVTSLRSESNHMMKSGLYTRFADWRFLHRARLDTVPLNGTRRFGNNSKRCRRCNNILETLPHVLSHCKYVSRPRALRHHAIVHRLARGTPKISGSVSEDRKIPGTSGQLRPDIVVTHTVNRTISIVDVAVVFENKYEAFQLARAGKIQKYEHLAEELRSQGWDVYLNAFVVGALGGWDPDNETVIRQLRISKSYAKLMKKLIVSDTIRWSRDIYVEFISGKRQYREDVPSNPIPVHPHYGPAVTEQPGDN

SEQ ID NO: 14781 - protein, 1383 aa, Daphnia pulicaria
MSDSDSSNCTPPRGSRFTENITDVVYISLPIPSSATFSCHICTTVGQKLLTHNSLKKHFRATHKGTIVVRFECRICQFELPSVRSYAAHHAELHSRRPVSPPSTTPGTPQVPPISSEAIDCFLAAARRQSISEALPPDPSAVAPIPPTAAPTNLPPLPDTRPMHPHPPGLLINFGPRELLPPLSASLSDVPSDFPPPPPEPDPPDGNGSLWSWTGRTNVLYDVLDHPVVSGCWERGGGGRCYRPRSHPPIVTEEIRIARQLLLPSAVSVPPPEMPQNSVASVLAQPPSPLATPSLRNTTHTPPTGSLPVSGAPGARGLVYAAISPPPIVSEPVTSPSMPDAPPWNRDAGHFDLPRRPDPRLSTSSLSAQPPGLVQQCEPPGGRRGRRSRQQSSHLPPVTNRRANGRPATSPRRRSPSLDPARIDEEEEAPDIPPPKLTDLQRQWVDTFNSLLPEDVDGLSALSLAISSAAAERQDTAPPPPTRAPAPRNQGLNRAPRRRPRYDPQDASAIQKLYRMDRNKAMTHILAEPSPYCAAEPAAIETHLTTIFAGEEHPWSDPPACVPAFDQPTTPDELAFLTAPITPLEVSFRLQRMKNTAPGPDGARYSGLRRVDPGCHTLALIYSRCLRIAKVPAAWKESTTVLIFKAGDRENLGNWRPLTLGNTIAKLYSGVIADRISRWAEEGHRISPQQKGFTRHDGCLEHNFLLQAAINQARRTGQELCVAWLDLANAFPSVPHSHIFGTLNLLGLPAELISVVQDLYIDTTTRGMTSSGLTAPIPISSGVKQGCPLSPVIFDLAMEPIIRAVMALKPLSFKLGLIDLLILAFADDLALLAKNEAALQRQLDVATETAEWCGLTFKPAKCATLHVVRRETVDSVFTINENPLAVLGEGQHYRHLGVPTGFRNKQTPEETLAQLSNDLDLLDNSLLAPWQKIDAVVTFIVPRLDFILRGANVAVKPLRALDKRMKKNVKKWLNLPQRASAEVVFIPSPLGGAGILPFSDMRNVCAITHGYRLLTCPDDDVRETAWDTLKTAAHLKIRRVPDMEDIAAYLNGSTDGDMIQTNGDVPSLWSRVRSCTRALRRIVNIEWWWCATLGEMQIIVPRPGKEPDQARAHPAARSQVCNLVKTALRASYLHRLLQKPDQGKVFSVTSLRSESNHMMKTGLYTRFADWRFLHRARLDTVPLNGTRRFGAGSKRCRRCNNVLETLPHVLSHCKYVSRPRALRHHNVVHRLARGTPVIAGTITEDKAIPGTSGQLRPDLVVTDVSTRSISIVDVAIVFENKFEAFQLARAGKIEKYDPLAAELRSQGWNVYLDAFVVGALGGWDPANDAVIRQLRISKSYAKLMKKLVISDTIRWSRDIYVEFISGKRQYREPIPMAPPPSRP

SEQ ID NO: 14782 - protein, 959 aa, Drepana arcuata
MSGSCIDNGVQSSVVPNSVSANNLVQCPQCAQVRYFKGQRGLRIHLGKAHKSHVAPSSIRTPSQINNTLFCDKLSRLKNSVPLIKRIPRAARVSVTNVLSKLIRDTVSDNTTLAWEQLLILPYSVLHVVKNTSSSSSSLTSNIKMNCRNPLDPAVLNYKKFEMSDNKYRHVESKLSDGDVKGAARLLFSNDTLAANDADTLDALRSKHPLPAFTSNPPDSPQPSDVSLQVSSGDVLDAVLSFRSGSAGGLDGLSPQHLKDLLVGTPGESSEALLKALTDLINLMLSGKVPGNVLDVLYGANLCALAKKDGGIRPIAVGTTYRRLAAKLCCKSAVLDLATYFRPKQLGFGSKGGCEAAVHSLRTLLYNRGAEVVLKVDVKNAFNSVDRGTLLTQVKQKIPSAFNFMWQCYSSPTKLMYQDNLINSSVGCQQGDPLGPAIFSLAIHPIISKLNSKFNIWYLDDGTLGGDVSSVLSDLQLIISEFKSIGLELNFSKCELFISDLTSEIERSTISKFNSLAPNINILDKNSLRILGSPIFDEAFPSFADDQIKNFQKSSDHLVKIKSHMAYFIIRHCLFAPKFTYVLRSSHMWKDRKILHSLDDTIRSTLSSVLNISFDDRSWSQASLPIRFGGLGIRKLSDVALPAFLASVHGVHDLIGNILITSLCGCEVSHLAEARDAWIMACPNTDVPLSPHIQKQWDEPISRLAYNALLDSAFNSADRARLLAIARWESGLWLHALPSFNIGTLLDDATFRLCASLRLGAKCIVPHRCHCGDFVNDSGHHGLSCISSAGRISRHSSINDLIRRALVRAGVPAVLEPVGLARGDGRRPDGMSLMPWRMGRPLVWDATCVDTLAPSHLSDTSVAAGAAAAQQECLKRRKYACLGSGYIFAAFAAETLGPWGPEAHHLFKEVSRRLVETSRDRLEHISLRESALLSSVAMLLVFLARYLGIPIWDKYFICK

SEQ ID NO: 14783 - protein, 960 aa, Thyatira batis
MNNSCDCPNVLVESSQQPRYMSLENLVQCPQCPQPRFFKGQRGLKIHHAKVHQTKDGLPNHSTIPFQNSNTIPFHDVISNLKHSSPLIKRIPRGARISVAKKLSEYIKKLISENSKSAWEHLLLFPYSILHVQDPKKTLTANIKNNCINPIQIPNLNSPTFRYNSSISKLVESKISDGDIKGAARVLFSSDILAPNDVNTLNALKDKHPLAAANVDFPDPPLPLDSTLQVTAQDVLGCVMSFSNGSAGGIDGLTPQHLKDLLQTTSGEAAETLLKDMTDLINLMLSGKVNEGVLDILYGANLCALKKKDGGIRPIAVGTTYRRLAAKVCCRAAVGLTSYFQPVQLGFGSRGGCEAAVHSLRTFLSVRQGDVLLKVDVKNAFNSVNRSTLLKEIKDKIPSCFNFLWQCYSSPTKLMYQNNLLESAVGCQQGDPLGPAIFSLAIHPIIKNLNSKLNVWYLDDGTLGGEADAVLSDLNYLVQELQKVGLELNYSKCELFLSDSIDYQTKTNIITDFNLLAPNLKVIDKSSLRLLGSPIFEEAFSPFIQDQIQNFNHCLDRIDKIHTHMAYFIIRHCLFVPKFTYVLRSSHMWQRQDILINLDTIIKNTLTTILNINLDDRSWTQASLPIRFGGLGIRKISSISLPAFLSSVHSVRNLIGNILTPSLGDFEVSFLSEARNAWVMACPSTDFPSSNESQKLWDEPLSRLSYGSLLQSSGNSAERARLIAVSKWESGLWLNALPSTNTGTLMDNTSFNICVCLRLGTACNVPHRCPCGENVGELGHHGLSCSRSAGRLSRHAALNDLIRRALVTAGVPAVLEPNGLVRDDGRRPDGMSLVPWKMGRPLVWDATCVDTLAPSHLPDTSVAPGAAAAQQECLKRRKYVSLSRTNIFSAFGVETLGPWGPEAHRLFKEVSHRLVEASRDRRAGTYFAQRIAIAIQRGNAASILGTLPQGSDLGHIFYLF

SEQ ID NO: 14784 - protein, 960 aa, Thyatira batis
MNNSCDCPNVLVESSQQPRYMSLENLVQCPQCPQPRFFKGQRGLKIHHAKVHQTKDGLPNHSTIPFQNSNTIPFHDVISNLKHSSPLIKRIPRGARISVAKKLSEYIKKLISENSKSAWEHLLLFPYSILHVQDPKKTLTANIKNNCINPIQIPNLNSPTFRYNSSISKLVESKISDGDIKGAARVLFSSDILAPNDVNTLNALKDKHPLAAANVDFPDPPLPLDSTLQVTAQDVLGCVMSFSNGSAGGIDGLTPQHLKDLLQTTSGEAAETLLKDMTDLINLMLSGKVNEGVLDILYGANLCALKKKDGGIRPIAVGTTYRRLAAKVCCRAAVGLTSYFQPVLLGFGSRGGCEAAVHSLRTFLSVRQGDVLLKVDVKNAFNSVNRSTLLKEIKDKIPSCFNFLWQCYSSPTKLMYQNNLLESAVGCQQGDPLGPAIFSLAIHPIIKNLNSKLNIWYLDDGTLGGEADAVLSDLNYLVQELQKVGLELNYSKCELFLSDSIDYQTKTNIITDFNLLAPNLKVIDKSSLRLLGSPIFEEAFSPFIQDQIQNFNHCLDRIDKIHTHMAYFIIRHCLFVPKFTYVLRSSHMWQRQDILINLDTIIKNTLTTILNINLDDRSWTQASLPIRFGGLGIRKISSISLPAFLSSVHSVRNLIGNILTPSLGDFEVSFLSEARNAWVMACPSTDFPSSNESQKLWDEPLSRLSYGSLLQSSGNSAERARLIAVSKWESGLWLNALPSTNTGTLMDNTSFNICVCLRLGTACNVPHRCPCGENVGELGHHGLSCSRSAGRLSRHAALNDLIRRALVTAGVPAVLEPNGLVRDDGRRPDGMSLVPWKMGRPLVWDATCVDTLAPSHLPDTSVAPGAAAAQQECLKRRKYVSLSRTNIFSAFGVETLGPWGPEAHRLFKEVSHRLVEASRDRRAATYFAQRIAIAIQRGNAASILGTLPHGSDLGHIFYLF

SEQ ID NO: 14785 - protein, 962 aa, Thyatira batis
MQLFHDGNSYAGTYLNMSGKIVEIIWYWHIAILSLSIHFSSLIIFCDVLRWNTLLISVYITNHSTIPFQNSNTIPFHDVISNLKHSSPLIKRIPRGARISVAKKLSEYIKKLISENSKSAWEHLLLFPYSILHVQDPKKTLTANIKNNCINPIQIPNLNSPTFRYNSSISKLVESKISDGDIKGAARVLFSSDILAPNDVNTLNALKDKHPLAAANVDFPDPPLPLDSTLQVTAQDVLGCVMSFSNGSAGGIDGLTPQHLKDLLQTTSGEAAETLLKDMTDLINLMLSGKVNEGVLDILYGANLCALKKKDGGIRPIAVGTTYRRLAAKVCCRAAVGLTSYFQPVQLGFGSRGGCEAAVHSLRTFLSVRQGDVLLKVDVKNAFNSVNRSTLLKEIKDKIPSCFNFLWQCYSSPTKLMYQNNLLESAVGCQQGDPLGPAIFSLAIHPIIKNLNSKLNVWYLDDGTLGGEADAVLSDLNYLVQELQKVGLELNYSKCELFLSDSIDYQTKTNIITDFNLLAPNLKVIDKSSLRLLGSPIFEEAFSPFIQDQIQNFNHCLDRIDKIHTHMAYFIIRHCLFVPKFTYVLRSSHMWQRQDILINLDTIIKNTLTTILNINLDDRSWTQASLPIRFGGLGIRKISSISLPAFLSSVHSVRNLIGNILTPSLGDFEVSFLSEARNAWVMACPSTDFPSSNESQKLWDEPLSRLSYGSLLQSSGNSAERARLIAVSKWESGLWLNALPSTNTGTLMDNTSFNICVCLRLGTACNVPHRCPCGENVGELGHHGLSCSRSAGRLSRHAALNDLIRRALVTAGVPAVLEPNGLVRDDGRRPDGMSLVPWKMGRPLVWDATCVDTLAPSHLPDTSVAPGAAAAQQECLKRRKYVSLSRTNIFSAFGVETLGPWGPEAHRLFKEVSHRLVEASRDRRAGTYFAQRIAIAIQRGNAASILGTLPQGSDLGHIFYLF

SEQ ID NO: 14786 - protein, 721 aa, Thyatira batis
MSFSNGSAGGIDGLTPQHLKDLLQTTSGEAAETLLKDMTDLINLMLSGKVNEGVLDILYGANLCALKKKDGGIRPIAVGTTYRRLAAKVCCRAAVGLTSYFQPVQLGFGSRGGCEAAVHSLRTFLSVRQGDVLLKVDVKNAFNSVNRSTLLKEIKDKIPSCFNFLWQCYSSPTKLMYQNNLLESAVGCQQGDPLGPAIFSLAIHPIIKNLNSKLNVWYLDDGTLGGEADAVLSDLNYLVQELQKVGLELNYSKCELFLSDSIDYQTKTNIITDFNLLAPNLKVIDKSSLRLLGSPIFEEAFSPFIQDQIQNFNHCLDRIDKIHTHMAYFIIRHCLFVPKFTYVLRSSHMWQRQDILINLDTIIKNTLTTILNINLDDRSWTQASLPIRFGGLGIRKISSISLPAFLSSVHSVRNLIGNILTPSLGDFEVSFLSEARNAWVMACPSTDFPSSNESQKLWDEPLSRLSYGSLLQSSGNSAERARLIAVSKWESGLWLNALPSTNTGTLMDNTSFNICVCLRLGTACNVPHRCPCGENVGELGHHGLSCSRSAGRLSRHAALNDLIRRALVTAGVPAVLEPNGLVRDDGRRPDGMSLVPWKMGRPLVWDATCVDTLAPSHLPDTSVAPGAAAAQQECLKRRKYVSLSRTNIFSAFGVETLGPWGPEAHRLFKEVSHRLVEASRDRRAGTYFAQRIAIAIQRGNAASILGTLPQGSDLGHIFYLF

SEQ ID NO: 14787 - protein, 1167 aa, Pterostichus madidus
MSSRPHSSLLVAALFHLQMLCGSLPTLGAVHLLQRRCRLKGSSLGASPSGPPDRRMAQPAENAGGTMVRGLHPQYTRNLVHAGTRKIIKISRTQAGTPAPGPAGTSSGHQGNPVTTSTSLPNAMNQPVSTTPTVDHQCANCAKSFKTLRGLGVHRTNKHREVVNEAIVLPSKKVRWSPEELRLLAREEALATVDGVAYINQHLMTRVPDRSLESIKGVRRRKDYKDMVLAALTDARTGLSPRRPPPTRAATAVPSTSAAPSPPPSPPSPGPSAGAEIDDDQDPLRTAVQKMADLIREAGTKSHRAQQLVAVAEAALQGHDPNPGIMAWLQSTIPPPAARPGQRGRPPPPSGQHQTNRPRQRVETRRNRRRRDYARIQELWKTNQSRAAHEAMSGKRFQARHSLEELQPFWSDMFARPSKGYPLPGRSEVQPDPALASVWDPISNQETEQHQVPSHSAAGPDGITASRWKAVPPLIRCLLYNVVLHNGGFPPELLVTRTIFLPKTEEPSSPAEYRPISVGSVIVRQLHRILAVRLQKTSPLDDRQRGFVSSDGCAENTAILDAVIYASRKHLRELHVGVLDITKAFDSLSHDALLATVIRKGLPPGFNSYVARLYHQSATVLEARGQRTAPVEVNQGVRQGDPLSPLLFNIAIDTILAALPKDVGFQLGPERVTALAFADDLVLVASSKWGLQTALTRAEQEAGKMGFTFSTTKSSTLSYIPAGHIKKMKVITDPHFSIREGLLPAVQVLDRWKYLGVEYDTRGAVSIEEDLTEVLNNISRAPLKPQQRIKIVTSYLVPRFYYSMVLGKVTAGRLLALDRQLRKAIRQWLRFPHDVPEAYFHTAPVDGGLGVPSLLHTIPALTLARMIKLSVSPYALARVAFDSERIQSKIRWARAQVKHQGLNPDAPKATARQRLMATRLHQATDGVELSESAKSALSSHWVSNSSHAIPGRDYVQYHHIRVNTIPTRMRTSRGEQRRTKRTRCRAGCRASETAAHVIQRCWRTHGGRILRHNAVAKTVAHALRDEGWQVTEEPHINTSKGLRKPDIVACRGSEAVIVDAQIVTGAVALSTSHKKKKAYYADDTEVINAVAANFKLPTTQVATTTCTITWRGVWSEDSHRDLNALGLRDPMLRSLTTRVLQGSHTNWSRFMTMTARTPARRQRQGIG

SEQ ID NO: 14788 - protein, 965 aa, Pterostichus madidus
MTRVPDRSLESIKGVRRRKDYKDMVLAALTDARTGLSPRRPTPTRAATAVPSTSAAPSPPPSPPSPGLSAGAEIDDDQDPLRTAVQKMADLIREAGTKSHRAQQLVAVAEAALQGHDPNPGIMAWLQSTIPPPAARSGQRGRPPPPSGQHQTNNRPRRHVETRRNRRRRDYARIQELWKTNQSRAAHEAMSGKRFQARHSLEELQPFWSDMFARPSKGYPLPGRGEVQPDPALASVWDPISNQETEQHQVPTHSAAGPDGITASRWKAVPPLIRCLLFNIVFHNGGFPPELLVTRTIFLPKTEEPSSPAEYRPISVGSVVVRQLHRILAVRLQKTSPLDDRQRGFVSSDGCAENTAILDAVIYASRKHLRELHVGVLDNTKAFDSLSHDALLATVIRKGLPPGFNSYVARLYHQSATVLEARGQRTAPVEVNQGVRQGDPLSPLLFNIAIDTILAALTKDVGFQLGPERVTALAFADDLVLVASSKWGLQTALTRAEQEAGKMGFVFSTSKSSTLSYIPAGHIKKMKVITDPHFSIREGLLPAVQVLDRWKYLGVEYDSRGAVSIEEDLTVVLNNITRAPLKPQQRIKIVTSYLVPRFYYSMVLGSVTAGRFLVLDRQLRKAIRQRLRFPHDVPEAYFHAAPVDGGLGVPSLLHTIPALTLSRMMKLSVSPYALARVAFDSERIQSKIRWARAQVKNQGLNPDAPKATARQRFWAKRLYKATDGVELSESAKSALSSHWVSNSSHAIPGRDYVQYHHIRINTIPTRMRTSRGEQRRTKRTRCRAGCRASETAAHVIQRCWRTHGGRILRHNAVAKTVAHALRDEGWQVTEEPHINTSKGLRKPDIVACRGSEAVIVDAQIVTGAVALSTSHKRKKAYYAGDTEVINAVAANFKLPASQVATTTCTISWRGVWSEDSHRDLNALGLRDPMLRSLTTRVLQGSHTNWNRFMTMTARTSARRQRQGIG

SEQ ID NO: 14789 - protein, 1167 aa, Pterostichus madidus
MSSRPHSSLLVAALFHLQMLCGSLPTLGAVHLLQRRCRLKGSSLGASPSGPPDRRMAQPAENAGGTMVRGLHPQYTRNLVHAGTRKIIKISRTQAGTPAPGPAGTSSGHQGNPVTTSTSLPNAMNQPVSTTPTVDHQCANCAKSFKTLRGLGVHRTNKHREVVNEAIVLPSKKVRWSPEELRLLAREEALATVDGVAYINQHLMTRVPDRSLESIKGVRRRKDYKDMVLAALTDARTGLSPRRPPPTRAATAVPSTSAAPSPPPSPPSPGPSAGAEIDDDQDPLRTAVQKMADLIREAGTKSHRAQQLVAVAEAALQGHDPNPGIMAWLQSTIPPPAARPGQRGRPPPPSGQHQTNRPRQRVETRRNRRRRDYARIQELWKTNQSRAAHEAMSGKRFQARHSLEELQPFWSDMFARPSKGYPLPGRSEVQPDPALASVWDPISNQETEQHQVPSHSAAGPDGITASRWKAVPPLIRCLLYNVVLHNGGFPPELLVTRTIFLPKTEEPSSPAEYRPISVGSVIVRQLHRILAVRLQKTSPLDDRQRGFVSSDGCAENTAILDAVIYASRKHLRELHVGVLDITKAFDSLSHDALLATVIRKGLPPGFNSYVARLYHQSATVLEARGQRTAPVEVNQGVRQGDPLSPLLFNIAIDTILAALPKDVGFQLGPERVTALAFADDLVLVASSKWGLQTALTRAEQEAGKMGFTFSTTKSSTLSYIPAGHIKKMKVITDPHFSIREGLLPAVQVLDRWKYLGVEYDTRGAVSIEEDLTEVLNNISRAPLKPQQRIKIVTSYLVPRFYYSMVLGKVTAGRLLALDRQLRKAIRQWLRFPHDVPEAYFHTAPVDGGLGVPSLLHTIPALTLARMIKLSVSPYALARVAFDSERIQSKIRWARAQVKHQGLNPDAPKATARQRLMATRLHQATDGVELSESAKSALSSHWVSNSSHAIPGRDYVQYHHIRVNTIPTRMRTSRGEQRRTKRTRCRAGCRASETAAHVIQRCWRTHGGRILRHNAVAKTVAHALRDEGWQVTEEPHINTSKGLRKPDIVACRGSEAVIVDAQIVTGAVALSTSHKRKKAYYADDTEVINAVAANFKLPTTQVATTTCTITWRGVWSEDSHRDLNALGLRDPMLRSLTTRVLQGSHTNWTRFMAMTARTPARRQRQGIG

SEQ ID NO: 14790 - protein, 1188 aa, Pristionchus arcanus
MNCHGSELEPYGSIDSSVIEYQLAGTSRVPKRKHRENSRGGPETTDRKTTPPKRQCGRGCQVDGPVQNNHSTTQGGDPALANTQNTNTEGTDPTSNKTDNSLAPERQDSEGEDPNRNTEQTNGEPKKRSPETKAFLKQFKANYCKAKQNQWRKPLLRTDRLSNELVENANYAIETVTAKNQGEPLATRLKALNAAVYAAGVTVNQIIRAPLWDKRIAMNRLVNERVKWIERHKKALLKLENDPGATTSYAMRLGRRLNLVSKTSVGITAEIRDLIEIKTEQVRVTKKTERTHTVRRMGAKGALHPRTQTEGVIPVEEVKNYWTPIIGREKTFTMTSEHQAWKEDVSKRVNSSENVRPWEEINVEETLKKIKLWKAPGPDGIQAFWWLRLKTAKESLLELTELLYRYPTKVPQWYCKGRVILIRKSETEPAEDPGNYRPITCLNTCYKTLTALVAKAVKHRVKEFIPKEQLALAEKVWGCVQAQAMDQAVCADATRREKELYMLWVDYSKAFDSVSHVAIRWVLKQMGVPERMRQLIKCLMAQWAVKYEGRDGGKVVRSTTCRVRNGVLQGDSLSPLLFCLAIAPVSHWLRNNVEPYVTGPKIRSEDPYRMSHIYYMDDLKVYTGSEFMLEKACNGIKRLSAAIGLELNPKKCAVRTAKRNQKMMGRDKDPASSKKLGDAWMSLEEMGIPFLRGSETYKYLGLEQTVGCSLNEALKRVCAKARARAKTIFSDEHLTVRQKVDAFNSGAIPVIGYVVGLMTFGNGQGQSVKKQCRDFDDKVRNEIIVPSMLRIENSCKNRPYVPREEGGLGIMRAEAAYDYGVVAQWAYCAGNAELDWIYQLADLFSNQKDQRSKRRSFISDFQKVQKKLGLETVSRTNLAVIKIGDEEIWDHRIAAKRLRRMVKQKHIDIQIEGWMSKETASRVRRKVIGIGDKDSYLTKDTFLWLERGWVTNTVMQNALALQENRIISLKSTVSRKRKQGSTLCRYGCGKEETDAHITSECGKYKSSLMNDRHDDVAAVVYHALRKKYGLKRVSTPKESDENDKVRIRWDTPVHVQEKGIISYKPDILVEDLVANKTYIVEVGVSWYAQIPRTEAWKELKYSYNGCVRWVPNLEDIPRGKNIRDGLMKAKKGWVEVIPLVIGVTGECTPKMKKGLKDLGLPGVNSLIESMQRKAVLGTHRLLAAHMAG

SEQ ID NO: 14791 - protein, 1241 aa, Heligmosomoides polygyrus
MRSGNPRLLRSRGPVPRLGENPQMQSSQASGLTSQEPSLGLTTTTPAVGECLTRNSRTKGVAWSPREVLRLSQLVLTNCDTRGRKQWVNIASAWELARSADEPVRTVPSLTKAYYKFVKPTEHMVAPVQQDVTGAPQTAEMAVPYEVAIPPCEQPPAVPEAASGPLYVDLEDASEQAVANTTDELKAAMAAEFRREYRRSIMSLDRQPLRRPEGEIPKRTLRIGNEILAEELQRVNAKSLTSLNAAVHAIAKVIAARVRSDDAERLRPQKERLLEAVQQRNTLIRFISILTFELRRRTAVTEGVRGSRPRPTAAYRTVATLHGIARTHELRRLLIRFKDELNIVRLEVNTLEDAKQRYLQRRRGAPPVAREPRAVGVSVPVDEVREHWKPIVGVRQPFTNTTELSEWAANVRRDAGSRSANSPSTCLSEADWKNLFSRVKPWKVPGPDGIQGFWWKHLPEAKNRLMMWCLRALHRPRDLPRWLCRGRVALIPKGKLETPGPGDFRPIACLNTCYKVLTAMLAHLVTESVGDRFPREQIALRKGVWGCTHAHILDQTVCKDAIQHRAELHMLWVDMTKAFDSVSHDAIKWTLSQWGVPYEVRRLLATIMSKQSVRYFGYQNGKSVKSAPLEIRNGLMQGDTLSPLLFCLAIAPISDWLHRNVTPFRLRTQTGSGPGVDDSLTIGHIFYMDDLKVYTTSRGDLLKAKDGIRQVAQQLGLRMNPDKCAVNSLNGPAGGDVGDMGEIPVLGANSLYKYLGAEQNTLVAMADVWQRVQVGASAASRRLWLSNLTVRQKVDGYNQIVLPKLKYAISCVIFGVGRFDSLRKSARDFDMETRKLLAESKTRFKCSCTSRLYVSKANGGLGLKSVEEELEHTIVYTWCYLASNPDFIIPYTLATGLERRSKRSLTSDFQKITRDNGIQSQVTRTPLAHIQVNGRDYTAATPAARAISCLIHERWSNTHLQNWKSKEVASRVLADREGQPDICLRDSFLWSMKGWVCSHVLRNVWSVQECSLRTKASASGRHASSSGDQMCRMCHKMRETAEHIVSVCEKWRTNVMVERHDDVARVLYYSLKRKYDLCSVKNNTRLPHVVDNDYVEIHWNMPIVTDEHLVHNRPDIMVWDKREKRIWIIEISVSWYTRVSRQERRKLHKYGTNSTLAEETAVDDFYPGPNLRAALQRERKCRVDVIPIVMGTCGECTTNLRRHVNSLKLPDKTDWLIEKLERNAVLGTNRLVKCHLANTDV

SEQ ID NO: 14792 - protein, 1153 aa, Ormyrus pomaceus
MEENFIEASEAAGSNTPPNGPVVVEYNITAMRGGRSARGQKHPNPREASATNSASNVIFDHEEIRVSAIAVEQMNCPICLKNNLRLICLSAKDLEKHVKEKHKAIKLSWECRLCKKVYKTAHGLRIHGSHCKGEEEEQELPFKCSECGSSYSTQIGLSQHKRFKHPAVRNLERAEQAQGTGRRGRLPSLVTREEFDRILELEKEFEGQRQINSKIQAEFPHLTCKQISDLRRRKRPETVQPEIDTGSVADQDASSSSEEEFMDASEDGVMSEERAPESAEWKIALERAVQEPVEVDDLWRNIHEQIAQASTNRCDGEHLDRLCDEIKNSLLKESEPPQVPTRKRRKKGTKATRAQRKRYFFSRCQDLYNKCPKKLADLVVANDFSLLERSEAPNTEGVRKLYEELWSKEGPTDISFMPSGSVDIRTENVFSPLQVREVQNKIRSIATNSAPGLDGVKKSHLTGKGVALVLAKFFNLLLQHQYFPKAWRKNRTTLIPKAGKDKGEVKNWRPLTIGSMVGRIYSALLDKRLRGSIRQNERQKGFSDENGCYINVSTLNAAMRAAKNQGGILGITDLEKAFDTVPHRAIYKALMRKGISETVASYIASMYEDCTTTIRTADGEIHIQLRRGVKQGDPLSPLLFNLCIEPLIEEIQNNTEGIEIEPGVKVAAMAFADDIVLLARDRETAHVQFMRAHKYLEKLGMRLSLEKCAVVQYISRAKTFYTKDPNIRVGNTKISAVEADETFKYLGAKIKPWQGLISDFELHTLEDLISRVKRLALKPLQKIELLRIYLLPKFVYGLVVKPPSVVTLREIDRVIRKSVKEILHIHECTCNEFLYTPKRSGGMGLPEIEQLVLIAALRNGLKAMEGTDTITLAAMQTEEKQKELQKYARLLRINWPTNSEEVSRYKNKMKNGYLKKWAQYKCQGQGVKEFDNDPVANEWLKRPSLMKPSLVSKAIQLRTDTAATRMAIRRDPLKKRTIPAECRKCGQGNENLPHILGQCINTKAARIRRHDEIKDFIKERVGRKFAVLDEPRLYSQERLYKPDLVIDMNEAGALIVDVTVRFEKNNRLAEAKKEKREKYNALKLVVGTELRRTKVEVAPIVVGTRGALPRSTRIQLEKLGITSKQDWLTISMIALRNAIVIVDKFNDYDADVE

SEQ ID NO: 14793 - protein, 991 aa, Dicyema japonicum
MLNKSLIEYTSNNIPSSIEDISCLIYSAQCVYQQITMKEPFKSNWRQRIQKKIEILAENNLVISNFFMSTITGEEKKKAVDILCSYNYKKCKRGEFERISTAINDQIRILNKKLSIADSRRQYGTDNRNFELNRRSFYRKLKSDSDIECIDGFDTSECFKFWTEVWEKRDKNDLSFGMNKRITGVEQQESDINDNFISNLIEYLPNWKAPGVDCVYNFFIKKLDSLHQYLFKEIRDIISGKSQPKRWFYTGITYLIPKKKDSIDPKDLRPITCMPCLYKLVTKSVNEKIAIYADTYNLITEYQLGTKRHCQGAKELALLNRCVNKAHENKLFCAWIDVRKAFDSVSHEYLVKILENSGLPEWITKFVISIIPNWRVSLRLGKKILGTINIERGILQGDSLSPQLFVFVLDPLSRMLSAKYPSMSINTAESNSFTFSANHFLFIDDLKLLAKEEGTLACMMKDVNAYFKLSGLEKNFEKSATNSYLLSNDAKLMDGVDSYRYLGVLEDNSSKVVKEVVLKNIKEEVQDRIEKLSKTKLNSVNLFKAINEHALSLFNYYIGLLEMEPGEYEEFDRLVRKLLMRLGIHMKPASKERLYLPRSTLGRGLISVTFKSEKMLLEFKTSLERRKKISLRKAGILWAEQLRKTHMATITEFLRVKYQMGPTMDIVENLKSSQINSLLSIIKKKSLHSILFESLENDTFDIKSSSTWITNGNISPKSEAMFFLLQDRNIFFRDLGLKCPHCNSSKKTVDHLATRCNRMLNSDYTRRHNEIVKCIHMHLSRKFGFKKSKKLKSHSIQSIITNQHAEIRVDTTIPTESKVQYNKPDIFLYDKKMNQIWLIEIGVTSMDNLKAVEVEKLHKYDILASELEIIYKAKVKILPIVLTWDGIVSRYFKSYMDIIGITTITRAYIQTIALKKTLESMLVEYKHGFEQITMAINNNWEMMKNPLTGCNLGKRRRDTDKELDDPENRKGSGDTTERVPVGAGLVGETRS

SEQ ID NO: 14794 - protein, 966 aa, Dicyema japonicum
MDKAPDLALYNKTFEELLSQIDANSSKKIDERRQTRKIPFQFVNDNLIEMLNKSLIEYTSNNIPSSIEDISCLIYSAQCVYQQITMKEPFKSNWRQRIQKKIEILAENNLVISNFFMSTITGEEKKKAVDILCSYNYKKCKRGEFERISTAINDQIRILNKKLSIADSRRQYGTDNRNFELNRRSFYRKLKSDSDIECIDGFDTSECFKFWTEVWEKRDKNDLSFGMNKRITGVEQQESDINDNFISNLIEYLPNWKAPGVDCVYNFFIKKLDSLHQYLFKEIRDIISGKSQPKRWFYTGITYLIPKKKNSVDPKDLRPITCMPCLYKLVTKCVNEKIAQYAETYDLITEYQLGTKRHCQGAKELALLNRCVNKAHENKLFCAWIDVRKAFDSVSHEYLVKILENSGLPEWITKFVISIIPNWRVSLRLGKKILGTINIERGILQGDSLSPQLFVFVLDPLSRMLSAKYPSMSINTAESNSFTFSANHFLFIDDLKLLAKEEGTLACMMKDVNAYFKLSGLEKNFEKSATNSYLLSNDAKLMDGVDSYRYLGVLEDNSSKVVKEVVLKNIKEEVQDRIEKLSKTKLNSVNLFKAINEHALSLFNYYIGLLEMEPGEYEEFDRLVRKLLMRLGIHMKPASKERLYLPRSTLGRGLISVTFKSEKMLLEFKTSLERRKKISLRKAGILWAEQLRKTHMATITEFLRVKYQMGPTIDIVENLKSSQINSLLSIIKKKSLHSILFESLENDTFDIKSSSTWITNGNISPKSEAMFFLLQDRNIFFRDLGLKCPHCNSSKKTVDHLATRCNRMLNSDYTRRHNEIVKCIHMHLSRKFGFKKSKKLKSHSIQSIITNQHAEIRVDTTIPTESKVQYNKPDIFLYDKKMNQIWLIEIGVTSMDNLKAVEVEKLHKYDILASELEIIYIAKVKILPIVITWDGIVSRYFKSYMDIIEITTITRAYIQTIALKKT

SEQ ID NO: 14795 - protein, 1171 aa, Dicyema japonicum
MMVGFSQSEKVIPMDASTEYLINGVRESVDLPVHGHFNAQVNYSNGPQQTSSTLCSLNAICDSIDSSNPGEWISSLLTCVKDRLKRVPRGGWPFIANYFNSKFGKKKSVYELKRLVSCHQNNSTIPKIGIKMDKAPDLALYNKTFEELLSQIDANSSKKIDERRQTRKIPFQFVNDNLIEMLNKSLIEYTSNNIPSSIEDISCLIYSAQCVYQQITMKEPFKSNWRQRIQKKIEILAENNLVISNFFMSTITGEEKKKAVDILCSYNYKKCKRGEFERISTAINDQIRILNKKLSIADSRRQYGTDNRNFELNRRSFYRKLKSDSDIECIDGFDTSECFKFWTEVWEKRDKNDLSFGMNKRITGVEQQESDINDNFISNLIEYLPNWKAPGVDCVYNFFIKKLDSLHQYLFKEIRDIISGKSQPKRWFYTGITYLIPKKKNSVDPKDLRPITCMPCLYKLVTKCVNEKIAQYAETYDLITEYQLGTKRHCQGAKELALLNRCVNKAHENKLFCAWIDVRKAFDSVSHEYLVKILENSGLPEWITKFVISIIPNWRVSLRLGKKILGTINIERGILQGDSLSPQLFVFVLDPLSRMLSAKYPSMSINTAESNSFTFSANHFLFIDDLKLLAKEEGTLACMMKDVNAYFKLSGLEKNFEKSATNSYLLSNDAKLMDGVDSYRYLGVLEDNSSKVVKEVVLKNIKEEVQDRIEKLSKTKLNSVNLFKAINEHALSLFNYYIGLLEMEPGEYEEFDRLVRKLLMRLGIHMKPASKERLYLPRSTLGRGLISVTFKSEKMLLEFKTSLERRKKISLRKAGILWAEQLRKTHMATITEFLRVKYQMGPTIDIVENLKSSQINSLLSIIKKKSLHSILFESLENDTFDIKSSSTWITNGNISPKSEAMFFLLQDRNIFFRDLGLKCPHCNSSKKTVDHLATRCNRMLNSDYTRRHNEIVKCIHMHLSRKFGFKKSKKLKSHSIQSIITNQHAEIRVDTTIPTESKVQYNKPDIFLYDKKMNQIWLIEIGVTSMDNLKAVEVEKLHKYDILASELEIIYKAKVKILPIVLTWDGIVSRYFKSYMDIIGITTITRAYIQTIALKKTLESMLVEYKHGFEQITMAINNNWEMMKNPFTGCNLGKKRRDTDKELDDPENRKGSGDTTKRVPVGAGLVGETRS

SEQ ID NO: 14796 - protein, 1203 aa, Teleogryllus occipitalis
MSSALRKSHAGDRPSQGRAAVSSTGAAVRNMLPVQVESGEPPQQLRRRGAAPPRATANLDIASQDAAPGRSLGNPRGSPTASGNPSQRMQWTRELNMSVMRAYYRSTKGETECEGFRRRLLTEWRKIYPESALNEQRVCSQLNSIRRRKVFSDAELNLLKTEVRLELTNEVVLEQQVNENEQTVHENEQHAVVFIPQLEYEMVDKSLQDIYEATKLHYQGISLDLRPKIPKLKCSANVYEVVGKMNQIIAPNISEATSLEDVAGLVHCAAIATCQHLGYKVRVGNGTSLSKKPYERQNPPAWLKKIENQIAQARRDISHIAEYFRDKGGISKMVRATIRSILRRLGIKRTHKDLESKLKVEDERLRQRIAALGARIRRYNEAARRKKENSLFSNNQKGFYRYLESSGANDNDINPPSASAMTDFWSQIWSTPKQHFDEAYWIRQEEEACHNIPEMNGVVISTEDVKRSIKRTHNWKAPGVDGIHNFWWKYLTCTHDILASQFQNILQGTSVLPEFCTMGVTFMLPKGENASCPENYRPITCLPTIYKVLTSIIATKLDEHLKENELLLPEQVGCRKGSRGCKELLIIDNIVSKHVKKKAHNLSVGWIDFRKAFDSIPHSWLQRTLQLYKVHPSIITFLTTCMNSWRTTLLVMRGKFSYQTDTLKICRGIFQGDSLSPLWFCLALNPLSRMLNASGYGYALKNPKKIISHQLYMDDLKLYAKGSEQLRSMLTLVESFSSSVCMDLGLEKCAVVHVKRGSVQNTENEPHLMEDLRIQELFGGDEYKYLGLQQLLGTADEKIRKQVERKVLSRVTKICKSCINSRNKFTGINTWALSAASHTFGVVKWSETSLQAFDRKVRTLLSKYRMHHPRSSTERLYLSRHHGGRGLLSLEVMCRQQEKQLRNYFTNNKSMTAICAQDHGYTPLKLLQEDHNPRVPKPVDRIEQWRSKELHGRFATALQSNSIDVKRSTEWLRTAGLFGETEGFVLAIQDQVVATNNYRRYIMKENISDKCRLCKKATESIQHICSGCSQLAQTDYLQRHNNVAKIIHQALAKRSDLIKESLPYYKYLPEQVLSNERTKILWDTPIVTDRTVEANKPDIVVFDKTTRRAIISDIAVPLDHNLLTTIAEKRRKYQPLSVELKNLYKLIEVDIVPVVISTNGLVAEDWRIVKEKLHLNEWHLRTMQKAVLLATTNIVRKVLSLNH

SEQ ID NO: 14797 - protein, 1203 aa, Teleogryllus occipitalis
MSSALRKSHAGDRPSQGHAAVSSTGAAVRNMLPVLVESGEPPQQLRRRGAAPPRATANLDIASQDAAPGRSLENPRGSPTSSGNPSQRMQWTRELNMSVMRAYYRSTKGETECEGFRRRFLTEWRKIYPESALNEQHVCSQLNSIRRRKVFSDAELNLLKTEVRLELTNEVVLEQQVNENEQKVHENEQHAVIFIPQLEYEMVDKSLQDIYEATKLHYQGISLDLRPKIPKLKCSANVYEVVGKMNQIIAPNISEATSLEDVAGLVHCAAIATCQHLGYKVRVGNGTSLSKKPYERQNPPAWLKKIENQIAQARRDISHIAEYFRDKGGISKMVRATIRSILRRLGIKRTHKDLESKLKVEEERLRQRIAALGARIRRYNEAARRKKENFLFSNNQKGFYRYLESRGANDNDINPPSASAMTDFWSQIWSTPKQHFDEAYWIRQEEEACHNIPEMNGGVISTEDVKRSIKRTHNWKAPGVDGIHNFWWKYLTCTHDILASQFQNILQGTSVLPEFCTMGVTFMLPKGGNAPCPENYRPITCLPTIYKVLTSIIATKLDEHLKENELLLPEQVGCRKGSRGCKELLIIDNIVSKHVKKKAHNLSVGWIDFRKAFDSIPHSWLQRTLQLYKVHPSIITFLTTCMNSWRTTLLVMRGKFSYQTDTLKVCRGIFQGDSLSPLWFCLALNPLSRMLNASGYGYALKNPKKIISHQLYMDDLKLYAKGSEQLRSMLTLVESFSSSVCMDLGLEKCAVVHVKRGSVQNTENEPHLMEDLRIQELFSGDEYKYLGLQQLLGTADEKIRKQVERKVLSRVTKICKSCINSRNKFTGINTWALSAASHTFGVVKWSETSLQAFDRKVRTLLSKYRMHHPRSSTERLYLSRHHGGRGLLSLEVMCRQQEKQLRNYFTNNKSMTAICTQDHGYTPLKLLQEDHNPRVLKPVDRIEQWRSKELHGRFATALQSNSIDVKRSTEWLRTAGLFGETEGFVLAIQDQVVATNNYRRYIMKENISDKCRLCKKATESIQHICSGCSQLAQTDYLQRHNNVAKIIHQALAKRSDMIKESLPYYKYLPEQVLSNERTKILWDTPIVTDRTVEANKPDIVVFDKTTRRAIIIDIAVPLDHNLLTTIAEKRRKYQPLSVELKNLYKLIEVDIVPVVISTNGLVAEDWRIVKEKLHLNEWHLRTMQKAVLLATTNIVRKVLSLNH

SEQ ID NO: 14798 - protein, 956 aa, Teleogryllus occipitalis
MNQIIAPNISEATSLEDVAGLVHCAAIATCQHLGYKVRVGNGTSLSKKPYERQNPPAWLKKIENQIAQARRDISHIAEYFRDKGGISKMVRATIRSILRRLGIKRTHKDLESKLKVEDERLRQRIAALGARIRRYNEAARRKKETSLFSNNQKGFYRYLESRGANDNDINPPSASAMTDFWSQIWSTPKQHFDEAYWIRQEEEACHNIPEMNGVVISTEDVKRSIKRTHNWKAPGVDGIHNFLWKYLTCTHDILASQFQNILQGTSVLPEFCTMGVTFMLSKGGNASRPENYRPIICLPTVYKFLTSIIATKLDEHLKENELLLPEQVGCRKGSRGCKELLIIDNIVSKHVKKKAHNLSVGWIDFRKAFDSIPHSWLYRTLQLYKVHPSIITFLTTCMNSWRTTLLVMRGKFSYQTDTLNICRGIFQGDSLSPLWFCLALNPLSRMLNASGYGYALKNPKKIISHQLYMDDLKLYAKGSEQLRSMLTLVESFSSSVCMDLGLEKCAVVHVKRGSVQNTENEPHLMEDLRIQELFSGDEYKYLGLQQLLGTADEKIRKQVERKVLSRVTKICKFCINSRNKFTGINTWAFSAASHTFGVVKWSETSLQAFDRKVRTLLSKYWMHHPRSSTERLYLSRHHGGRGLLSLEVMCRQQEKQLRNYFTNNKSMTAICAQDHGYTPLKLLQEDHSPRVPKPVDRIEQWRSKELHGRFATALQSNSIDVKRSTEWLRTAGLFGETEGFVLAIQDQVVATNNYKRYIMKENISDKCRLCKKATESIQYICSGCSQLAQTDYLQRHNNVAKIILQGLAKRSDLIKESLPYYKYLPEQVLSNERTKILWDTPIVTDRTVEANKPDIVVFDKTTRRAIIIDIAVPLDHNLLTTIAEKRRKYQPLSVVLKNLYKLIEVDIVPVAISTNGLVAEDWRIVKEKLHLNEWHLRTMQKAVLLATTNIVRRFSP

SEQ ID NO: 14799 - protein, 1203 aa, Teleogryllus occipitalis
MSSALRKSHAGDRPSQGRAAVSSTGAAVRNMLPVLVESGEPPQQLRRRGTAPPRATANLDIASQDAAPGRSLGNPRGSPTASGNPSQRIQWTRELNMSVMRAYYRSTKGETECEGFRRRLLTEWRKIYPESALNEQRVCSQLNSIRRRNVFSDRELNLLKTEVRLELTNEVVLEQQVNENEQTVHENEQHAVVFIPQLEYEMVDKSLQDIYEATKLHYQGISLDLRPKIPKLKCSANVYEVVGKMNQIIAPNISEATSLEDVAGLVHCAAIATCQHLGYKVRVGNGTSLSKKPYERQNPPAWLKKIENQIAQARRDISHIAEYFRDKGGISKMVRATIRSILRRLGIKRTHKDLESKLKVEDERLRQRIAALGARIRRYNEAARRKKENSLFSNNQKGFYRYLESRGANDNDINPPSASAMTDFWSQIWSTPKQHFDEAYWIRQEEEACHNIPEMNGVVISTEDVKRSIKRTHNWKAPGVDGIHNFWWKYLMCTHDILASQFQNILQGTSVLPEFCTMGVTFMLPKGGNASCPENYRPITCLPTIYKVLTSIIATKLDEHLKENELLLPEQVGCRKGSRGCKELLIIDNIVSKHVKKKAHNLSVGWIDFRKAFDSIPHSWLQRTLQLYKVHPSIITFLTTCMNSWRTTLLVKRGKFSYQTDTLKICRGIFQGDSLSPLWFCLALNPLSRMLNASGYGYALKNPKKIISHQLYMDDLKLYAKGTEQLRSMLTLVESFSSSVCMDLGLEKCAVVHVKRGSVQNTENEPHLMEDLRIQELFGGDEYKYLGLQQLLGTADEKIRKQVERKVLSRVTKICKSCINSRNKFTGINTWALSAASHTFGVVKWSETSLQAFDRKVRTLLSKYRMHHPRSSTERLYLSRHHGGRGLLSLEVMCRQQEKQLRNYFTNNKSMTAICAQDHGYTPLKLLQEDHNPRVPKPVDRIEQWRSKELHGRFATALQSNSIDVKRSTEWLRTAGLFGETEGFVLAIQDQVVATNNYRRYIMKENISDKCRLCKKATESIQHICSGCSQLAQTDYLQRHNNVAKIIHQALAKRSDLIKESLPYYKYLPEQVLSNERTKILWDTPIVTDRTVEANKPDIVVFDKTTCRAIIIDIAVPLDHNLLTTIAEKRRKYQPLSVELKNLYKLIEVDIVPVVISTNGLVAEDWRIVKEKLHLNEWHLRTMQKAVLLPTTNIVRKVLCLNH

SEQ ID NO: 14800 - protein, 1074 aa, Teleogryllus occipitalis
MDALDEQRVCSQLNSIRRRKVFSDAELNLLKTEVRLELTNEVVLEQQVNENEQTVHENEQHAVVFIPQLEYEMVDKSLQDIYEATKLHYQGISLDLRPKIPKLKCSANVYEVVGKMNQIIAPNISEATSLEDVAGLVHCAAIATCQHLGYKVRVGNGTSLSKKPYERQNPPAWLKKIENQIAQARRDISHIAEYFRDKGGISKMVRATIRSILRRLEIKRTHKDLESKLKVEDERLRQRIAALGARIRRYNEAARRKKENSLFSNNQKGFYRYLESRGANDNDINPPSASAMTDFWSQIWSTPKQHFDEAYWIRQEEEACHNIPEMNGVVISTEDVKRSIKRTHNWKAPGVDGIHNFWWKYLTCTHDILTSQFQNILQGTSVLPEFCTMGVTFMLPKGGNASCPENYRPITCLPTIYKVLTSIIATKLDEHLKENELLLPEQVGCRKGSRGCKELLIIDNIVSKHVKKKAHNLSVGWIDFRKAFDSIPHYWLQRTLQLYKVHPSIITFLTTCMNSWRTTLLVMRGKFSYQTDTLKICRGIFQGDSLSPLWFCLALNPLSRMLNASGYGYALKNPKKIISHQLYMDDLKLYAKGSEQLRSMLTLVESFSSSVCMDLGLEKCAVVHVKRGSVQNTENEPHLMEDLRIQELFGGDEYKYLGLQQLLGTADEKIRKQVERKVLSRVTKICKSCINSRNKFTGINTWALSAASHTFGVVKWSETSLQAFDRKVRTLLSKYRMHHPRSSTERLYLSRHHGGRGLLSLEVMCRQQEKQLRNYFTNNKSMTAICAQDHGYTPLKLLQEDHNPRVPKPVDRIEQWRSKELHGRFATALQSNSIDVKRSTEWLRTAGLFGETEGFVLAIQDQVVATNNYRRYIMKENISDKCRLCKKATESIQHICSGCSQLTQTDYLQRHNNVAKIIHQALAKRSDLIKESLPYYKYLPEQVLSNERTKILWDTPIVTDRTVEANKPDIVVFDKTTRRAIISDIAVPLDHNLLTTIAEKRRKYQPLSVELKNLYKLIEVDIVPVVISTNGLVAEDWRIVKENLHLNEWHLRTMQKAVLLATTNIVRKVLSLNH

SEQ ID NO: 14801 - protein, 1002 aa, Teleogryllus occipitalis
MVDKSLQDIYEATKLHYQGISLDLRPKIPKLKCSANVYEVVGKMNQIIAPNISEATSLEDVAGLVHCAAIATCQHLGYKVRVGNGTSLSKKPYERQNPPAWLKKIENQIAQARRDISHIAEYFRDKGGISKMVRATIRSILRRLGIKRTHKDLESKLKVKDERLRQRIAVLGARIRRYNEAARRKKENSLFSNNQKGFYRYLESRGANDNGINPPSASAMTDFWSQIWSTPKQHFDEAYWIRQEEEACHNIPEMNGVVISTEDVKRSIKRTHNWKAPGVDGIHNFWWKYLTCTHDILASQFQNILQGTSVLPEFCTMGVTFMLPKGGNASCPENYRPITCLPTIYKVLTSIIATKLDEHLKENELLLPEQVGCRKGSRGCKELLIIDNIVSKHVKKKAHNLSVGWIDFRKAFDSIPHSWLQRTLQLYKVHPSIITFLTTCMNSWRTTLLVMRGKFSYQTDTLKICRGIFQGDSLSPLWFCLALNPLSRMLNASGYGYALKNPKKIISHQLYMDDLKLYAKGSEQLRSMLTLVESFSSSVCMDLGLEKCAVVHVKRGSVQNTENEPHLMEDLRIQELFSGDEYKYLGLQQLLGTADEKIRKQVERKVLSRVTKICKSCINSRNKFTGINTWALSAASHTFGVVKWSETSLQAFDRKVRTLLSKYRMHHPRSSTERLYLSRHHGGRGLLSLEVMCRQQEKQLRNYFTNNKSMTAICAQDHGYTPLKLLQEDHNPRVPKPVDRIEQWRSKELHGRFATALQSNSIDVKRSTEWLRTAGLFGETEGFVLAIQDQVVATNNYRRYIMKENISDKCRLCKKATESIQHICSGCSQLAQTDYLQRHNNVAKIIHQALAKRSDLIKESLPYYKYLPEQVLSNERTKILWDTPIVTDRTVEANKPDIVVFDKTTRRAIIIDIAVPLDHNLLTTIAEKRRKYQPLSVELKNLYKLIEVDIVPVVISTNGLVAEDWRIVKEKLHLNEWHLRTMQKAVLLATTNIVRKVLSLNH

SEQ ID NO: 14802 - protein, 1002 aa, Teleogryllus occipitalis
MVDKSLKDIYEATKFHYQGILLDLRPKIPKLKCSANVYEVVCKMNQIIAPNISEATSLEDVAGLVHCAAIATCQHLGYKVRVGNGTSLSKKPYERQNPPAWLKKIENQIAQARRDISHIAEYFRDKGGISKMVRATIRSILRRLGIKRTHKDLESKLKVEDERLRQRIAALGARIRRYNEAARRKKENSLFSNNQKGFYRYLESRGANDNDINPPSASAMTDFWSQIWSTPKQHFDEAYWIRQEEEACHNIPEMNGVVISTEDVKRSIKRTHNWKAPGVDGIHNFWWKYLTCTHDILASQFQNILQGTSVLPEFCTMGVTFMLPKGGNASCPENYRPITCLPTIYKVLTSIIATKLDEHLKENELLFPEQVGCRKGSRGCKELLIIDNIVSKHVKKKAHNLSVGWIDFRKAFDSIPHSWLQRTLQLYKVHPSIITFLTTCMNSWRTTLLVMRGKFSYQTDTLKICRGIFQGDSLSPLWFCLALNPLSRMLNASGYGYALKNPKKIISHQLYMDDLKLYAKGSEQLRSMLTLVESFSSSVCMDLGLEKCAVVHVKRGSVQNTENEPHLMEDLRIQELFSGDEYKYLGLQQLLGTADEKIRKQVERKVLSRVTKICKSCINSRNKFTGINTWALSAASHTFGVVKWSETSLQAFDRKVRTLLSKYRMHHPRSSTERLYLSRHHGGRGLLSLEVMCRQQEKQLRNYFTNNKSMTAICAQDHGYTPLKLLQEDHNPRVPKPVDRIEQWRSKELHGRFATALQSNSIDVKRSTEWLRTAGLFGETEGFVLAIQDQVVATNNYRRYIMKENISDKCRLCKKATESIQHICSGCSQLAQTDYLQRHNNVAKIIHQALAKRSDLIKESLPYYKYLPEQVLSNERTKILWDTPIVTDKTVEANKPDIVVFDKTTRRAIIIDIAVPLDRNLLTTIAEKKRKYQPLSIELKNLYKLIEVDIVPVVISTNGLVAEDWRIVKEKLHLNEWHLRTMQKAVLLATTNIVRKVLSLNH

SEQ ID NO: 14803 - protein, 1203 aa, Teleogryllus occipitalis
MSSALKKSHAGDRPSQGRAAVSSTGAVVRNMLPVLVESGEPPQQLRRRGAAPPRATANLDIASQDAAPGRSLGNLRGSPTASGNPSQRMQWTRELNMSVMRAYYRSTKGETECEGFRRRLLTEWRKIYPESALNEQRVCSQLNSIRRRKVFSDAELNLLKTEVRLELTNEVVLEQQVNENEQTVHENEQHAVVFIPQLEYEMVDKSLQDIYEATKLHYQGISLDLRPKIPKLKCSANVYEVVGEMNQIIAPNISEATSLEDVAGLVHCAAIATCQHLGYKVRVGNGTSLSKKPYERQNPPAWLKKIENQIAQARRDISHIAEYFRDKGGISKMVRATIRSILRRLGIKRTHKDLESKLKVEDERLRQRIAALGARIRRYNEAARRKKENSLFSNNQKGFYRYLESRGANDNDINPPSASAMTDFWSQIWSTPKQHFDEAYWIRQEEEACHNIPEMNGVVISTEDVKRSIKRTHNWKAPGVDGIHNFWWKYLTCTHDILASQFQNILQGTSVLPEFCTMGVTFMLPKGGNASCPENYRPITCLPTIYKVLTSIIATKLDEHLKENELLLPEQVGCRKGSRGCKELLIIDNIVSKHVKKKAHNLSVGWIDFRKAFDSIPHSWLQRTLQLYKVHPSIITFLTTCMNSWRTTLLVMRGKFSYQTDTLKICRGIFQGDSLSPLWFCLALNPLSRMLNASGYGYALKNPKKIISHQLYMDDLKLYAKGSEQLRSMLTLVESFSSSVCMDLGLEKCAVVHVKRGSVQNTENEPHLMEDLRIQELFGGDEYKYLGLQQLLGTADEKIRKQVERKVLSRVTKICKSCINSRNKFTGINTWALSAASHTFGVVKWSETSLQAFDRKVRTLLSKYRMHHPRSSTERLYLSRHHGGRGLLSLEVMCRQQEKQLRNYFTNNKSMTAICAQDHGYTPLKLLQEDHNPRVPKPVDRIEQWRSRELHGRFATALKSNSIDVKRSTEWLRTAGLFGETEGFVLAIQDQVVATNNYRRYIMKENISDKCRLCKKATESIQHICSGCSQLAQTDYLQRHNNVAKIIHQALAKRSDLIKESLPYYKYLPEQVLSNERTKILWDIPIVTDRTVEANKPDIVVFDKTTRRAIIIDIAVPLDHNLLTTIAEKRRKYQPLSVELKNLYKLIEVDILPVVISTNGLVAEDWRIVKEKLHLNEWHLRTMQKAVLLATTNIVRKVLSLNH

SEQ ID NO: 14804 - protein, 1130 aa, Teleogryllus occipitalis
MSSALRKSHAGDRPSQGRAAVRNMLPVLVESGEPPQQLRRRGAAPPRATANLDIASQDAAPGRSLGNPRGSPTASGNPSQRMQWTRELNMFVMRAYYRSTKGETECEGFRRRLLTEWRKIYPESALNEQRVCSQLNSIRRRKVFSDAELNLLKTEVRLELTNEVVLEQQVNENEQTVHENEQHAVVFIPQLEYEMVDKSLQDIYEATKLHYQGISLDLRPKIPKLKCSANVYEVVGKMNQIIAPNISEATSLEDVAGLVHCAAIATCQHLGYKVRVGNGTSLSKKPYERQNPPAWLKKIENQIAQARRDISHIAEYFRDKGGISKMVRATIRSILRRLGIKRTHKDLESKLKVEDERLRQRIAALGARIRRYNEAARRKKENSLFSNNQKGFCRYLESRGANDNDINPPSASAMTDFWSQIWSTPKQHFDEAYWIRQEEEACHNIPEMNGVVISTEDVKRSIKRTHNWKAPGVDGIHNFWWKYLTCTHDILASQFQNILQGTSVLPEFCTMGVTFMLPKGGNASCPENYRPITCLPTIYKVLTSIIATKLDEHLKENELLLPEQVGCRKGSRGCKELLIIDNIVSKHVKKKAHNLSVGWIDFRKAFDSIPHSWLQRTLQLYKVHPSIITFLTTCMNSWRTTLLVMRGKFSYQTDTLKICRGIFQGDSLSPLWFCLALNPLSRMLNASGYGYALKNPKKIISHQLYMDDLKLYAKGSEQLRSMLTLVESFSSSVCMDLGLEKCAVVHVKRGSVQNTENEPHLMEDLRIQELFGGDEYKYLGLQQLLGTADEKIRKQVERKVLSRVTKICKSCINSRNKFTGINTWALSAASHTFGVVKWSETSLQAFDRKVRTLLSKYRMHHPRSSTERLYLSRHHGGRGLLSLEVMCRQQEKQLRNYFTNNKSMTAICAQDHGYTPLKLLQEDHNPRVPKPVDRIEQWRSKELHGRFATALQSNSIDVKRSTEWLRTAGLFGETEGFVLAIQDQVVATNNYRRYIMKENISDKCRLCKKATESIQHICSGCSQLAQTDYLQRHNNVAKIIHQALAKRSDLIKESLPYYKYLPEQVLSNERTKILWDTPIVTDRTVEANKPDYYYYYYYYYYYYYYYYYYYYYYTLFFSVFNGFLFDYVSG

SEQ ID NO: 14805 - protein, 1113 aa, Teleogryllus occipitalis
MQWTRELNMSVMRAYYRSTKGETECEGFRRRLLTEWRKVYPESALNEQRVCSQLNSIRRRKVFSDAELNLLKTEVRLELTNEVVLEQQVNENEQTVHENEQHAVVFIPQLEYEMVDKSLQDIYEATKLHYQGISLDLRPKIPKLKCSANVYEVVGKMNQIIAPNISEATSLEDVAGLVHCAAIATCQHLGYKVRVGNGTSLSKKPYERQNPPAWLKKIENQIAQARRDISHIAEYFRDKGGISKMVRATIRSILRRLGIKRTHKDLESKLKVEDERLRQRIAALGARIRRYNEAARRKKENSLFSNNQKGFYRYLESRGANDNDINPPSASAMTDFWSQIWSTPKQHFDEAYWIRQEEEACRNIPEMNGVVISTEDVKRSIKRTHNWKAPGVDGIHNFWWKYLTCTHDILASQFQNILQGTSVLPEFCTMGVTFMLPKGGNASCPENYRPITCLPTIYKVLTSIIATKLDEHLKENELLLPEQVGCRKGSRGCKELLIIDNIVSKHVKKKAHNLSVGWIDFRKAFDSIPHSWLQRTLQLYKVHPSIITFLTTCMNSWRTTLLVMRGKFSYQTDTLKVCRGIFQGDSLSPLWFCLALNPLSRVLNSSGYGYALKNPKKIISHQLYMDDFKFYAKGSEQLGSVLTLVESFSSSVCMDLGLEKCAVVHVKRGSVQNTENEPHLMEDLRIQELFSGDEYKYLGLQQLLGTADEKIRKQVERKVLSRVTKICKSCINSRNKFTGINTWALSAASHTFGVVKWSETSLQAFDRKVRTLLSKYRMHHPRSSTERLYLSRHHGGRGLLSLEVMCRQQEKQLRNYFTNNKSMTAICAQDHGYTPLKLLQEDHNPRVPKPVDRIEQWRSKELHGRFATALQSNSIDVKRSTEWLRTAGLFGETEGFVLAIQDQVVATNNYRRYIMKENISDKCRLCKATESIQHICSGCSQLAQTDYLRHNNVAKIIHQALAKRSDLIKESLPYYKYLPEQVLSNERTKILWDTPIVTDRTVEANKPDIVVFDKTTRRAIIIDIAVPLDHNLLTTIAEKRRKYQPLSVELKNLYKLIEVDIVPVVISTNGLVAEDWRIVKEKLHLNEWHLRTMQKAVLLATTNIVRKVLSLNH

SEQ ID NO: 14806 - protein, 1114 aa, Teleogryllus occipitalis
MQSTRELNMSVMRAYYRSTKGETECEGFRRRLLTEWRKIYPESALNEQRVCSQLNSIRRRKFFSDAELNLLKTEVRLELTNEVVLEQQVNENEQTVHENEQHAVVFIPQLEYEMVDKSLQDIYEATKLHYQGISLDLRPKIPKLKCSANVYEVVGKMNQIIAPNISEATSLEDVAGLVHCAAIATCQHLGYKVRVGNGTSLSKKPYERQNPPAWLKKIENQIAQARRDISHIAEYFRDKGGISKMVRATIRSILRRLGIKRTHKDLESKLKVEDERLRQRIAALGARIRRYNEAARRKKENSLFSNNQKGFYRYLESRGANDNDINPPSASAMTDFWSQIWSTPKQHFDEAYWIRQEEEACHNIPKMNGVVISTEDVKRSIKRTHNWKAPGVDGIHNFWWKYLTCTHDILASQFQNILQGTSVLPEFCTMGVTFMLPKGGNASCPENYRPIACLPTIYKVLTSIIATNLDEHLKENELLLPEQVGCRKGSRGCKELLIIENIVSKHVKKKAHNLSVGWIDFRKAFDSIPYSWLQRTLQLYKVHPSIITFLTTCMNSWRTTLLVMRGKFSYQTDTLKICRGIFQGDSLCPLWFCLALNPLSRMLNASGYGYALKNPKKIISHQLYMDDLKLYAKGSEQLRSMLTLVESFSSSVCMDLGLEKCAVHVKRGSVQNTENEHHLMEDLRIQELFGGDEYKYLGLQQLLGTADEKIRKQVERKVLSRVTKICKSCINSRNKFTGINTWALSAASHTFGVVKWSETSLQAFDRKVRTLLSKYRMHHPRSSTERLYLSRHHGGRGLLSLEVMCRQQEKQLRNYFTNNKSMTAICAQDYGYTPLKLLQEDHNPRVPKPVDRIEQWRSKELHGRFATALQSNSIDVKRSTEWLRTAGLFGETEGFVLAIQDQVVATNNYRRYIMKENISDKCRLCKKATESIQHICSGCSQLAQTDYLQRHNNVAKIIHQALAKRSDLIKESLPYYKYLPEQVLSNERTKILWDTPIVTDRTVEANKPDIVVLDKTTRRAIIIDIAVPLDHNLLTTIAEKRRKYQPLSVELKNLYKLIEVDIVPVVISTNGLVAEDWRIVKEKLHLNEWHLRTMQKAVLLATTNIVRKVLSLNH

SEQ ID NO: 14807 - protein, 827 aa, Teleogryllus occipitalis
MRIISGNEGPRCEIDPEALSDHFSLPAFDLPSLADCYPAAEGRPTVKETTFTEKEICEQLQGMANTAPGDDRLRYNNWRKVDPTCRLLCSIFRACAKFHRVPASWKISNTVFIYKSGHSGSPANWRPIALSNTILKLYLSLWGRRLNDWVEENGTLSPAQKGFRPHDGVYENNFLVERLLDEAKSKKIDLCLAIIDFSNAFGSVSHQAVLEGLRSAGVGQKLLEVVRDLYTDNQTSFLSSKGQSALARCLRGVRQGCPLSPTLFNLTIDPLLRSTLALSDLRIPGGAYADVWLAASNPASLQRMIDHLAAVAAKIGVQINSRKSDSLSIRDGAVYDNTYMVDGAPLKTLADADYTRFLGKPVGFNIIPPLAKVNDVLDQARDVADANLAPWQKLDALLTFVLSRLSFPIKMRTLAVGDADDLDSWLRAFVKEATGLPDASSHYIHARKSGAGMGLPQFTKEVHYAFIEGAFKLLTSPDITVHEIANEQLRSTVALRMPNCDIFANVVADYLNGSPISHQGRGNLWSRARQASKAAGIRWAFELRDGLLSPSIIYPHKEGEKVITPRYRKNPLRSLRRANQEAHLEAWKKQPDQGRSAHDLALAGARSSHFMRSGEGLRWTDYLWVHRAHLNLLRGLRAGFPWATNSAEGYCRFGCKDPKTGAQSLETQAHVICHCKRNYRAITSRHNAIVDAIKGASCAMDWRVVTEDQVFGSDNKRPDLVLVNRNGTSHKIIDVAVAFEGGKGSLAAARKIKLSRYEKTLQETRAIAGVTSAEIVPIVVGARGAWDPQNDKLLKQLVHEDYLPVLRKRLISAAIRGPHDIFKAHMA

SEQ ID NO: 14808 - protein, 1020 aa, Teleogryllus occipitalis
MTPSPSRDDSSRDNSRDGESRPPVPSEGGAVSPPSEVSTSPGVHVRRPDGSIGGTGTSSPGSSSAGTAGRPTGPSAAPNAEPVRPTPEGSTPRNRGQLRPSPPEPALVGKLHPELEDLRGVIIEASKAPVTGVTWLQLEDFINQAITKVQQLCLRNPPTPLRPGAGLNRPDNALTSKAKISRIYSGNPRRAMRIISGKEGPRCELDPNSLAEHFAMPAFQCPDVSACYPEAEGRPVIKETLFTEKEVGERLQGVANTAPGDDRIRYNNWRKVDPTCRLLCTIFNACAKFRRVPGTWKCSNTILIHKTGPKDSPANWRPIALSNTVAKLYFSLWGRRLNDWAEENGALSPAQKGFRPHDGVYENNYLVEQLLDEAKSKDTNLCLAFVDFSNAFGSVSHQAVLEALKASGVGSKFCEIVKDLYTDNFTSFLSSKGQSSQVYCSRGVRQGCPLSPILFNISIDPILRSTLALSDLHIPGGAYADDVWLAASNPAALQRMLDALATGAAKIGISINTNKSDSLSIRDGEVRDKSYRVEGSRLRTLTSLDNTRFLGKPVGFDILPSLATVKDVLVQAQGVADANLAPWQKLDALMTFVLSRLSFPIRMRTLAVGDASDLDAWMRAFVKEATGLPDNASSHFIHAGKSGAGMGLPQFTKEVHFAFIEGAFKLLTSPDHTVRRVANKQLRSTVASRLPDRDISPNVTAEYLNGVTVCHQGRGNIWSRARQASKAVGVRWAFELKDGLLSPSLIYKSKGEEKVLLPRQRNTLLRSLRTSNQETHLDAWKKQQDQGRAAHDLALAGAKSSHFLRSGENLRWTDYLWVHRARLNLLRGLRGGFPWAPSSSEGFCRFGCKDPKTGNPIRETQAHVICHCKRNYRAITTRHNTIVDAVKGAACAMGWRVVAEDQVFGSDNKRPDLVLVNRGGTQYKIVDVAVTFEGGKGSLAAARKVKLSKYAKTLQETRAIAGVTSAEIAPIVVGARGAWDPANDKHLKQLVHEDYLPVLRRRLVSAAIRGSHDIFKGHLA

SEQ ID NO: 14809 - protein, 1041 aa, Teleogryllus occipitalis
MQQNNQEPRTQMQAHSSSPTQREHDKLSLHKPRQLTRIQRPGERNSQKEAQVTQETQCRSECKRPAADPGQRSSSVIQPRERKPWKRTRIHTPPSPRLGAGTIPQHHERDREHNRSIRGRSPTEETWYRHPRASPEPAAYILPLLRWRPRPTADGWRNIERIIDKIIKEAQETCKIPPRSNYRPPPPQQENDNRTKHQADATRTFRVITNAEGPRCAIPPERIEEHFASTPPEEIDLSASYERVERDAVDVTPFSAEEVAARLADCANTAPGDDRLQYAHWRSIDHTGRILAPIFNACIKHQKIPEAWKESKTVLIYKKGDVDAPSNWRAIALTNTVAKLYSSLLARRLSRWIEQGEVLSPHQKGFRPTDGVREHNFLVAKLLKDAKDGRKDLAVAFLDLTNAFGAVRHEAILEALRCAGAGDAFSEIISDMYQGASTRILTQEGLTEPIPFHRGVKQGCPLSASLFNIAIDTPLRRALAISDSPIPGGAYADDIWLAATKPEVLQAMINMLVDTGEVIGLHVNAAKSDTLLLNKGRETAEHRFQIERTEINALSGANTTRFLGRPIGHTVFPDQTLTSQLVREMELIRRAQLAPWQKVDALQQFILSKLPFPMSLDMIKKKEADKIDRHVRAFVRETLNLSANSSVHYMYTARDKAGVGLPEVSKETDVASIDNAFKLLTTSDLTVRREATEDLTLTTAQRTSIRQPTLTDIATYLNGERNVSHTGMRNVWTRARVATKNLRIRWALEADGEFINPSLICTNDNHSLDVVLPHQRYQVSRRLRALYQKAHFEAWCAQPDQGRAAIELAARGSRSAYFVRSGEYLRWCDYGFIHAARLNLLGGLRGSHPWRRRGIEDEACRRNCMRNGQPLRETLAHVINHCRMTKVRARHNELVAHVKAAATHNGWKVIAEDKIWGPHGLRPDLVLENRTATELLILDVACPFDGNRNSLQEARAEKLRKYAPTLDYAKTLVSSARIVPIIVGALGAWCKDNDAELKPICNKAFTGTLRKCLIAASIRHSRDIYSSHINDNVETGPTRVD

SEQ ID NO: 14810 - protein, 919 aa, Teleogryllus occipitalis
MEGRLSPQFEALLLNASGPRPTADGWRNIERIIGKIIKEAQETCRIPPRSNYRPPPPQQENDSRIKHQADAARKYKRNARKTFRVITNAEGPRCAIPPERIEEHFASTPPEEIDLSASYERVERDAVDVTPFSAEEVAARLADCANTAPGDDRLQYAHWRSIDHTGRILAPIFNACIKHQKIPEAWKESKTVLIYKKGDVDAPSNWRAIALTNTVAKLYSSLLARRLSRWIEQGEVLSPHQKGFRPTDGVREHNFLVAKLLKDAKDGRKDLAVAFLDLTNAFGAVRHEAILEALRRAGAGDAFSEIISDMYQGASTRILTQEGLTEPIPFHRGVKQGCPLSASLFNIAIDTPLRRALAISDSPIPGGAYADDIWLAATKPEVLQIMINMLVDTGEVIGLHVNAAKSDTLQLNKGRETAEHRFQIEGTQINALSGANTTRFLGRPIGHTVFPDQTLTSQLVREMELIRRAQLAPWQKVDALQQFILSKLPFPMSLDMIKKKEADKIDRHVRAFIRETLNLSANSSVHYMYTARDKAGVGLPEVSKETDVASIDNAFKLLTTSDLTIRREATDDLTLTTAQRTSIRQPTLTDIATYLNGERNVSHTGMRNVWTRARVATKNLRIRWALEADGEFINPSLICTNDNRRLDVVLPHQRYQVSRRLRALYQKAHFEAWCAQPDQGRAAIELAAQGSRSAYFVRSGEYLRWCDYGFIHAARLNLLGGLRGSHPWRRRGIEDEACRRNCMKNGQPLRETLAHVINHCRMTKVRARHNELVAHVKAAATHNGWKVIAEDKSWGPHGLRPDLVLENRTATELLILDVACPFDGNRNSLQEARAEKLRKYAPTLDYAKTLVSSARIVPIIVGALGAWCKENDAELRPICNKAFTGTLRKCLIAASIRHSRDIYSSHINDNVETGPTRVD

SEQ ID NO: 14811 - protein, 1079 aa, Trialeurodes vaporariorum
METVKNETEEDLGEDSEQIVEEHTPERPTHQPASQTHPDPPVRNVPARQERDGSSSQEDDVSQTVETNRAVLNTVQDEINLENWIRAEFQKVNEEALEERRRLKKLINPKKAQNTIMQCNKVIKKIIEETTEMMKMKELNALIYATARIVIRIEEPENHGGRKDRKKKQEVPGWQKRIEAKILHWRRQLSVLTSKNNNGISQRKVHSIMSEHQKEAESDKESVIEYLKQRIAASAQRIQRYKKRVLQYKQNWIFKNNQKALYRQIRGNQIEVKETPENEEVERYWKSIYENKVRHNDKAEWIKKIKIDGKMEWTEITQDGVVAAIMKTANWKAPGIDKIQNYWLKQFTATHETLTKQFRELITSREFPEWFARGVTTLIPKNQNTRDPKNYRPITCLNTTFKVYTAVIAELIIKYITEAECMPLEQKGNRRKARGCLDQLLISKAIIEDCKKRKKNLGVAWVDYKKAFDSVPHSWILESLKLIGVHEKIIDACKNMMPMWATVLRLNSVHKTTQTEVIKIRRGIYQGDSLSPLLFCISLIPLSHLLRSQQRGYEVSETKTEVSHLLFVDDLKLFARDEQNLKKMLKTVHEFSEDIRMEFGLDKCAKSIFKNGHLAQSDNIRIQQDIEIRQLEEGEEYKYLGVEENGRIAHEKIKEKLRKEYKSRVRAILKTQLTARNKLQAIGTYAIPILEYSFGVVDWTLKEIRSIDVKTRKFLTIHKVHHPKSDVDRLYVAREEGGRGLRQVEAAYKSSIINLRHYLAKKMESDPYLKMVFDTDRRKCETKSIREQATKLENVEGIRARDGQTEEQRKQGVKTKLSDNIRENWTRKPMHGQYPKRLKEERICKRKSVLWLTQGHLKSETESLVVAAQDQALATRYRRVRIHKEGGSSKCRLCKTYEETVDHIMSGCPILAKEEYTYRHNRVCAQVHFDICKALNVPIEASKWYEHSPKPVTASEDGKTTILWDYSIRTDRTVPANRPDIVVKQTGGPCILIDVSIPMDGNVTEKEAEKLLKYKSLQIELQRMWKTKAVVVPIVIGATGIVSKELTKWLDCIPGKTSLVSVQKTAVLGTATILRKVLD

SEQ ID NO: 14812 - protein, 963 aa, Trialeurodes vaporariorum
MQCNKVIKKIIEETTEMMKMKELNALIYATARIVIRIEEPENHEGRKDRKKKQEVPGWQKRIEAKILHWRRQLSVLTSKNNNGISQRKVHSIMSEHQKEAESDKESVIEYLKQRIAASAQRIQRYKKRVLQYKQNWIFKNNQKALYRQIRGNQIEVKDTPEIEEVERYWKSIYENTVRHNDKAEWIKKIKIDGKMEWTEITQDGVVAAIMKTANWKAPGIDKIQNYWLKQFTATHETLTKQFRELITSREFPEWFARGVTTLIPKNQNTRDPKNYRPITCLNTTFKVYTAVIAELIIKYITEAECMPLEQKGNRRKARGCLDQLLISKAIIEDCKKRKKNLGVAWVDYKKAFDSVPHSWILESLKLIGVHEKIIDACKNMMPMWATVLRLNSVHKTTQTEVIKIRRGIYQGDSLSPLLFCISLIPLSHLLRSQQRGYEVSETKTEVSHLLFVDDLKLFARDERNLKKMLKTVHEFSEDIRMEFGLDKCAKSIFKNGHLAQPDNIRIQQDIEIRQLEEGEEYKYLGVEENGRIAHEKIKEKLRKEYKSRVRAILRTQLTARNKLQAIGTYAIPILEYSFGVVDWTLKEIRSIDVKTRKFLTIHKVHHPKSDVDRLYVAREEGGRGLRQIEAAYKSSIINLRHYLAKKMESDPYLKMVFETDRRKCETKSIREQAAKLENVEGIRARDGQTEEQRKQGVKTKLSDNIRENWTRKPMHGQYPKRLEEERICKRKSVLWLTQGHLKSETESLVVAAQDQALATRYRRVRIHKEGGSSKCRLCKTYEETVDHIMSGCPILAKEEYTYRHNRVCAQVHFDICKALNVPIEASKWYEHSPKPVTASEDGKTTVLWDYSIRTDRTVLANRPDIVVKQTGGPCILIDVSIPMDGNVTEEEAEKLLKYKSLQIELQRMWKTKAVVVSIVIGATGMVSKELTKWLDCIPGKTSLVRVQKTAVLGTATILRKVLD

SEQ ID NO: 14813 - protein, 1175 aa, Trialeurodes vaporariorum
MASEAGSQRVSLSREGLSDASGAETQPKIRAKWTKSDNLEILRCYFLAQKRNNVTEKDVYDLWRTRNPRIRPNMDSKKLASQRRYIIKSKKITDEEMETVKNETEEDLGEDSEQIVEEHTPERPTHQPASQTHPDPPVRDVPARQERDGSSSQEDDVSQTVETNRAVLNTVQDEINLENWIRAEFQKVNEEALEERRRLKKLINPKKAQNTIMQCNKVIKKIIEETTEMMKMKELNALIYATARIVIRIEEPENHEGRKDRKKKQEVPGWQKRIEAKILHWRRQLSVLTSKNNNGISQRKVHSIMSEHQKEAESDKESVIEYLKQRIAASAQRIQRYKKRVLQYKQNWIFKNNQKALYRQIRGNQIEVKDTPEIEEVERYWKSIYENKVRHNDKAEWIKKIKIDGKMEWTEITQDGVVAAIMKTANWKAPGIDKIQNYWLKQFTATHETLTKQFRELITSREFPEWFARGVTTLIPKNQNTRDPKNYRPITCLNTTFKVYTAVIAELIIKYITEAECMPLEQKGNRRKARGCLDQLLISKAIIEDCKKRKKNLGVAWVDYKKAFDSVPHSWILESLKLIGVHEKIIDACKNMMPMWATVLRLNSVHKTTQTEVIKIRRGIYQGDSLSPLLFCISLIPLSHLLRSQQRGYEVSETKTEVSHLLFVDDLKLFARDERNLKKMLKTVHEFSEDIRMEFGLDKCAKSIFKNGHLAQSDNIRIQQDIEIRQLEEGEEYKYLGVEENGRIAHEKIKEKLRKEYKSRVRAILKTQLTARNKLQAIGTYAIPILEYSFGVVDWTLKEIRSIDVKTRKFLTIHKVHHPKSDVDRLYVAREEGGRGLRQIEAAYKSSIINLRHYLAKKMESDPYLKMVFETDRRKCETKSIREQAAKLENVEGIRARDGQTEEQRKQGVKTKLSDNIRENWTRKPMHGQYPKRLEEERICKRKSVLWLTQGHLKSETESLVVAAQDQALATRYRRVRIHKEGGSSKCRLCKTYEETVDHIMSGCPILAKEEYTYRHNRVCAQVHFDICKALNVPIEASKWYEHSPKPVTASEDGKTTILWDYSIRTDRTVPANRPDIVVKQTGGPCILIDVSIPMDGNVTEKEAEKLLKYKSLQIELQRMWKTKAVVVPIVIGATGIVSKELTKWLDCIPGKTSLVSVQKTAVLGTATILRKVLD

SEQ ID NO: 14814 - protein, 963 aa, Trialeurodes vaporariorum
MQCNKVIKKIIEETTEMMKMKELNALIYATARIVIRIEEPENHGGRKDRKKKQEVPGWQKRIEAKILHWRRQLSVLTSKNNNGISQRKVHSIMSEHQKEAESDKESVIEYLKQRIAASAQRIQRYKKRVLQYKQNWIFKNNQKALYRQIRGNQIEVKETPENEEVERYWKSIYENKVRHNDKAEWIKKIKIDGKMEWTEITQDGVVAAIMKTANWKAPGIDKIQNYWLKQFTATHETLTKQFRELITSREFPEWFARGVTTLIPKNQNTRDPKNYRPITCLNTTFKVYTAVIAELIIKYITEAECMPLEQKGNRRKARGCLDQLLISKAIIEDCKKRKKNLGVAWVDYKKAFDSVPHSWILESLKLIGVHEKIIDACKNMMPMWATVLRLNSVHKTTQTEVIKIRRGIYQGDSLSPLLFCISLIPLSHLLRSQQRGYEVSETKTEVSHLLFVDDLKLFARDEQNLKKMLKTVHEFSEDIRMEFGLDKCAKSIFKNGHLAQSDNIRIQQDIEIRQLEEGEEYKYLGVEENGRIAHEKIKEKLRKEYKSRVRAILKTQLTARNKLQAIGTYAIPILEYSFGVVDWTLKEIRSIDVKTRKFLTIHKVHHPKSDVDRLYVAREEGGRGLRQVEAAYKSSIINLRHYLAKKMESDPYLKMVFDTDRRKCETKSIREQATKLENVEGIRARDGQTEEQRKQGVKTKLSDNIRENWTRKPMHGQYPKRLEEERICKRKSVLWLTQGHLKSETESLVVAAQDQALATRYRRVRIHKEGGSSKCRLCKTYEKTVDHIMSGCPILAKEEYTYRHNRVCAQVHFDICKALNVPIEASKWYEHSPKPVTASEDGKTTILWDYSIRTDRTVPANRPDIVVKQTGGPCILIDVSIPMDGNVTEKEAEKLLKYKSLQIELQRMWKTKAVVVPIVIGATGIVSKELTKWLDCIPGKTSLVSVQKTAVLGTATILRKVLD

SEQ ID NO: 14815 - protein, 921 aa, Trialeurodes vaporariorum
MKEEKIERKSKKFPDGKKRIEAKILHWRRQLSVLTSKNNNGISQRKVHSIMSEHQKEAESDKESVIEYLKQRIAASAQRIQRYKKRVLQYKQNWIFKNNQKALYRQIRGNQIEVKDTPEIEEVERYWKSIYENKVRHNDKAEWIKKIKIDGKMEWTEITQDGVVAAIMKTANWKAPGIDKIQNYWLKQFTATHETLTKQFRELITSREFPEWFARGVTTLIPKNQNTRDPKNYRPITCLNTTFKVYTAVIAELIIKYITEAECMPLEQKGNRRKARGCLDQLLISKAIIEDCKKCKKNLGVAWVDYKKAFDSVPHSWILESLKLIGVHEKIIDACKNMMPMWATVLRLNSVHKTTQTEVIKIRRGIYQGDSLSPLLFCISLIPLSHLLRSQQRGYEVSETKTEVSHLLFVDDLKLFARDERNLKKMLKTVHEFSEDIRMEFGLDKCAKSIFKNGHLAQSDNIRIQQDIEIRQLEEGEEYKYLGVEENGRVAHEKIKEKLRKEYKSRVRAILKTQLTARNKLQAIGTYAIPILEYSFGVVDWTLKEIRSIDVKTRKFLTIHKVHHPKSDVDRLYVAREEGGRGLRQIEAAYKSSIINLRHYLANKMESDPYLKMVFETDRRKCETKSIREQAAKLENVEGIRARDGQTEEQRKQGVKTKLSDNIRENWTRKPMHGQYPKRLEEERICKRKSVLWLTQGHLKSETESLVVAAQDQALATRYRRVRIHKEGGSSKCRLCKAYEETVDHIMSGCPILAKEEYTYRHNRVCAQVHFDICKALNVPIEASKWYEHSPKPVTASEDGKTTILWDYSIRTDRTVPANRPDIAVKQTGGPCILIDVSIPMDGNVTEKEAEKLLKYKSLQIELKRMWKTKAVVVPIVIGATGIVSKELTKWLDCIPGKTSLVSVQKTAVLGTATILRKVLD

SEQ ID NO: 14816 - protein, 1102 aa, Trialeurodes vaporariorum
MDSKKLASQRRYIIKSKKITDEEMDTVKNETEEDLGEDSEQIVEEHTPERPTHQPASQTHPDPPVSDVPAGQERDGSSSQEDDVSQTVETNRAILKTVQDEINLENWIRAEFQKVNEEALEERRRLKKLINPKKAQNTIMQCNKVIKKIIEETTEMMKMKELNALIYATARIVIRIEEPENHEGRKDRKKKQEVPGWQKRIEAKILHWRRQLSVLTSKNNNGISQRKVHSIMSEHQKEAESDKESVIEYLKQRIAASAQRIQRYKKRVLQYKQNWIFKNNQKALYRQIRGNQIEVKDTPEIEEVERYWKSIYENTVRHNDKAEGIKKIKIDGKMEWTEITQDGVVAAIMKTANWKAPGIDKIQNYWLKQFTATHETLTKQFRELITSREFPEWFARGVTTLIPKNQNTRDPKNYRPITCLNTTFKVYTAVIAELIIKYITEAECMPLEKKGNRRKARGCLDQLLISKAIIEDCKKRKKNLGVAWVDYKKAFDSVPHSWILESLKLIGVHEKIIDACKNMMPMWATVLRLNSVHKTTQTEVIKIRRGIYQGDSLSPLLFCISLIPLSHLLRSQQRGYEVSETKTEVSHLLFVDDLKLFARDERNLKKMLKTVHEFSEDIRMEFGLDKCAKSIFKNGHLAQSDNIRIQQDIEIRQLEEGEEYKYLGVEENGRIAHEKIKEKLRKEYKSRVRAILRTQLTARNKLQAIGTYAIPILEYSFGVVDWTLKEIRSIDVKTRKFLTIHKVHHPKSDVDRLYVAREEGGRGLRQIEAAYKSSIINLRHYLAKKMESDPYLKMVFETDRRKCETKSIREQAAKLENVEGIRARDGQTEEQRKQGVKTKLSDNIRENWTRKPMHGQYPKRLEEERICKRKSVLWLTQGHLKSETESLVVAAQDQALATRYRRVRIHKEGGSSKCRLCKTYEETVDHIMSGCPILAKEEYTYRHNRVCAQVHFDVCKALNVPIEASKWYEHSPKPVTASEDGKTTVLWDYSIRTDRTVPANRPDIVVKQTGGPCILIDVSIPMDGNVTEKEAEKLLKYKSLQIELQRMWKTKAVVVPIVIGATGMVSKELTKWLDCIPGKTSLVSVQKTAVLGTATILRKVLD

SEQ ID NO: 14817 - protein, 906 aa, Trialeurodes vaporariorum
MAKRIEAKILHWRRQLSVLTSKNNNGISQRKVHSIMSEHQKEAESDKESVIEYLKQRIAASAQRIQRYKKRVLQYKQNWIFKNNQKALYRQIRGNQIEVKDTPEIEEVERYWKSIYENKVRHNDKAEWIKKIKIDGKMEWTEITQDGVVAAIMKTANWKAPGIDKIQNYWLKQFTATHETLTKQFRELITSREFPEWFARGVTTLIPKNQNTRDPKNYRPITCLNTTFKVYTAVIAELIIKYITEAECMPLEQKGNRRKARGCLDQLLISKAIIEDCKKRKKNLGVAWVDYKKAFDSVPHSWILESLKLIGVHEKIIDACKNMMPMWATVLRLNSVHKTTQTEVIKIRRGIYQGDSLSPLLFCISLIPLSHLLRSQQRGYEVSETKTEVSHLLFVDDLKLFARDERNLKKMLKTVHEFSEDIRMEFGLDKCAKSIFKNGHLAQSDNIRIQQDIEIRQLEEGEEYKYLGVEENGRIAHEKIKEKLRKEYKSRVRAILKTQLTARNKLQAIGTYAIPILEYSFGVVDWTLKEIRSIDVKTRKFLTIHKVHHPKSDVDRLYVAREEGGRGLRQIEAAYKSSIINLRHYLAKKMESDPYLKMVFETDRRKCETKSIREQAAKLENVEGIRARDGQTEEQRKQGVKTKLSDNIRENWTRKPMHGQYPKRLEEERICKRKSVLWLTQGHLKSETESLVVAAQDQALTTRYRRVRIHKEGGSSKCRLCKTYEETVDHIMSGCPILAKEEYTYRHNRVCAQVHFDICKALNVPIEASKWYEHSPKPVTASEDGKTTILWDYSIRTDRTVPANRPDIVVKQTGGPCILIDVSIPMDGNVTEKEAEKLLKYKSLQIELQRMWKTKAVVVPIVIGATGIVSKELTKWLDCIPGKTSLVSVQKTAVLGTATILRKVLD

SEQ ID NO: 14818 - protein, 961 aa, Trialeurodes vaporariorum
MQQSDQKIIEETTEMMKMKELNALIYATARIVIRIEEPENHEGRKDRKKKQEVPGWQKRIEAKILHWRRQLSVLTSKNNNGISQRKVHSIMSEHQKEAESDKESVIEYLKQRIAASAQRIQRYKKRVLQYKQNWIFKNNQKALYRQIRGNQIEVKDTPEIEEVERYWKSIYENKVRHNDKAEWIKKIKIDGKMEWTEITQDGVVAAIMKTANWKAPGIDKIQNYWLKQFTATHETLAKQFRELITSRKFPEWFARGVTTLIPKNQNTRDPKNYRPITCLNTTFKVYTAVIAELIIKYITEAECMPLEQKGNRRKARGCLDQLLISKAIIEDCKKRKKNLGVAWVDYKKAFDSVPHSWILESLKLIGVHEKIIDACKNMMPMWATVLRLNSVHKTTQTEVIKIRRGIYQGDSLSPLLFCISLIPLSHLLRGQQRGYEVSETKTEVSHLLFVDDLKLFARDERNLKKMLKTVHEFSEDIRMEFGLDKCAKSIFKNGHLAQSDNIRIQQDIEIRQLEEGEEYKYLGVEENGRIAHEKIKEKLRKEYKSRVRAILKTQLTARNKLQAIGTYAIPILEYSFGVVDWTLKEIRSIDVKTRKFLTIHKVHHPKSDVDRLYVAREEGGRGLRQIEAAYKSSIINLRHYLANKMESDPYLKMVFETDRRKCETKSIREQAAKLENVEGIRARDGQTEEQRKQGVKTKLSDNIRENWTRKPMHGQYPKRLEEERICKRKSVLWLTQGHLKSETESLVVAAQDQALATRYRRVRIHKEGGSSKCRLCKAYEETVDHIMSGCPILAKEEYTYRHNRVCAQVHFDICKALNVPIEASKWYEHSPKPVTASEDGKTTILWDYSIRTDRTVPANRPDIVVKQTGGPCILIDVSIPMDGNVTEKEAEKLLKYKSLQIELQRMWKTKAVVVPIVIGATGIVSKELTKWLDCIPGKTSLVSVQKTAVLGTATILRKVLD

SEQ ID NO: 14819 - protein, 1186 aa, Apodemia murphyi
MMKRRIHRERIGPLPGGDRQGPSGAGAGRGSMRDASRRLAKTSGQSVSSPSPSEGLAQASPRTSQFAPATGGIRRMRWTRSQNENVMRAYFRAVGSETNRTGYRARLHKEFQYLEPLLNTTEQNLADRVRFIQRSNIFSAEELQQLNQASIPQSHLLQIQNVECPCQDITEAALPAPPRREEEDTVDSIQNLDQIRNVLEEAIFEYRNKLLDERPRIPRITLSIANRNVVEAINKFLPAYLKDSTGLSDTNSILFGAAVAVCRTIGIKLLKGSCTTNKVNGTPIWKQRIEKRIARARVFIGKLISFRSGNTRPRVTRFVKLAFAGTDVNINQADIYQKLTERIDDLKQRIAAWSQRIRRYSERVARFHQNRLFSSDQKKFYRQLIRVPTGPAADQRPDKAEMIRFWRSLWSESVEYEESGWMEDTEEECARIVPMNPVSITVEDIETAIRKAPNWKTPGNDSLHLYWFKGFSACYSTLASQFQQALESGVCPNFLTTGITHLVPKSDRTADPSQYRPITCLPTTYKILTSILADKIMTHINKNNILAVNQNGCRGGSRGTKELLLIDAVINQQVKKNRRNFAAAWIDYKKAFDSVPHTWLKRVLELYKIESKVRDFLNACVSQWSTVLCLSGEQLSDAEDRILIKRGIFQGDCLSPLWFCLSLNPLSRLLDKSGTGFQFQRGGTRLTHLFYMDDLKLFAPNSAKLMELLNITCKFSNSIRMEFGIEKCATIHVQRGRIIDSQDLPTSESISLRALTETETYRYLGMSQAVGIKEADVKQSICEVFWERLTKVMKSFLSGVNKARAFNGWVMPVVSYTFGILRWTPTELDALDRKVRTTLTLHRMHHPRSSMMRLYLPRKNGGRGYLNAKTMHNREVCSLRDYFLSRTESILHGEVAASDKGFTPLSLALENWQKPEILSTNDRESVWKTKELHGRFYKALRDSQVDSVASIQWLRFGDIFGETEGFVCAIQDQVIKTNNYRRYILKDGTIDACRLCHCPGETLRHVISGCSRLANTEYLHRHNQAAKIIHQELALKYGLLENRVPYYKYIPMPVLENNRARLYWDRPIITDRTILTNKPDIVLMDCVKSSIFLVDITIPFDENLSKAEADKKTKYLDLAHEITSMWRVESAEIIPVVLSANGLIPYSLRSYLKKLDINPNITIAKMQKAVLLETARIVRRFLTHPS

SEQ ID NO: 14820 - protein, 1184 aa, Apodemia mejicanus
MMKRRIHRERIGPLPGGDRQGPSGAGAGRGSMRDASWRLAQTSGQSVSSPSPSEGLVQASPRTLHVVPATGGTRRMRWTRSQNENIMRAYFRAVGPETNRTGYRARLHKEFQSLEPQLNITEQNLADRVRFIQRSNIFSADELHQLKQASDPLPLVPRVPNLEAHLQGSNEAITPVSPARAVGEDILNCSQNLGQILEEAILEYRNKSFDERPRIPRITLSAANRNIVGAINKLLPVYLKDSSSLSDTNSILFGAAVAVCRTIGLKIMKESRITHKVNCTPIWKQRIEKRIARARVLIGKLISFRSGNIRPRVTRFVKLAFAGTNVDINQPDMYQKLTERIDDLKQRVAAWSQRIRRYSERVARFQQNRVFASDQKKFYRQLGRESLDTAGARRPEKAEMIRFWRSLWSEPVEHEESDWMEGVEETCAQIAPMNPVLITVEDVEAAIRKSPNWKTPGNDGLHLYWIKGFSACYSTLASQYQHAVDNGVCPNFFTIGITHLVPKNEMTTDPSQYRPITCLSTTYKIMTSILADKVIAHINKNNILADNQNGCRGGSRGSKELLLVDAAINQQVKKNRRNFAAAWIDYRKAFDSVPHTWLKRVLELYKIDCKTRQFLNACMSQWNTILCLSGEQLSDAKDRVPIKRGIFQGDCLSPLWFCLSLNPLSSLLDKSGTGFQFRRGGSRLTHLFYMDDLKLYAPNTAKLTELLNITCKFSNSIGMELGIEKCATIHVQRGRIIESQEIPTLESINLRAITETETYRYLGMSQTVGVKEADVKQAVCDVFWERLTKVLKSFLSGANKTRAFNAWVMPVLTYTFGILRWSQTELDAFDRKVRTTLTRHRMHHPRSSVMRLYLPRRCGGRGFLSAKTMHNRELCNLRDYFLSKTESNIHREVIGTDKGLTPLSLASGNWQRPEVLNANSRESVWRTKELHGRFYEALHGPQVDTATSVQWLRFGDIFGETEGFVCAIQDQVIKTNNYRRYILKDGTVDACRICHCPGETLRHVISGCSMLANTEYLHRHNQAAKIIHQELAMKYGLLESRVPYYKYIPESVLENDRARLYWDRPITTDRTINANKPDITLMDRKKSAVFLVDITIPFDENLVKAEAEKKTKYLDLAHEVTAMWRVELTEIIPIVLSANGLVPSNLCSYLKKLDINPNTTIAKMQKAVLLDNARIVRRFLSHSP

SEQ ID NO: 14821 - protein, 1124 aa, Apodemia mejicanus
MNSHVAPATGGTRRMRWNRNQNENVMRAFFRAIGAENNRIGYRARLQQEFQLLEPLLNVTEQNLADRVRFIQRSNIFNEHELQQLKQTSIPHSLPEVQSPELQNHVTTGEDVPALDEDGEEIANNECTLNLEHIGKELEKAILIYRETLLEERPRIPRITLSAANQNVIQAINRLLPAYLKNSTGLSDTNAILFAAAVAVCQIIGAKLLMQTQKAHKTNCKPSWKQRIENRIAKTRVLIGKLISYRSGNTRPRVMRFVKVALAGSNIDLNQPDIYHKLTERIDDLKQKIAAWSQRIRRYSERAARFHQNRLFASNQKKFYRQLDRAPSRTAGEKPDKAELIRFWRSQWSEPVEHQESDWITSVEEACAGIHTMNPVSITVEDIKNAIRKAPNWKTPGSDGLHLYWIKGFYECHETLALQFQHALETGLCPSFLTTGITHLTPKNDNTTDPSQYRPITCLPTTYKVLTSILASKITAHINTNKILAENQNGCRGGSRGTKELLLIDSIAGQLVKRNRRNFAAAWIDYKKAFDSVPHTWLKRVLELYKVDCTVRNFLSACMGQWNTVLCLSGELMMNSEDRILIRRGIFQGDCLSPLWFCLSLNPLSHLLDKSEMGFQFRRGGYKLTHLFYMDDLKLFAPNSDRLMELLNITGEFSSSIHMEFGIDKCAAVHVRRGKIIDSQELATSESISLKSLTEAETYRYLGMKQTVGVKETEMKQSVCDVFWERLTKILKSFLSGANKARAFNGWVMPVLIYTFGLLRWTQTELDALDRKVRTTLTRHRMHHPRSSIMRLYLPRKCGGRGYLSAKIMHNKEVCSLRDYIISKTESAVHKEVIACDQGFTPLSLFTENWQKPEILSIADRESVWKGKELHGRFFRALHESHVETKSSVQWMRFGDLFGETEGFVCAIQDQVIKTNNYRRYILKDGTVDICRLCGCPGETLRHVISGCSMLANTEYLHRHNQAAKIIHQELALKYGLLECRVPYYKYIPVPVLENNRVRLYWDRSIITDKTIHANKPDIVLMDRKESRVFFVDITVPYDENLMKAESEKKMKYLDLAHEVTSMWRMESTEIVPIVMSANGLVPTSLCNYLKKLGIGQNNTIAKIQKAILLDNARIVRRFLTQSP

SEQ ID NO: 14822 - protein, 1186 aa, Apodemia chisosensis
MKRRIHRERLGPLPGGDRQGPSGAGAGRGSMRDASRRLAQTSGQSVSSPSPSEGLAQASPKILQFAPATGGIRRMRWTRNQNENIMRAYFRAVGSETNRTGYRARLHKEFQLLEPLLNITEQNLADRVRFIQRSNIFSIDELQQLGQASIPQLPLHQVPNLEAQSQGGTEVIIPAPPESREEEDNLSCSQNIEKIGRILEEAILEYRNKLLDERPRIPRITLSVANRNIVEAVNKLLPVYLKDSTSLSDTNSILFGAAVAVCRTIGVKLIKESRTTHTVNCTPIWKQRIEKRIARARVFIGKLLSFRSGNTRPRVTRFVKLAFAGTNVDINQPDIYQKLTERIDDLKQRIAAWSQRIRRYSERVTRFRQNRLFASDQKKFYRQLNKEPSGLTNAQRPDKAEMIRFWRSLWSEPVEHEESDWIAGIEEVCARIVPMNPVLITAKDVEAAIRKASNWKTPGKDGLHLYWIKGFSACYSTLASQFQLAVESGICPNFFTTGITHLAPKKEMTTDPSQYRPITCLSTTYKILTSILADKIMMHVNKNNILADNQNGCRGGSRGSKELLIIDAIISQQVKKNRRNFAAAWIDYKKAFDSVPHTWLKRVLELYKIDCKVRDFLNACMSKWSTILCLSGEQLSDAEDRISIRRGIFQGDCLSPLWFCLSLNPLSCLLDKSATGFQFRRGGSRLTHLFYMDDLKLLAPNSAKLMEMLNITCKFSSSIGMQLGIEKCATIHVQRGRIIDSQELPTSESINLRALTETETYRYLGMSQAVGVKEADMKQAVGEVFWERLAKVLKSFLSGTNKTRAFNAWVIPVLTYTFGVLRWTQTELEALDRKVRTTLTSHRMHHPRSSIMRLYLPRKCGGRGYLNAKTMHNREVCSLRDYFLSKTESVMHSEVIVSDKGLSPLSLASKNWQKPEVLSTNDREAVWKAKELHGRFYKALRDPQVDSATSVQWLRFGDLFGETEGFVCAIQDQVIKTNNYRRYILKDGTVDVCRICHCPGETLRHVISGCSMLANTEYLHRHNQAAKIIHQELALKYGLLENRVPYYKYIPEPVLENDRARLYWDRPIITDRTIPVNKPDIVLMDRAKSIVFLVDITIPFDENLVKAEADKKTKYLDLAHEVTAMWRVELTEVIPIVLSVNGLVPSNLRNYLKKLDINQNTTIAKMQKAVLLDNARIVRGFLTHSS

SEQ ID NO: 14823 - protein, 1184 aa, Apodemia duryi
MMKRRIHRERIGPLPGGDRQGPSGAGAGRGSMRDASWRLAQTSGQSVSSPSPSEGLVQASPRTLHVVPATGGTRRMRWTRSQNENIMRAYFRAVGPETNRTGYRARLHKEFQSLEPQLNITEQNLADRVRFIQRSNIFSADELHQLKQASDPLPPVPRVPNLEAQLQGSNEAITPVSPARAVGEDILNCSQNLGQILEEAILEYRNKSFDERPRIPRITLSAANRNIVGAINKLLPVYLKDSSSLSDTNSILFGAAVAVCRTIGLKIMKESRITHKVNCTPIWKQRIEKRIARARVLIGKLISFRSGNIRPRVTRFVKLAFAGTNVDINQPDMYQKLTERIDDLKQRVAAWSQRIRRYSERVARFQQNRVFASDQKKFYRQLGRESLDTAGARRPEKAEMIRFWRSLWSEPVEHEESDWMEGVEETCAQIAPMNPVLITVEDVEAAIRKSPNWKTPGNDGLHLYWIKGFSACYSTLASQFQHAVDNSVCPNFFTIGITHLVPKNEMTADPSQYRPITCLSTTYKIMTSILADKVIAHINKNNILADNQNGCRGGSRGSKELLLIDAVINQQVKKNRRNFAAAWIDYRKAFDSVPHTWLKRVLELYKIDYKTRQFLNACMSQWNTILCLSGEQLSDAKDRVPIKRGIFQGDCLSPLWFCLSLNPLSSLLDKSGTGFQFRRGGSRLTHLLYMDDLKLYAPNSAKLTELLNITCKFSNSIGMELGIEKCATIHVQRGRIIESQEIPTLESINLRAITETETYRYLGMSQTVGVKEADVKQAVCDVFWERLTKVLKSFLSGANKTRAFNAWVMPVLTYTFGILRWSQTELDAFDRKVRITLTRHRMHHPRSSMMRLYLPRRCGGRGFLSAKTMHNRELCNLRDYFLSKTESNIHREVIGTDKGLTPLSLASGNWQRPEVLNANSRESVWRTKELHGRFYEALHGPQVDTATSVQWLRFGDIFGETEGFVCAIQDQVIKTNNYRRYILKDGTVDACRICHCPGETLRHVISGCSMLANTEYLHRHNQAAKIIHQELAVKYGLLESRVPYYKYIPESVLENDRARLYWDRPITTDRTINANKPDITLMDRKKSAVFLVDITIPFDENLVKAEAEKKTKYLDLAHEVTAMWRVELTEIIPIVLSANGLVPSNLCSYLKKLDINPNTTIAKMQKAVLLDNARIVRRFLSHSP

SEQ ID NO: 14824 - protein, 1164 aa, Apodemia zela
MMDLQNTNKQNSTANLATTSGRATSPSLSDGLARAGPSRARRAAPAADGLRRMRWTREHNANIMRAYYRAIGEETQRTGYRARLLQEFRRLEPTITVTAQNLADRVRFIQRSNIFNENELVQLGKTYAPTPSPARNVPSINIPLPSSSTVLPSKEIEADEELDAEVTSQQMEHIKSELQQAVWEYRHKPVDDRPRIPRIFPNTKNRRIIRSVNNLLPSFLDASRDLDDTNSILFAAAMTVCKLSGVKAKGRPNTSQKLKTDPSWKRRIEQRIHKTRILIGKLISYKSGNTRPRVVRFVRIAFMGSQIDFQHPVSESDLTERIDYLKQKVGAWAQRIRRYSERVARYHQNSLFATDQKRFYRSLTNKSTVQTDNQPTQTEFINFWRNLWSQPVEHEEGYWMTSVKNACNKLTTMEPVSITDEDVKEAVRKASNWKAPGRDKLQQYWLKSFTACHNVLAQQFQTALQDGKLSNLFTTGITYLIPKSSSVPDPAQYRPITCLSTTFKLLSSVLASKIMAHINKNNIIAEAQNGCRSGSRGSKELLLIDAVINQQVKRNRRNFSTAWIDYRKAFDSVPHSWLKRVLELYKIDCTVRNFLGACMEQWSTTLSLGGELLSAAGDQIAIRRGIFQGDCLSPIWFCQSPSLNPLSLLLDESGIGFQFRRGGPRISHLFYMDDLKLLAPNAPKMTELLNVTKTFSSSIRMELGIDKCAVLHVEKGRVRDPQDSQTLESMNLRILTETETYRYLGMSQCIGIRETDVKQSVLEVFFERLTKVLKSFLSGANKTRAYNGWVMPVLLYTFGVLKWNQTELDTLDRKVRTSLTFHRMHHPRSSVMRLYLPRRCGGRGYLNAKTMHNREVCSLREYFLSRSGSIHEEVRKCDKGLTPLSLATDNWQHPEILSCTEREAVWKGKELHGRFYKALKEPFIDSKTSLHWLRFGDLFGETEGFVCAIQDQVIKTNNYRRYILKDGTVDICRACHRPGETLRHVISCCSMLANTEYLHRHNQAAKIIHLELALKYGLITQRLPYYRYNPEAVIENDCARLYWDRPIITDRTITANKPDIVLMDRSQSKVFLIDVTIPFDENIVKAEIDKRTKYLDLAHEVTMMWRVMSTDIVPVVISANGLIPNSLRKHLTGLALQENIIGKLQKAVVLDTARIVRRFLSQSS

SEQ ID NO: 14825 - protein, 1183 aa, Apodemia mejicanus
MMNRRIQKARIGPLPGGDRQGPSGAGAGRGSMRDARQRLAHPTGQSVSSPSPSDCLAQASSRTLQDVPATDGIRRMRWTRNQNENIMRAYYRATGSETNRTGYRARLYNEFHLLEPLLKVTEQNLADRVRFIQRSHIFNAEELEQIKQTSVPMVSSSEVLTVDALPRIATSAVVTIPNERSEGEDIGEVSQDVEKIRGVLGEVIREYRNKSFEERPHIPRIRLTTANRKLVEAVNKLLPDYLKNSTGLGDTNLVLYSAAVTVCRIIGIKIIPHTRPHRGTNHGAGWRQRIEERIAKTRVLIGKLISFKSGNTRPKVMRFVKIAFAGTGVNLEKPDIQRNLTERIDVLKQKIAAWSQRIRRYTERGTRYHQNRLFMSDQKKFYRILSHEVSGSDGTWPDQAETIMFWRNLWSQPVEHEESEWVNDVEKSCNQIIPMSPVLITQEDVQIAIRKTSNWKTPGSDRLHFYWIKAFTECHTSLASQFQDILQRSICPNFLTDGITHLVPKNSRTTDPSQYRPITCLNTTYKILTSIIASKIMAHVNNNNILAETQNGCRGGSRGSKELLLIDAVIGQQVKRNRRNFSAAWIDYKKAFDSVPHTWLRKVLEIYKIDSRIRDFLYTCMSQWSTTLCLSRQLMSNAEDRILIKRGIFQGDCLSPLWFCLSLNPLSHLLDKSGTGFQFRRGGPRLSHLFYMDDLKLFAPNSTMLIKLLNITLKFSSSIRMELGIEKCATVHVKRGRIIDSQELPTSESINLRTLTETETYRYLGMSQTVGVKEAEMKQSVCEVFWERLRKVLKSYLSGVNKAHAFNSWVMPVLTYTFGILRWSQTELDALDRKVRTTLTCHRMHHPRSSTMRLYLPRKCGGRGYMSAKTMHNREVCSLRDYFLSKIENVVHREVITCDKGLTPLSLDTENWQKPELLSVKDRESVWKGKELHGRFYKALHDPQVDNEASVHWLRFGDIFGETEGFVCAIQDQVIKTNNYRKYILKDGTIDVCRMCRSPGETLRHVISGCSMLANTEYLHRHNQAAKIIHQELALKYGLVQSRLPYYKYIPEPVLENDRARLYWDRPIITDRTIFSNKPDIVLMDRAISRVFLVDITIPFDENLVKAEADKKTKYLELAHEVKEMWRVESTAIVPIIVSVNGLVPSNLRNYLNKLNINQNIIIAKMQKAVLLDTVRIVRRFLA

SEQ ID NO: 14826 - protein, 1183 aa, Apodemia mormo
MMNRRIQKARIGPLPGGDRQGPSGAGAGRGSMRDARQRLAHPTGQSVSSPSPSDCLAQASSRTLQDVPATDGIRRMRWTRNQNENIMRAYYRATGSETNRTGYRARLYNEFHSLEPLLKVTEQNLADRVRFIQRSHIFNAEELEQIKQTSVPMVSSSEVLTVDALPRIATSAVVTIPNERSEGEDIGEVSQDVEKIRGVLGEVIREYRNKSFEERPHIPRIRLTTANRKVVEAVNKLLPDYLKNSTGLGDTNLVLYSAAVTVCRIIGIKIIPHTRPHRGTNHGAGWRQRIEERIAKTRVLIGKLISFKSGNTRPKVMRFVKIAFAGTGVNLEKPDIQRNLTERIDVLKQKIAAWSQRIRRYTERGTRYHQNRLFMSDQKKFYRILNHEASGSDGTWPDQAETIMFWRNLWSQPVEHEESEWVNDVEESCNQIIPMSPVLITQEDVQIAIRKTSNWKTPGSDRLHFYWIKAFTECHTSLASQFQDILQRSICPNFLTDGITHLVPKNSKTTDPSQYRPITCLNTTYKILTSIIASKIMAHVNNNNILAETQNGCRGGSRGSKELLLIDTVIGQQVKRNRRNFSAAWIDYKKAYDSVPHTWLRKVLELYKIDSRIRDFLYTCMSQWSTTLCLSRQLMSNAEDRILIKRGIFQGDCLSPLWFCLSLNPLSHLLDKSGTGFQFRRGGPRLSHLFYMDDLKLFAPNSAMLIKLLNITLKFSSSIRMELGIEKCATVHVQRGRIIDSQELPTSESINLRTLTETETYRYLGMSQTVGVKEAEMKQSVCEVFWERLRKVLKSYLSGVNKAHAFNSWVMPVLTYTFGILRWSQTELDALDRKVRTTLTCHRMHHPRSSTMRLYLPRKCGGRGYMSAKTMHNREVCSLRDYFLSKIENVVHREVITCDKGLTPLSLDTENWQKPELLSVKDRESVWKGKELHGRFYKALHDPQIDNEASVHWLRFGDIFGETEGFVCAIQDQVIKTNNYRKYILKDGTIDVCRMCRSPGETLRHVISGCSMLANTEYLHRHNQAAKIIHQELALKYGLVQSRLPYYKYIPEPVLENDRARLYWDRPIITDRTIFSNKPDIVLMDRAISRVFLVDITIPFDENLVKAEADKKTKYLELAHEVKEMWRVESTAIVPIIVSANGLVPSNLRNYLNKLNINQNIIIAKMQKAVLLDTARIVRRFLA

SEQ ID NO: 14827 - protein, 986 aa, Fasciola gigantica
MNTCKCRWCSGSFRTRRGLTQHMRHAHPNELNAARLGSLRPKRKRWSKEEDTRLYELVDYRLGYTSIAALCREIADHFPGRSVEAIEARVAGLRRPGGNWGGMMERDQDNIVTLQVDEEDEHAETKRWEAKVLEAISETANGAEPERVGVLQWLARRFCDGRISREAAAGELEAIVASWFPHTLKPRPRSEPPNAGQLSKKRVRRLQYAVLQRMYRKRRKDAVDMVLTGDWRSSHMPKRRTVPGLTAYWKEVFEVESAVDNRPTPRPASSLWAVIDPIQEGEVRKAIREIGKSSPGLDGLTAADVGKLDNRLVLALLNVLLLLRSPPEALTKARITLIPKVVNPEKPAEYRPIAIASVITRILHKVLASRWSRSHSFADLQVAFQKRDGCCEASEILQAVLRRVHEKTKGLAAAFVDISKAFDTVATSTIIRNAVAQGLPPPLVEYIRHMYDTSAVLIEQETVRPGRGVRQGDPLSPLLFLSVMDEMLKSSLPGVGFDQGGRLVDALAYADDLVLFAEDESRLRDKLEALNSALQAAGMSLNASKSCTLTIVPDGKRKTVVLAPTQYSVGGTRLRTMNVEDRVKYLGLEFNWKGKVRVRHTGILERYLIEVTRAPLKPYQRLTVLKQHLVPKLLHQLVLGAAHRNTLASMDRMIRQFVRGWLRLPADVPVAYLYTKIPDGGLGLPSLATLVPLAQRKRTEKVASSSAATAVLFKDTPCFKQFVARANMGIRIGGEAVCSKAEASQAWSEQLWKSHDGKALRGESVDPVSHDWVRDPTRLPGKVFLRGIKLRGGLLPTRTRASRGGRTPAHGVMCKGGCGHPESIDHILQSCQLTHNVRCERHNRVLRKINKVLNRKCEKVWLEPIVPCENSFRKPDLVVRERGVVYVVDVCVTTSARMEETRRLKVQKYGTESVTGAVRDLAGVVESARVVQAPVVITNRGLLSKESGSSLRNLGFTRSELSDLAMTVILGSLKGYDLYMRGTRRY

SEQ ID NO: 14828 - protein, 804 aa, Apodemia duryi
MKHVNELLKSNKVHGAHGDINKKIEEYLDTLKQKLAVKSHRLARYKKSQERKENNRLFSKNEKMFYRKLKESTIDIKQCPSKTDLTNFWSNIWSKSVEHNRNSAWIDRENERMKNMEEMEFENITLEELQDIIRKTHNWKAAGIDGIHNYWIKKFSNLHIILGQHISNILKGTATIPEFLTKGITFMLPKTTRTDDPSQYRPITCLPTLYKIITSCITNLINRHINKNNILAEEQKGCRKFHMGCKEQLTIDAVVLKYIQSKRKDLFVTYIDYKKAFDSIPHSLLIQILEVYKIHPLIIRFLKNAMANWRTTLILQSADNKIVTDEIPIKRGIFQGDSLSPLWFCLALNPLSHDLINSKLGLDIKINRYNSFQLTHLLYMDDLKLYSNTDKNMIELLNITTQYSKDISMDLELDKCKKLNIKKGKIVPGNYHIDENQSIKAMECNDLYKYLGYNQARQIEHTKIKTHLKEEYINRVYSLCKKSINSKNLFKSINTYAIPILTYSFGIIKWSKTELQNLQIKTRTILTQYRYHHPKSAIERITLHRKHGGRGLIDVMILHKKQVFKLKQFFNSKKTSSQFHEAICNIDKNYTPLNLSDHNLEIVDEKQYYKDKYNRWNSKELHGRHPSDLNQNFIDIEASNKWLDCAGLFPETEGFIIAIQDQVINTRNYRKFIIKDKSIQSDLCRKCNNKPETIQHIIGGCITLTQNDYTHRHNQLANILHQKLAYKYSLIQGPPAPYYNYIPQHVLDSSTHKLYFDRTIITDHTIYNNRPDITLVDKQNRHTYIIDIAVPNTNNIQISVKSFK

SEQ ID NO: 14829 - protein, 896 aa, Apodemia mejicanus
MKHVKELLKSNKVHGAHGDINKKIEEYLDTLKQKLAVKSHRLARYKKSQERKENNRLFSKNEKMFYRKLKESTIDIKQCPSKTDLTNFWSNIWSKSVEHNRNSAWIDRENERMKYMEEMEFENITLEELQDIIRKTHNWKAAGIDGIHNYWIKKFSNLHIILGQHISNILKGTATIPEFLTKGITFMLPKTTRTDDPSQYRPITCLPTLYKIITSCITNLINRHINKNNILAEEQKGCRKFHMGCKEQLTIDAVVLKYIQSKRKDLFVTYIDYKKAFDSIPHSLLIQILEVYKIHPLIIRFLKNAMANWRTTLILQSADNKIVTDEIPIKRGIFQGDSLSPLWFCLALNPLSHDLINSKLGLDIKINRYNSFQLTHLLYMDDLKLYSNTDKNMIELLNITTQYSKDISMDLGLDKCRKLNIKKGKIVPGNYHIDENQSIKAMECNDLYKYLGYNQARQIEHTKIKTHLKEEYINRVYSLCKKSINSKNLFKSINTYAIPILTYSFGIIKWSKTELQNLQIKTRTILTQYRYHHPKSAIERITLHRKHGGRGLIDVMILHKKQVFKLKQFFNSKKTSSMLHEAICNIDKNYTPLNLSDHNLEIVDEKQYYKDKYNRWNSKELHGRHPSDLNQNFIDIEASNKWLDDAGLFPETEGFIIAIQDQVINTRNYRKFIIKDKSIQSDLCRKCNNKPETIQHIIGGCTTLTQNDYTHRHNQLANILHQKLAYKYSLIQGPPAPYYNYIPQHVLDSSTHKLYFDRTIITDHTIYNNRPDITLVDKQNRHTYIIDIAVPNTNNIQATITEKIRKYTELQEEIKNVWKMDRVTIVPIVVSNTGVIPTLLHNALKILNLPKNTYITLQKAAILNTCRTVRKFLQLSSGNEIVPHQNSLNVNDPNLG

SEQ ID NO: 14830 - protein, 1265 aa, Apodemia mormo
MELRNKSKRLMSLPGGYRRGSPGAGAGCSSMRSTGGGRISRRSPAGTPEEATSSQLHSNSDTIVQELPETPPAEDVSRAASAMRPATTKAGKPRVRMKWDTRTNTFIMRTYYKITKLESDLTTYRQLLHQEFCKQYPDLNISEQRLSDQRRVIVRNNLLSDTILNKIKEEVAKELRESNDNDNPIYTDTITNTPSVQASPGPSTSSQVTTSQIIPLNSEIFSENYQSLINTQSSNTQEQNIDINLFRELSSKLEENIIKYSGIDPSLRPRLPIIKGSKKLTYVTSFFNHNIILTKSASLETLTDIHNFIYCAAKTIIDHLNIRVSNGNNRNTIKKAPAWKIRIENDIKKYRRDIGRLTQFKHGNRGKKLMKHVNELLKSNKVHGAHGDINKKIEEYLDTLKQKLAVKSHRLARYKKSQERKENNRLFSKNEKMFYRKLKESAIDIKQCPSKTDLTNFWSNIWSKSVEHNRNSAWIDRENERMKYMEEMEFENITLEELQDIIRKTHNWKAAGIDGIHNYWIKKFSNLHIILGQHISNILKGTATIPEFLTKGITFMLPKTTRTDDPSQYRPITCLPTLYKIITSCITNLINRHINKNNILAEEQKGCRKFHMGCKEQLTIDAVVLKYIQSKRKDLFVTYIDYKKAFDSIPHSLLIQILEVYKIHPLIIRFLKNAMANWRTTLILQSADNKIVTDEIPIKRGIFQGDSLSPLWFCLALNPLSHDLINSKLGLDIKINRYNSLQLTHLLYMDDLKLYSNTDKNMIELLNITTQYSKDISMDLGLDKCKKLNIKKGKIVPGNYHIDENQSIKAMECNDLYKYLGYNQARQIEHTKIKTHLKEEYINRVYSLCKKSINSKNLFKSINTYAIPILTYSFGIIKWSKTELQNLQIKTRTILTQYRYHHPKSAIERITLHRKHGGRGLIDVMILHKKQVFKLKQFFNSKKTSSMLHEAICNIDKNYTPLNLSDHNLEIVDEKQYYKDKYNRWNSKELHGRHPSDLNQNFIDIEASNKWLDCAGLFPETEGFIIAIQDQVINTRNYRKFIIKDKSIQSDLCRKCNNKPETIQHIIGGCITLTQNDYTHRHNQLANILHQKLAYKYSLIQGPPAPYYNYIPQHVLDSSTHKLYFDRTIITDHTIYNNRPDITLVDKQNRHTYIIDIAVPNTNNIQATITEKIRKYTELQEEIRNVWKMDRVTIVPIVVSNTGVIPTLLHNALKILNLPKNTYITLQKAAILNTCRTVRKFLQLSSGNEIVPHQNSLNVNDPNLG

SEQ ID NO: 14831 - protein, 1265 aa, Apodemia murphyi
METRNKSKRLMSLPGGYRRGSPGAGAGCSSMRSTGGGRISRRSPAGTPEEATSSQIGLNLGTIVQESPETPPAEDVSQAASAMRPATTKAGKPRVRMKWDIKTNIFIMRTYYKVTRLESDLTTYRQLLHQEFCKQYPDLNISEQRLSDQRRVIVRNNLLSDTILNKIKEEVAKELRESNDNDNSIFTDTITNTPLIPSYTSISTSNQATISQVTPLDSELLSENYQSLINTQSNNTQEQRVNSNLLEELSSKLEENIIYYSGIDPSLRPRLPKLKGSKKLTHVTTFFNHNVIPTKIASLESLTDLHNFIYCAAKTIIEYLKVRVNNDNKHYTIRRAPAWQIRIEGDIKKYRRDIGRLTQFKNGNRGKKLMKHIDELLRSNKIHGSHGDSNRKIEEYLDTLKQKLAVKSHRLARYKKSQERKENNRLFSNNEKMFYRKLKGSTIEITQCPSKTVLTDFWSNIWSKSAEHNRNSAWINRENERMKHIKEMEFENISLEELQDIIRRTHNWKAAGIDGIHNYWIKKFSNLHVILAQLITNILKGTAAIPEFLTKGITYMLPKTTKTDDPSQYRPITCLPTLYKIITSCITNLVNRHINKYNILVEEQKGCRKYHMGCKEQLTIDAVVLKYIQSKRKDLFVTYIDYKKAFDSIPHSLLIHILEIYKIHPLIISFLKNVMAHWRTTLTLQTAKNIIVTNEIPIKRGIFQGDSFSPLWFCLALNPLSHDIINSKLGLDIKINRYNSFQLTHLVYMDDLKLYSNTDKNMTELLNITTQFTEDISMDLGLDKCKKLNIKKGKIVAGNYHINENHCIKAMECNELYKYLGYNQARQLEHTKIKTNLKEEYISRVYSLCKTTLNSKNLFKSINTYAIPVLTYSFGVIKWSETELQNLQIKTRTILTQYRYHHPKSAVERITLHRKYGGRGLIDIKILHKKQLFKLKKFFNAKKPSSHLHETICNIDKNYTPLNLSDDNLETIDENQYYKDKFNSWNSKVLHGRHPSDLNQPSIDMEASNKWLDSAGLFPETEGFIIAIQDQVINTRNYRKYIIKDTNVQSDLCRKCHNKPETIQHIIGACTTLTQNDYTHRHNQLANILHQKLALKYLLIQGPITPYYNYKPQHVLDSSTHKLYFDRTIITDHTIYNNRPDITLVDKQNRYTYIIDIAVPNTNNIQTTITEKIRKYTELQEEIRRVWNMDRVIIVPIVVSNTGVIPTALHNSLKILDLPKYTYITLQKAAILNTCRIVRKFLQLSSDNEIVPYPNNPNINDPNLG

SEQ ID NO: 14832 - protein, 838 aa, Apodemia zela
MKHIDELLRSNKVHGAHGDMNRKIEEYLDTLKQKLAVKSHRLARYKKSQERKENDRLFSNNEKMFYRKLKGSTIDIKQCPSKTDLTDFWSNIWSKSVDHNKNSAWIDREKERMKNMEEMEFENISSEELQDIIRKTHNWKAAGIDGIHNYWIKKFNNLHIILEQHINNILKGINTIPEFLTKGITYMLPKTTKTDDPSQYRPITCLPTLYKIITSCITSLVNRHIIKNNILVEEQKGCRKFHMGCKEQLTIDAVVLKYIQSKRKDLFVTYIDYKKAFDSIPHSLLIQILEIYKIHPLIIRFLKNTMAHWRTTLTLQTAGCKIVTNEIPIKRGIFQGDSFSPLWFCLALNPLSHDIINSKLGLDIKINRYKSVQLTHLLYMDDLKLYSNTDENMTELLNITTQFTKDIGMDLGLDKCKKLNIKKGKTVAGNYHINENHCIKAMECNDLYKYLGYNQARQIEHMKIKTHLKEEYVNRVYSLCKKRINSKNLFKSINTYAIPILTYSFGVIKWSKTELQNLQIKTRTILTQYRYHHPKSAIERITLHRKDGGRGLIDITILHKKQLFKLKQFFNNKKTSSQLHEAICYIDKNYTPLNLSEDNLETIDEKQHYKDKYNNWNSKELHGRHPSDLNQPFIDMDASNKWLDSAGLFPETEGFIIAIQDQVINTRNYRKFIIKDPMIKSDLCRKCHNKPETIQHIIGACITLTQNDYTHRHNQLANILHQKLALKYSLIQGPPAPYYNYNPQHVLDSSTHKLYFDRTIITDHTIYNNRPDITLVDKQNRHTYIIDIAVPNTNNIQTTITEKIRKYTELQEEIRRVWKMDRVIIVPIVVSNTGVIPT

SEQ ID NO: 14833 - protein, 1267 aa, Emesis temesa
METRNRNKRLMSLPGGYRRGSPGAGAGCSSMRSTGGGRISRRSPAGSLEEVTSSQTNLNLDAIAQKSPETFPAEDVSLAASALRPATTKAGKPRVRMKWDTKTNIFIMRTYYKITRLESNLTTYRHLLHQEFCGQYPDLNISEQRLSDQRRVIIRNKLLSDDILNKIKEEVAKELQETNDSDNPNITNTHTHPSTDQTSSNLSTSNQATTSQCTPPDIEKFSENYQILLNTQSGNIHQHSVDLNLVEELSNKLEINIINYNGVNPSLRPRIPKVKGSKRLDYITAVFNYNIIPNKVTSIETLTDLHNFIYCSAKTIIDYLNINIINSKDNICRTIKRAPAWQTRIESDIKHYRRDIGRLTQFKNGNRGKKLMKHIDKLLRSNKVHGAHEDINRKIEEYMDTLKQKLAVKSHRLARYKKSQERKENNRLFSNNEKIFYRKLRGSINDIKQIPSKTDLTNFWSNVWSQSVEHNRNSAWIDRENDRLKNIEEMEFENISLEELQDIIRNTHNWKAAGIDGIHNYWIKKFSNLHITLAQHINAVLKGNAMIPEFLTKGITYMLPKTTQTYDPSQYRPITCLPTLYKIITSCITRLVNRHINKNNILVEEQKGCRKFHMGCKEQLTIDSVVLKYIHLKRKDLFVTYIDYKKAFDSIPHSLLIQILEIYKINPLIINFLKNAMAQWRTTLTLRTANNHIVTDEIPIKRGIFQGDSFSPLWFCLALNPLSHEIIDSKLGLDIKIGRHNLFQLTHLLYMDDLKLYSNTDKNMTELLKITTQFTKDIAMDLGLEKCKKLNIKKGKIVAGNYHIDENQTIEAMEPNNLYKYLGYNQARQLEHTKIKSHLKTEYINRIYSLCKKSINSKNLFKSINTFAIPILTYSFGVIKWSKTELQNIQIKTRTILTQYRYHHPKSAIERITLSRKDGGRGLIDILILHEKQLLKLKQFFNNKRTSSQLHEAICNIDKNYTPLNLSKDNLEIIDEKQYYQNKYNSWNSKELHGRHPSDLNQPFIDKEASNKWLDSAGLFPETEGFIIAIQDQVINTRNYRKYIIKDKTIQSDLCRKCHTKPETIQHIIGACITLTQNDYTHRHNQLANILHQKLAYKYSLIQDPPTPYYNYKPQHVLDSSTHKLYFDRTIITDHTIYNNRPDITLVDKQNRHTYIIDIAVPNTNNIQTTVTEKIRKYTELQEEIRRVWKMDKVMIVPIVISNTGVIPMALHNSLKLLNLPRYTYITLQKAAILNTCRIVRKFLQLSTDNEIGPEQNNLYPNNPNLG

SEQ ID NO: 14834 - protein, 919 aa, Gonioctena quinquepunctata
MRSQNDELNGKECISSHMPSCEICFKSFKTEKGLRIHNTRIHHSLPIYLQNKSTYDSQEKRNEERSNQLHNRLAKFKRSTFVIKRIPKSARICCAFALSDAIDECIKFNSIESWEKLFLFSYKNLQIPQSSKERKVSLSSLIKKNISDSDSAHPNVQTKQCSSKFSPNLTRSVMNKISDGDLSSAIRILSSNDTIASFDNSTFSQLKSKHPAAIRSEPLQYDRQEIEPLEVNKINVTEAVKCFKTSSAGGIDSLRPSHIQDMLSESSGCASEKLLNSLTALCNFMLAGRVNPEICTVLYGASLCALKKKDGGIRPIAVGMFYRRLVAKLACFGIKEKLGEVFRPTQFGFGTPGGCEAVAHAARQYINQHPNPKSRVFLKLDFKNAFNMVDRNFLLKKVKDSIPNIFPFLNQCYNFPSFLNFGEEIIISERGIQQGDPLGPALFCLAIDDLTKSIKSEFNCWYLDDGSIGGEKNVILEDLKYIISNLNEIGIELNTNKCEIFFLDVPNQKVFDEFVYFIPGLKLLIESDFVLLGAPVTLEALSTCIKDKTDSLSLISSRLKEIPAHAAFFLLKNCLALPKLMYILRCSPTWHGNSELEKFDELMKSTLESITNNQFRNENWLQATLPVKMGGLGIRLASSLTLPAFLSSLNSVSHLVNSILPSDFFGLIDSFYEEGERLWISKVNVPLQGTDKKMQSAWDRPLLKLNLNNLFETAVSTSQKARLNAVFSKESGAWLDALPVSSLGNLLDNETFRISVGLRLGSSICVRHNCKCGAEVDESGVHGLSCKFSAGRRSRHDAVNDLIKRALITAKIPAILEPSGVSRDDGKRPDGMTLIPWKFGKPVVWDFTCMDTMATSHLNSTSIRKGAAAENGEKVKIKKYQNLRNLYIFYPVAIETYGVFGLKQRNSLKRLVERFSSDQ

SEQ ID NO: 14835 - protein, 1202 aa, Philaenus spumarius
MEEITTILYPADNFKCNKCYGAPGLRTSGIYKKNDGLTKHLAKHHPPGIYRYKCSLCREGDFSNIAGVNRHIKKNHSVRSQPDNTVNVLPPAATNLQASITDYDELLQDIVLVNLEEAHTGHEAQLRTADQLDVPTPHTAANHENFSVEDAPADDVQPTPREEHPDPLHHSEVQPQEDVTNFGESSTDIASQVELPVSNFNCRINHNLSMLLEGEVPREGPVTQGFDEASRERNGAREIPTNEPQGSEPDTDCHDMVVANEQQLAWIGRLREATTFDEFESIVNEWMAVIIVQPGNVRQQDDGGRGTGHHGRNRGGRYRGHRRPARNQNTYNPIEASRIQKLYRINKKKAVREVLGGDSLYCRVEPDRVEEHFRGVFSSKGFTFGETPQCVLDSMSVPSGMEGEEGLMCEIDNLAVLDRISRMPNSAPGPDGISYLLLKRVDPGCAVITTIMNECLKYGRVPKSWKESTTVLIHKHGETGELDNWRPLTLASCIAKLYTGVIADRLGRWAARTSRVSWAQKGFMEHEGCYEHNFVLQSTIDDARRKGKRAVIAWLDLANAFGSVPHEYLRHTLSLHQVPNRLVSLIMELYDGANTKIRTSAGYTEPIPLEAGVKQGDPLSPILFNLAIEPLVRVVQSMAPKNGYSLCGQDFSVVAYADDLALIASGESEMTQLLSTIGDIASWAGLKFKPNKCATLDVDCRVKRGTASTIFQINNSDIVALQEGEEYRHLGIPTGFKTCQNPIEGLKNMMTDLQAVDRSLLAPWQKLEVARMFILPRLDFILRGARVGKGPLTKLDLLVRRLAKSWLYLPRRASAELVYLDPSEGGAGLFPTSDQVDVASVVHAFRLITCRDPVVRNLARNTLHGVVRQRLGRNPTEEDVAGYLSGRLDGEFGRDGGDIASVWTGARNAARRMHNRIGINWRWSQALREYQVVIPAPDVAPILVPENARQILMRRLRAAIRTGYRRKLVGKADQGKVIEVSALSDISSHFIRSGRYTRFADWRFVFKARLGTVPLNGSKRWGNRDKRCRRCGYVSETLPHVLNHCQKQSAAWQGRHDAVLGRLSKAVPRITGDVSINKTVPGIDSNLRPDLVVINEGEKRITIVDVAIPFENRCQALAVARAEKETKYARLADELRQKGYEVSVDGFVVGALGSWDRKNEGVIRKLRISPRYANVMRRLMVSETIRWSRDIYVTHVTGHKQW

SEQ ID NO: 14836 - protein, 946 aa, Philaenus spumarius
MVVANEQQLAWIGRLREATTFDEFESIVNEWMAVIIVQPGNVRQQDDSGRGTGHHGRNRGGRYRGHRRPARNQNTYNPIEASRIQKLYRINKKKAVREVLGGDSLYCRVEPDRVEEHFRGVFSSKGFTLGETPQCVLDSMSVPSGMEGEEGLMYEIDNLAILDRISRMPNSAPGPDGISYLLLKRVDPGCAVVTTIMNECLKYGRVPKSWKESTTVLIHKHGETGELDNWRPLTLASCIAKLYTGVIADRLGRWAARTSRVSWAQKGFIEHEGCYEHNFVLQSTIDDARRKGKRAVIAWLDLANAFGSVPHEYLRHTLSLHQVPNRLVSLIMELYDGANTKIRTSAGYTEPIPLEAGVKQGDPLSPILFNLAIEPLVRVVQSMTPKNGYSLCGQDFSVIAYADDLALIASGESEMTQLLSTIGDIASWAGLKFKPNKCATLDVDCRVKRGTASTIFQINNSDIVALQEGEEYRHLGIPTGFKTCQNPIEGLKNMMTDLQAVDRSLLAPWQKLEVARMFILPRLDFILRGARVGKGPLTKLDLLVRRLAKSWLYLPRRASAKLVYLDPSEGGAGLFPTADQVDVASVVHAFRLITCRDPVVRNLARNTLHGVVRQRLGRNPTEEDVAGYLSGRLDGEFGRDGGDIASVWTGARNAARRMHNRIGINWRWSQALREYQVVIPAPDVAPILVPENARQILMRRLRAAIRTGYRRKLVGKADQGKVIEVSALSDISSHFIRSGRYTRFADWRFVFKARLGTVPLNGSKRWGNRDKRCRRCGYVSETLPHVLNHCQKQSAAWQGRHDAVLGRLSKAVPRIAGDVSINKTVPGIDSNLRPDLVVINEGEKRITIVDVAIPFENRCQALAVARAEKETKYARLADELRQKGYEVSVDGFVVGALGSWDRKNEGVIRKLRISPRYANVMRRLMVSETIRWSRDIYVTHVTGHKQ

SEQ ID NO: 14837 - protein, 1202 aa, Philaenus spumarius
MEEITTILYPADNFKCNKCYGAPGLRTSGIYKKNDGLTKHLAKHHPPGIYRYKCSLCREGDFSNIAGVNRHIKKNHSVRSQPDNTVNVLPPAATNLQASITDYDELLQDIVLVKLEEAHTGHEAQLRTADQLDVPTPHTAANHENFSVEDAPADDVQPTPREEHPDPLHHSEVQPQEDVTNFGESSTDIASQVELPVSNFNCRINHNLSILLEGEVPREGPVTQGFDEASRERNGAREIPTNEPQGSEPDTDCPDMVVANEQQLAWIGRLREATTFDEFESIVNEWMAVIIVQPGNVRQQDDGGCGTGHHGRNRGGRYRGHRRPARNQNTYNPIEASRIQKLYRINKKKAVREVLGGDSLYCRVEPDRVEEHFRGVFSSKGFTLGETPQCVLDSMSVPSGMEGEEGLMCEIDNLAVLDRISRMPNSAPGPDGISYLLLKRVDPGCAVITTIMNECLKYGRVPKSWKESTTVLIHKHGETGELDNWRPLTLASCIAKLYTGVIADRLGRWAARTSRVSWAQKGFMEHEGCYEHNFVLQSTIDDARRKGKRAVIAWLDLANAFGSVPHEYLRHTLSLHQVPNRLVSLIMELYDGANTKIRTSAGYTEPIPLEAGVKQGDPLSPILFNLAIEPLVRVVQSMAPKNGYSLCGQDFSVVAYADDLALIASGESEMTQLLSTIGDIASWAGLKFKPNKCATLDVDCRVKRGTASTIFQINNSDIVALQEGEEYRHLGIPTGFKTCQNPIEGLKNMMTDLQAVDRSLLAPWQKLEVARMFILPRLDFILRGARVGKGPLTKLDLLVRRLAKSWLYLPRRASAELVYLDPSEGGAGLFPTADQVDVASVVHAFRLITCRDPVVRNLARNTLHGVVRQRLGRNPTEEDVAGYLSGRLDGEFGRDGGDIASVWTGARNAARRMHNRIGINWRWSQALREYQVVIPAPDVAPILVPENARQILMRRLRAAIRTGYRRKLVGKADQGKVIEVSALSDISSHFIRSGRYTRFADWRFVFKARLGTVPLNGSKRWGNRDKRCRRCGYVSETLPHVLNHCQKQSAAWQGRHDAVLGRLSKAVPRITGDVSINKTVPGIDSNLRPDLVVINEGEKRITIVDVAIPFENRCQALAVARAEKETKYARLADELRQKGYEVSVDGFVVGALGSWDRKNEGVIRKLRISPRYANVMRRLMVSETIRWSRDIYVTHVTGHKQW

SEQ ID NO: 14838 - protein, 1308 aa, Euura saliciscinereae
MATWKEIELEVLRRFLEEKIGPVTGADLTALQMQLPGRSTAGIKKKIGQVRVNNNNNDANNNDANHIDANNENGGNVPARPKAWTPEEFRRLEVAFSRAAGNTKAEKLKNITEQFQGRTAKAMAQQLRTKSPYIYEGGALQEEEEERDEERRGGVGREVQREDAPADERQESPRRRAAVDNAGRHRGGRVRRVTDRRVPQQPQHEDPTDVPERAPRVGFNPHPQPVEARPADQNVNPAPAGLPEHPDGRTQHYATQQQHAEPQQIQGGQPPAEDAAMTSLRKRFRYAWSHVAGARRNVGRIGTRVDRGLVARIDILLQEALTLAAESGLPETAIRKSSKRAIRAAGLILADETKRRRKKRKSKAPKHVSIKRVVDGLEKKIELATTLRSWKKRHLSYPLRTFARQLRRMKLTPTQYLDVTRDRIATLKKSQQYQEELHQSLKLRSEFAERPSIKTITEKPTRVELEVTKAEEFYTKLYSTIDKDDRKPTPRFNDYVRRLRRHREANIPQQIDQRTLEDLTNRAAKTMAPWKTPGEDGIPAGLYNLFPSAKRYLTSFVRGVLDGTRTCTVADARGKVILLHKNGDVKDPANYRPIALLNTDYKVLTSVIAQVVKSNLPEWAIPGEQLAREEVWGTTHGLLQDKAASQVARMNRAKHHSAWIDFAKAYDSVSHRQLRRLIQVLPIPDNMINVLTNVTKKWSIRISLGKTNTAPIDVRRGVYQGDTISPLLFILVTAFIIQEVKTSPDVLVAARGKQEIVAYMDDIKLHAASDKGLKAAVKCVKTCAQEVGLHMNTKKCGVYTRTDTAGEDEEADDDRGDGEGSAFLPRIREGYKYLGITQLELDTEINITSVVEKSTEKAKQILGSKLAASQKIQLLNSTVATAATYVLGNMFSEKRCSTMIRVSRDLDLQIRKLLVEDKLKTYSTSTASVHLDRNRGGLGLRSVADEVELHYVRKGAYLALHPDLEVARQRYDALGKKGWKNPRTDFERILTKHGVAWEPQEDLNIGENARKVVSRVRAKQQERWAATWCENMNYGRVVAQEKGRVMFHAYNSWYMEGWRISMLHAAAEEQVQGLGVIPENRIMCPRGCRAQLTAYHVASACLTPEYNTRHDIIVAKILRTILLCHGAPENVLEKCQFTRATMTDEYDWNGREVRMRAGVSVRTSTPLKHNRPDIVVIMSNPEEVFIIEVAVSHLQNVRLQERIKRTRYEINSVADINRDNVNRTTRDTNLVTELRHMYRCPVQLGVLVIGAYGEAICSEEMIKTQSIFQRMGVPPRRFNTLVRSACYSSAVSTTNIITNRLKKGDEGR

SEQ ID NO: 14839 - protein, 1328 aa, Codatractus imalena
MNMMKQNNNTNKLNKYNLRPRHNACRQTSSTKSGCRCVNSIAEHSIQDPSENPEIATIFHSSPTTSSVSPNILQTPNTSPSSFEQINNTPTSSPSSLSVDVAQGAGFIIPEPTTDICRARKKWTTEMNTFIWRTYLITTNMETDTRQYLDILHSEFNKKYPQINASKQRLGDQRRAIIRNNLLDKKTREQIKMEIITNESYNLGLDIHSNKENSQRSRIKWSREMNENLIRCYYETTNCETNKTGYRTQLRHKFIDIYPQFSHLSEQNIADQNRSIINNKLITETRLIELKKEITKICTARQSADRTPSNPNPSSNQEIIQNRQNDTIEEEISPLETSTINSLLRNRLCNITTQKTFIDYDKINQTFNDTLNRFQQSNPTTRPRIPKLKCSKKLDLIVDYINSNILVKYSDINNDFITTQTIIYAAAYTAAVCIGIKIYNAGETNRQYKRNSPPWQIRIQNKILELRKDIGRMTQYMRGNSSRKLVNNVQEIKTKYKVHTKHEEQNKTDEQIIDTLKQKLNAAASRLKRYIQCSLRKKQNSQFINSEKQFYRQLDQNTQKTQSHIHDKHNTHTTSEIPAADEFHQYWCNIWSNPVQHNISADWLNKENIDNIQQMNFEYISLNTFLQILKKAHNWKSPGSDNIHNYWYKRFTQFHPLLHNFINKFILNPKSMPQYVTQGITYLIPKDQDYKNPANYRPITCLQTIYKLLTGCISELVYQHIMQNNILATEQKGCRKKSQGCKEQLIVDSVTMNLAFKQNKNISTMYIDYRKAFDSIPHSWLIYILQHYKIDPVIINFLKTAMKYWVTTLKTSSPNIDTSEIPIRRGIFQGDSFSPLWFCLALNPLSNMLNRTNDGFHIKVNNNRTVLTHLMYMDDIKLYSDNTQTLHNLADITQTFSNDICMEFGIDKCKTLEVKNGMLVQNNYPLKSGHHIEALDHNSFYKYLGFHQNRQINHRQIKLEIASKFKHRINILLRSQLNARNTVKSINTYAIPLLTYSFGIIKWTQAELKKMQCNINKALTTYRKHHPRSCSQRLTLPRKEGGRGIVDIVNLHNSQISSLRRFFHEQAEQTNLHKIVTMVDVKLTPLNLHVRTPQRNEQIIDLKEKIRSWQKKSLHGRHFQDLQQPHVDKEASNAWLRRGELFPETEAFMIAIQDQTINTRNYQKYIIRTPNLPTDICRRCHSNSETIQHITGACKSIVQTDYKHRHDQVAAIIHQNLAYKHKFVTQKVPYYKYKPDCILENSKYKIYWDRTIITDKTVHYNRPDITILDKAQKTVFLIDIAVCNTHNLLNTHSEKIAKYEDLSIEIKRQWQVNKVTTVPIIISTTGVI

SEQ ID NO: 14840 - protein, 1365 aa, Codatractus cyledis
MKMMKQNNKTNNLNKYNLRPRHNACRQTSTKLGCRCVNSIAEHSIQDPSENPEIATIFHSSPTTSSVSPNIFQTPNTSPSSFEQINNTPTSSSSLSVDVAQGADAIIPEPTTDICRARKKWTPEMNTFIWRTYLITTNMETDTRQYLDILHSEFNKKYPQINASKQRLGDQRRAIIRNNLLDKKTREQIKMEIITNESYNLGLDIHSNKENSQRSRIKWSREMNENLIRCYYETTNCETNKTGYRTQLRHKFIDIYPQFSHLSEQNIADQNRSIINNKLITETRLIELKKDITKICTTRQSEDRTPSNPNPSSNQEIIQNRQNDTIEEETSPLETSTINSLSRNRLCNITTQKTFIDYDKINQTFNDTLKRFQQSNPTTRPRIPKLKCSKKLDLIVDYINSNILVKYSNINNDFITIQTIIYAAAYTAAVCIGIKIYNAGETNRQYKSNSPPWQIRIQNKILELRKDIGRMTQYMRGNSSRKLVNNVQEIKTKYKVHTKYEEQNKTDEQIIDTLKQKLNAAASRLKRYIQCSLRKKQNSQFINSEKQFYRQLDQNTQKTQSHVRDKHNTHTTSEIPAADEFRQYWCNIWSNPVQHNISADWLNKENIDNIQQMNFEYISLNIFLQILKKAHNWKSPGSDNIHNYWYKRFTQFHPLLHNFINKFILNPKSMPQYVTQGITYLIPKDQDYKNPANYRPITCLQTIYKLLTGCISELVYQHIMQNNILATEQKGCRKKSQGCKEQLIVDSITMNLAFKQNKNISTMYIDYRKAFDSIPHSWLIYILQHYKIHPVIINFLKTAMKYWVTTLKTSSPNIDTSEISIRRGIFQGDSFSPLWFCLALNPLSNMLNRTNDGFHIKVNNNRTVLTHLMYMDDIKLYSDNTQTLHNLADITQTFSNDICMEFGIDKCKTLEVKNGMLVQNNYPLKSGHHIEALDHNSFYKYLGFHQNRQINHKQIKLEIASKFKHRINILLRSQLNARNTVKSINTYAIPLLTYSFGIIKWTQAELKKMQCNINKALTTYRKHHPRSCSQRLTLPRKEGGRGIVDILNLHNSQISSLRHFFHEQAEQTNLHKIVTMVDVKLTPLNLHVRTPQRNEQIIDLKEKIKSWQKKSLHGRHFQDLQQPHVDKDASNAWLRRGELFPETEAFMIAIQDQTVNTRNYQKYIIRTPNLPTDICRRCHSNSETIQHITGACKSIVQTEYKHRHDQVAAIIHQNLAYKHKFVTQKVPYYKYKPDCILENSKYKIYWDRTIITDKTVHYNRPDITILDKTQKTVFLIDIAVCNTHNLINTHSEKIAKYEDLSIEIKRQWQVNKVTTVPIIISTTGVIPKTLHASLDALLMPPSTFLLLQKAAILNTCRIVRKFLSI

SEQ ID NO: 14841 - protein, 1080 aa, Venada nevada
MLPQRTKLECLVKVSLPNHTLQTRAQQRLIIIIITIIQNRRNSCTEGETSTTVTHTSDTLIQNRTRNTTTLKTFIDYDKINQTFNETLEHFQQLYPTNRPRIPKLKYSKKLDLIVDYINSNILTKHSDMNNDFITIQTIIYVAAYTAAVCNGMKIYYSKETNQQHKSNVPPWQRRLENKILALRKDIGRMTQYMQGNLSRKLVKNVEEIKTKYKIHSKHEKQNTTDKEILDTLKQKLNAAAGRLKRYMQCSLRKKQNSQFINSEKQFYRQLDQNTSNIHDKHGTHITETPATDELYQFWCNIWSNPLEHNISADWINNENIDNIQQMNFEYISRDIFLKILRKAHNWKSPGSDNIHNYWYKKFTQFHPLLHNHINKFIHNPELMPEYITQGVTYMIPKDQDYKNPAKYRPITCLQTIYKLLTGCISELVYQHTMKYSILATEQKGCRKKSQGCKEQLIVDSVTMNLAFKRKKNISTMYIDYKKAFDSIPHSWLLYVLQHYKINPIIINFLKTAMSSWKTKLKIINNPNIETSEIHIRRGIFQGDAFSPLWFCLALNPLSNMLNRTDSGFHIKVNNDQTELTHLMYMDDIKLYSDTTQKLHSLADIVQTFSNDICMEFGIDKCKTLEVKNGTIIENNYLLKSGLNIEALEYNSFYKYLGFHQNRQINHTQIKLEITKKFKHRIHILLRSQLNARNTIKSINTYAIPLLTYSFGIIKWTQAELKKMQCNINRALTIYRKHHPRSCSQRLTLPRNEGGRGIVDIVNLHNSQISSLRNFFYGEADKMNLHKVVTMADVRLTPLNLHIRTPQRNELIIDQKEKVKAWQNKALHGRHFQDLQQPHVDKEASNAWLRRGELFPETEAFMIAIQDQIINTRNYQKYIIRTPNLPTDICRRCHSNSETIQHITGACKAIVQTDYKHRHDQVAAIIHQNLAFKHKFVTRKMPYYKYIPDNILENKKYKIYWDRTILTDKTIHYNRPDITILDKLNKTVFLIDIAVCNTHNLLTTHSEKIAKYEDLAIEIKRQWQVNTVTTLPIIISTTGIIPKSLHASLNALQMPPSTFVLLQKAAILNTCRITRKFLNI

SEQ ID NO: 14842 - protein, 1369 aa, Urbanus velinus
MKMKKLNNNINNISKYNLRPRQNACRKTSTTDVGCQNLRTGDAEEQTNQDLLVNQTSAAKLCPSPSTSSYHFQTPNSSHLFEQINITSSSSSSSSYLSVDVAQEAEAIILEPTTDNSRARKKWTTEMNTFIWRTYLITTNMETDTHHYLDKLHYEFTTKYPQFNVSKQRLGDQRRAIVRNNLLDKKTREQIKMQLITQELNNLRLEIHSNTQNSQRSRIKWSSEMNENLVRYYYEVTHCETNKTSYRKQLRHKFIDSYPQLSHLSEQNIADQTRSIINNKLITEARLCELKKETQHTLQHPVERTQLNVNDSLDQEPRRYRENNYRETEVTSVTHTCTLNTLLQNRIQNNTSTLKTHIDSDKINKTFDETLNHFQHSNPTTRPRIPKLKCSKKLGLIVEYINSNLLINYVGKNNDFITLQTIIYAAAYTAAVCIGIKIYDSRDANRSHINNTPSWQRRIENKILALRKDIGRMTQYMQGNLSRKLAKNIEEIKTKYKIHTKHEEQNTTDKQFIDTLKQKLNAAASRLKRYTQCNLRKKQNSQFINNEKQFYRQLDQNTQKTQSNTHRQHNNFTPETYLPATDDLYQFWSNIWSNSVQHNISAEWIGEESLDNIQQMNFDCIPFDTFLKILKKAHNWKSPGSDNIHNYWYKKFTQLHPLLHSYINKFLHNPELIPQYVTQGVTYMIPKDEDYKNPAKYRPITCLQTIYKLLTGCISELVYQHVMKNNILATEQKGCRKKSQGCKEQLIIDSVIMNQAFKSKKNISTMYIDYRKAFDSIPHSWLIYILQHYKIHSKIVNFLKTIMTHWTTKLIAINNLNTQTAEINIRRGIFQGDAFSPLWFCLALNPLSNMLNRTNNGFHIEANNNQTVLTHLMYMDDIKLYSDSTQTLHNLADITQTFSNDIFMEFGIDKCKTLEVRRGAIVQNNYPLKSGHSIEPLDLNSFYKYLGFYQNRQINHAQIKLEIEKKFKHRINILLRSYLNARNTVKSINTYAIPLLTYSFGIIKWTQAELHKMQRSINKTLTTYRKHHPRSCSQRLTLPRNEGGRGLIDIVNLHNSQISSLRNFFYQQADHTYLHKIVTMADVRLTPLNLHAKTTQRNEKITNLKEKMTAWQNKSLHGRHIQDLQQAHVDKDASNAWLRRGELFPETEAFMIAIQDQTINTRNYQKYIIRTPNLPTDICRRCHSNSETIQHITGACKSIVQTDYKHRHDQVAAIVHQNLAFKHKFVTEKVPYYKYTPDNILENNKYKIYWDRTIITDKTVHYNRPDITMLDKTHKTVFLIDIAVCNTHNLLTTHAEKLAKYEELALEIKRQWQVNTVTTLPIVISTTGIIPKSLHASLTALQMPPFTYALLQKAAILNTCRITRKFLNI

SEQ ID NO: 14843 - protein, 1371 aa, Autochton itylus
MKMKKQNKNTVELNRYNLRPRRNACRTTSTINERCQNIPIIKDQINQDPIRKETETTIFLSASPSTSLISSNLFQTPSSSPHSFEQVNISSSSSSSSLSVDVAQEADALILKPTTDTSRARKKWTVEMNRFIWRTYLITTNMETDTRHYLDKLHYEFNKKYPQINASKQRIGDQRRAIVRNNLLDQKTRDQIKIQLTKNESNSLKFDIHSNTQNSQRNRIKWSKEMNENLVRCYYETTNCETNKTGYRTQLRNKFIDVYPQFSHLSEQNIADQNRSIINNKLITATRLSELRKQVKDLTKSCTTQHSVNTTQPNLNHSSEQETSQNNIVPEEESSSTVTCTPNSLLQIRTHNINTLKIFIDYNKINQTFQETLNQFQQSNPTTRPRIPKLKCSKKLDLIADYINSNILINYIDKNNDFITTQTIVYVAAYTAAVCSGMKIYDSKDTYIQNKSKSPPWKIRLENKILALRRDIGRMTQYMKGNLSRKLIKNVEEIKTTNKIHTKYEEQNITDTQILDTLKQRLNVAASRLKRYMQCTLRKKQNSQFINSEKQFYRQLDQNTQKTQSSINNKHNTTITETPLPDTDQLHQFWCNIWSNPVQHNISADWINNENTDNIQQMSFEYISFDIFLKILKKAHNWKSPGSDNIHNYWYKKFTKFHPLLHNYINKFIHNPETMPQYITQGVTYMIPKDEDYTNPAKYRPITCLQTIYKVLTGCISELVYHHITENNILATEQKGCKKKSQGCKEQLIVDSVIMNLAFKSKKNISTMYIDYRKAFDSIPHSWLIYILQHYKIHPTIINFLKITMIHWSTNLKTINSPNIQTSDIYIRRGIFQGDAFSPLWFCLALNPLSSMLNSTNNGFHIKVNNKQSVLTHLMYMDDIKLYSDSTQALHDMADLVQTFSKDICMEFGIDKCKTLEVKNGKIVQNNYPLKSGHTIEGLDHNSFYKYLGFDQNRQINHRDIKLQIAKKFKHRINILLRSQLNARNTVKSINTYAIPLLTYSFGIIKWTQAELIKMQRNINKALTTYRKHHPRSCSQRLTLPRSEGGRGIVDIVNLHNSQISSLRNFFYEQAEHTNLHKVVTVTDVRLTPLNLHARTPQRNERITALKEKIKLWQSKSLHGRHFHDLNQTHVDKEASNTWLRRGELFPETEAFMIAIQDQTINTRNYQKYIIRTPNLPTDICRRCHSNSETIQHITGACKSIVQTDYKHRHDQIAAIVHQNLAFKHKFVTRIVPYYKYTPDSILENSKYKIYWDRTIMTDKTVHYNRPDITVLDKTQKTVFLIDIAVCNTHNLLTTHSEKIAKYEELTLEIKRQWQVNTVTTIPIVISTTGIIPKTLHASLNALQMPPSTYILIQKAAILNTCRITRKFLNT

SEQ ID NO: 14844 - protein, 897 aa, Telemiades fides
MTQYSQGKLSRKLIKHVEEIRIKYNIHTKHEEHNTTDIQILDTLKQKLNAAASRLKRYMQCTLRKKQNAQFVNNEKQFYRQLDKNSQETESNIYNKDNTQVTEKPTIEINKLHEFWSNIWSIPAHHNTSANWINKENIDHIKQMKFDYISPDIFQKILKKSHNWKSPGSDNIHNYWYKKFTQFHPLLHNYINKFIHNPEIMPEFITQGVTYMISKDEDYTNPAKYRPITCLQTIYKLLTGCLSELIYQHTLQYNILAIEQKGCKKQSQGCKEQLIIDSVVMNLACKRKKDISTMYIDYRKAFDSVPHSWLVHILQLYKIHPIIINFMKVAMLQWTTKLKVLNSPNMQTSDIPIRRGIFQGDAFSPLWFCLAINPLSNMLNRTNDGFHIKVQNTQTILTHLMYMDDIKLYSNSTQNLHNLADIVQTFSSDISMEFGIDKCKTLEIKNGIIVQNNYSLKSGHTIEALDYNMFYKYLGFHQNRQINHTQIKLDLTKKFKHRINILLRTQLNARNTVKSINTFAIPLLTYSFGIIMWTLGDLKKLQTCINKTLTTHRKHHPRSCLQRLTLPRVEGGRGILDIVNLHNSQISSLRNFFYEQSEHIKLHKVVTMADVRLTPLNLHVKTPQRNEKVIGIKEKVEAWQKKSLHGRHYQDLQQPHVDKEASNAWLRRGELFPETEAFLIAIQDQTINTRNYQKYIIRTPNLPTDICRRCHSNSETIQHITGACKSIVQTDYKHRHDQVAAIVHQNIAFRYKFLTKKVPYYKYIPDTILENNKYKIYWDRSIITDKTVHCNRPDITILDKMKKIVFLIDIAVCNTHNLLATHAEKIGKYEDLAVEIKRQWQVDSVKTIPIVISTTGVIPKTLHTSLNALDLPSYTFLLLQKAAILNTCRITRKFLNS

SEQ ID NO: 14845 - protein, 1354 aa, Astraptes apastus
MNMKMKKQTRNIDKLNKYNLRPRKNACQTTIEEHINQDRFKNQTEVAAMVNKSPSSSSISSHLFQTPNSSPHSFEKVNISSSSSSTLSVDVAQEAEALILEPTADTNRARKKWTIEMNRFIWRTYLIITSMETDTRNYLDKLHYEFNKKFPQFNASKQRLGDQRRAIIRNNLLDKKTREQIKSQLTTNEINDLNIHIEINANTQNSQRSRIKWSTEMNENLIRCYYQATVCETNKTAYRAKLRNNFIDIYPQFSYLTEQNISDQNRSIINNKLITDTRLSEIKEAIKDKATTCTTQHTVQTNLNHSSLEEINQNNIVATKESSLTEFYTSNSLLENRPCNTSILKTFIDYNNINKTFDETLNQFQQSNPTTRPRIPKLKCSKKLDHIVDYINSHILINYSDENNDFNTIQTIIYSAAYTAAVCSGMKIYDSRNANLQSKSKTPSWQIRIESKISGLRKDIGRMTQHMQGNSSRKLGKNIKEIKTQYKIHTKHEEQNTTDAQILDTLKQKLNAAASRLKRYMQCSLRKKQNSQFINSEKQFYRQLNQNTQNTQSSINNKPNTIIPDTEQLYQFWYNIWSNPVQHNITADWINNENTENIQQMNFEFISFDTFIKILKRAHNWKSPGSDNIHNYWYKKFTYFHPILHNYINQFIRNPELMPQYVTQGVTYMIPKDEDYKNPAKYRPITCLQTIYKLLTGCISDLVYQHITQNNILATEQKGCKKKSQGCKEQLIVDSITMNLAFKNKRNISTMYIDYRKAFDSIPHSWLLYILQHYKIHPTIINFLKTAMIHWSTNLKTINSPNTQTSEIYIRRGIFQGDAFSPLWFCLALNPLSNMLNSTNNGFHIKINNNRTLLTHLMYMDDIKLYSNNTQTLHNLADIIQTFSNDICMEFGIDKCKTLEIKNGKIVQNNYPLISGHRIEALDHNSFYKYLGFDQNRQINHAQIKLEITKKFKHRINILLRSQLNAGNTVKSINTYAIPLLTYSFGIIKWTQTELIKIQRNINKTLTTYRKHHPRSCSQRLTLPRSEGGRGLVDIVNLHNSQISSLRNFFYEQAEHTNLHKVVTVADVRLTPLNLHARTPQRNEKITDLKEKIKSWQNKSLHGRHFQDLQQPHVDKEASNAWLRRGELFPETEAFMVAIQDQTINTRNYQKYIIRTPNLPTDICRRCHSNSETIQHITGACKSIVQTDYKHRHDQVAAIVHQNLAFKHKFVTQKLPYYKYKPDTILENSKCKIYWDRTIITDKTVHYNRPDITILDKTDKTVFLIDIAVCNTHNLLTTHSEKLAKYEDLALEIKRQWQVNTVTTIPIVISTTGIIPKTLLVSLKALQMPPSTYILLQKAAILNTCRITRKFLNI

SEQ ID NO: 14846 - protein, 1265 aa, Spathilepia clonius
MKMKKQNTNKNIDSLNRYNLRPRRNTYRTTSTINERCQNLPTIEEHISEDPLKMQTENAPILHTSPSTSSISPSILGETPNSSLHSFEQLHISLSSSCPSLSVDVAQEAEALIREPTTDSCRARKKWTAEMNTFIWRTYLIITNMETDTRHYLDKLHYEFNTKYPKFNVSKQRLGDQRRAIVRNNLLDQKTREKIKTQLTTNETNNLRLEINSNTQNSQRSRIKWSKEMNENLIRCYYETTNCGTNKTGYRTQLRNKFIDIYPQFSYLSEQNIADQSRSIINNKLITEIRLRELKEEIKETTQHSIDIIQLNLNRSAEQEINQNNIGAQEDEETTSRINYTLNSLVQNRNCNTATLKLFIDYDKINQTFTETLKKFKQSNPTSRPRIPKLKYSKKLDLIVDYINSNILISYSDESKDFITIQTIIYAAAYTAAVCSGMKIYDTRDTNRQHKSNLPSWQRRIESKILALRKDIGRMTQYVQGNLSRKLIKYIEEIKNKYKIHTKHEEQNTTDNQILDTLKQKLNAAASRLKRYMQCSLRKRQNSQFVNSEKQFYRQLDQNTQKIQSNTNNRHNMVETEIPLPDTDQLYQFWHNIWSHPVQHTASAEWINNENTDKIQQMNFEYISFDTFLKILKKAHNWKSPGSDNIHNYWYKKFTQFHPLLHNYINEFIQNPKVMPQYITQGITYMIPKDEDYKNPAKYRPITCLQTIYKLLTGCISEQVYQHIIQNDILATEQKGCKKKSQGCKEQLIVDSVAMNLAFKSKKNISTMYIDYRKAFDSIPHSWLLYILQHYKIHPTIINFLKTSMMRWTTSLKTINGPNNQTPEIYIRRGIFQGDAFSPLWFCLALNPLSNMLNSTNSGFHIKVNNDQTVLTHLMYMDDIKLYSNSTETLHNLADIVQNFSNDVCMEFGIDKCKTLEVQNGIIVQNNYSMKSGHNIEALDHNSFYKYLGFPQNRQINHTQIKLEIGKKFKHRINILLRSQLNARNSIKAINTYAIPLLTYSFGIVKWTQAELNNMQRTINKALTTYRKHHPRSCSQRLTLPRKEGGRGIVDIVNLHNSQITSLRNFFYEQSEHTNLHKVVTVADVRLTPLNLHVKTPQRNEKITDIKEKIESWQKKSLHGRHFQDLQQPHVDKEASNAWLRRGELFPETEAFMIAIQDQTINTRNYQKYIIRTPNLPTDICRRCRSNSETIQHITGACKSIVQTDYKHRHDQVAAIVHQNLAFKHKFVKQKVPYYKYIPDTILENSKYKIYWDRTIITDKTVHYN

SEQ ID NO: 14847 - protein, 1313 aa, Aurina azines
MSQCNSPSSSVSPNLFQTPNSSPHSFEQANFTLLSSSSSLSVDVAQEAEADILEPTTDNFRARKKWTLEMNKFIWRTYLIATNMEINNRHYLDTLYSEFNKKYPEMNASKQRLGDQKRAIVRNNLLDKKTREHIKTQLTTDESNNVNREIYLNEQNSQRSRMKWSTQMNENLIRCYYDVTNCETNKTGYRSQLRKKFLDIYPQFSHLSEQNIADQNRSIINNKLITEKRLRELVEEMKSVAKTCTTQKVIEETRPNLHENYEREVWKNVCREGEDNSTAPATHNSFLLNRTCNITNSTTFIDHDKVNKTFHEALNRFQQSNPITRPRIPKIRCSKKLDAIVDYINTNILTKYSDENSDFITIQTIIYTAAYTTAICTGLKVYDTKDVGQQHKRSVPPWQRRIENKILALRKDIGRMTQYIRGNLGRKLIKHVEEIRKNYNIHTKHEEPNKSDKEILDTLKQKLNAAVSRLNRYIQCSLRKKQNSQFSKNEKQFYKQLEQKTQKTESYIHNRTNTHYTTEESMPPIEDLYQFWHNIWSRPVQHNIAADWINNEDTDSIQQMNFESISLDTFLKILNKAHNWKSPGSDHIHNYWYKKFTQFHPMLHSFINKFINSPESIPKYVTQGVTYMIPKDEDHKNPTKYRPITCLQTIYKLLTGCISELIYQHIIQNNILAIEQKGCKKQSQGCKEQLIVDSVVMNVAFTRKKNISTMYIDYRKAFDSVPHSWLIYILQHYKIHPIVINCLKTAMLHWTTKLKTMNNPNAHTSEIPIRRGIFQGDAFSPLWFCLALNPLSNMLNRTSNGFHVKINNNQTVLTHLMYMDDIKIYSDSTPTLHELADITQTFSNDICMEFGIDKCKTLEVNNGIIVQNNYILNSGHNIEALGYNSFYSYLGFDQNRQINHAQIKLEITKKIKHRINILTRSQLNSRNIVKSINTYAIPLLTYSFGIIKWTQTELKKMQSSINKTLTIYRKHHPRSCLQRLTLPRVEGGRGIVDIINLHNSQISSLRTYFYEQAEQTKLHKVVTMADVRLTPLNLHARAQQRNEKVTDMKDKMKAWKNKSLHGRHFQDLHQPHVDKEASNAWLRRGQLFPETEAFIIAIQDQTINTRNYQKYIIRTPNLPTDICRRCHSQSETIQHITGACKAIVQTDYKHRHNQVAAIVHQNIAFTHKFVPQKLPYYKYTPDNILENSKYKIYWDRTIITDKTVHYNRPDITILDKIKKTVFLIDIAVCNTHNLLATHTEKIAKYEDLAIEIKRQWKVNTVTTVPIIISTTGVIPKSLHTSLNALDMPSSTIELLQKAAILNTCRITRKFLNI

SEQ ID NO: 14848 - protein, 1161 aa, Astraptes apastus
MQLTTHESNNLRLETYSATQNSQRSRIKWSREMNENLVRCYYEVTHCETNKTSYRTQLRNKFIDSYPQFSYLSEQNIADQNRSIINNKLITEVRLCQLRKEIKDKQQTVDRAHTNLSLERESHQNSQRQNICIEREATSMVPCNLDSLLQNREESNKTTLDNKIFIDCDKINQTFHETLNHFKNSNPTTRPRIPKLKPSKKLDSIVEYINSKILSNYLDKDSEFITIQTIIYSAAYTAAVCSGTKIYDSSDTNRQHINNTAPWQVRIENKILALRKDIGRMTQYMHGNLSRKLVKHIEEIKSKYKTHTKHEEQNKTNKQILDTLKQKLNAAASRLKRYVQCSLRKKQNSQFINSEKQFYRQLDQNTQKTQSIINSKHNNSITDTPFPDPDELYQFWDNIWSNSVQHNISADWINEDSLDNMQQMNFDQVSFDTFLNILKKAHNWKSPGSDNIHNFWYKKFTQLHPLLHNYINKFIHNPELTPQYVTQGVTYMIPKDEDYRNPAKYRPITCLQTFYKLITGCISELVYQHVVQNEILSTEQKGCKKRSQGCKEQLIVDSVIMNLAFKSKKNISTMYIDYRKAFDSIPHSWLIFILQHYKIHPNIVNFLKTIMIHWTTKLKVINNPNIETTEINIRRGIFQGDAFSPLWFCLALNPLSNMLNRTKNGFHVKINSNQTALTHLMYMDDIKLYSDSTQTLHNLADITQTFSNDICMEFGIDKCKTLEVKNGTIVQNNYSLKSGHDIEALDLNSFYKYLGFHQNRQINHTQIKIEIEKKFKHRINILLRSQLNARNTVKSINTYAIPLLTYSFGIIKWTQVELNKMQRNINKALTNYRKHHPRSCSQRLTLPRNEGGRGIVDIVNLHNSQITSLRNFFYEQAEHTNLHKVVTTADVRLTPLNLHIKTPQRNEKITDPKEKMKLWQNKTLHGRHFQDLHQPHVDKEASNAWLRRGELFPETEAFIIAIQDQTINTRNYQKYIIRTPNLPTDICRRCHKNSETIQHITGACQSIVQTDYKHRHDQVAAIVHQNLAFKHKFVTQKVPYYKYIPDNILENGNYKIYWDRTIITDKTVHYNRPDITILDKTKKTVFLIDIAVCNTHNLLTTHSEKLAKYEDLALEIKRQWQVSTVTTIPIVISTTGIIPKSLHVSLKALQMPPSTYTLLQK

SEQ ID NO: 14849 - protein, 1372 aa, Chioides albofasciatus
MKMKKQYRNTEISKKYNLRPRQNACRMTSTTNKGCQNTQSIEEYRSEDPVENQPETATILHSSPTTSSTSSNLFQTPNSSPHSFQRVNISSSSSSSSLSVDVAKEAEAIILEPTTDSCRARKKWTKDMNSFIWRTYLITTNMETDTRHYLDKLYYEFTKKYPQINASKQRLGDQRRAIVRNNLLDKKTREQIKVELTKNESNILSVETHSDTQNSQRSRIKWSREMNENLIRCYYETTNCETNKTGYRAQLRNKFIDIYPQFSHLSEQNIADQNRSIINNKLITETRLCELRKEIENVVKSCPTQHLMDIIQHPTDIIQPNLNHSSEQNNSDTGNQTNSTLPYTLNSSPQNTTSNTTTLKTFIDYDKINQTFHETYKQFQQSNPTSRPRLPKLKCSKKLDLIVDYINSNILQNYLDKNTDFITFQTIIYSAAHTATVCIGMKIYDPKDTNQQHKTISPSWQRRIESKILELRKDIGRMTQYMKGNMSRKLAKNVEEIKIKYRIHTKHEEQNTTDEQIIDTLKQKLNATSSRLKRYIQCNLRKKQNSQFINNEKQFYRQLDQNTQKTQTNTNKKGNITETPLPDTEQLYQFWCNIWSHPVQHNISADWISNENTDYIQEMNFEYISFDTFLKILKRAHNWKSPGSDNIHNYWYKKFTQIHSLLHTYINKFIQNPKIMPQYITQGVTYMIPKDDDYKNPAKYRPITCLQTIYKLLTGCISELVYQHVTQNKILSTEQKGCKKKSQGCKEQLVIDSVIMNLAFKSKKNISTMYIDYRKAFDSIPHSWLIYILQHYKIHPTIINFLEASMVHWTTNLKIINNSNVRTSEINIRRGIFQGDAFSPLWFCLALNPLSNMLNSTNKGFHVKVNKNQTALTHLMYMDDVKLYSDSTQKLHNLADIIQTFSNDICMEFGIDKCKTLEVKNGKIVQNNYPLNSGHNIEALDHNSFYKYLGFNQNRQINHTEIKKEIGKKFKHRLNILLRSQLNARNTVKSINTYAIPLLTYSFGIIKWTQVELNKMQRNINKALTTYRKHHPRSCSQRLTLPRSEGGRGIVDIVNLHNSQISSLRNFFYEQAEHTNLHKVVTVADVRLTPLNLHVRTPQRNEKITDLKEKIKSWQSKSLHGRHIQDLQQPHIDKEASNAWLRRGELFPETEAFMIAIQDQTINTRNYQKYIIRTPNLPTDVCRRCHSNSETIQHITGACKSIVQTDYKHRHDQVAAIVHQNLAFKHKFVTQKIPYYKYTPDTILENSKYKIYWDRTIITDKTVHYNRPDITFLDKTKKNVFLIDIAVCNSHNLLTTHSEKLAKYEELTLEIKRQWQVNTVTTIPIVISTTGIIPKTLHASLNTLEMPPSTYMLLQKAAILNTCRITRKFLNI

SEQ ID NO: 14850 - protein, 1366 aa, Urbanus proteus
MKKLYSNTNNFSKYNLRPRQNACRNTSAMNTGCQNRPEHDTEERNNQDPLRKQTETSATLHSSPSTSSVSSYHFQTPNSSPHSFEQVNITPSSSSSFMSVDVAQEAEAVILEPTIDSCRARKKWTPEMNRFIWRTYLITTNMETDTHHYLDKLHSEFTKQYPQVNASKQRLGDQRRAIVRNNLLDKKTRDQIKMQLITHECSNLIQETHTNTQNSQRSRIKWSREMNENLIRCYYEVTNCESNKTSYRTLLRNKFIDRYPQYSHLSEQNIADQNRSIINNKFITEVRLCELRKEIKDLMQTVHRTHRTEQEAHQNSQSQNICIEEEDTTIPCSLNSLLQNTQENNKTTFVNRAFIDSDNINQTFDETLNYFKKSDPTTRPRIPKLKSSKKLDSIVQYINSNILSNYLDKNSDFITVQTVIYSAAYTAAVCSGMKIYDSSNTNRQHINNTAPWQVRIENKILALRKEIGRMTQYMQGNLSRKLVKNIEEIKNKYKIHTKHEEHNTTDKQILDTLKQKLNAAASRLKRYVQCSLRKKQNSQFVNNEKQFYRQLDQNTQKTQSNTSSKHNNSTIEAAVPATDELYQFWSNIWSNSVEHNISADWINAESLDNIQQMNAHQVSFDTFLKILKKTHNWKSPGSDNIHNFWYKQFTQLHPILYNYINKFLHNPELMPQYVTQGVTYMIPKDDDYKNPAKYRPITCLQTFYKLLTGCISELVYQHVVQNEILSIEQKGCKKKSQGCKEQLIVDSVIMNLAFRRKKSLSTMYIDYRKAFDSIPHSWLIYILQHYKIHPNIVNFLKTVMIHWTTKLKAINNPNIQTAEINIRRGIFQGDALSPLWFCLALNPLSNMLNRTNNGFQLKVNSNHTTLTHLMYMDDIKLYSDSTQKLHNLADITQTFSNDICMEFGIDKCKTLEVKNGTIVQNSYPLMSGHHIEPLDLNSYYKYLGFHQNRQINHTQIKLEIEKKFKHRINILLRSQLNARNTVKSINTFAIPLLTYSFGIIKWTQGELNKMQRSINKALTNYRKHHPRSCLQRLTLPRNDGGRGIVDIVNLHNSQITSLRNFFYEQAEHTNLHKVVTVADVRLTPLNLHDRTLQRNEKIIDSKEKIKLWQNKSLHGRHYQDLQQPHVDKDASNAWLRRGELFPETEAFIIAIQDQTINTRNYQKYIIRTPNLPTDICRRCHSNSETIQHITGACKSIVQTDYKYRHDQVAAIVHQNLAFQHKLVPQKVPYYKYIPDNILENSKYKIYWDRTIITDKTVHYNRPDITILDKTKKTVFIIDIAVCNTHNLLTTHSEKLAKYEDLALEIKRQWQVNTVTTIPIVISTTGIIPKSLHASLNALQMPTSTFTLLQKAVILNTCRITRKFLNI

SEQ ID NO: 14851 - protein, 1371 aa, Astraptes hopfferi
MKMKKLNNNTNNLSKYNLRPRQNACRTTSIMNNGCQNLPTHESEERNNKDPLGNQAERAAIFHSSPSTSPVSSYHFQTPNSSPHSFEQVNITPSSSSSLSVDVAQEAEAVIPEPTADTCRARKKWTPDMNRFIWRTYLITTNMETDTRHYLDKLHYEFTKKYPQFNTSKQRLGDQRRAIVRNNLLDTQTREQIKMQLITDDSSNLRLETHSNTQNSQRSRMKWSREMNENLIRCYYEVTYCETNKTSYRTPLRNKFIDSYPQFSHLSEQNIADQTRSIINNKLITEVRLCELRKEIKYILQHTVDTTQQNVSHNSVQETHQGRQNICIEGVTTSLVPCNINSLLPYTKETNKTLDNKIFVDSDKINQIFDETLNYFQQSNPTTRPRIPKLKQSKKLDSIVEYINSKILLNYLDKNSDFICVQTIIYAAAYTAAVCSGMKIYDARDTNRQYINNTAPWQTRIENKILSLRKDIGRMTQYMQGNLSRKLVKKIEEIKTKYKIHTKHEEQNTTDKQILDTLKQKLNAAASRLKRYIQCSLRKKQNSQFNNSEKQFYRQLDQNTQKTQSNINGKHNKSKTETPLPATDELYHFWSNIWSNAVQHNVSAHWINEESLDNIQQMNFDQVSFDTFLKILNKAHNWKSPGSDNIHNFWYKKFTQLHPLLHNYINKFIHKPELMPEYVTQGVTYMIPKDEDYKNPAKYRPITCLQTFYKLLTGCISELVYQHVIQNEILAIEQKGCKKKSQGCKEQLIVDSVIMNLAFKSKKNISTMYIDYRKAFDSIPHSWLIYILQHYKIHPNIVNFLKTVMTHWTTKLKVINNPNIQTAEISIRRGIFQGDAFSPLWFCLALNPLSNMLNRTNNGFHVKVNNNQTVLTHLMYMDDIKLYSDSTQTLHNLADFTQTFSNDIGMEFGIDKCKTLEVKRGTIVQNNYPLMSGHNIEPLDINSFYKYLGFHQNRQINHTQIKLEIEKKFKHRINILLRSQLNARNTVKSINTYAIPLLTYSFGIIKWTQVELNKMQRNINKALTNYRKHHPRSCLQRLTLPRIEGGRGIVDIVNLHNSQITSLRNFFYEQAEHTNLHKVVTVADVRLTPLNLHVRTPQRNEKITDSKEKMKLWQNKSLHGRHFQDLHQPHVDKEGSNAWLRRGELFPETEAFMIAIQDQTINTRNYQKYIIRTPNLPTDICRRCHNNSETIQHITGACKSIVQTDYKHRHDQVAAIVHQNLAFKHKFVTQKVPYYKYIPDNILENSKYKIYWDRTIITDKTVHYNRPDITILDKSKKTVFLIDIAVCNTHNLLITHSEKLAKYEDLALEIKRQWQVNTVTTIPIVISTTGIIPKSLHVSLNALQMPPLTYTLLQKAAILNTCRITRKFLNI

SEQ ID NO: 14852 - protein, 1350 aa, Urbanus velinus
MKKHRNTENIKIYNLRPRKNACRTTFEESVNQDRFKNQTEDATIACTSPSTSSISSHLFQTPNSSPHSFEHVNLSSSSSSSSLSVDVAQKAEARILEPTTDFCRARKKWTPEMNRFIWRTYLIITSMETDTRNYLDKLHYEFNTKFPQFNASKQRLGDQRRAIVRNNLLDKKTREQIKSQVATNEPNILNTYISTQNTQRSRIQWSREMNENLIRCYYQATDCETNKTAYRPKLRNKIIDIYPQFAHLTEQNISDQNRSIINNKLITDTRLSEIKESIKYNAQTCTTQHTVDTNLNNISVEEINQNNIVASKDTSPTIPRTTNSLSQNRPCNTNDMLKRFIDYNKIDETFNDTLNQFQKSDPTTRPRIPKLKSSKKLDLIVNHINSKILINYSDKNSDFITIQTIIYSAAYTAAVCSGMKIYETNNANLQYKSKPPPWQMRIESKILTLRKDIGRMTQYMQGNISRKLTKNIEEIKTKYKIHTKHEEDNTTDKQILDTLKQKLNAAASRLKRYMQCGLRKKQNSQFINSEKQFYRQLDQNTQNTQSGNNNMNNAIITDKPDTDQLYQFWYNIWSNPVQHNITADWINNESTEYIQQMNFESISFDTFIKIHKRAHNWKSPGSDNIHNYWYKKFMQFHPILHNYINKFIRNPELMPQYVTQGITYMIPKDEDYKNPAKYRPITCLQTIYKLLTGCISELVYQHITENDIVATEQKGCKKKSQGCKEQLIVDSIAMNLAFKSKKDISTMYIDYRKAFDSIPHSWLIYILQHYKIHPTIINFLKTAMTHWTTYLKTINSPNVQTSKIYIRRGIFQGDAFSPLWFCLALNPLSNMLNKTNNGFHIKVNNNQTVLTHLMYMDDIKLYSNSTQTLHNLADITQTFSNDIRMEFGIDKCKTLEIKNGKIVHNIYPLKSGHNIEGLDHNSFYKYLGFNQNRKINHAQIKLDIEKKFKHRINILLRSQLNARNTVKSINTYAIPLLTYSFGIIKWTQTELNKMQRNINKTLTTYRKHHPRSCSQRLTLPRNEGGRGIVDIVNLHNSQISSLRNFFYEQAEHTHLHKVVTVADVRLTPLNLHARTPQRNEKIINLKEKMQSWQNKSLHGRHFNDLQLPHVDKEASNAWLRRGELFPETEAFMIAIQDQTINTRNYQKYIIRTPNLPTDICRRCHSNSETIQHITGACKSIVQTDYKHRHDQVAAIIHQNLAFKHKFVTQKSPYYKYTPDTILENNKYKIYWDRTIITDKTVHYNRPDITILDKTNKTVFLIDIAVCNTHNLLNTYTEKVAKYEDLAIEIKRQWQVNSVTTIPIVISTTGIIPKTLHVSLDALQMPPSTYILLQKAAILNTCRITRKFLNI

SEQ ID NO: 14853 - protein, 931 aa, Urbanus velinus
MKIYDSSNTNRQHINNTAPWQVRIENRILALRKEIGRMTQYMQGNLSRKLVKNIEEIKNKYKIHTKHEEHNTTDKQILDTLKQKLNAAASRLKRYVQCSLRKKQNSQFVNSEKQFYRQLDQNTQKTQSSKQNNSTIEAAVPATDELYQFWSNIWSNSVEHNISADWINTESLDNIQQMNAHQVSFDTFLKILKKTHNWKSPGSDNIHNFWYKQFTQLHPILYNYINKFLHNPELMPQYVTQGVTYMIPKDDDYKNPAKYRPITCLQTFYKLLTGCISELVYQHVIQNEILSIEQKGCKKKSQGCKEQLIVDSVIMNLAFRRKKSLSTMYIDYRKAFDSIPHSWLIYILQHYKIHPNIVNFLKTVMIHWTTKLKAINNPNIQTAEINIRRGIFQGDAFSPLWFCLALNPLSNMLNRTNNGFQLKVNSNHTTLTHLMYMDDIKLYSDSTQKLHNLADITQTFSNDIRMEFGIDKCKTLEVKNGTIVQNSYPLMSGHHIEPLDLNSYYKYLGFHQNRQINHTQIKLEIEKKFKHRTNILLRSQLNARNTVKSINTFAIPLLTYSFGIIKWTQGELNKMQRSINKALTKYRKHHPRSCLQRLTLPRNDGGRGIVDIVNLHNSQITSLRNFFYEQAEHTNLHKVVTVADVRLTPLNLHDRTLQRNEKIIDSKEKIKLWQNKSLHGRHYQDLQQPHVDKDASNAWLRRGELFPETEAFIIAIQDQTINTRNYQKYIIRTPNLPTDICRRCHSNSETIQHITGACKAIVQTDYKHRHDQVAAIVHQNLAFQHKFVPQKVPYYKYIPDNILENSKYKIYWDRTIITDKTVHYNRPDITILDKTKKTVFIIDIAVCNTHNLLTTHSEKLAKYEDLALEIKRQWQVNTVTTIPIIISTTGIIPKSLHASLNALQMPTSTFTLLQKAVILNTCRITRKFLNI

SEQ ID NO: 14854 - protein, 1377 aa, Urbanus sp.
MKKFNNNTNNTNNNSSKYNLRPRQNACRNTSTMNIGCQNRPEHGTEERFNQDPLRKQTETSTTLHSSPSTSSVSFYHLQSPNSSPHSFEQVSITPSSSSSFMSVDVAQEAEAVILEPTIDSCRARKKWTPDMNRFIWRTYLIITNMETDTRRYLDKLHSEFTKKYPQVNASKQRLGDQRRAIVRNNLLDTKTRNQIKMQLITHEPHNLIQNTHTNAQNSQRSRIKWSTEMNENLIRCYYQVTHCETNKTSYRTLLRNKFIDRYPQYSYLSEQNIADQNRSIINNKLITEVRLCELRMEIKDLIQQNVDRTHRNENHSSGQETHQNSHSQNICIEEENATIVPCNLSSLLQNTQENNRTTFINKTFIDSDNINQTFDETLNHFKKSDPTTRPRIPKLKSSKKLDSIVEYINSKILSNYLDKNSDFITVQTVIYSAAYTAAECSGMKIYDSSNTNRQHINNTAPWQVRIENRILTLRKEIGRMTQYMQGNLSRKLVKNIEEIKTKYKIHTKHEEHNTTDKQILDTLKQKLNAAASRLKRYVQCNLRKKQNSQFINSEKQFYRQLDQNTQKTQSNNNSKHNNSTIETALPATDEMYQFWSNIWSNSVQHNISADWINAESLDNIQQMNADQVSFDTFLKILKKTHNWKSPGSDNIHNFWYKQFTQLHPILHNYINKFIHNPELMPQYVTQGVTYMIPKDEDYKNPAKYRPITCLQTFYKLLTGCISELVYQHVIQNEILAIEQKGCKKKSQGCKEQLIVDSVIMNLAFKRKKSISTMYIDYRKAFDSIPHSWLVYILQHYKIHPNIVNFLKTVMIHWTTKLKTINSPNIQTAEINIRRGIFQGDAFSPLWFCLALNPLSNMLKRTNNGFHVKVNSNQTTLTHLMYMDDIKLYSDSTQTLHNLADITQTFSNDICMEFGIDKCKTLEVKNGTIVQNSYPLMSGDHIEALELNSCYKYLGFHQNRQINHTQIKSEIEKKFKHRINILLRSQLNARNTVKSLNTFAIPLLTYSFGIIKWTQVELNKMQRNINKALTNYRKHHPRSCLQRLTLPRNEGGRGIVDIVNLHNSQITSLRNFFYEQAEHTNLHKVVTAADVRLTPLNLHDRTPQRNEKTVDSIEKMKLWQNKSLHGRHYQDLQQPHVDKEASNAWLRRGELFPETEAFMIAIQDQTINTRNYQKYIIRTPNLPTDICRRCHSNSETIQHITGACKSIVQTDYKHRHDQVAAIVHQNLAFKHKFVPQKVPYYKYIPDNILENSKYKIYWDRTIITDKTVHYNRPDITILDKTKKTVFLIDIAVCNTHNLLTTHSEKIAKYEDLALEIKRQWQVNTVTTIPIIISSTGIIPKSLHASLNALQMPPLTFTLLQKAVILNTCRITRKFLNI

SEQ ID NO: 14855 - protein, 1195 aa, Ectomis labriaris
MNASKQRLGDQRRAIVKNNLLNEEVRKQIKIHLATSEPSNLETHSIERTSQRNRIKWSEEMNENLIRCYYEITNCETNKTGYRTQLRNKFIHIYPHYSHLSAQNIADQNRSIVNNKLITECRLQELRNEINLSQQIHKTQAHINHNLEEEIRLGLNIERHIETNTTSAQASRTLSRNIMANTTVKSLIEYDKIDNIFNDALNRFQKSNPITRPRIPKLKCSKKLDLIVDYINSNILTKYLHIKNDFVTIQTIIYAAAYTSAVCSGIKICDTESERRQYDKNLPPWQRRIENKILILRKDIGRMTQYLQGNLSRKLGKHIEEIRTKHKIHTKHEEHNTTDIQILDTLKQKLNAAASRLKRYVQCTLRKKQNAQFINNEKQFYRQLNQNMQNTSTESNIHKSKKPTPITDKLYQFWSNIWSIPVQHNITAEWIQSENTDNISQMNFDYISLDMFKKLLKKAHNWKSPGSDNIHNYWYKKFTQLHPLLHNYINAFIDDPDLIPQYITKGVTYMIPKDEDYTNPAKYRPITCLQTFYKLLTGCISELVYQHITKNNILAIEQKGCKKKSQGCKEQLIIDSVVMNQAFKGKKDISTMYIDYRKAFDSVPHSWLLYTLNLYKIHPKIINLMKTAMLQWTTKLKVPNSSNILTSEIPIRRGIFQGDSFSPLWFCLAMNPLSNLLNKTNDGFNFKIKSHQTFLTHLMYMDDIKLYSDSTQTLHNLADIVQTFSSDIFMEFGVDKCKTLEFKNGTIVQNNYPLQSGENIEALNHNSFYKYLGFNQNIQINHAQIKFEITKKFKHRINILLRSQLNARNTVKSINTFAIPLLTYTFGIIKWTQAELGRLQCYINKTLTTYRKNHPRSCLQRLTLPRVEGGRGIVDILNLHNSQVSRLRNFFHEQAEQVSFYKVITLADIRLTLLNLHVKTPQRNEKIIDVKEKIEAWQKKSLHGRHYKDLQQPHVDKEASNAWLRRGELFPETEAFMIAIQDQTINTRNYQKYIIRTPNLTTDICRRCHSSSETIQHITGACKSIAQSDYKHRHDQVAAIVHQNIAYRHKFLKKKVPYYKYIPETILENNYYKIYWDRTIITDKTVHYNRPDITILDKINKTVFLIDIAVCNTHNLLATHSEKIAKYEDLAVEIKRQWQVNIVKTIPIVISTTGIIPKTLHTSLSAIEIPYSTFILLQKATILNTCRITRKFLNS

SEQ ID NO: 14856 - protein, 1366 aa, Telegonus anausis
MKMKKLNNVNTNNLSKYNLRPRQNACRTTSIMNNGCQNLPALEGEERNNQDPLGNHSSPSTSPVSSYHFQTPNSSPHSFEQLNITSSSSSSPSLSVDVAQEAEAVIPEPTADTCRARKKWTPDMNRFIWRTYLITTNMETDTHHYLDKLHNEFTKKYPQFNASKQRLGDQRRAIVRNNLLDTKTREQIKMHIITDNSNNLRLETHSNTQNSQRSRIKWSREMNENLIRCYYEVTHCETNKTSYRTSLRNKFIDSYPQFSHLSEQNIADQNRSIINNKLITEIRLCELRNEIKDILQHTIDTTQQNVSHNSVQETHQGRQNICVEGVNTSVIPYNLNSLLSNTKESNTTLDNKILIDSDKINQIFDETLNHFQQSNPTTRPRIPKLKHSKKLDSIVEYINSKILLNYLDKNSDFIRVQTVIYAAAYTAAVCNGMKIYESRDTDRQHINNTAPWQIRIENKILALRKDIGRMTQYIQGNLSQRLVKKIEEIKAKYKIHTKHEEQNTTDKQILDTLKQKLNAAASRLKRYIQCSLRKKQNSQFMNSEKQFYRQLDQNTQKTQSNINSKHNKSKTETPLPATDELYHFWNNIWSNSVQHNASAHWINEESLDSIQQMNFDQVSFDTFLKILNKAHNWKSPGSDNIHNFWYKKFTQLHPLLHNYINKFIHKPELLPQYVTQGVTYMIPKDEDYKNPAKYRPITCLQTFYKLLTGCISELVYQHVIQNEILATEQKGCKKKSQGCKEQLIVDSVIMNLAFKSKKNISTMYIDYRKAFDSIPHSWLIYILQHYKVHPNIVNFLKTVMTHWTTKLKAINNPNIETAEINIRRGIFQGDAFSPLWFCLALNPLSNMLNSTNNGFHVKVHNNQTVLTHLMYMDDIKLYSDSTQTLHNLADFTQTFSNDIGMEFGIDKCKTLEVKSGTIVQNNYHLMSGHNIEPLDLNSFYKYLGFYQNRQINHTQIKLELEKKFKHRINILLRSQLNARNTVKSINTYAIPLLTYSFGIIKWTQVELNKMQRNINKALTNYRKHHPRSCLQRLTLPRIEGGRGIVDIVNLHNSQITSLRNFFYEQAEHTNLHKVVTVADVRLTPLNLHVRTPQRNEKITDSKEKMKLWQNKSLHGRHFQDLHQPHVDKEGSNAWLRRGELFPETEAFMIAIQDQTINTRNYQKYIIRTPNLPTDICRRCHNNSETIQHITGACKSIVQTDYKHRHDQVAAIVHQNLAFKHKFVTQKVPYYKYVPDNILENSKYKIYWDRTIITDKTVHYNRPDITILDKTKKTVFLIDIAVCNTHNLLTTHSEKLAKYEDLALEIKRQWQVNTVTTIPIVISTTGIIPKSLHISLNVLQMPPLGYTLFQKAAILNTCRITRKFLNI

SEQ ID NO: 14857 - protein, 892 aa, Astraptes hopfferi
MKICESRDTNRQHINNTPPWQRRIEDKILALRKDIGRMTQYMQGNLSRKLVKNVEEIKTKYKIHTKHEEQNTTDKQILDTLKQKLNAAASRLKRYIQCSLRKKQNSQFINNEKQFYRQLDQNTQRTQSNIHTQHSKSTIESSLPTSDEFYQFWSNIWSNSVQHNITANWINEEILDNIQQMNFDCIPVDTFLKVLKKAHNWKSPGSDNIHNYWYKQFTQLHPLLHNFINKFIQNPELMPQYITQGVTYMIPKDNDCKNPAKYRPITCLQTIYKLLTGCISELVYEHAVQNDILATEQKGCKKNSQGCKEQLIVDSVIMNHAIKSKKNISTMYIDYRKAFDSIPHSWLLYILQHYKIHPNIVNFLKSVMTHWTTKIKAINNLSTQTSEINIRRGIFQGDAFSPLWFCLALNPLSKILNRTNNGFHIEVNNNKTALTHLMYMDDIKLYSGSTQALHNLADIVQTFSNDIRMEFGIDKCKTLEVKDGTIVQNNYPLKSGNNIEALDLNSFYKYLGFHQNMQINHSEIKLDIGKKFKHRINIVLRSQLNARNTIKSINTYAISLLTYSFGIIKWTQAELNKMQININKALTTYRKHHPRSCSQRLTLPRKEGGRGIVDIVNLHNSQISSLRNFFYQQADHTNLHKIVTMADVRLTPLNLHAKVAQRNEKITEIKEKLTAWQNKSLHGRHIQDLQQQHVDKEASNAWLKRGELFPETEAFMIAIQDQTINTRNYQKYIIRTPNLVTDICRRCHNNSETIQHITGACKSIVQTDYKHRHDQVAAIVHQNLAFKHKLITQKVPYYKYTPDNILENSKYKIYWDRTIITDKTVHYNRPDITILDKTKRIVFLIDIAVCNTHNLLTTHSDKLAKYEDLALEIKRQRQLNTVTTIPIVISTT

SEQ ID NO: 14858 - protein, 1367 aa, Urbanus evona
MKKLNNNTYNSSKYNLRPRKNACQNTSTMNVGCQNWPEHDIEERISQDPLRRQTETSATLHSSPSTSSVSSYHFQTPNSSPHSFEQVNITPSSSSSFMSVDVAQEAEAVILEPTIDSCRARKKWTPDMNRFIWRTYLIITNMETDTRHYLDKLHSEFTKKYPQLNASKQRLGDQRRAIVRNNYLDTKTRDQIKLQVITHETNNLMQKTHTNTQKSQRSRIKWTNEMNESLIRCYYEVTHCEANKTSYRTLLRNKFIDSYPQYSYLSEQNIADQNRSIINNKLVTEVRLCELRKEINDLIQQTLNRTHRNENHSSEQETHQNRYCQNICTEGENTTIEPCNLSSLLQNTQEKNKTTCVNKTFIDSDNINQTFDEALNHFQKLDPTARPRIPKLKKSKKLDSIVEYINFKILSNYLDKNSDFITVQTVIYSAAYTAAVCSGIKIYDSSNTNRQRINNTAPWQVRIENRILSLRKEIGRMTQYMQGNLSRKLVKNIEEIKTKYKIHTKHEEHNTTDKQILDTLKQKLNAAASRLKRYVQCSLRKKQNSQFINNEKQFYRQLDQNTQNTQSNINSKQNNSTIETALPATDELYQFWSNIWSNSVQHNISADWINAQSLDNIQQMNADKVSFDTFLKILKKTHNWKSPGSDNIHNFWYKQFTQLHPILHNYINKFINNPELMPQYVTQGVTYMIPKDEDYKNPAKYRPITCLQTFYKLLTGCISELVYEHVIQNEILAIEQKGCKKKSQGCKEQLIVDSVIMNLAFKRKKSISTMYIDYRKAFDSIPHSWLIYILQHYKIHPNIVNFLKTAMINWTTKLKAINNPNIQTPEINIRRGIFQGDAFSPLWFCLALNPLSKMLNETNNGFHVKVNSSQTTLTHLMYMDDIKLYSDSTQTLHNLADITQTFSNDICMEFGIDKCKTLEVKNGTLVQNSYTLMSGHHIEALDFNSYYKYLGFHQNRQINHTQIKLEIEKKFKHRINILLRSQLNARNTVKSINTFAIPLLTYSFGIIKWTQVELNKMQRNINRALTNYRKHHPRSCLQRLTLPRKEGGRGIVDIVNLHNSQITSLRNFFYEQAEHTNLHKVVTAADVRLTPLNLQNKTPQRNEKIIDSKEKMKVWQNKSLHGRHYQDLQQPHVDKEASNAWLRRGELFPETEAFMIAIQDQTINTRNYQKYIIRTPNLPTDICRRCHSNSETIQHITGACKSIVQTDYKHRHDQVAAIVHQNLAFKYKFVTQKVPYYKYTPDNILENSKYKIYWDRTIITDKTVHYNRPDITILDKTKKTVLLIDIAVCNTHNLLTTHSEKLAKYEDLALEIKRQWQVNTVTTIPIIISTTGIIPKSLHASLNTLQLPPLTFALLQKAAILNTCRIT

SEQ ID NO: 14859 - protein, 1356 aa, Telegonus anausis
MKMKKQTRIIDNVSIYNLRPRKNACRTTIEEQTNQDRFKNQTAKATSPYTSPSTSSISSNLFHSSNSSPHSFEKVNMSSSSSSSTSSMSVDVAQEAEALILEPTTDTCRVRKKWTTEMNRFIWHTYLIATNMETDTRNYLDKLHYEFNKKFPHFNESKQRLGDQRRAILRNNLLDKKTREQIKTQVAHELNNLRLEVPSNTQNSQRSRIKWSTEMNENIIRCYYLVTDCETNKTAYRAQLRNKFIDIYPQFSYLTEQNIADQNRSIINNRLITDTRLSEIKKTIKDMANTTPTQHSVHTNLNHSSIDKINQNSIVISQETSLTLTSTFNSLQNRTNDTTTLKSFIDYNKINETFNETLNKFLQSNPTTRPRIPKLKCSKKLDLIVDYINSNILVNYSDHNNDFIAIQTIIYSAAYTATVCSGMKIYDSRNTNLQYKSNPPSWQIRIESKILALRKDIGRMTQYIQGNSSRKLAKNIEEIKTKYKIHTKHEEQNTTDKQILDTLKQKLNAAASRLKRYMQCNLRKKQNSQFINGEKQFYRQLDQNTQKTQFRINNKHNITVTETPLPDSDQLHKFWYNIWSNPVQHNFTADWINNENTDNIEQMNFEYISLDTFLKILKRAHNWKSPGSDHIHNYWYKKFRHFHPILHNYINKFMHNPELMPQYLTQGVTYMIPKDEDYKNPAKYRPITCLQTIYKLLTGCISELVYQHITQNNILATEQKGCKKKSQGCKEQLIVDSITMNLAFKNKRNISTMYIDYRKAFDSVPHSWLVYILQHYKIHPTIINFLKTTMNHWTTKLKTINSPNIQTSEIYIRRGIFQGDAFSPLWFCLALNPLSNMLNCTNNGFHFKINKNRTLLTHLMYMDDIKLYSDSTKKLHNLADITQTFSNDICMEFGIDKCKTLEVKNGNIVQNNYPLKSGQNIEALDNNSFYKYLGFNQNRQINHAQIKLDISKKFKHRINLLLRSQLNARNSVKSINTYAIPLLTYSFGIIKWTQTELKKMQRNINKVLTTYRKHHPRSCLQRLTLPRNEGGRGIVDIVNLHNSQISSLRNFFHEQAEHTSLHKVVTVADVRLTPLNLHDRTPQRNENITDLKEKKTSWQIKSLHGRHFQDLHQPHVDKEASNAWLRRGELFPETEAFMIAIQDQTINTRNYQKYIIRTPNLPTDMCRRCHSNSETIQHITGACKSIVQTDYKHRHDQVAAIVHQNLAFKHKFLTQRVPYYKYIPDTILENSKYKIYWDRTILTDKTVHYNRPDITILDKTEKTVLLIDIAVCNTHNLLTTHSEKLAKYEDLALEIKRQWQVNKVTTIPIVLSTTGIIPKTLHDSLNALRMPPSTYILLQKAAILNTCRITRKFLNI

SEQ ID NO: 14860 - protein, 1434 aa, Dalla costala
MEAVQNRKVPQAGTSAHSEGESRPEPTGLGSSTYSGGSNATQSSVPTPYRLRPRSTSGKGLLKNPISPPLPSHTSITNINSSLVKKTNTNTYNLRPRLNACQKPCTTVYTEQKSPSTNSNKHTDTISCNISPTSSSSNSLFQTPNSSPRSFERAFFSSPSSSSSPLSVDVAQEAEAIYLVPTTDTNRARKKWTPEMNRFIWRTYLIATNIEKNTRNYLDSLHHEFNQEFPHMTASRQRIGDQRRAIIRNNLLDLNTRQQIKLELEASSNTSNLRIHSNEQSQITQRSRLNWTLEMNENLLRCYYQITQNETNKTAYRPQLRKKFIDIYPQLSHVSEQHVADQNRSILNNKLIPENRIKEIVKEIEDAAKNRHNNTNITQRDENFDQVLNRTPNEESETSQGVAHIHHTILDNSRSCNNTTTVTYLDQDNIKETFQETFSRFQHTNPARRPHIPKQKCTKKLFYIVKYLNSNVLPEYLHTTNDFLYVQTVIYSAAYTAVILNGTKIRDLADTIQGNKSKTPAWQNRMEKKVLELRKDIGRITQYKQGHRSRKLVNQVEKIKIKYIIHTKHEENNTTVELILDTLKQKLNAISSRLKRYITCNLRKKQNLQFNNNEKQFYRQLALNTQNNQSGTNNNSIPGTAEPQPPVDKLHEFWSDIWSNPVEHNNLADWIQQENVDSIEHMKFDYIPHDIFMKILKKAHNWKSPGSDGIHNFWYKKFTQIHPILHNFINDFIQNPSSMPEYITQGITYMIPKDLDYTNPAKYRPITCLQTIYKILTGCISELIYEHITQNNILAVEQKGCRKKSQGCKEQLVIDSVVMNLAFSRKKDVSTMFIDYRKAFDSIPHTWLIFILHHYKINPTLIHFMKTSMDNWVTKLKVNQNNIQTPDICIRRGIFQGDAFSPLWFCLALNPLSNLLNKSNNGFPIKAGNNQINFTHLMYMDDIKLYSYSTHSLHHLADITQTFSNDICMEFGIEKCKTLEIKNGQIEQNIYTLQSGQNIDALCQNSCYKYLGIHQNRKINHSNIKAETKGKFKHRINILTRTQLNARNTVKAVNTYAIPMLTYSFGIIKWTQAELKNMQRYINKSLTSNRKHHPRSCLQRLTLSRTEGGRGIVDIVNLHNSQISSLRNFFFEQAKQINLHKVITIVDKQFTPLNLHNNNTQRNEKIIGISEKISAWERKSLHGRHRHDLGQPHIDRQASNAWLRRGELFPETEAFMIAIQDQIINTRNYQKYIIRTRNLPTDICRRCHSNSETIQHITGACKAIAQTDYKHRHDQVAAIIHQNIAYRHKFVTHKEPYYKYKPNTILENNTHKIYWDRTIITDKTVHYNRPDITILDKNRKTVHLIDIAVCNTHNLLSTHVEKIAKYEDLTLEIKRQWQVNTVKTIPVIISSTGVIPKTLHNSLEALEMPASTYALMQKAVILNTCRITRKFLNL

SEQ ID NO: 14861 - protein, 1422 aa, Ectomis asine
MRLRSGLILPQAGTGAFSDGESRPGQLSSGSPTYSGGDTVSQPSAQYNTVTEQNHDSTSIVQMCQYQYHETLSSTSTSSLVNFSDTPTLSTYTNNLNNIRTRAVVHTNEKEAKRTAPINQLGPTVMLYPPASSESCSKSNFTPSASLSLSVDVAQEADAINPEPTIDKFCARKKWTPEMNKFIWRTYLIATKMENDPRHYLDTLHHEFNKKYPYMNASKQRLGDQRRAITNKNLLNKEDREQIKKELSINEHNFSLEITSSSNEQFLLRNRIKWSREMNENLIRCYYTITNCEVNKTGYRTQLRNKFIDIYPQFSHLSEQNIADQNRSIINNKLITETRLLEIKNEIKVLIKTNTKRHNTNEISVASCSNNNINNNLEQEIRLSLDTEGEIISTSTPTLQVLASCNATTVNSFLDHDKIDKIFLDTLQHFRHSNPITRPYIPKLKYSKKLDTIIDYINSNILTKYLHINNDFITYQTIIYAAAYTCALCSGIKIYDSENKSQQYNYKPPWQRRIENKILALRKDIGRMTQYLQGNLNRKLVKRVEEIKSKYKIHTKYEEHNTTDIQILDTLKQKLNAAASRLKRYVQCSLRKKQNSQFTHNEKQFYRQLKHNTQKTESNTHNTDNVTEIPTPDIDKLYQFWHDIWSIPVQHNTSAYWINSENTDNIEKMNFDNISQEILLKILKKAHNWKSPGSDNIHNFWYKKFTQFHPLLHNYVNKFIHNPDSMPQYITQGVTYMIPKDENSTDPSKYRPITCLQTFYKLVTACISELVYQHASQNDILAFEQKGCKKKSQGCKEQLIVDSIVMNLAFKRKKNISTMYIDYRKAFDSIPHSWLIYILELYKIHPLIINFLKKAMIQWKTNLKAFKDLKVQTPEIPIRRGIFQGDALSPLWFCLALNPLSNMLNKSNDGFHIKVKNNQSMLTHLMYMDDIKLYSDSTQKLHNLADIIQTFSSDISMEFGVDKCKTLEVRNGTILENNYFLKSGQNIEALDHNSFYKYLGFYQNRQINHTNVKLEITKKFKHRINILLRSQLNARNTVKSINTFAIPLLTYSFAIIKWTQIELRKLQSYINKALTTYRKHHPRSCQQRLTLPRAEGGRGIVDIVNLHNSQITSMRNFFYEQADQINLYKIVSMADVRLTPLNLHAKSPQRNERITYIKEKSNLWQNKALHGRHYQDLQQPHVDKDASNAWLRRGDLFPETEAFMIAIQDQTINTRNYQKYIIRSPNLLTDMCRRCHSNSETIQHITGACKAIVQTDYKHRHDQVAAIVHQNIAFRHKFLTKKVPYYKYIPDTILENTKYKIYWDRTIITDKTVHFNRPDITVLDKMKKTVFLIDIAVCNTHNLLSTQTEKISKYQDLAVEIKRQWQVNSVKTIPIVISTTGVIPKTLHSYLNAIEIPPSTYILLQKAAILNTCRITRKFLNL

SEQ ID NO: 14862 - protein, 952 aa, Nascus phocus
MTTTTNHLQTIIYTAAYTAAACSGIKIYDQEDAGRQYNNSPPPWQRRLENKILALRKDIGRMTLYIQGNISRKIVKHVEEIKNKYKIHTKHEEPNATDKQILDTLKQKLNATASRLSRYKQCTLRKKQNSQFINNEKQFYRQLDQNTQKTQSNTHNTTERSVPPTDELYQFWRNIWSNPVQHNISGDWINSENLDHIKEMDFEYISIDTFLKILKKTHNWKSPGSDNIHNFWYKKFTQFHSLLHNYINKFIHNPKLIPQYITQGVTYMIPKDGDYNNPANYRPITCLQTIYKLLTGCISELIYQHIMQNNILAIEQKGCKRKSQGCKEQLIVDSVVMNLAFKRKNNISTMYIDYRKAFDSIPHSWLIYILQRYKIHPTIINFLKTAMLYWKTKLKIMNSRNDIPEIDIRRGIFQGDAFSPLWFCLALNPLSNMLNRTNNGFHIKLNNDQTTLTHLMYMDDIKLYSTSTATLHNLADITQVFSNDICMEFGINKCKTLEVKNGKVVQNNYILKSGENIEALDHNSLYKYLGFHQNTQIKHTQIKLEITKKFKHRINILLRSQLNSRNTVKSMNTYAIPLLTYSFGVIKWTQTELKKMQCNINKALTTYRKHHPRSCSQRLTLPRIEGGRGIVDIVNLHNSQISSLRNFFYEQAEQTCLHKVVTIADSRLTPLNLHNKTPQRNEKITSIKEKTQAWQNKSLHGRHFQDLQQSHVDKEASNAWLQRGELFPETEAFMLAIQDQTINTRNYQKFIIRTPNLATDICRRCHSASETIQHITGACKSIVQTDYKHRHNQVAAIVHQNLAFKHKFVTQKVPYYKYIPDNILENSKYKIYWDRTIITDKTVHYNRPDITILDKIKKTVFLIDIAVCNTHNLLSTHSEKIAKYEDLAIEIKRQWKINTVTTIPIIISTTGVIPKTLRNSLNFLEMSHTTIALLQKAAILNTCRITRKFLNI

SEQ ID NO: 14863 - protein, 1237 aa, Ectomis octomaculata
MNKFIWRTYLIATKMETDTRHYLDMLYHEFNKKYPHMNASKQRLGDQRRAIVKNNLLNEEVRNQIKLHLVSSGPNNISIETQSIENKTQRNRIKWSEEMNENLIRCYYQATNCEMNKTGYRTQLRNKFIHIYPHLSYLSEQNIADQNRSIINNKLITESRLQELRNNINVTTQINVTPRRIDKTQAHVNHNQVEEIRLGLNEESNIETNPTAAQESHTLSPNIVRSTTTVKPFIDYDKIDNIFNDTLNQFQQSNPITRPRIPKLKCSKKLEFIVNYINSNILTKYLHIKNDFPTIQTIIYAAAYTSAVCSGVKIRDPESERHRYNNNLPSWQRRIQNKILTLRKDIGRMTQYMQGNLSKKLGKHIEEIKTKYKTHTKHEEHNTTDVEILDTLKQKLNATASRLKRYMQCTLRKKQNTQFVNNEKQFYRQLSQNMQNTESNIHKPTPTTDKLYQFWSNIWSIPVQHNISAEWIQSVNTDNIPQMNFSSIPLDIFKKILKKAHNWKSPGSDNIHNYWYKKFTQFHPLLHSYINEFIHNPNLIPQYITKGVTYMIPKDEDCTNPAKYRPITCLQTIYKLLTGCISEIVYQHAIQSNILTIEQKGCKKKSQGCKEQLVIDSVVMNLAFKRKKDISTMYIDYKKAFDSVPHSWLLYTLKLYKIHPLIIDFMKTAMLQWTTELKILNSPNIQTSQIPIRRGIFQGDSFSPLWFCLAMNPLSNMLNRSNYGYHFKIKNNQTLLTHLMYMDDIKLYSDSTQALHNLADIVQTFSRDIFMEFGIDKCKTLEFKNGTIVQNNNYSLKSGENIEALDHNSFYKYLGFYQNIKINHSQIKSEISKKFKQRINILLRSQLNARNTVKSINTFAVPLLTYSFGIIKWTQAELGRLQCYINKTLTIHRKNHPRSCLQRLTLPRVEGGRGIVDIVNLHNSQICRLRNFFHEQAERVSFYKVVTVADVRLTPLNLHIKTPQRNEKITNVKEKIEAWQKKSLHGRHYKDLQQSHVDKEASNAWLRRGELFPETEAFIIAIQDQTINTRNYQKYIIRTPNLPTDICRRCHNNSETIQHITGACKSIVQTDYKHRHDQVAGIVHQNIAFRHKFLQKKVPYYKYIPDTILENDHYKIYWDRTIVTDKTVHFNRPDITILDKINKTVFLIDIAVCNTHNLLATHSEKIAKYEDLSVEIKRQWHVNIVKTIPIVISTTGIIPKTLHTSLSVIGIPSSTYILLQKAAILNTCRITRKFLNS

SEQ ID NO: 14864 - protein, 1380 aa, Entheus sp.
MLFPLLYCWLPSGAGYEMKKTNTNFTKYNLRPRRGACQNKSAVAAGSQSSQLPRIKKPPSQTSSGQQSEPTAEFILSSNSSTSSSSPDTFFQSPISSPHSYESSSSSSSSSIDVAQEAEAVNLVSTVDATRARRKKWTLEMNTFIWRTYIKATNIEKDTRHYLDILYEEFNKKFPHMNASKQRLGDQRRTIVRNNLLDYNTREQIKLQFDNDPTNTTNLDIHTVEQRSNTPRTKLKWSLEMNENLIKCYYQVTQCEKNKTGYRPLLRTKFTEIYPRLSYLSEQNISDQLRSIIKNKRMSECRLKELRTEINHTTAEGIILNNIVDITQEDITDNLFSELTHSTYEEKERIPTTQHAFTDTKTPNTTSSTCLDDAKINIIFQESLNRFERSNPTSRPHIPKQKGSKKFTSIVHHINTVILPKHTPKNDNFTDLQTIIYCAAYTAATCNGTKIKEPTNIPSKTNFLPQPWQRRIEEKILRLRKDIGRMTQYKQGHKGRKLLMQVEEIKIRHKTHTKHEEHNTTDELILDTLKQKLTVTAGRLKRYMVCNTRKKQNLQFINSEKQFYRKLSLETQQNQTERTKQTNSSEQPSPPIDELYRFWSNIWSDPVKHNTSAHWIQEENTTHIEKMHFEYIPLDILLRILKKTHNWKSPGTDSIHNYWYKKFTHLHPSLLNCINNFIRDPKSIPSYVMQGVTYMIPKDSDYSNPAKYRPITCLQTIYKLLTGCISELIYQHITQNNILAIEQKGCKKKSQGCKEQLIIDSVAMNLAFTRKKNISSMYIDYRKAFDLVPHSWLIYILHHYKIHPLLINCMKTAMEHWSTKLKINPTSNIYSDDIYIRRGIFQGDTFSPLWFCLALNPLSTMLNRTKNGFNITVTNNQTTLTHLMYMDDIKLYSNSTQKLHHLADTTQTFSNDIRMEFGIDKCKTLEVEKGIIKQNNYFLQCGQTIESLDEKSYYKYLGFHQNRRINHSQIKIEITNKFKHRINILARSHLNARNTTKAINTYAIPLLTYSFGIIKWTHTELNNLQRKINTSLTSYRKHHPRSCVQRLTLPRIVGGRGIVDIANLHNSQVSSLRRYFFEQSEHTSLHKVITTADIRFTPLNLSVRNTQPNEKIISMNEKMEIWEKKSLHGRHRQDLQQHHVDKSASNAWLTRGELFPETEAFMIAIQDQTINTRNYQKYIIRTPNLPNDICRRCHSNSETIQHITGACKSIVQTDYKHRHDQVAAIVHQNIAYKHKFISLKVPYYKYKPNTILENSRYRIYWDRTIITDKTIHYNRPDITILDKTSKSVFLIDIAVCNTHNLLSTHADKIAKYEDLTTEIKRLWQVSTVRIIPIVISTTGVIPKTLHDSIKTLELPPHIFLLIQKAAILNTCRITRKFLNF

SEQ ID NO: 14865 - protein, 899 aa, Udranomia kikkawai
MTQHKQGNRGRKLLKQIEEIRLKYKIHTKHEEHNTTDELILDTLKQKLNVAASRLKRYKTCDLRKKQNLQFINNEKEFYRKLSLETQNNQSNATSNNNPYSHQTLPPIDELHQFWSSIWSNPVQHNISANWIHDQDTNNIEQMNFSHIPLNLFLRILKKTHNWKSPGTDCLHNYWYKKFTHIHPSLYKCINDFIQKPESIPAYIMQGVTYMIPKDVDYGNLSKYRPITCLQTIYKLMTGNTGCISELIYEHISQNNILAVEQKGCRKKSQGCKEQLIIDSAVMNHAFRQKKDISTMYIDYRKAFDSIPHSWLIYILHHYKIHPILVNCVETAMKYWTTNLKVNFNTNIHSDDIHIRRGIFQGDTFSPLWFCLALNPLSNLLNRTGNGFHVKINNNQTILTHLMYMDDIKLYSHSTQTLHQLADITQIFSNDICMEFGIDKCKTLEVENGIVKQSNYLLQSGQNIEALDHNSFYKYLGFNQNRQINHNQIKEETIAKFKHRLNILARSQLNARNTTRAINTYAIPLLTYSFGIIRWTQAELKNIQRIINKSLTLHRKHHPRACLQRLTLPRIEGGRGFVDISNLHNSQVSSLRRFFFEQAENSNLHKVIAIIDRHLTPLNLSTKDPQPNEKIISMNEKLKAWENKALHGRHRQDLQQEHIDKESSNAWLRRGELFPETEAFIIAIQDQIINTRNYQKYIIRTQNLPTDVCRRCYNNSETIQHITGACKSLVQTDYKHRHDQIAAIIHQNIAYKYKFIAKKVPYYKYKPDTILENNKFKIYWDRTIITDKTVHYNRPDITILDKTNKTVLLIDIAVCNTHNPRNTQSEKIAKYEDLSIEIKRQWQVSNVTTVPIVISTTGIIPKALHASLKILEMPPSTLILIQKAAILNTCRITRKFLNL

SEQ ID NO: 14866 - protein, 1374 aa, Udranomia kikkawai
MDILVPLLYCWLLFGAGYEMKKINTNTTKYNLRPRRGACRNISTSVTGCQNSPTSSNENQTTQTSVGHQLEATEDIINSPTSTSSISLFPSPVSSPQSYEKSISSLSLSSASSSGNVVQEANAIDLVPMTDAYRARKKWTLEMNKFIWRTYLISTKMESDTRHYLDTLHQEFNKKFPHMNASKQRLGDQRRAIVRNNLLDQNMRQQIKSQLETNLQNTSNSDIHLPECNNTQRNRMKWSQEMNENLIRCYYQVTQLENNKTGYRPQLRRIFLDIYPHLSHLSEQHIADQNRSIINNKLIHQDRLIELKEEIKEVLKETLFQNSTDMTQQNLPPLTTLESNSIIHHTNNTRTENTLPNTAPNKYIDYTKINTTFQESLSRFQYTIPTTRPRIPKQKCSKKLNSIVQYINTTILPKHSLENHDFTYFQTVIYSAAYTAAICNGTKIKETENVVQERIYKPQAWQQRIDQKISKLRRDIGRMTQYKLGHRGRKLLKQVEEIRLKYKIHTKHEEHNTTDELILDTLKQKLNVASSRLKRYKVCDLRKKQNLQFMNNEKEFYRRLSLETQNNQRYVTPNNNPAFKQPLPPIEQLHQFWSNIWSNPVQHNISANWIHDENTSNIQQMNFSHIPFNLLLRILKKSHNWKSPGTDGLHNYWYKRFTHIHPFLHKFINDFIQNPESIPVYIMQGVTYMIPKDLDYANPAKYRPITCLQTIYKLMTGCLSELVYEHITQYNILAVEQKGCRKRSQGCKEQLIIDSVVMNHALRRKKDISTMYIDYRKAFDSIPHSWLLYILHHYKVHPTLVNCIETTMKHWTTTLKVNFGSSIHSDDIHIRRGIFQGDTFSPLWFCLALNPLSNLLNRTGTGFNLKTNNTQSILTHLMYMDDIKLYSHSTHTLHQLADITQLFSNDICMEFGIDKCKTLEVENGIIKQNNYLLQSGLIIEALDHNSSYKYLGFHQNRQINHKQIKVDTKAKFKHRINILARSQLNARNTIRAINTYAIPLLTYSFGIIRWTQAELKNIQRIINKSLTIHRKHHPRACLQRLTLPRIEGGRGLVDILNLHNSQVSSLRRFFFEQAEHSNLHKVITISDKRLTPLNLSTKDPQPNEKIISMKEKLTAWENKALHGRHRQDLQQEHIDKESSNAWLRRGELFPETEAFIIAIQDQIINTRNYQKYIIRAQNLPTDVCRRCYSTSETIQHVTGACKSLVQTDYKHRHDQIAAIIHQNIAFKYKFIPKKVPYYKYKPDTILENNEHKIYWDRTIITDKTVHYNRPDITILDKTNKTVLLIDIAVCNTHNLRNTQSEKIAKYEDLSIEIKRQWQVSNVTTVPIVISTTGIIPKALHASLKILEMPPSTLVLIQKAAILNTCRITRKFLNI

SEQ ID NO: 14867 - protein, 804 aa, Cecropterus albociliatus
MTQYVQGNVSRKLLKNIQEIKTKYKIHTKHEEENTTNKQVLDTLKQKLNAAASRLKRYKECSLRKQQNSQFINSEKQFYRQLHQNTQSNIRNKHNQSKPDTYFPATDELHQFWSNIWSNSVQHNSSADWINEESLDNIQEMTFDNIPFDTFLKILKKTHNWKSPGSDNIHNYWYKKFTQLHPLLYNYINKFIHNPDLMPQYISQGVTYMIPKDEDVKNPAKYRPITCLQTIYKLLTGCISELVYQHVIQNNILATEQKGCKKKSQGCKEQLIIDSVVMNLALKSKKNISTMYIDYRKAFDSIPHSWLVYILQHYKIHPNIVNFLKTAMTHWTTRLKYINNRSLEIPEINIRRGIFQGDAFSPLWFCLALNPLSNMLNKTNNGFHIKVKNNQTALTHLMYMDDIKIYSDSTQKLHNLADTIQIFSNDICMEFGIDKCKTLEVKSGIIVQNNYLLKSGHNIEALEPNSFYKYLGFHQNQKINHSQIKLDLERKFKHRINILLRSQLNARNTVKSINTYAIPLLTYSFGIIKWTQVELSKMQRTINKTLTTNRKHHPRSCSQRLTLPRNEGGRGIVDIINLHNSQISSLRNFFYEQAEHTNLHKIVTIADIRLTPLNLHAKTPQGNEKTTDLKEKIKAWQNKSLHGRHFQDLQQPHIDKEASNAWLRRGELFPETEAFMIAIQDQTINTRNYQKYIIRTPNLPTDTCRRCHSNSETIQHITGACKSIVQTDYKHRHDQVAAIVHQNLAFKHKFITQKVPYYKYAPDNILEDSKYKIYWDRTIITDKTVHYNRPDITILDKTKKQYFL

SEQ ID NO: 14868 - protein, 1234 aa, Epargyreus clarus
MNRFIWRTYLVTTNMETDTRHYLDKLHYEFTKKYPQINASKQRLGDQRRAIVRNNLLDKKTREHIKIQLTTNESNNLGLEIHSNTQNSQRSRMKWSREMNENLIRCYYETTNCETNKIGYRTQLRNKFLDIYPQFTHLSEQNIADQNRSIINNKLITETRLCELRKEVENITKTCTTQHTIDRIQPTLNNISEQNNTGTEEQTSSPLMYILNSSPQNRTPNTTPLKPFIDYDKINQTFNQALNQFQQSNPTTRPRLPKLKCSKKLDLIVDYINSNILIHYTDKNNDFITFQTIIYSAAYTAAVCSGMKIYDTNDTNQQHKSISPPWQRRIESKILAFRKDIGRLTQYMLGNLSRKLVKNIEEIRNKYTIHTKHEEENTTDKQILDTLKQKLNAASSRLKRYMQCSLRKKQNSQFINNEKQFYRQLDQNTQKTQHNTVITETPLPDTDQLYRFWCNIWSHPVQHNTSADWINNENTDSIEQMNFEDISFDTFFKILKRAHNWKSPGSDNIHNYWYKKFTQFHPLLHTYINKFIQNPDIMPLYVTQGVTYMIPKDEDYKNPAKYRPITCLQTIYKLLTGCISELVYQHTILNKILATEQKGCKKNSQGCKEQLVIDSVIMNLAFKSKKNISTMYIDYRKAFDSIPHSWLIYILQHYKIHPTIVNFLKAVMVHWTTNLKIINNQNVRTPGINIRRGIFQGDAFSPLWFCLALNPLSNMLNSTKKGFHIKVNKNQAVITHLMYMDDIKLYSDSAQTLHILADTIQTFSDDICMKFGIDKCKTLEVKRGTLVQNNYPLRSGHNIEALDHNSFYKYLGFNQNRQIKHNQIKLEIGKKFKHRLNILLRSQLNARNTIKSINTYAIPLLTYSFGIIKWTQVELKKMQRNINKALTTYRKHHPRSCSQRLTLPRNEGGRGIVDIVNLHNSQISSLRNFFYEQAEHTNLHKVVTVADVRLTPLNLHIRTPQRNEKITDFKEKIKSWQSKSLHGRHLQDLQQPHVDKEASNAWLRRGELFPETEAFMIAIQDQTINTRNYQKYIIRSPNLPTDICRRCHSNSETIQHITGACKSIVQTDYKHRHDQVAAIVHQNLAFKHKFVTQKVPYYKYTPDNILQNNKYKIYWDRTIITDKTVHYNRPDITFLDKTKKTVFLIDIAVCNSHNLLTTHSEKLAKYEELTIEIKRQWQVNTVTTIPIVISTTGIIPKTLHVSLSTLEMPPSTYILLQKAAILNTCRITRKFLNI

SEQ ID NO: 14869 - protein, 898 aa, Cecropterus dorantes
MTQYVQGNVSRNLLKNIEKIRTKHNIHTKHEEQNTTDKQILDTLKQKLNAAASRLKRYMQCSLRKKQNSQFINSEKQFYRQLDQNTQKTQSNIFSRHNQSKTESSLPATDELYQFWNNIWSNSVQHNTSADWINEESLDNIQQMNFDYISFDTFLKVLKKTHNWKSPGSDNIHNYWYKKFTKLHPLLHNYINKFIHNPELMPEYVTQGVTYMIPKDEDLKNPAQYRPITCLQTIYKLLTGCISELVYQHVIHNDLLAIEQKGCKKKSQGCKEQLIIDSVVMNLAFKSKKNISTMYIDYRKAFDSIPHSWLVYILQHYKIHPIIINFLKTVMTHWTTKLKAINNPSIETSEIKIRRGIFQGDAFSPLWFCLALNPLSNMLNKMKNGFHIKINNNQTEITHLMYMDDIKLFSENTQKLHNLADTIQTFSNDICMEFGIDKCKTLEVRNGIIVQNNYLLNSGHNIEALDLNSFYKYLGFHQNQQINHTQIKLDIEKKFKHRINILLRSQLNARNTVKSINTYAIPLLTYSFGIIKWTQVELSKMQRNINKTLTTYRKHHPRSCLQRLTLPRNEGGRGIVDIVNLHNSQISSLRNFFYEQAEHTKLHKIVTIADIRLTPLNLHDNTPQRNEKTTDFKEKIEGWLNKSLHGRHIKDLQQPHVDKEASNAWLRRGELFPETEAFIIAIQDQTINTRNYQKYIIRTPNLPTDICRRCHSNSETIQHITGACKSIVQTDYKHRHDQVAAIVHQNLAFKHKFVTQKVPYYKYTPDNILENTKYKIYWDRTIITDKTVHYNRPDITILDKIKKTVFLIDIAVCNTHNLLTTHSEKLAKYEDLALEIKRQWQVSTVTTIPIVISTTGVIPKSLHDSLNALQMPPSTYVILQKAAILNTCRITRKFLNIC

SEQ ID NO: 14870 - protein, 1360 aa, Cecropterus takuta
MKMKKQNNNISKYNLRPRQNACQKTSKINVGCQNLPAHGNEEHIYKERFGNQTETAATLNSSPSTSSVSFSHFQTPNSSPHSFEQLNITSSSSSSSLSVDVAQEAQVVIPESTTDTCRARKKWTPEMNSFIWRTYLISTNMETDTRHYLDKLYYEFSKKYPQFNASKQRLGDQRRAIVRNNLVDKETREQIKMQLITHEPNNLRVDTHSNTQCSQRSRIKWSREMNENLIRCYYEVTHCETNKTSYRTQLRNKFIDRYPQFSHLSEQNIADQNRSIINNKLITEDRLCELRNEIKDVVTQHTVDKPQANVNYSSNQETLNTAQNISIEEGTASIVTYTFNSQQNRLQYNTNTLKTLIDSDKINQTFDNTLNHFQHSNPTTRPHIPKLKCSKKLDLIVKYINSNILLNYLDDNNDFSTTQTIIYAAAYTAAVCSGIKIYDSRDPNKQNIINTPPWQKRIEDKISALRKDIGRMTQYVQGNVSRKLLKNIQEIKTKYKIHTKHEEENTTNKQVLDTLKQKLNAAASRLKRYNQCSLRKKQNSQFINSEKQFYRQLYQNTQSNIRNKHNQSLPATDELHQFWSNIWSNSVQHNSSADWINEESLDSIQQMKFDNIPFDTFLKILKKTHNWKSPGSDNIHNYWYKKFTQLHPLLHNYINKFIHNPELMPQYISQGVTYMIPKDEDFENPAKYRPITCLQTIYKLLTGCISELVYQHVIQNDILATEQKGCKKKSQGCKEQLIIDSVVMNLALKSKKNISTMYIDYRKAFDSIPHSWLVYILQHYKIHPNIVNFLKTVMNHWTTRLKYINNTSLEIPEINIRRGIFQGDAFSPLWFCLALNPLSNLLNKANNGFHIKVKNNQTALTHLMYMDDIKIYSDSTQKLHNLADTIQIFSNDICMEFGIDKCKTLEVKSGIIVQNNYLLKSGHNIEALEPNSFYKYLGFHQNQKINHSQIKLDLERKFKHRINILLRSHLNARNTVKSINTYAIPLLTYSFGIIKWTQVELSKMQRTINKALTTYRKHHPRSCSQRLTLPRNEGGRGIVDIINLHNSQISSLRNFFYEQAEHTNLHKIVTIADSQLTPLNLHAKTPQRNEKTTDLKEKIKAWQNKSLHGRHFQDLQQPHIDKEASNAWLRRGELFPETEAFMIAIQDQTINTRNYQKYIIRTPNLPTDTCRRCHSNSETIQHITGACKSIVQTDYKHRHDQVAAIVHQNLAFKHKFITQKVPYYKYTPDNILEDSKYKIYWDRTIITDKTVHYNRPDITILDKTKKTVFLIDIAVCNTHNLLTTHSEKLSKYEDLALEIKRQWQVNTVTTIPIVISTTGVIPKLLHASLKVLQMPPSTYIILQKAAILNTCRITRKFLNI

SEQ ID NO: 14871 - protein, 1369 aa, Cecropterus bathyllus
MKKQAISTNNVSKYNLRPRQNACQRTSKINVGCQNLPAHDIEEHINKDTLENQTEKTPILYSSPSTSSVSFSHFHTPNSSPHSFEQVNITSSSSSSSLSVDVAQEAKAVISEPTTDTCRARKKWTPEMNSFIWRTYLISTNMETDTRHYLDKLHYEFSKKYPQFNASKQRLGDQRRAIVRNNLVDKKTREQIKTQLITHEPNNLRVETHSNTQYSQRSRIKWSREMNENLIRCYYEVTQCETNKTSYRSQLRNKFIDSYPQFSHLSEQNIADQNRSIINNKLITEDRLCELRNEIKEVITQHTVDKTQANVNHTSKQETLNTRQNSCIEEENTSIASCKINALQNRIQYSTNTLKTLIDSDKINQTFDDTLNHFRHSNPTTRPRIPKLKCSKKLDLIVEYINSNILLNYLDDNNDFSTTQTIIYAAAYTAAVCSGIKIYDSRDKNKQNIINTPSWQRRIEDKISALRKDIGRMTQYVQGNTGRKLLKNIQEIKTKYKIHTKHEEHNTTDKQILDTLKQKLSAAASRLKRYIQCSLRKKQNAQFINSEKQFYRQLDQNTQKTQSNIHNIHNRSKTETPLPATDELHQFWSNIWSNPVQHNSSADWINEESLDNIQPMKFDHISYDTFLKILKKSHNWKSPGSDNIHNYWYKKFTQLHPLLHNYINKFIHNPELMPQYVSQGLTYMIPKDEDFKNPAKYRPITCLQTIYKLLTGCISELVYQHVIQNDILATEQKGCKKKSQGCKEQLIIDSVVMNLAFKSKKNISTMYIDYKKAFDSIPHSWLVYILQHYKIHPNIVNFLKTVMTHWTTRLKYINQTNLESSEINIRRGIFQGDAFSPLWFCLALNPLSNMLNKTNNGFHIKVNNNQTTLTHLMYMDDIKIYSDSTQKLHNLADTIQIFSNDICMEFGIDKCKTLEVKGGIIVQNNYLLKSGYNIEALDPNSFYKYLGFHQNQKINHSQIKLDIEKKFKHRINILLRTQLNARNTVKSINTYAIPLLTYSFGIIKWTQSELSKMQRNINKTLTTYRKHHPRSCSQRLTLPRNEGGRGIVDIVNLHNSQISSLRNFFYKQAEHTNLHKIVTIADIRLTPLNLHANTPQRNEKTTDLKEKIKRWQDKSLHGRHIQDLQQPHVDKEASNAWLRRGELFPETEAFMIAIQDQTINTRNYQKYIIRTPILSSDICRRCHSNSETIQHITGACKSIVQTDYKHRHDQVAAIVHQNLAFKHKFVTQKVPYYKYTPDNILENSKCKIYWDRTIITDKTVHYNRPDITILDKIKKTVFLIDIAVCNTHNLLTTHSEKLAKYEDLALEIKRQWQVNTVTTIPIVISTTGVIPKSLHASLNALQMPPSTYIILQKATILNTCRITRKLLNL

SEQ ID NO: 14872 - protein, 1376 aa, Udranomia orcinus
MDILVPLLYSWLLSGASYEMKKININTTKYNLRPRRGACQNISTIVTGCQNSPTSPIDQQTTQTSDGHQIEATHDIINSSTPSSPNSLFPSPVSSPHSYEKSISSLSLSSASSLGNVAQEANATDLVPITDANRARKKWTLEMNKFIWRTYLISTKMETDTRHYLDTLHQEFNKKFPHMNVSKQRLGDQRRAIIRNNLLDQDTRQQIKSHLEKHPQNASNLHTHLPEHSNNTQRNRMKWSQEMNENLIKCYFQVTQLENNKTGYRPQLRRVFLEIYPHLSHLSEQHIADQNRSIINNKLIQQNRLLELKNEINETLKETLYQNTTDMTQQDVSPHTLLESNPRIHHTNNTRTENTLDNAAPKIYIDYTKINTIFHESLNRFQPTDPITRPRIPKQKCSKKLNSIVHYINTTILPKYSLENYDFTNLQTIIYSAAYTAAICNGTKIWETEKVVQERIYKTQPWERRIDQRISKLRKDIGRMTQYNRGHRGRKLQKQVEEIRLSYKIHTKHEEPNTTDELILDTLKQKLNVAASRLKRYKVCDLRKKQNLQFINNEKQFYRKLSLETQNNQSNATHNNHPSYTQTLPPIEELHQFWSNIWSNPVQHNISANWIQNENTNNIEQMNFSHIPVNLLLRILKRTHNWKSPGTDGIHNYWYKKFTHIHPLLHKCINNFIQNPDSIPTYIMQGVTYMIPKDLDYANPAKYRPITCLQTIYKLMTGCISELIYQHITQNNILAVEQKGCRKNSQGCKEQLIVDSVVMNHAFRCKKDISTMYIDYRKAFDSIPHSWLIYVLKHYKIHPTLVNCMETAMKHWTTTLKVNFNLNIHSDNIHIRRGIFQGDTFSPLWFCLCLNPLSNLLNRTGNGFHLKTNNSQTILTHLMYMDDIKLYSHTTQMLHQLADTTQIFSSDIRMEFGIDKCKTLEVENGKVKQNNYLLQSGQNIEALDHNSSYKYLGFNQNRQIEHKQIKIDTKAKFKHRLNILARSQLNARNTIRAINTYAIPLLTYSFGIIRWTQAELKNIQRIINKSLTFHRKHHPRACLQRLTLPRIEGGRGLVDISNLHNSQVSSLRRFFFEQAKHNNLHEVITMSDKRLTPLNLSAKDPQPNEKIISMNEKLTAWENKALHGRHRQDLQQTHIDKESSNAWLRRGELFPETEAFIIAIQDQIINTRNYQKYIIRTQNLPTDVCRRCNSNSETIQHVTGACKSLVQTDYKHRHDQIAAIIHQNIAFKYKFITKKVPYYKYKPDTILENNKYKIYWDRTIITDKTVHYNRPDITLLDKINKTVLLIDIAVCNTHNLRNTQSEKIAKYEDLSIEIKRQWQVSNVTTIPIVISTTGVVPKALHAGLKTLEMPLSTLILIQKAAILNTCTRITRTFLNM

SEQ ID NO: 14873 - protein, 895 aa, Entheus sp.
MTQYKQGHRGSRLLMQVEEIKIRHKIHTKHEEHNTTDELILDTLKQKLNVTAGRLKRYMVCNTRKKQNVQFLNNEKQFYRTLSVKTQQNQSGPSNDSNSSEQPSPPIDELYRFWSNIWSDPVKHNKSAPWIQEENLNNIEEMNFEYIHLDILLKILKKTHNWKSPGTDSLHNYWYKKFTHLHPYLVKCINNFIRDPKSIPTYVMQGVTYMIPKDSDYSNPAKYRPITCLQTIYKLLTGCISELIYQHITHNNILAIEQKGCTKNSQGCKEQLLIDSVAMNFAFSRKKNISSMYIDYRKAFDLVPHSWLIYILHHYKIHPLLFNCMKTAMDHWSTKLKINYTYNIYSDDIHIRRGIFQGDTFSPLWFCLALNPLSSMLNRTKNGFNITTRNSQITLTHLMYMDDIKLYSNSTQTLHHLADTTQTFSNDIRMEFGIDKCKALEVEKGTIKQNNYFLQSGQNIEGLDENSYYKYLGFDQNRRINHSKIKIDITDKFKHRINILVRSHLNARNTTKAINTYAIPLLTYSFGVIKWTQTELNKLQRKINTSLTSYRKHHPRSCIQRLTLPRIVGGRGIVDIANLHNSQVSSLRRYFFEQAEHTNLHKVITAADIRFTPLNLSVRNIQPNEKIISINEKIETWEKKSLHGRHRQDLQQPHVDKRASNAWLTRGELFPETEAFLIAIQDQTINTRNYQKYIIRTPNLANDICRRCHSNSETIQHITGACKSIVQTDYKHRHDQVAAIVHQNIAYKHKFIAQKVPYYKYKPNTILENSRYRIYWDRTIITDKTVHYNRPDITILDKTSKSVFLIDIAVCNTHNLLSTHADKIAKYEDLTTEIKRLWQVNTVRIIPIVISTTGVIPNTLHDSIKTLELPPNIFALIQKAVILNTCRITRKFLNV

SEQ ID NO: 14874 - protein, 1240 aa, Parnara guttata
MNKFIWRTYLIATNMEEDTRNYLDFLHQEFNKEFPHMKASRQRLGDQKRAIVRSNLLDLDTRQQIKLELQLNNDHDTHTVSNTSSQNTQRSRIKWSQDMNENLVRCYYRICHSSTNRTGYRTLLKASFTEVYLHLSHLSEQHLADQNRSILNNMLLPEKRLKGIEEESLNSIQSNTNDTPLDDNSNLDLNDITNVRTETFLPLTHTDSTPDNEVLTGNIRNDYDINKNTYYIDKQNVDRLFEENLMHFRHTHATNRPHIPKQKCSKKLNAIVHYINTNILPNHLHKDSDFSTTQTVIYSAAYTAAICNGTKIKPVGNIIQKSKPQIPPWQRRIETKILTLRKDIGRMTQYKKGHISNKLHKQIGEIKTKYKTHTKYDEENITDELILDTLKQKLNVAASRLKRYVKCNLRKKQNSQFINSEKQFYRQLTIDTHKNQTGNHMNTHSTNGNIPPTDVLHKYWSDIWSNPVQHNVSANWIQTENIDNVGEMQFKHVTETIFLKVLKKAQNWKCPGSDGIHNFWYKKFTHSHSILHNYINNFLKNPETMPEFITQGVTYMIPKDSDHSDPTKYRPITCLQTFYKILTGCITEVVNEHITQYNILAIEQKGCRKRSQGCKEQLVIDSIVMNLASARKRNISTMYIDYRKAFDSIPHTWLIHTLEHYKIHPMLVNFFKTVMKLWRTTLKFNNLATQTSDISIRRGIFQGDSFSPLWFCLALNPLSNLLNSSNVGFDIVADEGHITLTHLMYMDDIKLYSNSTQTLHQLADITQTFSNDICMEFGIDKCKTLEIEKGNLKQNCYHTQSGLPIEALDHDSYYKYLGFHQNIKINHQQIKVDLRGKFKHRVNLLVRSQLNARNTIKAINTYAIPLLTYSFGIIKWTQVELKKIQRTISTCLTTHRKLHPRSCLQRLTLPRAEGGRGVVDIVNQHNRQITSLRKFFFEQAEHINLHNIITLIDTRFTPLNLSNRLTQRNEKIISEREKIRTWENKSLHGRHRQDLEQAHVDKHASNMWLQRGELFPETEAFMIAIQDQIINTRNYQKHIIRSRNLPTDICRRCHKNSETIQHITGACKSIVQTDYKHRHDQVAAIIHQNLAHKYKFITEKMPYYKYKPDTLLQNKQSKIYWDRTIITDKTVHFNRPDITILDKSNNSVYLIDIAVCNTHNLLTTHADKISKYEDLAIEIKRQWKVASVKTVPIVISTTGVIPKTLHNSLATLEMPTSTYALMQKAVILNTCRITRKFLNK

SEQ ID NO: 14875 - protein, 1362 aa, Hyalothyrus neleus
MKKINTNLNKYNLRPRHGACQNMSTVEGGCQSTTPSNFGKQIIQSTARHQPETTANTISQNNSSISSPLPDSLFESPISSPHSYEQSRLSSSSSVDVAQEAEAIDLEPTSDVIRARKKWTLEMNKFIWRTYLISTNMEKDTRHYLDTLYQEFNKKFPHMNASKQRLGDQRRAIVRNNLLDHKTRQQIKVQLEQNSPITIDLEIHSVEASHNKQRSRMKWSQEMNENLIKCYYEITQCEKNKTGYRPQLRSKFMDIYPHLSHLSEQNIADQNRSVISNKLVSANRLKELRKEINDALEEELSLRNTADITHQNLVDHSAQEPTHTRIEDRETNIRIQHTDTLTENKSDNATSTTYIDYTKINKLFQESLNRFQHSLPTNRPHIPKQKYSKKLGTIVNYINTTTLPKHSPINQDFLTLHTIVYSAAYTAAICNGTKIKESENIVNKNEPKSPWQRRMEEKILSLRRDIGRMTQHKQGHRGRKLLKKVEEIKVRHKTHTQHEEHNTTDELILDTLKQKLNVTASRLKRYIVCDLRKKQNLQFINNEKLFYRKLSLEEQINQAGTSNNCNSTKQPLPPVDDLHRFWSNTWSNPAQHNTYADWIQFENLDAIEQMNFENIPLDTLLRILKKAHNWKSPGTDGLHIYWYKKFTHLHPFLHNCINDFIQNPETIPAFVMQGVTYMIPKDSDYANPANYRPITCLQTIYKLLTGCISELIYQHITQNNILAIEQKGCKRNSQGCKEQLIIDSVVMQLALKRKKDISTMYIDYRKAFDSIPHSWLIYILHHYKIHPTLINCIKTAMTHWTTTLKVDHRANTYSDNIHIRRGIFQGDTFSPLWFCLALNPLSNMLNRSNSGFHLKTNMQATLTHLMYMDDIKLYSNNTQTLHHLADITQTFSNDICMDFGIDKCKTLEVENGIIKQTNYTLQSGQSIEALDHNSSYKYLGFKQNQQINHSQIKVDILVKFKHRINILARSQLNSRNTIKAINTYAIPLLTYSFGIIKWTQTELKNIQRNINTTLTAFRKHHPRSCLQRLTLPRIEGGRGLVDIANLHNSQVSSLRSFFFEQSEFTNLHRVITMSDMRFTPLNLSLRTLQPNEKIIPINEKIKAWEKKSLHGRHRQDLQQSHVDKDASNSWLRRGELFPETEAFMLAIQDQIINTRNYQKYIIRTPNLPTDICRRCHSNSETIQHITGACKSIVQTDYKHRHDQVAAIIHQNIAFKHKFIAQKVAYYKYKPNTILENNRYKIYWDRTIITDKTIHFNRPDITMLDKTNKSVFLIDIAVCNTHNLLSTHVEKIAKYEDLTIEIKRLWQVNTVQIIPIVISSTGVIPKTLQTSLKTLEMPPTTLELIQKAVILNTCRITRKFLNI

SEQ ID NO: 14876 - protein, 1372 aa, Hasora chromus
MGPIMKMKKNTNKNTYNLRSLSRACQQTSEFDIGFSSTSNNKELNRRALERNKLESITADNSPSPTSPSSSTSTNSLFQTLNLSPHSLEQPNPRSSSNSPMSADVAQEAEAIYPEPTAGTTSARKKWTTEMNRFIWRTYLIATDMETDTRKYLDTLHFEFNNKFPHMKASRQRLGDQRRAIVRNNLLDEKTRQDIYLEASTHTSTSYLGTSNQNIQYSKPGRIKWSLTLNKDLIKCYYVITRCETNNTAYRTQLRSMFVEMYPQYAHLSEQHIADQRRSIINNKLIPDNLLKEILDEVKEKNGWEQSLRNDDNIPSNLVNSGGIEIQHEENQDNTTTVRTSPIHIATPTQNNVRNTIKTKTPIDHNKIKEIFQNTYNRFKHTNPTTRPRIPKQKTSKKFACIVEYLNKSILPEHITLDQDFETTQTIIYTAAYTASICNGTRIKELTDNEQQKKSKVPLWLRRLENKIAILRKDIARIIQYINGNRSRNIMTYVEEYKVKYKNHSKHEEPNDTAELILDTMKQKLNAAASRLKRYRQCDLRKKQNLQFINNEKLFYRQLAINTQKVSNTEVNNFTIENSALPMQELHKFWSDIWANPVQHNTSAGWIHSENADNISEMKFDNIPLSTFLKILKKTHNWKTPGTDNIHNFWYKKLTRVHDVLYTHINNFLHKPETIPEYISHGITYMIPKDTDYSNPAKYRPITCLQTFYKIVSGCIADLVYQHITQNNILAEEQKGCKKNSYGCKEQLIIDSVAMNLAVTKKRDISTMYIDYRKAYDSVPHSWLLYTLRLYKIHPTMIDFMEKIMQRWMTKLKFINGLNEESANIPIRRGIFQGDAFSPLWFCLSLNPLSNLLNKSANGFHITGKNHQTTLTHLMYMDDIKLYSNNTQSLHRLADITQTFSNDICMDFGIDKCKSLTIRKGKIEQNDYQLHSGQNIESLDQNSSYKYLGFHQNCKINHKEIKKDVTKKFKHRVNIILRSQLNARNTVKAINTYAISLLTYSFGIIKWSQYELKSLQRSINTSLTVFRKHHPRSCVQRLTLPRIEGGRGLIDVANLHNAQITSLRNYFYQKSLYSNLHQAVNNADTRFTPLNLQTNSIQPNERVVKLTEKITTWQKKSLHGRHRHDLEQPHVDKAASNAWLRRGDLFPETEAFMVAIQDQTINTRNYQKYIIRNLNLPTDTCRRCHSSSETIQHITGACKSIVQTDYKHRHDQVAAIIHQNLALKYKFISERTPYYKYQPSIILENDKYKIYWDRTIITDKTVHFNRPDIVTLDKTNKIVHLIDIAICNTHNLLTTHTEKLSKYTELTLEIKRQWQISTVKIVPIIISSTGVIPNTLHNSLETLQMPTSTLTILQKAVILNTCRLTRKFLDIY

SEQ ID NO: 14877 - protein, 1345 aa, Codatractus alcaeus
MKMMEQNNNTNNLKKYNLRPRHNACQKTSSTKLGCQNIPTKSIHDPLENPKTATYFYSSPTSSVSSNIFQTPNSSPRSFERVINTPTSSSSSLSVDVAQEADANIPEPITDICRARKKWTPEMNTFIWRTYLTTTNMETDTRHYLDTLHSEFNKKYPQINASKQRLGDQRRAIVRNNLLDKKTREQIKMELIKKESNNPSLDIHSNEENSQRSRIKWSREMNENLIKCYYETTNCETNKTGYRTQLRLKFIDIYPQFSHLSEQNIADQNRSIINNKLVTKFRLCELKRNIAKICTGQQSVDKTQSDPNPNSYKEIIQNTQSVIEEEFSPLVTSTINAPSRNRLCNTTTQKSFIDYDKINQTFDETLKHFQKSNPTTRPRIPKLKCSKKLDLIVDYIDSNILIKYSDINNDFITIQTIIYVAAYTAAVCVGIKIYGSEQTNRQYKSSLPQWQSRIQNKILALRKDIGRMTQYMQGNCSRKLIKNVDEIKTKYKVHTKHEEQNTTDKQILDTLKQKLNAAASRLKRYVQCSLRKKQNSQFINNEKQFYRQLDQNTQKTQSHIHDTRQHTHTSETSLPATNELQQYWCNIWSNPVQHNISADCLNNENTDRIQQMNFEHISLNTFLKILKKAHNWKSPGSDNIHNYWYKRFTALHPLLHNFINKFIHNPESMPQYVTQGITYLIPKGQDCKNAANYRPITCLQTIYKLLTGCISELVYQHIMENNILATEQKGCRKKSQGCKEQLIVDSVTMNLAFKQKKNISTMYIDYKKAFDSIPHSWLIYILQHYKIHPVIINFLKIAMKYWVTKLKTTGAPNIDTSEISIRRGIFQGDSFSPLWFCLSLNPLSNMLNRTNNGFHIKVNNNRTVLTHLMYMDDIKLYSENTQKLHNLADITQKFSNDICMEFGIDKCKTLEVKNGMVIQHNYPLSSGHNVEALDHNSFYKYLGFHQNRQINHTQIKLEIANKFKHRINMLLRSQLNARNTVLSINSYAIPLLTYSFGIIKWTQAELKKMQCNINKFLTTYRKHHPRSCSQRLTLPRYQGGRGIVDIVNLHNSQISSLRNFFYEQAKQTNLHKVVTMADVRLTPLNLHARTPQLNERITNLKEKNKAWQNKSLHGRHFHDLQQPHIDTEASNSWLRRGELFPETEAFMIAIQDQTINTRNYQKYIIRTPNLPTDICRRCHSNSETIQHITGACKAIVQTDYKHRHNQVAAIIHQNLAFKHKFVTQKVPYYKYTPDNILENSNYKIYWDRTIITDKTVHYNRPDITILDKTKKTVFLIDIAVCNTHNLLKTHSEKIAKYEDLAIEIKRQWQVSTITIIPIIISTTGVIPKTLHASLDALLMPPSTFL

SEQ ID NO: 14878 - protein, 1279 aa, Aeromachus stigmata
MDNGSSSSSSPSSLLSVDVAQEAHAENLVPTSETSRVRKKWTLKMNKFIWRTYLIATKMETDTRNYLDILHQEFSKEFPNMNASKQRLGDQRRAIVNNNLLDLDTRQQIKQQLNANLAETLNILTPSNEQSLNTQSSRIKWTQQMNEDLIRCYYQIKHSQTNMTGYRTALRTSFVTLHPHFSHLSEQHLASQNRSIVKNKLIPEQRLKEIEKEAERLSQHDTNTIQLIGTTQQDLNQTTNSYEHNEVSLTVSNENESAVLVTNRTFNTNTCNINNVDIIFQKTLTRFQQTNPITRPHIPKQKFSKKLASLVHYINNNTLPKHINKDTDFMTFHTIIYSAAYTVAMCNGTKIKESADTTHHHKTIKPAWQMRMENKVLQLRKDIGRVTQYKQGKRGKILIKHVEEIKDRYKIHTKYDELNTTEDLILDTLKQKLNVVASRLKRYITCNLRKKQNSQFINSEKQFYRNLTTETQNKHNNDRIHNTNTEILPPTDELHTFWSNIWSNSVQHNHSADWMQEENVDGIGDMQFEHIPHEIFIKILNKAHNWKCPGSDGIHNFWYKKFTHLHPHLHNFINDFLISPALMPKFITEGITYMIPKDSNYTDPTKYRPITCLQTIYKIITGCISELVNDHITQYNILATEQKGCRKNSQGCKEQLIIDSVVMNLALKKKRDISTMYIDYRKAFDSIPHSWLVYILAHYKIHPTLITFMKTAMEHWSTSLKLQKSTIQSPVINIRRGIFQGDAFSPLWFCLALNPLSNILNKSSNGFHITVNDDHTILTHLMYMDDIKLYSNSTETLHNLADITQIFSNDICMEFGIDKCKTLEIKRGAIKQSNYFLQSGLSVEALDYNSYYKYLGFEQSKQINHKQIKTDLKGKFRHRVNILVRSQLNARNTVKAVNSFAIPLLTYSFGIIKWTQTELKNIQRNINTSLTTQRKHHPRSCLQRLTLPRDEGGRGIIDIVNLHNSQITSLRKFFFHQADCLNLHKIITLTDTRFTPLNLNNNNPQLNENLTSETEKILTWAKKSLHGRHRQDLEQPYIDKQASNAWLKHGYLFPETEAFMIAIQDQVINTKNYQKYIIKKPNISSDLCRRCHSNPETIQHITGACKAIVQTDYKHRHDQVASIIHQNLAHKYKLIKQKVAYYKHKPDTLLENNEFKMYYDRTIITDKTVHYNRPDITVLDKTNNSVFLVDIAVCNTHNLLTTHTEKVAKYQDLSLEIKRQWQVNVVRTVPIIISSTGVIPKTLHKSLEILDITPSTYALMQKAVILNTCRITRKFFNLT

SEQ ID NO: 14879 - protein, 868 aa, Choaspes benjaminii
MMEYMKGNTSQKIQVHIENIKTTYKIHTKHEEHNATDDMILDTIKQKLNAAASRLKRYKNCHLRKKQNSQFINNEKQFYRQLNVNTLNYTPVSNKNDQTPDRQETFSKNLHKYWSNIWANPVQHNTNAEWLKSHNTNEITNMRFNHITPHTFLTILNKTHNWKTPGTDNIQNYWYKKFTKVHALLHTHINHFIKNPESMPDYITQGITYMIPKDPNYNNPANYRPITCLQTIYKILTGCISEIVHQHVTKNNILAEEQKGCRKNSQGCKEQLIIDSVVMTSALKQKDDISTMYIDFRKAFDSVPHTWLLYVLQLYKVHPTLISFLKIAMKSWKTKLNPTANSNTQTPDIPIRRGIFQGDAFSPLWFCLALNPLSILLNQTDAGFYLQTKNNKAVLTHLMYMDDIKLYSTNTQSLHHLADITQTFSTDIHMDFGVDKCKTLTVKKGKIEKTDYILESGNNIDSLDQNSSYKYLGFHQNRQIHYKQIKKELATTFKHRINIILRSQLNARNTVKALNTYAVPLLTYSFGIINWSQTELTKLQRCINTTLTYHRKHHPRSCVQRLTLPRKEGGRGIADITNLHNKLITSLRNFFYERSLQTTLHRLITEADHRHTPLNLYARTTQRNEKILNSNEKITAWESKSLHGRHPRDFKLPHEDREASNAWLRRGELFPETEAFIIAIQDQTINTRNYQKYIIRNPNLSTDICRRCHSNSETIQHITGACKAIVQTDYKHRHDQAASIIHQYLAYRHKFITQKIPYYKYKPNPILENNRFKIYWDRTIITDKTVHYNRPDITILDKTNKTVFIIDIAICNTHNLLATHAEKMSKYEDLTIEIKRQWQVGSVKIIPMNISTTGIPCLKNPTCQLRYT

SEQ ID NO: 14880 - protein, 1100 aa, Dalla quadristriga
MEMNENLIRCYYQITQNETNKTGYRPQLRRKFIDIYPELYHISEQHVADQNRSILNNKLIAENRLKEIAKEIEDAAKETYFNRNVTQNDDNLYQVGQIANEEREISRPEVYTDNTVIDDRSRYDMNITYIDKHNIRKTFHETFSRFENTDPVNRPHIPKQICNKKLFSIINYLNTDILSNYLHTTNDFSYIQTVIYSAAYTAVILNGTKIKELAETIHVNKAKEPAWKKRIENKILELRKDIGRMTQYKLGHRGRKLVAQVEKIKIKFEIHSKHEENNTTAELILDTLKQKLNATASRLKRYITCNLRKIQNLQFKHNEKQFYRKLVINTQNGRSETQNNDKSGTEIPRPPMDKLHQFWSNIWSNSVEHNTSAGWIKQENVDRIEDMKFDYIPHDIFMKILKKAHNWKSPGSDGIHNFWYKKFTQMHPLLHNCLNDFIQNPNSMPDYITQGITYMIPKDLEYTNPEKYRPITCLQTVYKILTGCISELIYQHITQNNILATEQKGCRKKSQGCKEQLVIDSVVMNLASSRKKDISTMFIDYRKAFDSIPHTWLIFILHHYKIHPTLIHFMKTAMDHWKTTLKLHQYNEQTPEISIRRGIFQGDAFSPLWFCLALNPLSAILNNSKSGFQIKAGDDQIKLTHLMYMDDIKLYSNSTHSLHCLADLTQTFSNDICMQFGIEKCKTLEFRNGVLQQSNYTLQTGQNIDALCQNSYYKYLGFHQNRTINHNEIKMETKGKFKHRVNILARSHLNAGNTIKAINTFAIPLLTYSFGIIKWTQTELKQIQRYINTSLTTHRKRHPRSCLQRLTLPRTEGGRGILDIVNLHNSQITSLRNYFFEQANHTYLHKVVTMIDARFTPLNLRNSNSQRNEKIVSDSEKILEWEKKSLHGRHRHDLGQPHIDRQASNVWLRRGELFPETEAFMIAIQDQIISTRNYQKYIIRTPNLPTDICRRCHSNSETIQHITGACKAIVQTDYKHRHDQVAAIIHQNIAYRHKLITQKEPYYTYKPNTILENNTHRIYWDRTIITDKTIHYNRPDITILDKHSKTVFLIDIAVCNTHNLLSTHVEKLAKYEDLSQEIKRQWRVNTVRIIPIVISTTGVI

SEQ ID NO: 14881 - protein, 1398 aa, Piruna aea
MMEAVRKRNVPQAGTSASSEGESRPEPIGLGSSTYSGGSNAAQTFVQTSYALRPRSTSGKVLHKTETSPSSSAISYSVYTKKKNPSTCRKEIDTVSYTVSPTSSCSLFQTPNSSPQTQRQASSSSSSFSSTSPLSVDVAQEAEAIQLVPTSDKIRARKKWTPEMNKFIWRTYLIATNMEKHTRKYLDTLHREFNQKFPYMTASKQRLGDQRRAIIRNNLLDFNTREQIKLELETANTPHFEIHPNNQTHSTQRSRLVWTTEMNENLIRSYYQITQNGTNKTGYRPQLRKKFTEIYQQLSHISEQHVADQTRSILNNKLIPDSRLTQIAQEIKAATTDRLTETHNNRHEQNNDKSEFNLDANLGRAISLQYNRANPGIADTRRGSSTTTYIDLHDIRKTFHETLSRFRNTNPVIRPHIPKQKCTKKLLSTVDYLNTNILPNYLCSTNDFPHVQTIIYSAAYTAVTLNGIHIKELSEIGQVNKLKTPSWQRRIENKILELRQDIGRMTQYKLGNRRSKLVHQVENIKIKYKIHTKHEENNTTVELILDTLKQKLNATSSRLKRYIICNLRKKQNIQFNNSEKQFYRQLTANIQNNQSEMQNNDRSNTVLQPPIEKLHEFWSNIWSNSVEHNKCADWIQEENVNYIKDMQFDYIPYDVFIKVLKKSHNWKSPGSDGIHNFWYKKLTQVHPFLHNSLNDFIRNPDSMPDYITQGITYMIPKDLDHTNPEKYRPITCLQTIYKLLTACISDLVYLHITQNNILAIEQKGCKRKSQGCKEQVVIDSVVMNLASSQKKDISTMFIDYRKAFDSIPHSWLIFILHHYRIHPTLIHFLKTAMEHWKTTLKLHRFNGETSDICIRRGIFQGDAFSPLWFCLALNPLSVILNNSNNGFQIKAGDKQINLTHLMYMDDIKLYSTNTHSLHHLADLTQTFSNDICMQFGIEKCKTLEFKNGVLEQNSYTLQEGQNIDALCQNTYYKYLGFHQNRTINHTKIKTETIGKFKHRVNILARTHLNARNTIKAINTFAIPLLTYSFGIIKWTQTELKQIQRYINTSLTSHRKHHPRSCLQRLTLPRMEGGRGVLDVVNLHNSLITSLRNYFFEQAKHTDLHKAITMTDKRFTPLNLLNTNTQRNEKVINNNEKILAWERKSMHGRHRHDLVQVHIDKEASNAWLRRGELFPETEAFMIAIQDQIISTRNYQKYIIRTPNLPSDLCRRCHSNSETIQHITGACKSIVQTDYKHRHDQVAAIIHQNIAHRYKFITRKEPYYTYKPNTILENNTHKIYWDRTIITDKTIHYNRPDITILDKISKTVFLIDIAVCNTHNLLTTHVEKLAKYEDLSIEIKRQWQVNTVRILPLIISTTGVIPKTLHENLEILKMPTSTYILMQKAVILNTCRITRKFLSI

SEQ ID NO: 14882 - protein, 1305 aa, Piruna pirus
MDTHSYIVSPTSSFSLFQTPNSSPHTSRRGFSSSSISSTSPLSVDVAQEAEAIRLVPTSDNIRARKKWTPEMNKFIWRTYLIVTNMEKDTRKYLDTLHREFNQKFPYMTASKQRIGDQRRAIIRNNLLDFNTRQQIKIELETSNTRHFEIHSNNPHSTQRSRLIWTTEMNENLIRSYYQITQNGTNKTGYRPQLRKQFIEIYQHLSHISEQHVADQTRSILNNKLISDSRLRQITQEIEGATTDRLTKTHLNSHEQNNDNLHHNLEANLEREISRSGNTANTGIADRRRCSFTKTNIDDHDIRKTFHETLSRFRHTNPVTRPHIPKQKCTKKLLSTVDYINTNILPNYLYATNNFLYVQTIIYSAAYTAVTLNGIKIKELSQTAQVHKPKTPHWQRRIENKILELRKDIGRMTQYKLGNRGRKLVHQVENIKTRYVVHTKHEENNTTVELILDTLKQKLNATSSRLKRYVTCNLRKKQNTQFNNSEKQFYRQVTANTQNNQSEMRNNDRSNTILQPPIDKLHEFWSNIWSNSIEHNICANWIQEENVNYIKDMQFDYIPHEIFMKILKKAHNWKSPGSDGIHNFWYKKLTQVHPFLHNCLNDFIQNPDSMPDYITQGITYMIPKDLDYTNPEKYRPITCLQTIYKLLTGCISDLIYLHITQNNILATEQKGCRKKSQGCKEQLVIDSVVMNLASSQKKDISTMFIDYRKAFDSIPHSWLIFILHHYKIHPSLINFLKTSMEHWKTTLKIHQYNGETSDICIRRGIFQGDSFSPLWFCLALNPLSVILNNTNNGFQIKAGDTQFNLTHLMYMDDIKLYSTNTHSLHHLADLTQTFSNDICMQFGIEKCKTLEFRNGILERNNYVLQEGQNIDALCPNAYYKYLGFHQNRTINHTKIKTETIEKFKHRVNILARTHLNARNTIKAINTFAIPLLTYSFGIIKWTQTELKQIQRHINASLTSHRKHHPRSCLQRLTLPRIEGGRGVLDVVNLHNSLITSLRNYFFEQTKYTDLHKAIVRADKRLTPLNLFNNNTQRNEKIVSNNEKILAWERKSMHGRHRHDLVQIHIDKEASNAWLRRGELFPETEAFMIAIQDQIISTRNYQKYIIRTPNLPTDLCRRCHSNSETIQHITGACKSIVQTDYKHRHDQVAAIIHQNIAHRYKFISRKEPYYTYKPNTILENNTHKIYWDRTIITDKTIHYNRPDITILDKNSKTVFLIDIAVCNTHNLLSTHVEKLAKYEDLSVEIKRQWQVNTVRILPIVISTTGVIPRTLHENLEVLKMPTSTYILMQKAVILNTCRITRKFLAI

SEQ ID NO: 14883 - protein, 941 aa, Ephestia elutella
MSVNANYELCPLCPGSSRRFVVPRGLAIHMTRIHRHGDLDSDSVPLSQSPRTGINYNQLDSLHSLKRSVPVLKHVPKGARHLAAGKLTLLIEDCLKDNSVETWYALFSFAYTSLRVPNREGRSSLTSKVKENINNPDSVAVTNHDQKTSYSLNKLIESKVHEGDLRGAVRLLSSDCSFAPQNNDTRNALLLRHPSPSRSLSLPAEPNRSSHYFTVKSTDVASAIGSFQTGSASGLDGLRPDHLKELTSFSARNNGGRFLEALTNLCNFLIKGLLNPQVCPYFYGASLFALRKKDGGIRPIAIGSSLRRLVAKLGCNAVRDKATLFLQPHQLGFGTPRGCEAAIHATRYFAKTNENSNNVIVKLDIANAFNSVERDVILNEVLENIPELFPFLYQCYAFQSNLYYDGNPIKSKVGAQQGDPLGPLIFSIALHKAVTCLKSPLNVWYLDDGTLGGPPDIVAADLLLLFKKFEPLGLKLNENKCELFLCGEDARSSVSRFESLIAGVRVMDSTNLSLLDSPIFDIAIPSYIRDKLSSFSAMQERLKYLSSHVALVLLRNCFVIPRMTYFIRTSPVWLFPQEMKQFDDAVKSSLESLLNVHFAENQWVQASLPIRHGGLGIRRLSEVSLPAFLASSHGVINLVTKLLSINGDGLILPHVSEALSSWLSLCPNSPVPDKPYLQRAWDEEISQIVRLELVNQASGADLARLKAVGEIESGAWLHAIPSPYLGTLLDNDSLRIAVALRLGCSVCEPHRCICGKMVEENGRHALGCSRCAGRLSRHHTINDIIRRALISANIPCHLEPSGLSRTDGKRPDGLTLIPWQRGRSLLWDATCVSTYAASYINSTMREAGAAARAAAGQKCNKYSILSRNYEFVPVAVETAGPWCAEAKSFVKDLGRRLRDRGHDIRSGWYLIQRISLAIQRGNSASVMGTFEPGTVQGGIFD

SEQ ID NO: 14884 - protein, 979 aa, Drosophila pruinosa
MSRMHKDRLDELRLRVDVKARWNEEELSMMARKELELTANAERFINKKLAEMFPNRSVDAIKKCRQRDNYKAIIEQFKGQAAIIPEINESETTTRRPSLREPESSSSRSRSIPIDPSIHSDDVLMRILRGLRPVECSRTWRVEVLQSIVDSAQTSGKVATLQCLSNYLLEIFPARNNGLVPARVYPEPRNRRQYRRQQYARVQRNWDKHKGRCIGSLLDGPDESVMPNQEIMKPFWREVMTQQSPSSCNTVVPSMAHLLEGVWSPITSRDLQMHKVSLTSSPGPDGITPKTARSIPNGVMLRIMNLILWCGELPVLFRMARTVFVPKTGKASQPHDFRPISVPSVIVRQLNAILASRFATSVDWDPRQRGFMPTDGCADNATIVDLVLRNCHRQYKSCYIATLDVSKAFDSVSHEAVLDTLTAYGAPRNFVNYVRRMYSGGGTYFSGRGWRSEEFVPARGVKQGDPLSPLMFNLVIDRLLRSLPEYVGVNVGNAKINVAAFADDLVLFSETPKGLQELLDTTVDFLKTVGLTLNANKCFTISVKGQPKQKCTVVEPRSFKVDSRICPALKRTKEWRYLGIQFTAEGRARYNPAEDLGPKLDIISRSPLKPQQKLFALRTVLIPQLYHKLTLGSVAIGVLRKCDRLVRSVVRRWLDLPMDVSVAFFHAPQNAGGLGVPSVRWTAPVLRIQRLDSIKWPHLEQSETASSFLSAERRRARDRCQAKEAALFTRHEIDSYWANRLHNSVDGSGLREAGRYAQQHGWVVDPTRLLTGKAYVNGIKLRINALPTRSRTTRGRHELERQCRAGCDAPETLNHILQKCHRTHGRRVARHNSVASYLKQGLELRGYTVIAEPSLQGESRIYKPDLVAFRPDHTLVIDAQVVTDGLDLDQAHRSKVEIYDRQDLRTTLIRDYQAHEDIRTVSATLNWRGIWSYQSVTRLRALGVLNAADSNVISTRVVVGGVCGFKTFMFHTGYHRRVS

SEQ ID NO: 14885 - protein, 979 aa, Drosophila pruinosa
MSRMHKDRLDELRLRVDVKARWNEEELSMMARKELELTANGERFINKKLAEVFPNRSVDAIKKCRQRDNYKAIIEQFKGQAAIIPEINESETTTRRPSLREPESSSSRSRSIPIDPSIHSDDVLMRILRGLRPVECSRTWRVEVLQSIVDSAQTSGKVATLQCLSNYLLEIFPARNNGLVPARVYPEPRNRRQYRRQQYARVQRNWDKHKGRCIGSLLDGPDESVMPNQEIMEPFWREVMTQQSPSSCNTVVPSMAHLLEGVWSPITSRDLQMHKVSLTSSPGPDGITPKTARSIPNGVMLRIMNLILWCGELPVLFRMARTVFVPKTGKASQPHDFRPISVPSVIVRQLNAILASRFASSVDWDPRQRGFMPTDGCADNATIVDLVLRNCHRQYKSCYIATLDVSKAFDSVSHEAVLDTLTAYGAPRNFVNYVRRMYSGGGTYFSGRGWRSEEFVPARGVKQGDPLSPLMFNLVIDRLLRSLPEYVGVNVGNAKINVAAFADDLVLFSETPKGLQELLDTTVDFLKTVGLTLNANKCFTISVKGQPKQKCTVVEPRSFKVDSRICPALKRTKEWRYLGIQFTAEGRARYNPAEDLGPKLDIISRSPLKPQQKLFALRTVLIPQLYHKLTLGSVAIGVLRKCDRLVRSVVRRWLDLPMDVSVAFFHAPQNAGGLGVPSVRWTAPVLRIQRLDSIKWPHLEQSETASSFLSAERRRARDRCQAKEAALFTRHEIDSYWANRLHNSVDGSGLREAGRYAQQHGWVVDPTRLLTGKAYVNGIKLRINALPTRSRTTRGRHELERQCRAGCDAPETLNHILQKCHRTHGRRVARHNSVASYLKQGLELRGYTVIAEPSLQGESRIYKPDLVAFRPDHTLVIDAQVVTDGLDLDQAHRSKVEIYDRQDLRTTLIRDYQAHEDIRTVSATLNWRGIWSYQSVTRLRALGVLNAADSNVISTRVVVGGVCGFKTFMFHTGYHRRVS

SEQ ID NO: 14886 - protein, 940 aa, Drosophila pruinosa
MAKDSLIKKLAEVFPNRSVDAIKKCRQRDNYKAIIEQFKGQAAIIPEINESETTTRRPSLREPESSSSRSRSIPIDPSIHSDDVLMRILRGLRPVECSRTWRVEVLQSIVDSAQTSGKVATLQCLSNYLLEIFPARNNGLVPARVYPEPRNRRQYRRQQYARVQRNWDKHKGRCIGSLLDGPDESVMPNQEIMEPFWREVMTQQSPSSCNTVVPSMAHLLEGVWSPITSRDLQMHKVSLTSSPGPDGITPKTARSIPNGVMLRIMNLILWCGELPVLFRMARTVFVPKTGKASQPHDFRPISVPSVIVRQLNAILASRFASSVDWDPRQRGFMPTDGCADNATIVDLVLRNCHRQYKSCYIATLDVSKAFDSVSHEAVLDTLTAYGAPRNFVNYVRRMYSGGGTYFSGRGWRSEEFVPARGVKQGDPLSPLMFNLVIDRLLRSLPEYVGVNVGNAKINVAAFADDLVLFSETPKGLQELLDTTVDFLKTVGLTLNANKCFTISVKGQPKQKCTVVEPRSFKVDSRICPALKRTKEWRYLGIQFTAEGRARYNPAEDLGPKLDIISRSPLKPQQKLFALRTVLIPQLYHKLTLGSVAIGVLRKCDRLVRSVVRRWLDLPMDVSVAFFHAPQNAGGLGVPSVRWTAPVLRIQRLDSIKWPHLEQSETASSFLSAERRRARDRCQAKEAALFTRHEIDSYWANRLHTSVDGSGLREAGRYAQQHGWVVDPTRLLTGKAYVNGIKLRINALPTRSRTTRGRHELERQCRAGCDAPETLNHILQKCHRTHGRRVARHNSVASYLKQGLELRGYTVIAEPSLQGESRIYKPDLVAFRPDHTLVIDAQVVTDGLDLDQAHRSKVEIYDRQDLRTTLIRDYQAHEDIRTVSATLNWRGIWSYQSVTRLRALGVLNAADSNVISTRVVVGGVCGFKTFMFHTGYHRRVS

SEQ ID NO: 14887 - protein, 1031 aa, Drosophila nasuta
MPRIAESYSVNSPTASVGAHQGRNVDANPVVGHLCVECGRSFGTKTGLGVHMSRQHKDRLDELRTRVDVKTRWCEEELAMMARKELELIANGERFINKKLALHFPERSVDAIKKCRQRDNYKAKIEQLRGQAALIPEISEPQTITRRPSISGLESSSSMSESVPITPSIHSDDVLMRILRGFGPVGCNRSWRVEVLQSIIDGAQTSGKEATLQCLSNYLLEIFPNRNEGPVSARVFPEPRNRRQNRRQQFARVQRNWDKHKGRCIGSLLAGPDESVMPNQEIMEPYWREVMTQQSLSSCNSTVPHMGHLLEGVWSPITSRDLQLHQVPLTSSPGPDGISPRTARSIPSGVMLRIMNLILWCGKLPTLFRMARTVFIPKTVRASRPEDFRPISVPSVIVRQLNAILASRLASSVDWDPRQRGFLPTDGCADNATIVDLILRDHHRRHASCYIATLDVSKAFDSVSHAAVIDTLSAYGAPTGFVDYVRSLYLGGGTSLNGKGWRSEEFVPARGVKQGDPLSPHMFNLVIDRLLRSLPDEIGVSVGNAKTNAAVFADDLVLFASTPKGLQALLDTTVSFLASVGLTLNANKCFTVSVKGQPKQKCTVIESRSFCVGSRTCPSLKRSEEWRYLGIQFTADGRARYNPTEDIGPRLDIISRSPLKPQQKLFALRTVLIPQLYHKLTLGSVAIGVLRKCDRLVRSVVRKWLDLPMDVSVAFFHAPHTSGGLGVPSVRRTAPMLRIQRLTNIKWPHLEQSETASSFLSAEIRRARDRCKASGDAALDTRLLIDSYWADRLHSSVDGSGLREAGRYAPQHGWVVAPTRLLTGKAYLNGIKLRINALPTRSRTTRGRHELERQCRAGCDAPESLNHILQKCHRTHGRRVARHNSVANYLKRGLETRGYSVIAEPSLQGENRIYKPDLVGFRPDHTIVIDAQVVTDGLDLDQAHQSKVEIYDRQDVRTALVRDYRAHEDIKIVSATLNWRGIWSYRSVKRLIALGVLNAGDSNIISTRVVDGGVCGFKTFMFHTGYRQGVG

SEQ ID NO: 14888 - protein, 976 aa, Drosophila nasuta
MPRIAESYSVNSPTASVGAHQGRNVDANPVVGHLCVECGRSFGTKTGLGVHMSRQHKDRLDELRTRVDVKTRWCEEELAMMARKELELIANGERFINKKLALHFPERSVDAIKKCRQRDNYKAKIEQLRGQAALIPEISEPQTITRRPSISGLESSSSMSESVPITPSIHSDDVLMRILRGFGPVGCNRSWRVEVLQSIIDGAQTSGKEATLQCLSNYLLEIFPNRNEGPVSARVFPEPRNRRQNRRQQFARVQRNWDKHKGRCIGSLLAGPDESVMPNQEIMEPYWREVMTQQSLSSCNSTVPHMGHLLEGVWSPITSRDLQLHQVPLTSSPGPDGISPRTARSIPSGVMLRIMNLILWCGKLPTLFRMARTVFIPKTVRASRPEDFRPISVPSVIVRQLNAILASRLASSVDWDPRQRGFLPTDGCADNATIVDLILRDHHRRHASCYIATLDVSKAFDSVSHAAVIDTLSAYGAPTGFVDYVRSLYLGGGTSLNGKGWRSEEFVPARGVKQGDPLSPHMFNLVIDRLLRSLPDEIGVSVGNAKTNAAAFADDLVLFASTPKGLQALLDTTVSFLASVGLTLNANKCFTVSVKGQPKQKCTVIESRSFCVGSRTCPSLKRSEEWRYLGIQFTADGRARYNPTEDIGPRLDIISRSPLKPQQKLFALRTVLIPQLYHKLTLGSVAIGVLRKCDRLVRSVVRKWLDLPMDVSVAFFHAPHTSGGLGVPSVRRTAPMLRIQRLTNIKWPHLEQSETASSFLSAEIRRARDRCKASGDAALDTRLLIDSYWADRLHSSVDGSGLREAGRYAPQHGWVVAPTRLLTGKAYLNGIKLRINALPTRSRTTRGRHELERQCRAGCDAPESLNHILQKCHRTHGRRVARHNSVANYLKRGLETRGYSVIAEPSLQGENRIYKPDLVGFRPDHTIVIDAQVVTDGLDLDQAHQSKVRSTTDRTYERLWFGIIGHMRTLKSFLLR

SEQ ID NO: 14889 - protein, 1031 aa, Drosophila nasuta
MPRIAESYSVNSPTASVGAHQGRNVDANPVVGHLCVECGRSFGTKTGLGVHMSRQHKDRLDELRTRVDVKTRWCEEELAMMARKELELIANGERFINKKLALHFPERSVDAIKKCRQRDNYKAKIEQLRGQAALIPEISEPQTITRRPSISGLESSSSMSESVPITPSIHSDDVLMRILRGFGPVGCNRSWRVEVLQSIIDGAQTSGKEATLQCLSNYLLEIFPNRNEGPVSARVFPEPRNRRQNRRQQFARVQRNWDKHKGRCIGSLLAGPDESVMPNQEIMEPYWREVMTQQSLSSCNSTVPHMGHLLEGVWSPITSRDLQLHQVPLTSSPGPDGISPRTARSIPSGVMLRIMNLILWCGKLPTLFRMARTVFIPKTVRASRPEDFRPISVPSVIVRQLNAILASRLASSVDWDPRQRGFLPTDGCADNATIVDLILRDHHRRHASCYIATLDVSKAFDSVSHAAVIDTLSAYGAPTGFVDYVRSLYLGGGTSLNGKGWRSEEFVPARGVKQGDPLSPHMFNLVIDRLLRSLPDEIGVSVGNAKTNAAAFADDLVLFASTPKGLQALLDTTVSFLASVGLTLNANKCFTVSVKGQPKQKCTVIESRSFCVGSRTCPSLKRSEEWRYLGIQFTADGRARYNPTEDIGPRLDIISRSPLKPQQKLFALRTVLIPQLYHKLTLGSVAIGVLRKCDRLVRSVVRKWLDLPMDVSVAFFHAPHTSGGLGVPSVRRTAPMLRIQRLTNIKWPHLEQSETASSFLSAEIRRARDRCKASGDAALDTRLLIDSYWADRLHSSVDGSGLREAGRYAPQHGWVVAPTRLLTGKAYLNGIKLRINALPTRSRTTRGRHELERQCRAGCDAPESLNHILQKCHRTHGRRVARHNSVANYLKRGLETRGYSVIAEPSLQGENRIYKPDLVGFRPDHTIVIDAQVVTDGLDLDQAHQSKVEIYDRQDVRTALVRDYRAHEDIKIVSATLNWRGIWSYRSVKRLIALGVLNAGDSNIISTRVVDGGVCGFKTFMFHTGYRQGVG

SEQ ID NO: 14890 - protein, 1031 aa, Drosophila nasuta
MPRIAESYSVNSPTASVGAHQGRNVDANPVVGHLCVECGRSFGTKTGLGVHMSRQHKDRLDELRTRVDVKTRWCEDELAMMARKELELIANGERFINKKLALHFPERSVDAIKKCRQRDNYKAKIEQLRGQAALIPEISEPQTITRRPSISGLESSSSMSESVPITPSIHSDDVLMRILRGFGPVGCNRSWRVEVLQSIIDGAQTSGKEATLQCLSNYLLEIFPNRNEGPVSARVFPEPRNRRQNRRQQFARVQRNWDKHKGRCIGSLLAGPDESVMPNQEIMEPYWREVMTQQSLSSCNSTVPHMGHLLEGVWSPITSRDLQLHQVPLTSSPGPDGISPRTARSIPSGVMLRIMNLILWCGKLPTLFRMARTVFIPKTVRASRPEDFRPISVPSVIVRQLNAILASRLASSVDWDPRQRGFLPTDGCADNATIVDLILRDHHRRHASCYIATLDVSKAFDSVSHAAVIDTLSAYGAPTGFVDYVRSLYLGGGTSLNGKGWRSEEFVPARGVKQGDPLSPHMFNLVIDRLLRSLPDEIGVSVGNAKTNAAAFADDLVLFASTPKGLQALLDTTVSFLASVGLTLNANKCFTVSVKGQPKQKCTVIESRSFCVGSRTCPSLKRSEEWRYLGIQFTADGRARYNPTEDIGPRLDIISRSPLKPQQKLFALRTVLIPQLYHKLTLGSVAIGVLRKCDRLVRSVVRKWLDLPMDVSVAFFHAPHTSGGLGVPSVRRTAPMLRIQRLTNIKWPHLEQSETASSFLSAEIRRARDRCKASGDAALDTRLLIDSYWADRLHSSVDGSGLREAGRYAPQHGWVVAPTRLLTGKAYLNGIKLRINALPTRSRTTRGRHELERQCRAGCDAPESLNHILQKCHRTHGRRVARHNSVANYLKRELETRGYSVIAEPSLQGENRIYKPDLVGFRPDHTIVIDAQVVTDGLDLDQAHQSKVEIYDRQDVRTALVRDYRAHEDIKIVSATLNWRGIWSYRSVKRLIALGVLNAGDSNIISTRVVDGGVCGFKTFMFHTGYRQGVG

SEQ ID NO: 14891 - protein, 856 aa, Drosophila immigrans
MRILRGMRPVECHRSWRVEVLQSIVDRAHTSGKEATLQCLSIYLLEIFPARNEGLVPARVYPEPRNRRQNRRQQYARVQRNWDKNKGRCIKSLLDGPDESVLPNQEVMEPYWREVMMQQSPSSCNNAVPNMEHLFEGVWSPITSRDLKMHKVSLTSSPGPDGISPKTARSIPVGVMLRIMNLILWCGKLPTLFRMARTVFIPKTATASRPEDFRPISVPSVIVRQLNAILASRLTSSVDWDPRQRGFLPTDGCADNATMVDLILRDHHARYASCHLATLDVRKAFDSVSHAAVIDTLTAYGVPKGLVDYVRSLYEGGGTFLTGKGWRSEGFIPARGVKQGDPLSPLMFNLVMDRLLRSLPEEIGVKVGNAKVNAAAFADDLVLFSSTPKGLQALLDTTVDFLSSVGLTLNANKCFTVSVKGQPKQKCTVVEPRSFCVGSRMCPALKRSEEWKYLGIHFTAEGRARYNPAEDLGRKLDIISSSPLKPQQKLFALRTVLIPQLYHKLTLGSVAIGVLRKCDRLVRSVVRRWLDLPLDVSIAFFHAPHNSGGLGVPSVRRTAPMLRIKRLDSIKWPHLEQSEAASSFLSAEIRRARDRCQATGVNALVSRQAIDSYWANRLHMSVDGSGLREAGRYAPQHGWVVQPTRLLSGKAYLNGVKLRINALPTRSRTTRGRHELERQCRAGCDAPESLNHILQKCHRTHGRRVARHNSVASYLKRGLETRGYTVIAEPSLQGDERRFKPDLVAIQPDHTIVIDVQVVTDGLDLDQAHQSKVEIYDRLDVRTALVREYQVHEDIKIVSATLNWRGIWSYQSVTRLRALGVLNAGDSNVISTRVVAGGVCGFRTFMFHTGFRQGVG

SEQ ID NO: 14892 - protein, 1031 aa, Drosophila nasuta
MPRIAESYSVNSPTASVGAHQGRNVDANPVVGHLCVECGRSFGTKTGLGVHMSRQHKDRLDELRTRVDVKTRWCEEELAMMARKELELIANGERFINKKLALHFPERSVDAIKKCRQRDNYKAKIEQLRGQAALIPEISEPQTITRRPSISGLESSSSMSESVPITPSIHSDDVLMRILRGFGPVGCNRSWRVEVLQSIIDGAQTSGKEATLQCLSNYLLEIFPNRNEGPVSARVFPEPRNRRQNRRQQFARVQRNWDKHKGRCIGSLLAGPDESVMPNQEIMEPYWREVMTQQSLSSCNSTVPHMGHLLEGVWSPITSRDLQLHQVPLTSSPGPDGISPRTARSIPSGVMLRIMNLILWCGKLPTLFRMARTVFIPKTVRASRPEDFRPISVPSVIVRQLNAILASRLASSVDWDPRQRGFLPTDGCADNATIVDLILRDHHRRHASCYIATLDVSKAFDSVSHAAVIDTLSAYGAPTGFVDYVRSLYLGGGTSLNGKGWRSEEFVPARGVKQGDPLSPHMFNLVIDRLLRSLPDEIGVSVGNAKTNAAAFADDLVLFASTPKGLQALLDTTVSFLASVGLTLNANKCFTVSVKGQPKQKCTVIESRSFCVGSRTCPSLKRSEEWRYLGIQFTADGRARYNPTEDIGPRLDIISRSPLKPQQKLFALRTVLIPQLYHKLTLGSVAIGVLRKCDRLVRSVVRKWLDLPMDVSVAFFHAPHTSGGLGVPSVRRTAPMLRIQRLTNIKWPHLEQSETASSFLSAEIRRARDRCKASGDAALDTRLLIDSYWADRLHSSVDGSGLREAGRYAPQHGWVVAPTRLLTGKAYLNGIKLRINALPTRSRTTRGRHELERQCRAGCDAPESLNHILQKCHRTHGRRVARHNSVANYLKRGLETRGYSVIAEPSLQGENRIYKPDLVGFRPDHTIVIDAQVVTDGLDLDQAHQSKVEIYDRQDVRTALVRDYRAHEDIKIVSATLNWRGIWSYRSVKRLIALGVLNAGDSNIISTRVVDGGVFGFKTFMFHTGYRQGVG

SEQ ID NO: 14893 - protein, 1025 aa, Drosophila immigrans
MWPPRGILRVLLQIGFGSSGYERRKGSLGYQPGDPTTVGANQNNMPRIAEINSVISPTANVGAQQGRNVDANPVVGHLCVECGRSFGTKTGLGVHMSRQHKDRLDELRTRVDVKARWCEEELTMMARKELELIASGERFINKKLAVLFPTRSVDAIKKCRQRDNYKATIEQLRGQAALIPEINEPITITHRPSRELGSPPSTSRSIPITPSIHSDDVLMRILRGMRPVECHRSWRVEVLQSIVDRAHTSGKEATLQCLSIYLLEIFPARNEGLVPARVYPEPRNRRQNRRQQYARVQRNWDKNKGRCIKSLLDGPDESVLPNQEVMEPYWREVMMQQSPSSCNNAVPNMEHLFEGVWSPITSRDLKMHKVSLTSSPGPDGISPKTARSIPVGVMLRIMNLILWCGKLPTLFRMARTVFIPKTATASRPEDFRPISVPSVIVRQLNAILASRLTSSVDWDPRQRGFLPTDGCADNATMVDLILRDHHARYASCHLATLDVRKAFDSVSHAAVIDTLTAYGVPKGLVDYVRSLYEGGGTFLTGKGWRSEGFIPARGVKQGDPLSPLMFNLVMDRLLRSLPEEIGVKVGNAKVNTAAFADDLVLFASTPKGLQALLDTTVDFLSSVGLTLNANKCFTVSVKGQPKQKCTVVEPRSFCVGSRMCPALKRSEEWKYLGIHFTAEGRARYNPAEDLGRKLDIISSSPLKPQQKLFALRTVLIPQLYHKLTLGSVAIGVLRKCDRLVRSVVRRWLDLPLDVSIAFFHAPHNSGGLGVPSVRRTAPMLRIKRLDSIKWPHLEQSEAASSFLSAEIRRARDRCQATGVNALVSRQAIDSYWANRLHMSVDGSGLREAGRYAPQHGWVVQPTRLLSGKAYLNGVKLRINALPTRSRTTRGRHELERQCRAGCDAPESLNHILQKCHRTHGRRVARHNSVASYLKRGLETRGYTVIAEPSLQGDERRFKPDLVAIQPDHTIVIDVQVVTDGLDLDQAHQSKVEIYDRLDVRTALVREYQVHEDIKIFSPPQKRGGT

SEQ ID NO: 14894 - protein, 1018 aa, Drosophila nasuta
MASVGAHQGRNVDANPVVGHLCVECGRSFGTKTGLGVHMSRQHKDRLDELRTRVDVKTRWCEEELAMMARKELELIANGERFINKKLALHFPERSVDAIKKCRQRDNYKAKIEQLRGQAALIPEISEPQTITRRPSISGLESSSSMSESVPITPSIHSDDVLMRILRGFGPVGCNRSWRVEVLQSIIDGAQTSGKEATLQCLSNYLLEIFPNRNEGPVSARVFPEPRNRRQNRRQQFARVQRNWDTHKGRCIGSLLAGPDESVMPNQEIMEPYWREVMTQQSLSSCNSTVPHMGHLLEGVWSPITSRDLQLHQVPLTSSPGPDGISPRTARSIPSGVMLRIMNLILWCGKLPTLFRMARTVFIPKTVRASRPEDFRPISVPSVIVRQLNAILASRLASSVDWDPRQRGFLPTDGCADNATIVDLILRDHHRRHASCYIATLDVSKAFDSVSHAAVIDTLSAYGAPTGFVDYVRSLYLGGGTSLNGKGWRSEEFVPARGVKQGDPLSPHMFNLVIDRLLRSLPDEIGVSVGNAKTNAAAFADDLVLFASTPKGLQALLDTTVSFLASVGLTLNANKCFTVSVKGQPKQKCTVIESRSFCVGSRTCPSLKRSEEWRYLGIQFTADGRARYNPTEDIGPRLDIISRSPLKPQQKLFALRTVLIPQLYHKLTLGSVAIGVLRKCDRLVRSVVRKWLDLPMDVSVAFFHAPHTSGGLGVPSVRRTAPMLRIQRLTNIKWPHLEQSETASSFLSAEIRRARDRCKASGDAALDTRLLIDSYWADRLHSSVDGSGLREAGRYAPQHGWVVAPTRLLTGKAYLNGIKLRINALPTRSRTTRGRHELERQCRAGCDAPESLNHILQKCHRTHGRRVARHNSVANYLKRGLETRGYSVIAEPSLQGENRIYKPDLVGFRPDHTIVIDAQVVTDGLDLDQAHQSKVEIYDRQDVRTALVRDYRAHEDIKIVSATLNWRGIWSYRSVKRLIALGVLNAGDSNIISTRVVDGGVCGFKTFMFHTGYRQGVG

SEQ ID NO: 14895 - protein, 1074 aa, Drosophila immigrans
MWPPRGILRVLLQIGFGSSGYERRKGSLGYQPGDPTTVGANQNNMPRIAEINSVISPTANVGAQQGRNVDANPVVGHLCVECGRSFGTKTGLGVHMSRQHKDRLDELRTRVDVKARWCEEELTMMARKELELIASGERFINKKLAVLFPTRSVDAIKKCRQRDNYKATIEQLRGQAALIPEINEPITITHRPSRELGSPPSTSRSIPITPSIHSDDVLMRILRGMRPVECHRSWRVEVLQSIVDRAHTSGKEATLQCLSIYLLEIFPARNEGLVPARVYPEPRNRRQNRRQQYARVQRNWDKNKGRCIKSLLDGPDESVLPNQEVMEPYWREVMMQQSPSSCNNAVPNMEHLFEGVWSPITSRDLKMHKVSLTSSPGPDGISPKTARSIPVGVMLRIMNLILWCGKLPTLFRMARTVFIPKTATASRPEDFRPISVPSVIVRQLNAILASRLTSSVDWDPRQRGFLPTDGCADNATMVDLILRDHHARYASCHLATLDVRKAFDSVSHAAVIDTLTAYGVPKGLVDYVRSLYEGGGTFLTGKGWRSEGFIPARGVKQGDPLSPLMFNLVMDRLLRSLPEEIGVKVGNAKVNAAAFADDLVLFASTPKGLQALLDTTVDFLSSVGLTLNANKCFTVSVKGQPKQKCTVVEPRSFCVGSRMCPALKRSEEWKYLGIHFTAEGRARYNPAEDLGRKLDIISSSPLKPQQKLFALRTVLIPQLYHKLTLGSVAIGVLRKCDRLVRSVVRRWLDLPLDVSIAFFHAPHNSGGLGVPSVRRTAPMLRIKRLDSIKWPHLEQSEAASSFLSAEIRRARDRCQATGVNALVSRQAIDSYWANRLHMSVDGSGLREAGRYAPQHGWVVQPTRLLSGKAYLNGVKLRINALPTRSRTTRGRHELERQCRAGCDAPESLNHILQKCHRTHGRRVARHNSVASYLKRGLETRGYTVIAEPSLQGDERRFKPDLVAIQPDHTIVIDVQVVTDGLDLDQAHQSKVEIYDRLDVRTALVREYQVHEDIKIVSATLNWRGIWSYQSVTRLRALGVLNAGDSNVISTRVVAGGVCGFRTFMFHTGFRQGVG

SEQ ID NO: 14896 - protein, 873 aa, Drosophila nasuta
MSESVPITPSIHSDDVLMRILRGFGPVGCNRSWRVEVLQSIIDGAQTSGKEATLQCLSNYLLEIFPNRNEGPVSARVFPEPRNRRQNRRQQFARVQRNWDKHKGRCIGSLLAGPDESVMPNQEIMEPYWREVMTQQSLSSCNSTVPHMGHLLEGVWSPITSRDLQLHQVPLTSSPGPDGISPRTARSIPSGVMLRIMNLILWCGKLPTLFRMARTVFIPKTVRASRPEDFRPISVPSVIVRQLNAILASRLASSVDWDPRQRGFLPTDGCADNATIVDLILRDHHRRHASCYIATLDVSKAFDSVSHAAVIDTLSAYGAPTGFVDYVRSLYLGGGTSLNGKGWRSEEFVPARGVKQGDPLSPHMFNLVIDRLLRSLPDEIGVSVGNAKTNAAAFADDLVLFASTPKGLQALLDTTVSFLASVGLTLNANKCFTVSVKGQPKQKCTVIESRSFCVGSRTCPSLKRSEEWRYLGIQFTADGRARYNPTEDIGPRLDIISRSPLKPQQKLFALRTVLIPQLYHKLTLGSVAIGVLRKCDRLVRSVVRKWLDLPMDVSVAFFHAPHTSGGLGVPSVRRTAPMLRIQRLTNIKWPHLEQSETASSFLSAEIRRARDRCKASGDAALDTRLLIDSYWADRLHSSVDGSGLREAGRYAPQHGWVVAPTRLLTGKAYLNGIKLRINALPTRSRTTRGRHELERQCRAGCDAPESLNHILQKCHRTHGRRVARHNSVANYLKRGLETRGYSVIAEPSLQGENRIYKPDLVGFRPDHTIVIDAQVVTDGLDLDQAHQSKVEIYDRQDVRTALVRDYRAHEDIKIVSATLNWRGIWSYRSVKRLIALGVLNAGDSNIISTRVVDGGVCGFKTFMFHTGYRQGVG

SEQ ID NO: 14897 - protein, 1032 aa, Drosophila albomicans
MPRIAESYSVNSPTASVGAHQGRNVDANPVVGHLCVECGRSFGTKTGLGVHMSRQHKDRLDELRTRVDVKTRWCEEELAMMARKELELIANGERFINKKLALHFPERSVDAIKKCRQRDNYKAKIEQLRGQAALIPEISEPQTHYARRPSISGLESSSSMSESVPITPSIHSDDVLMRILRGFGPVGCNRSWRVEVLQSIIDGAQTSGKEATLQCLSNYLLEIFPNRNEGPVSARVFPEPRNRRQNRRQQFARVQRNWDKHKGRCIGSLLAGPDESVMPNQEIMEPYWREVMTQQSLSSCNSTVPHMGHLLEGVWSPITSRDLQLHQVPLTSSPGPDGISPRTARSIPSGVMLRIMNLILWCGKLPTLFRMARTVFIPKTVRASRPEDFRPISVPSVIVRQLNAILASRLASSVDWDPRQRGFLPTDGCADNATIVDLILRDHHRRHASCYIATLDVSKAFDSVSHAAVIDTLSAYGAPTGFVDYVRSLYLGGGTSLNGKGWRSEEFVPARGVKQGDPLSPHMFNLVIDRLLRSLPDEIGVSVGNAKTNAAAFADDLVLFASTPKGLQALLDTTVSFFASVGLTLNANKCFTVSVKGQPKQKCTVIESRSFCVGSRTCPSLKRSEEWRYLGIQFTADGRARYNPTEDIGPRLDIISRSPLKPQQKLFALRTVLIPQLYHKLTLGSVAIGVLRKCDRLVRSVVRKWLDLPMDVSVAFFHAPHTSGGLGVPSVRRTAPMLRIQRLTNIKWPHLEQSETASSFLSAEIRRARDRCKASGDAALDTRLLIDSYWADRLHSSVDGSGLREAGRYAPQHGWVVAPTRLLTGKAYLNGIKLRINALPTRSRTTRGRHELERQCRAGCDAPESLNHILQKCHRTHGRRVARHNSVANYLKRGLETRGYSVIAEPSLQGENRIYKPDLVGFRPDHTIVIDAQVVTDGLDLDQAHQSKVEIYDRQDVRTALVRDYRAHEDIKIVSATLNWRGIWSYRSVKRLRALGVLNAGDSNIISTRVVDGGVCGFKTFMFHTGYRQGVG

SEQ ID NO: 14898 - protein, 1031 aa, Drosophila albomicans
MPRIAESYSVNSPTASVGAHQGRNVDANPVVGHLCVECGRSFGTKTGLGVHMSRQHKDRLDELRTRVDVKTRWCEEELAMMARKELELIANGERFINKKLALHFPERSVDAIKKCRQRDNYKAKIEQLRGQAALIPEISEPQTITRRPSISGLESSSSMSESVPITPSIHSDDVLMRILRGFGPVGCNRSWRVEVLQSIIDGAQTSGKEATLQCLSNYLLEIFPNRNEGPVSARVFPEPRNRRQNRRQQFARVQRNWDKHKGRCIGSLLAGPDESVMPNQEIMEPYWREVMTQQSLSSCNSTVPHMGHLLEGVWSPITSRDLQLHQVPLTSSPGPDGISPRTARSIPSGVMLRIMNLILWCGKLPTLFRMARTVFIPKTVRASRPEDFRPISVPSVIVRQLNAILASRLASSVDWDPRQRGFLPTDGCADNATIVDLILRDHHRRHASCYIATLDVSKAFDSVSHAAVIDTLSAYGAPTGFVDYVRSLYLGGGTSLNGKGWRSEEFVPARGVKQGDPLSPHMFNLVIDRLLRSLPDEIGVSVGNAKTNAAAFADDLVLFASTPKGLQALLDTTVSFLASVGLTLNANKCFTVSVKGQPKQKCTVIESRSFCVGSRTCPSLKRSEEWRYLGIQFTADGRARYNPTEDIGPRLDIISRSPLKPQQKLFALRTVLIPQLYHKLTLGSVAIGVLRKCDRLVRSVVRKWLDLPMDVSVAFFHAPHTSGGLGVPSVRRTATMLRIQRLTNIKWPHLEQSETASSFLSAEIRRARDRCKASGDAALDTRLLIDSYWADRLHSSVDGSGLREAGRYAPQHGWVVAPTRLLTGKAYLNGIKLRINALPTRSRTTRGRHELERQCRAGCDAPESLNHILQKCHRTHGRRVARHNSVANYLKRGLETRGYSVIAEPSLQGENRIYKPDLVGFRPDHTIVIDAQVVTDGLDLDQAHQSKVEIYDRQDVRTALVRDYRAHEDIKIVSATLNWRGIWSYRSVKRLRALGVLNAGDSNIISTRVVDGGVCGFKTFMFHTGYRQGVG

SEQ ID NO: 14899 - protein, 1031 aa, Drosophila albomicans
MPRIAESYSVNSPTASVGAHQGRNVDANPVVGHLCVECGRSFGTKTGLGVHMSRQHKDRLDELRTRVDVKTRWCEEELAMMARKELELIANGERFINKKLALHFPERSVDAIKKCRQRDNYKAKIEQLRGQAALIPEISEPQTITRRPSISGLESSSSMSESVPITPSIHSDDVLMRILRGFGPVGCNRSWRVEVLQSIIDGAQTSGKEATLQCLSNYLLEIFPNRNEGPVSARVFPEPRNRRQNRRQQFARVQRNWDKHKGRCIGSLLAGPDESVMPNQEIMEPYWREVMTQQSLSSCNSTVPHMGHLLEGVWSPITSRDLQLHQVPLTSSPGPDGISPRTARSIPSGVMLRIMNLILWCGKLPTLFRMARTVFIPKTVRASRPEDFRPISVPSVIVRQLNAILASRLASSVDWDPRQRGFLPTDGCADNATIVDLILRDHHRRHASCYIATLDVSKAFDSVSHAAVIDTLSAYGAPTGFVDYVRSLYLGGGTSLNGKGWRSEEFVPARGVKQGDPLSPHMFNLVIDRLLRSLPDEIGVSVGNAKTNAAAFADDLVLFASTPKGLQALLDTTVSFLASVGLTLNANKCFTVSVKGQPKQKCTVIESRSFCVGSRTCPSLKRSEEWRYLGIQFTADGRARYNPTEDIGPRLDIISRSPLKPQQKLFALRTVLIPQLYHKLTLGSVAIGVLRKCDRLVRSVVRKWLDLPMDVSVAFFHAPHTSGGLGVPSVRRTAPMLRIQRLTNIKWPHLEQSETASSFLSAEIRRARDRCKASGDAALDTRLLIDSYWADRLHSSVDGSGLREAGRYAPQHGWVVAPTRLLTGKAYLNGIKLRINALPTRSRTTRGRHELERQCRAGCDAPESLNHILQKCHRTHGRRVARHNSVANYLKRGLETRGYSVIAEPSLQGENRIYKPDLVGFRPDHTIVIDAQVVTDGLDLDQAHQSKVEIYDRQDVRTALVRDYRAHEDIKIVSATLNWRGIWSYRSVKRLRALGVLNAGDSNIISTRVVDGGVCGFKTFMFHTGYRQGVG

SEQ ID NO: 14900 - protein, 1031 aa, Drosophila nasuta
MPRIAESYSVNSPTASVGAHQGRNVDANPVVGHLCVECGRSFGTKTGLGVHMSRQHKDRLDELRTRVDVKTRWCEEELAMMARKELELIANGERFINKKLALHFPERSVDAIKKCRQRDNYKAKIEQLRGQAALIPEISEPQTITRRPSISGLESSSSMSESVPITPSIHSDDVLMRILRGFGPVGCNRSWRVEVLQSIIDGAQTSGKEATLQCLSNYLLEIFPNRNEGPVSARVFPEPRNRRQNRRQQFARVQRNWDKHKGRCIGSLLAGPDESVMPNQEIMEPYWREVMTQQSLSSCNSTVPHMGHLLEGVWSPITSRDLQLHQVPLTSSPGPDGISPRTARSIPSGVMLRIMNLILWGGKLPTLFRMARTVFIPKTVRASRPEDFRPISVPSVIVRQLNAILASRLASSVDWDPRQRGFLPTDGCADNATIVDLILRDHHRRHASCYIATLDVSKAFDSVSHAAVIDTLSAYGAPTGFVDYVRSLYLGGGTSLNGKGWRSEEFVPARGVKQGDPLSPHMFNLVIDRLLRSLPDEIGVSVGNAKTNAAAFADDLVLFASTPKGLQALLDTTVSFLASVGLTLNANKCFTVSVKGQPKQKCTVIESRSFCVGSRTCPSLKRSEEWRYLGIQFTADGSARYNPTEDIGPRLDIISRSPLKPQQKLFALRTVLIPQLYHKLTLGSVAIGVLRKCDRLVRSVVRKWLDLPMDVSVAFFHAPHTSGGLGVPSVRRTAPMLRIQRLTNIKWPHLEQSETASSFLSAEIRRARDRCKASGDAALDTRLLIDSYWADRLHSSVDGSGLREAGRYAPQHGWVVAPTRLLTGKAYLNGIKLRINALPTRSRTTRGRHELERQCRAGCDAPESLNHILQKCHRTHGRRVARHNSVANYLKRGLETRGYSVIAEPSLQGENRIYKPDLVGFRPDHTIVIDAQVVTDGLDLDQAHQSKVEIYDRQDVRTALVRDYRAHEDIKIVSATLNWRGIWSYRSVKRLIALGVLNAGDSNIISTRVVDGGVCGFKTFMFHTGYRQGVG

SEQ ID NO: 14901 - protein, 1031 aa, Drosophila nasuta
MPRIAESYSVNSPTASVGAHQGRNVDANPVVGHLCVECGRSFGTKTGLGVHMSRQHKDRLDELRTRVDVKTRWCEEELAMMARKELELIANGERFINKKLALHFPERSVDAIKKCRQRDNYKAKIEQLRGQAALIPEISEPQTITRRPSISGLESSSSMSESVPITPSIHSDDVLMRILRGFGPVGCNRSWRVEVLQSIIDGAQTSGKEATLQCLSNYLLEIFPNRNEGPVSARVFPEPRNRRQNRRQQFARVQRNWDKHKGRCIGSLLAGPDESVMPNQEIMEPYWREVMTQQSLSSCNSTVPHMGHLLEGVWSPITSRDLQLHQVPLTSSPGPDGISPRTARSIPSGVMLRIMNLILWCGKLPTLFRMARTVFIPKTVRASRPEDFRPISVPSVIVRQFNAILASRLASSVDWDPRQRGFLPTDGCADNATIVDLILRDHHRRHASCYIATLDVSKAFDSVSHAAVIDTLSAYGAPTGFVDYVRSLYLGGGTSLNGKGWRSEEFVPARGVKQGDPLSPHMFNLVIDRLLRSLPDEIGVSVGNAKTNAAAFADDLVLFASTPKGLQALLDTTVSFLASVGLTLNANKCFTVSVKGQPKQKCTVIESRSFCVGSRTCPSLKRSEEWRYLGIQFTADGRARYNPTEDIGPRLDIISRSPLKPQQKLFALRTVLIPQLYHKLTLGSVAIGVLRKCDRLVRSVVRKWLDLPMDVSVAFFHAPHTSGGLGVPSVRRTAPMLRIQRLTNIKWPHLEQSETASSFLSAEIRRARDRCKASGDAALDTRLLIDSYWADRLHSSVDGSGLREAGRYAPQHGWVVAPTRLLTGKAYLNGIKLRINALPTRSRTTRGRHELERQCRAGCDAPESLNHILQKCHRTHGRRVARHNSVANYLKRGLETRGYSVIAEPSLQGENRIYKPDLVGFRPDHTIVIDAQVVTDGLDLDQAHQSKVEIYDRQDVRTALVRDYRAHEDIKIVSATLNWRGIWSYRSVKRLIALGVLNAGDSNIISTRVVDGGVCGFKTFMFHTGYRQGVG

SEQ ID NO: 14902 - protein, 1031 aa, Drosophila nasuta
MPRIAESYSVNSPTASVGAHQGRNVDANPVVGHLCVECGRSFGTKTGLGVHMSRQHKDRLDELRTRVDVKTRWCEEELAMMARKELELIANGERFINKKLALHFPERSVDAIKKCRQRDNYKAKIEQLRGQAALIPEISEPQTITRRPSISGLESSSSMSESVPITPSIHSDDVLMRILRGFGPVGCNRSWRVKVLQSIIDGAQTSGKEATLQCLSNYLLEIFPNRNEGPVSARVFPEPRNRRQNRRQQFARVQRNWDKHKGRCIGSLLAGPDESVMPNQEIMEPYWREVMTQQSLSSCNSTVPHMGHLLEGVWSPITSRDLQLHQVPLTSSPGPDGISPRTARSIPSGVMLRIMNLILWCGKLPTLFRMARTVFIPKTVRASRAEDFRPISVPSVIVRQLNAILASRLASSVDWDPRQRGFLPTDGCADNATIVDLILRDHHRRHASCYIATLDVSKAFDSVSHAAVIDTLSAYGAPTGFVDYVRSLYLGGGTSLNGKGWRSEEFVPARGVKQGDPLSPHMFNLVIDRLLRSLPDEIGVSVGNAKTNAAAFADDLVLFASTPKGLQALLDTTVSFLASVGLTLNANKCFTVSVKGQPKQKCTVIESRSFCVGSRTCPSLKRSEEWRYLGIQFTADGRARYNPTEDIGPRLDIISRSPLKPQQKLFALRTVLIPQLYHKLTLGSVAIGVLRKCDRLVWSVVRKWLDLPMDVSVAFFHAPHTSGGLGVPSVRRTAPMLRIQRLTNIKWPHLEQSETASSFLSAEIRRARDRCKASGDAALDTRLLIDSYWADRLHSSVDGSGLREAGRYAPQHEWVVAPTRLLTGKAYLNGIKLRINALPTRSRTTRGRHELERQCRAGCDAPESLNHILQKCHRTHGRRVARHNSVANYLKRGLETRGYSVIAEPSLQGENRIYKPDLVGFRPDHTIVIDAQVVTDGLDLDQAHQSKVEIYDRQDVRTALVRDYRAHEDIKIVSATLNWRGIWSYRSVKRLIALGVLNAGDSNIISTRVVDGGVCGFKTFMFHTGYRQGVG

SEQ ID NO: 14903 - protein, 926 aa, Drosophila nasuta
MPRIAESYSVNSPTASVGAHQGRNVDANPVVGHLCVECGRSFGTKTGLGVHMSRQHKDRLDELRTRVDVKTRWCEEELAMMARKELELIANGERFINKKLALHFPERSVDAIKKCRQRDNYKAKIEQLRGQAALIPEISEPQTITRRPSISGLESSSSMSESVPITPSIHSDDVLMRILRGFGPVGCNRSWRVEVLQSIIDGAQTSGKEATLQCLSNYLLEIFPNRNEGPVSARVFPEPRNRRQNRRQQFARVQRNWDKHKGRCIGSLLAGPDESVMPNQEIMEPYWREVMTQQSLSSCNSTVPHMGHLLEGVWSPITSRDLQLHQVPLTSSPGPDGISPRTARSIPSGVMLRIMNLILWCGKLPTLFRMARTVFIPKTVRASRPEDFRPISVPSVIVRQLNAILASRLASSVDWDPRQRGFLPTDGCADNATIVDLILRDHHRRHASCYIATLDVSKAFDSVSHAAVIDTLSAYGAPTGFVDYVRSLYLGGGTSLNGKGWRSEEFVPARGVKQGDPLSPHMFNLVIDRLLRSLPDEIGVSVGNAKTNAAAFADDLVLFASTPKGLQALLDTTVSFLASVGLTLNANKCFTVSVKGQPKQKCTVIESRSFCVGSRTCPSLKRSEEWRYLGIQFTADGRARYNPTEDIGPRLDIISRSPLKPQQKLFALRTVLIPQLYHKLTLGSVAIGVLRKCDRLVRSVVRKWLDLPMDVSVAFFHAPHTSGGLGVPSVRRTAPMLRIQRLTNIKWPHLEQSETASSFLSAEIRRARDRCKASGDAALDTRLLIDSYWADRLHSSVDGSGLREAGRYAPQHGWVVAPTRLLTGKAYLNGIKLRINALPTRSRTTRGRHELERQCRAGCDAPESLNHILQKCHRTHGRRVARHNSVANYLKRDLRREATLSLLNQVCRERTGYISRTWWVSDQITL

SEQ ID NO: 14904 - protein, 1031 aa, Drosophila kohkoa
MPRIAESYSVNSPTASVGAHQGRNVDANPVVGHLCVECGRSFGTKTGLGVHMSRQHKDRLDELRTRVDVKTRWCEEELAMMARKKLELIANGERFINKKLALHFPERSVDAIKKCRQRDNYKAKIEQLRGQAALIPEISEPQTITRRPSISGLESSSSMSESVPITPSIHSDDVLMRILRGFGPVGCNRSWRVEVLQSIIDGAQTSGKEATLQCLSNYLLEIFPNRNEGPVSARVFPEPRNRRQNRRQQFARVQRNWDKHKGRCIGSLLAGPDESVMPNQEIMEPYWREVMTQQSLSSCNSTVPHMGHLLEGVWSPITSRDLQLHQVPLTSSPGPDGISPRTARSIPSGVMLRIMNLILWCGKLPTLFRMARTVFIPKTVRASRPEDFRPISVPSVIVRQLNAILASRLASSVDWDPRQRGFLPTDGCADNATIVDLILRDHHRRHASCYIATLDVSKAFDSVSHAAVIDTLSAYGAPTGFVDYVRSLYLGGGTSLNGKGWRSEEFVPARGVKQGDPLSPHMFNLVIDRLLRSLPDEIGVSVGNAKTNAAAFADDLVLFASTPKGLQALLDTTVSFLASVGLTLNANKCFTVSVKGQPKQKCTVIESRSFCVGSRKCPSLKRSEEWKYLGIQFTADGRARYNPTEDIGPRLDIISRSPLKPQQKLFALRTVLIPQLYHKLTLGSVAIGVLRKCDRQVRSVVRKWLDLPMDVSVAFFHAPHTSGGLGVPSVRRTAPMLRIQRLTNIKWPHLEQSETASSFLSAEIRRARDRCKASGDMALDTRLLIDSYWADRLHSSVDGSGLREAGRYAPQHGWVVAPTRLLTGKAYLNGIKLRINALPTRSRTTRGRHELERQCRAGCDAPESLNHILQKCHRTHGRRVARHNSVANYLKRGLETRGYSVIAEPSLQGENRIYKPDLVGFRPDHTIVIDAQVVTDGLDLDQAHQSKVEIYDRQDVRTALVRDYQAHEDIKIVSATLNWRGIWSYRSVKRLRALGVLNAGDSNIISTRVVDGGVCGFKTFMFHTGYRQGVG

SEQ ID NO: 14905 - protein, 980 aa, Drosophila nasuta
MSRQHKDRLDELRTRVDVKTRWCEEELAMMARKELELIANGERFINKKLALHFPERSVDAIKKCRQRDNYKAKIEQLRGQAALIPEISEPQTITRRPSISGLESSSSMSESVPITPSIHSDDVLMRILRGFGPVGCNRSWRVEVLQSIIDGAQTSGKEATLQCLSNYLLEIFPNRNEGPVSARVFPEPRNRRQNRRQQFARVQRNWDKHKGRCIGSLLAGPDESVMPNQEIMEPYWREVMTQQSLSSCNSTVPHMGHLLEGVWSPITSRDLQLHQVPLTSSPGPDGISPRTARSIPSGVMLRIMNLILWCGKLPTLFRMARTVFIPKTVRASRPEDFRPISVPSVIVRQLNAILASRLASSVDWDPRQRGFLPTDGCADNATIVDLILRDHHRRHASCYIATLDVSKAFDSVSHAAVIDTLSAYGAPTGFVDYVRSLYLGGGTSLNGKGWRSEEFVPARGVKQGDPLSPHMFNLVIDRLLRSLPDEIGVSVGNAKTNAAAFADDLVLFASTPKGLQALLDTTVSFLASVGLTLNANKCFTVSVKGQPKQKCTVIESRSFCVGSRTCPSLKRSEEWRYLGIQFTADGRARYNPTEDIGPRLDIISRSPLKPQQKLFALRTVLIPQLYHKLTLGSVAIGVLRKCDRLVRSVVRKWLDLPMDVSVAFFHAPHTSGGLGVPSVRRTAPMLRIQRLTNIKWPHLEQSETASSFLSAEIRRARDRCKASGDAALDTRLLIDSYWADRLHSSVDGSGLREAGRYAPQHGWVVAPTRLLTGKAYLNGIKLRINALPTRSRTTRGRHELERQCRAGCDAPESLNHILQKCHRTHGRRVARHNSVANYLKRGLETRGYSVIAEPSLQGENRIYKPDLVGFRPDHTIVIDAQVVTDGLDLDQAHQSKVEIYDRQDVRTALVRDYRAHEDIKIVSATLNWRGIWSYRSVKRLIALGVLNAGDSNIISTRVVDGGVCGFKTFMFHTGYRQGVG

SEQ ID NO: 14906 - protein, 935 aa, Drosophila kohkoa
MPRIAESYSVNSPTASVGAHQGRNVDANPVVGHLCVECGRSFGTKTGLGVHMSRQHKDRLDELRTRVDVKTRWCEEELAMMARKELELIANGERFINKKLALHFPERSVDAIKKCRQRDNYKAKIEQLRGQAALIPEISEPQTITRRPSISGLESSSSMSESVPITPSIHSDDVLMRILRGFGPVGCNRSWRVEVLQSIIDGAQTSGKEATLQCLSNYLLEIFPNRNEGPVSARVFPEPRNRRQNRRQQFARVQRNWDKHKGRCIGSLLAGPDESVMPNQEIMEPYWREVMTQQSLSSCNSTVPHMGHLLEGVWSPITSRDLQLHQVPLTSSPGPDGISPRTARSIPSGVMLRIMNLILWCGKLPTLFRMARTVFIPKTVRASRPEDFRPISVPSVIVRQLNAILASRLASSVDWDPRQRGFLPTDGCADNATIVDLILRDHHRRHASCYIATLDVSKAFDSVSHAAVIDTLSAYGAPTGFVDYVRSLYLGGGTSLNGKGWRSEEFVPARGVKQGDPLSPHMFNLVIDRLLRSLPDEIGVSVGNAKTNAAAFADDLVLFASTPKGLQALLDTTVSFLASVGLTLNANKCFTVSVKGQPKQKCTVIESRSFCVGSRKCPSLKRSEEWKYLGIQFTADGRARYNPTEDIGPRLDIISRSPLKPQQKLFALRTVLIPQLYHKLTLGSVAIGVLRKCDRLVRSVVRKWLDLPMDVSVAFFHAPHTSGGLGVPSVRRTAPMLRIQRLTNIKWPHLEQSETASSFLSAEIRRARDRCKASGDMALDTRLLIDSYWADRLHSSVDGSGLREAGRYAPQHGWVVAPTRLLTGKAYLNGIKLRINALPTRSRTTRGRHELERQCRAGCDAPESLNHILQKCHRTHGRRVARHNSVANYLKRGLETRGYSVIAEPSLQGENRIYKPDLVGFRPDHTIVIDAQVCD

SEQ ID NO: 14907 - protein, 1031 aa, Drosophila kohkoa
MPRIAESYSVNSPTASVGAHQGRNVDANPVVGHLCVECGRSFGTKTGLGVHMSRQHKDRLDELRTRVDVKTRWCEEELAMMARKELELIANGERFINKKLALHFPERSVDAIKKCRQRDNYKAKIEQLRGQAALIPEISEPQTITRRPSISGLESSSSMSESVPITPSIHSDDVLMRILRGFGPVGCNRSWRVEVLQSIIDGAQTSGKEATLQCLSNYLLEIFPNRNEGPVSARVFPEPRNRRQNRRQQFARVQRNWDKHKGRCIGSLLAGPDESVMPNQEIMEPYWREVMTQQSLSSCNSTVPHMGHLLEGVWSPITSRDLQLHQVPLTSSPGPDGISPRTARSIPSGVMLRIMNLILWCGKLPTLFRMARTVFIPKTVRASRPEDFRPISVPSVIVRQLNAILASRLASSVDWDPRQRGFLPTDGCADNATIVDLILRDHHRRHASCYIATLDVSKAFDSVSHAAVIDTLSAYGAPTGFVDYVRSLYLGGGTSLNGKGWRSEEFVPARGVKQGDPLSPHMFNLVIDRLLRSLPDEIGVSVGNAKTNAAAFADDLVLFASTPKGLQALLDTTVSFLASVGLTLNANKCFTVSVKGQPKQKCTVIESRSFCVGSRKCPSLKRSEEWKYLGIQFTADGRARYNPTEDIGPRLDIISRSPLKPQQKLFALRTVLIPQLYHKLTLGSVAIGVLRKCDRLVRSVVRKWLDLPMDVSVAFFHAPHTSGGLGVPSVRRTAPMLRIQRLTNIKWPHLEQSETASSFLSAEIRRARDRCKASGDMALDTRLLIDSYWADRLHSSVDGSGLREAGRYAPQHGWVVAPTRLLTGKAYLNGIKLRINALPTRSRTTRGRHELERQCRAGCDAPESLNHILQKCHRTHGRRVARHNSVANYLKRGLETRGYSVIAEPSLQGENRIYKPDLVGFRPDHTIVIDAQVVTDGLDLDQAHQSKVEIYDRQDVRTALVRDYQAHEDIKIVSATLNWRGIWSYRSVKRLRALGVLNAGDSNIISTRVVDGGVCGFKTFMFHTGYRQGVG

SEQ ID NO: 14908 - protein, 1189 aa, Meloidogyne luci
MAPKRNKNFVVSVEEGLSRSVPITCGVYGTEQTRHKRTNSCGGSLVHSSLDLPIEAHQDSNNSHGVGVGSEPPCGAADITANTPEYHTIGKTGVPQDPNARQKGGKKCLIWTEKDVDTLVNLVERIKATQGLKRVWRNVQTAWNALRGHLPASLDNTVVRSKEALCAKYRSYHSKRGRESSIQGRENTEEVSNLNEDQGATLIRLHSDILDENQGDLEELSKRLKRQFGLAMKTFTRKPLPKPKHPIPEVLIRQINCLISLFIDDECKGRLSIGKLNSLVYAAGEILVNHSTKEKTSDSKGTKRTESELVQKEKRLRTRLAWLQDIIQSRESGAQLSKTGYARIKKLRKEFNNLERLCDFRNLKEKLVNRTRLIHKTILNIREERERRRVRNMAPRWAINANDSKVKSKVHIPLKKVYSYWSEIIGVERQFKSCKTLEDWRKSIVVPTLSIDMETSREGWEQVRKASRPWKATGPDGIPNWMWKHLPRANEELYKWIFGLLAKPKVPVWFSQGRAVLLYKKGDPGDPGNYRTIVCLNTCYKWCSGLIAYWVRKQIVNLPYEQKACKKGVWGCVEAHILDATITKDAQNQRKRELSMAWIDFSKAFDSVPHKYVRWVLNGTKLHSSVRRLLSQMMGRWSIYYEQRTPTGIKRSRMLNIKNGVLQGDSLSPLLFCLCIAPISDWLNRRVPKYETSMFKGTVNSLSLNHLFFMDDLKLYTPTRFDLAWALKSLEALMEQIGCRINKAKSGFVEVIKSIDPKSVIGDLPEIGNGSSYKYLGLEQDLNVCKDQVWERVSAMLIERTESIFSSKLNVRQMITAYNCMVPAVIRFIWTNVIIGRGKWSTDRLTCLRLDQKVRGILAKCKLRFTSQNTYRIYAYPRNGGLGLKSLAETFDESIVYAYCYLTCSQRLRMPLRFMEALDNRTKRSLVSDFKKVVESYGINCTEFPDVIPLDKPGLFICGNCYEHPTMAARAIVKLMRKVRDEGNRLALDQKVKGFAMMSLITDYKRWNLDSLRTWDWIKKGFISPIVLRNVTSAQENNMSFTNFSEEGKAFCRWGCLDARNKSQKAQESIAHIVANCDNWASTIYVERHNFVASRIYYELCLKFGLPLMLDNQRKQPVVENEQVKLYWDRPVDCVKVNFNKPDIVCFVKKPGSVEEYLEVWVIEISVVWYQNLSAVLGTHWVLKAHMSR

SEQ ID NO: 14909 - protein, 1345 aa, Ophraella communa
MTAEVSTSQCTICSKNFKNTTGLKIHHAKVHHGKVHYQPNADEEITGSRFENSSTPLHLRLASLKQNVSIIKRIPKAARFLSASALSSLINDCVRNNSISSWENLLMFPYGSFNISHNVFNPKISLATMIKRNLNDSSRKLQLQNVNRKSQNSKSNLLKRITNKVTDGDLSGAVKILCSDDTLAKINEETFLELQSKHPSVGCHSNYPNDSSLSLYTPTVSEKDVSRAIKSFRTSSSGGLDSLRPSHIQDMTSYSAGSSSAKLLKSITDLCNLFLSGRVNIDIYPIIFGASLCGLRKKCGGIRPIAVGTFYRRLVAKLVCFKLKKKLGDMFRPIQFGFGTSGGCEAVAHAARRYIHEHDDKSEKVFLKLDFKNAFNMIYRDSMLQTVLEIIPEFYPFINSCYRYPSFLSFGENIISSERVVQQGDPLAPALFCLTIHDMVKNIFTEFNAWYLDDGSFGGKPYEVLESLSTIISKSKEIGLELNFHKCELFFLENYDPEIFEKFNTLAPGIKIITRSNFSLLGAPLTDEALSLTLADKLKQFDLMTCRLVELPSHIAFFLLKHCLAIPKLMYVLRCSPSWRNQFLLNTFDEAMRDSLSVLLNNPMNLNTWIQASLPVSHGGLGIRSTSSLALPAFLSSMYSVSHLIESILPPMFPPDHFLKEGEELWKNESNCQLKSDQKVHQHAWDTPLIKIASNKLLEAAITPSEKARLKAVSSENAGAWLNALPISSIGTFLDNETFRIAVGLRLGSYVCEEHLCTCGSVVDSTGVHGLSCKFSAGRFSRHQAVNDLIKRSLATAKIPAVLEPVGIFREDGKRPDGMTLIPWQRGRSVMWDFTCVDTLAASHVSKTSVTPGSAAHAAECLKIRKYTNLRDNFIFYPIGIETFGTFGPHALKFIREIGNKIEKETNDPRATSFLIQRISLAIQRGNAASFLGTFPSSKTLDEFYMKPAIQNYSFFSDLITPHELHQSNKDTHHSQDCFEEYGIDKHNTDSFNSNRFTLPGNVDALGLNGLRNIGNTCFMNSIIQCLSNTKCLLEYLRKDAFMRDLNTKNSNIKGALIKGFARVIKELWSEDLSGGVVYTASLKSNIQRFAPRFIGYEQQDAEEFLRYLLEILHEDVNRVTEKPLPILTGIDENLTDNEIAQESWSRYLRMDNSEIVDIFVGQLKSTLKCTHCGHCSVTFDPIWDLSLSIPRITCQLNLFHCLDSFISEETLDGDEKPTCSKCKERRKCTKNLSFEKLPKILVIHLKRFSSTESFRGKLNVTVEFPLEALDMSDYSTAKVAPCRYNLYAITNHRGTLNDGHYTAYCRHPYSRTWYEYNDSRVSPISYESLVSGEAYVLFYEQEGT

SEQ ID NO: 14910 - protein, 1176 aa, Ophraella communa
MTTNTRLASSVAPFRIDIPLKYSDRSCPLCVASGVNLFFMGLRDEELHIKKEHKQYTIFYTCRTCGSYESTRKTSATVHVGKCKGPPSPVSPRGFSCTLCNRVFATKKGLSQHERLTHPEARNAARAAGTQSNGAGAGLTQRIPPDKGLFSEEETQRMIEIELLYWGDWMMSTKLRKVCPDKTPAQIRQRRRAKGYYTRVFQAAVEHGLIEPIDSSSDEENQSLNESIAQYLTGLDEEEAAEPGIELGPNGADGTEHIDDSLVQSQPRAPNRIIPTITIEEAQEVSPEVINWMEEVVKTALATNVPQNARQPPTNQTQAKSPLEDGLRFACECQGNVPQEHIDYLYTLATASLSSGERARPIPRKGRTKGSRKRYLYAQTRDLYNKNPSLVASYVRRNVDWLEQQAVQCSETDVRDLYQKLWGRKPEVQVDFGVDCAPPIEVGSILTTITTEDIQSRIARIKKSTAAGPDGFTLKDLRTKAAVEVLRLVFNLIMICGKIPSEWRRNRTSLILKEGKDGKKAESYRPITISSLLSRIYFGILDSRIREHVKFSPRQKGFLNEPGCFNNVHILNELLRHSKVHEGLVLTQLDVSKAFDTVPHEAIRAALVKKGVPDLVVRIIEDAYKDVDTKIQLPQASVEIRLQRGVKQGDPLSPLLFNAVMDSLLQQLESEAGYKISAEHSISCLAFADDLVLVAQNVQQAKDQLKYTEGYLKRLGMSIAANKCSAFRINTKKDSWYITDPGLALDSGEAIPACKPEDHLVYLGMKISPWVGVDVRHIKQDLEQVLSRVKRLKLKPHQKVDLIATYLVPHYLYQLAIAIPSYNTIRALDQELRVVVKEILHLPNSIANGMIYCRKRDGGLGFPKLEISVVSSALKTGLRFLQNTDPAMQALCQSSRLESRLKQLARTARLAWPLNTSDINKYAQRSKREELAKWSKLSSQGRAVSAFSDCPIANEWLRQPLLKPCRMITAIKMRTNTCANHAAMCRVAPVVDPSCRNCHAQVETLGHILGQCRSTKPARINRHDEIQGIIVQRIQNQRGREVAISVNPSLTLAQGGMLKPDLVIQDQGRVFVVDVTVRHEDKDYLTQGALSKKHKYDPLLPQLQQRYNAVTAEVLPIVVGTRGAMPKETVSNLKKLGIRDRKTLLTVSMTALRSSIEIYHDFMDAAPQGRYRRQPP

SEQ ID NO: 14911 - protein, 1057 aa, Pachyrhynchus sulphureomaculatus
MKGKKVADTELDEIKAQVNELLERTETPDEPHVVPINTVEEVQPLNRFPPINQPNYLEPENNDLIDMETKILQALTTIQAYSISQRKKLKKVNLTYNIKRKITEANMALAKIKENKKLDLTNINELMYAAAYAIAGEEKGKTDSIPRRDNKEPAWKVRLAKHIERYRSELAIIREYKKGVTTAQVHKKIRTIKKTYKLYGTIVEIEQNIVMKMQAKAQRLRRYTKRCDQYYQNKLFREDAKRFYRHLNSKRTEIKETPTQQQIEHFWGNILENQVTHNQRAPWIQKEQQDYENIPRGTWSDFTVDEITQIIKRTHSWKSPGPDKLQNFWLKQFAVLHVDLTEALNEAVKNPGSIPLWLTAGTTYLLSKGKDTKEPKNYRPITCLPTLYKVLTAAISNRIYDHLIDNKIFPDEQKGCRKSSRGCKDQLLISKMVTGIAKRRMRSLALAWIDYKKAFDSVPHSWVNTVMRTYRISPVITQFVEQSMQNWRTEMMLFHASGIIQTNTINIKRGIFQGDSLSPLLFCLALIPLTNMLNRQNVGVKIGENTDINHLFYMDDLKLFAKDENQLQLALGVVKKFSDDIKMEFGLDKCATAIYKRGKLSKSQNIKLDEKTIIRNLDVTEAYKYLGFEEKDGIDNEQMKKTMATEYYRRVRQVLNTELNAKNKITAINTLAVPIMTYSFGIVDWLRGEIKNIDRKTRKLLTVGGIHHPRADVCRLYIKRRNGGRGLIELESAYNSAITGLSDYITTGKDRFCRAVSSYDLSKAKYSLQKECEMVKSKYFQNEPGTRRDQVQLKNNIENERIELLKGKPLHGQFYRNFDKTFVDKGKSMGWLRSSGLKGETESLLIAAQDQALKTRYFQKNILKQNVNSKCRMCNAAEEHISHIIAGCPTLAPSEYTHRHNKVASYVHWTICRDIGMRVSNKYYEHLPEKVINYNDVIIMWDYPIITDRTILANRPDIVLHDKKQNKCLLIDVSIPDDANVALKETEKISKNKDLEIEVSRMWNTTTKTVPIVLGALGTIKRGLDQYLQSVPGQPNLYEAQKIALLGTAHILRKVLG

SEQ ID NO: 14912 - protein, 1192 aa, Pachyrhynchus sulphureomaculatus
MVRTRNKRYSGGPGQQDLDRNRQEDLPAPDHGNDNGHEQPHAQSESPTPSGSNQTQTLSQTGLPENRAVVSTTNQRRQQWTQEQYKEVMWCYYYAIASKDKDGVIKATYAIWRQRNPDIFKNINPNTLANQRRYIMKGKKVADTELDEIKAQVNELLERTETPDEPHVVPINTVEEVQPLNRFPPINQPNYLDPENNDLIDMETKILHALTTIQAYSISQRKKLKKVNLTYNIKRKITEANMALAKIKENKKLDLTNINELMYAAAYAIAGEEKGKTDSIPRRDSKEPAWKVRLAKHIERYRSELAIIREYKKGVTTAQVHKKIRTIKKTYKLYGTIVEIEQNIVMKMQAKAQRLRRYTKRCDQYYQNKLFREDAKRFYRHLNSKRTEIKETPTQQQIEHFWGNILENQVTHNQRAPWIQKEQQDYENIPRGTWSDFTVDEITQIIKRTHSWKSPGPDKLQNFWLKQFAVLHVDLTEALNEAVKNPGSIPLWLTAGTTYLLSKGKDTKEPKNYRPITCLPTLYKVLTAAISNRIYDHLIDNKIFPDEQKGCRKSSRGCKDQLLISKMVTGIAKRRMRSLALAWIDYKKAFDSVPHSWVNTVMRTYRISPVITQFVEQSMQNWRTEMMLFHASGIIQTNTINIKRGIFQGDSLSPLLFCLALIPLTNMLNRQNVGVKIGENTDINHLFYMDDLKLFAKDENQLQLALGVVKKFSDDIKMEFGLDKCATTIYKRGKLSKSQNIKLDEKTIIKNLDVTEAYKYLGFEEKDGIDNEQMKKTMATEYYRRVRQVLNTELNAKNKITAINTLAVPIMTYSFGIVDWLRGEIKNIDRKTRKLLTVGGIHHPRADVCRLYIKRRNGGRGLIELESAYNSAITGLSDYITTGKDRFCRAVSSYDLSKAKYSLQKECEMVKSKYFQNEPGTRRDQVQLKNNIENERIELLKGKPLHGQFYRNFDKTFVDKGKSMGWLRSSGLKGETESLLIAAQDQALKTRYFQKNILKQNVNSKCRMCNAAEEHISHIIAGCPTLAPSEYTHRHNKVASYVHWTICRDIGMRVSNKYYEHLPEKVINYNDVIIMWDYPIITDRTILANRPDIVLHDKKQNKCLLIDVSIPDDANVALKETEKISKYKDLEIEVSRMWNTTTKTVPIVLGALGTIKRGLDQYLQSVPGQPNLYEAQKIALLGTAHILRKVLG

SEQ ID NO: 14913 - protein, 1193 aa, Homalodisca vitripennis
MEAPPTLYIALPVTKRFQCPVCRESGVLTIRKREGLKRHLIQDHGPGWELSYVCCDTEYSCREHKYSFKRAKAHFEEEHQGTPFEVGNEDELGISSTSFDGLQDLILRVATPARPAQEPQASPAPSSSSSSSPESLESPLILQRAGSAAARARNALRRRRLPEDRELTPPRVPLDHPPSVGLPSPPPPPLPSPVHPPLAPPPPSPEPSPGRPPLPDPPPSPATACHGAMPPGRRSPGAPDPPPDPPSPGLPPGSPAELPDHLTAWQRQWLPRFIPGTPWDEFIVALDEMTASLSTAPQPTNPPRLPRRRAAAAPRDNRRDVREAARLQRLYRQAPRKAMREVLGSSSPFCSIPEETIKRHFEASYTSRDGCAGVPPPNCLVPPAPHPPPLLDSALPEEISLLLRRASNTAPGPDGVRYNVWRRRDPTGHVLAAVFNICITARRFPPSWKSSSTVLIHKKDNPGDINNWRPIALSNTAGKLLCSLLADRLSRWASENNIISGAQKGFTPAEGCLEHNFILQELLDDARRRGNELCVAWLDLANAFGSVPHSALLAALRSAGLSQDQLRFIEDLYQGSSTSIRHSRGSTDPIAFGAGVRQGCPLSPILFNLVMEYLIRPLTALEDQHGAVLHGTSVSVLAYADDLALVARSEASLQALLDVVVPAATWVGLRFKPTKCATLHVARRTTRPSVFRIYGAPLRVLGEGDSYQHLGVPTGMKVDQTPVATIARLEAETEAVLRSVLAPWQKLHALRTFIVPQLEFNLKTARIRKTALRSLDSKIKCGVKKIFNVPSRASAELVYLPPSCGGAGLVPLADLSDLAAINHTFRLLTSPDARVASIALEGLAASAGQRSAARAGMEFLVGYLNGDFPGNSNVATTFSAARAALNRLKKRLPDLRWGWCAGRATFQITIPGDRALRIVDRGSRHTLSANLRSSLQQHFRAILSAKPDQGRVARVTTTCATANHMLHEGRYTRFADWRFVHRARLNVLPLNGCRRWGVNDRRCRRCGQHDETTAHVLCHCTSSLATGITRRHNAVQDLLVAAIRPTEGVEVRVNQRVPLQALLQGRDDFPEEMVRCRPDVVMIDAHNKIIKIVDIATPYEDGWRAIEAARERKLDTYGPLARMLTAGGYRTSVDAFIVGSLGAWDSANWGTLTRLGVHRRYGTSLSRRCVSEAIRWSRDIYVTHVSGVQQWQD

SEQ ID NO: 14914 - protein, 1186 aa, Homalodisca vitripennis
MEAPPTLYIALPVTKRFQCPVCRESGVLTIRKREGLKRHLTQDHGPGWELSYVCCDIEFSCREYKYSLKRAKAHFEEQHQGTPFEVGDEDELGITSTSFDGLQDLILRVATPARPTQESQASPAPTSSSSSSPESPPTLQRAGSAAARARNALRRRRLPENRELTPPRVPLDHPPPAGLPSPPSPPPPLPSPVNPPLAPPPPSPEPSPGRPPLPDPPPSPATPCHGAMPLGRHSPGAPDPPPDPPSPGLPPGSPAELPDHLTAWQRQWLPRFIPGTPWDEFIVALDEMTASLSTAPQPTNPPRLPRRRAAAAPRDNRRDVREAARLQRLYRRAPRKAMREVLGSSSPFCSIPEETIKRHFEASYTLRDGCAGVPPPNCLVPPAPHPPPLLDSALPEDISLLLRRASNTAPGPDGVRYNVWRRRDPTGHVLAAVFNLCITARRFPPSWKSSSTVLIHKKDSPGDINNWRPIALSNTAGKLLCSLLADRLSRWASENNLISGAQKGFTPAEGCLEHNFILQELLDDARRRGSELCVAWLDLANAFGSVPHSALLAALRSAGLSQDQLRFIEDLYQGSSRGSTDPITFGAGVRQGCPLSPILFNLVMEYLIRPLSALEDQHGAVLHGTSVSVLAYADDLALVARSEASLQALLDAVIPAATWVGLRFKPTKCATLHVARRTTRPSVFRIYGAPLRVLGEGESYQHLGVPTGMKVDQTPVVFIARLEAETEAVLQSVLAPWQKLHALRTFIVPQLEFNLKTARIRKTALRSLDKKIKCGVKKIFNVPSRASAELVYLPPSCGGAGLVPLADLSDLAAINHAFRLLTSPDARVASLALEGLAASAGQRSAARAGMEFLVGYLNGDFPGNSNVATTFSAARAALNRLKKRLPDLRWGWCAGRATLQITIPGDRALRIVDRGSRHALSASLRSSLQQHFRATLSAKPDQGRVARVTTTCATANHMLHEGRYTRFADWRFVHRARLNVLPLNGCRRWGVNDRRCRRCGQHDETTAHVLCHCTSSLATGITRRHNAVQDLLVAAIRPAEGVEVRVNQRVPLQALLQGRDDFPEEMVRCRPDVVMIDAHNKIVKIVDIAVPYEDGWRAIEAARERKLDTYGPLARMLTAGGYRTSVDAFIVGSLGAWDSANWGTLARLGVHRRYGTSLSRRCVSEAIRWSRDIYVTHVSGVQQWQD

SEQ ID NO: 14915 - protein, 1193 aa, Homalodisca vitripennis
MEAPPTLYIALPVTKRFQCPVCRESGVLTVRKREGLKRHLIQDHGPGWELSYVCCDTEYSCREHKYSFKRAKAHFEEEHQGTPFEVGNEDELGISSTSFDGLQDLILRVATPARPAQEPQASPAPSSSSSSSPESLESPPILQRAGSAAARARNALRRRRLPEDRELTPPRVPLDHPPSVGLPSPPPPPLPSPVHPPLAPPPPSPEPSPGRPPLPDPPPSPATACHGAMPPGRRSPGAPDPPPDPPSPGLPPGSPAELPDHLTAWQRQWLPRFIPGTPWDEFIVALDEMTASLSTAPQPTNPPRLPRRRAAAAPRDNRRDVREAARLQRLYRQAPRKAMREVLGSSSPFCSIPEETIKRHFEASYTSRDGCAGVPPPNCLVPPAPHPPPLLDSALPEEISLLLRRASNTAPGPDGVRYNVWRRRDPTGHVLAAVFNICITARRFPPSWKSSSTVLIHKKDNPGDINNWRPIALSNTAGKLLCSLLADRLSRWASENNIISGAQKGFTPAEGCLEHNFILQELLDDARRRGSELCVAWLDLANAFGSVPHSTLLAALRSAGLSQDQLRFIEDLYQGSSTSIRHSRGSTDPIAFGAGVRQGCPLSPILFNLVMEYLIRPLTALEDQHGAVLHGTSVSVLAYADDLALVARSGASLQALLDVVVPAATWVGLRFKPTKCATLHVARRTTRPSVFRIYGAPLRVLGEGDSYQHLGVPTGMKVDQTPVATIARLEAETEAVLRSVLAPWQKLHALRTFIVPQLEFNLKTARIRKTALRSLDSKIKCGVKKIFNVPSRASAELVYLPPSCGGAGLVPLADLSDLAAINHTFRLLTSPDARVASIALEGLAASAGQRSAARAGMEFLVGYLNGDFPGNSNVATTFSAARAALNRLKKRLPDLRWGWCAGRATFQITIPGDRALRIVDRGSRHTLSANLRSSLQQHFRAILSAKPDQGRVARVTTTCATANHMLHEGRYTCFADWRFVHRARLNVLPLNGCRRWGVNDRRCRRCGQHDETTAHVLCHCTSSLATGITRRHNAVQDLLVAAIRPTEGVEVRVNQRVPLQALLQGRDDFPEEMVRCRPDVVMIDAHNKIIKIVDIATPYEDGWRAIEAARERKLDTYGPLARMLTAGGYRTSVDAFIVGSLGAWDSANWGTLARLGVHRRYGTSLSRRCVSEAIRWSRDIYVTHVSGVQQWQD

SEQ ID NO: 14916 - protein, 1191 aa, Homalodisca vitripennis
MDKTLFCALPLGQRLQCPECLEEGVQCIRKREGMKRHMNQDHGGGWDISYVCCDVEFSCRQHRYALKQAKAHFSQEHQGADFLLPEEELGLCASSYNALQEKIIGIATPIRPMTPPIASPSTSSSSSPTLSPPRPLIRARSAAAIARNTHRRRIRERNVTPPREPLPVGHMMSPVLSAASPPTPPPHHDHGLSPPAPPVSPATPIAPPAAPVAGPPSPSPPPPGPPSSVGSAPPDSPASSSVDQPAHELSAWQREWVAKFIPEMPWEEFIDALDQLVASVTSASARPGQAQRGDRRDARSARPPMATRHHDAKEATRLQRLYRRAPRRAVREVLMAASPFCGIPGAAIEDHFRDCYSPRDGCVGAPPPNSLLPAVPPPPLLEATTPGEVLSLLRRTSNTAPGPDGVRYGVWRRRDPSGHVLAAVFNVCLAARRFPPAWKVSTTILIHKKGPVEDISNWRPIALSNTCGKLFCSLLANRLSGWASANGLLSGAQKGFTPAEGCLEHNFLLQELLDEARRRGGELCVAWLDLANAFGSVPHSSLFSALRSAGLTADQLRLIRDLYQGSVTSVRHNGGMTAEIPFGAGVRQGCPLSPLLFNLVMETLIRPLVAMEDIHGADLHGTRVSVLAYADDLALVAKSEASLRALLEAVVPAASWVGLKFKPAKCATLHVARRTVRPTEFMIDGAPLRVLGEGEPYQHLGVPTGMRVDQTPVDTIARLEGEAAAIFGSMLAPWQKLHALRTFLVPQLIFNFNTARIRKTSLRELDKLIKSGCKRVMNLPQRASAELIALPPSWGGACLLPLSDLADLSAVAHAFRLLTSPDPKIAHLSLEGLAVSAGQRTAAGVDMAFLVSYLNGEIGGDTNVATTFSLARAALNRLSKRLPDLRWGWCEERRTFQLSVPGERSTITVDGGSRSKLSSVLRLSLQFHFRSVLSNKPDQGRAVRVTAGCPSSNHFLYEGRHARFADWRFIHRARLNVLPLNGCRRWGAGDRRCRRCGRHDETTAHVLCHCLPTMSVVSKRHDAVLDHLIAAIRPSPGVETRRNQRVPLDRLLANREVPDDLVRLRPDVVVIDDSRKIIRIVDVTMPYEDGWRAIVEARERKHAAYAPLARFLRSGGFTVTVDAFVVGALGAWDRANWDTLARLGVSRQYGVALSRRCVSTAVQWSRDLYVQHVTGVPQYRQTREQNLDQDR

SEQ ID NO: 14917 - protein, 918 aa, Homalodisca vitripennis
MPWEEFIDALDQLVASVTTASARPEQAQRGDRRDARTARPPMATRRHDAKEATRLQRLYRRAPRRAVREVLKAASPFCSIPGAAIEDHFRDCYSPRDGCVGAPPPNSLLPAVPPPPLLEATTPGEVLSLLRRTSNTAPGPDGVRYGVWRRRDPSGHVLAAVFNVCLAAKRFPPAWKVSTTILIHKKGPVEDISNWRPIALSNTCGKLFCSLLANRPSGWASANGLLSGAQKGFTPAEGCLEHNFLLQELLDEARRRGGELCVAWLDLANAFGSVPHSSLFSTLRSAGLTADQLRLIQDLYQGSATSVRHNGGMTAEIPFGAGVRQGCPLSPLLFNLMMETLIRPLVAMEGIHGADLHGSRISVLAYADDLALVAKSEASLRALLEAVVPAASWVGLRFKPEKCATLHVARREVRPTAFTIYGSPLRVLGEGEPYHHLGVPTGMRVDQTPVDTISRLEGEAATIFGSPLAPWQKLHALRTFLIPQLIFNLNTARIRKTCLRGLDNIVKAGCKRTLNLPARASAELVALPPSWGGAGLLPLADLSDLAAVAHAFRLLTCPDPKVAHLALEGLAVSAGQRSAARADREFLVAYLNGDFAGNSNVETTFSLARAARNRLSKQLPDLRWGWCGERDSFQLTVPGERSTSIVDRGSRSRVSSCLRSAMQLFYRSALSAKPDQGRVMRVAAACPTSNHFLYEGRHTRFADWRFIHRARLNVLPLNGCRRWGAGDRRCRRCGRHDETTAHVLCHCLPSMAVVTKRHDAVLGLLAASIRPSPGVEVRQNQRVPLYHLLPERNVPDNLARLRPDLVVIDRDRKTIKLVDVTMPYEDGWQSIVEARERKYAKYDPLAQTLRAGGYHVTVDAFVVGSLGAWDNANWGTLARLGVSRQYGVALSRKCVSTAIRWSRDLYVQHVTGVRQYSP

SEQ ID NO: 14918 - protein, 921 aa, Homalodisca vitripennis
MDWDEFLHALDLLVASVTSASARPGQDRRGDNRDGRPPRTARPPQTTGRHDAREAMRLQRLYRRAPRRAVREVLKAASPFCGIPGAAIEDHFRDSYSPREGSVGTPPPNSSLPAAPPPPLLDPVSPGEVLSLLRRTSNTAPGPDGIRYGVWRRRDPSGHVLSAVFNVCLAAKRFPPAWKVSTTVLIHKKGPVGDINNWRPIALSNTCGKLFCSLLANRLTGWASANGLLSGAQKGFTPAEGCLEHNFLLQELLDEARRRGGELCIAWLDLANAFGSVPHSSLFSALRSAGLTADQLRLIEDLYQGSVTSIRHNGGVTAEIPFGAGVRQGCPLSPLLFNLVMETLIRPLTAMEDVHGADLHGTRISVLAYADDLALVARSEASLRALLEAVIPAASWVGLKFKPNKCATLHVARREVRPTAFSIYGSPLRVLGEGEPYQHLGVPTGMRVDQTPVDTISRLEGEAAAIFGSLLAPWQKLHALRTFLIPQLIFNLNTARIRKTCLRGLDNIVKAGCKRTLNLPARASAEVVALPPSWGGAGLLPLADLSDLAAVAHAFRLLTCPDPKVAHLALEGLAVSAGQRSAARADREFLVAYLNGDFAGNSNVETTFSLARAARNRLSKRLPDLRWGWCGERDSFQLTVPGERSTSIVDRGSRSRVSSCLRSAMQLFYRSALSAKPDQGRVMRVAAACPTSNHFLYEGRHTRFADWRFIHRARLNVLPLNGCRRWGAGDRRCRRCGRHDETTAHVLCHCLPSMAVVTKRHDAVLGLLAASVRPSPGVEVRQNQRVPLDQLLPERNVPDNLARLRPDLVVIDRDRKLIKLVDVTMPYEDGWQSIIDARERKYAAYDPLAQTLRAGGYRVTVDAFVVGSLGAWDKANWGTLARLGVSRQYSVALSRKCVSTAIRWSRDIYVQHVTGVRQYSP

SEQ ID NO: 14919 - protein, 918 aa, Homalodisca vitripennis
MPWEEFIDALDQLVASVTTASARPEQAQRGDRRDARTARPPMATRRHDAKEATRLQRLYRRAPRRAVREVLKAASPFCSIPGAAIEDHFRDCYSPRDGCVGAPPPKSLLPAVPPPPLLEATSPGEVLSLLSRTSNTSPGPDGVRYGVWRRRDPSGHVLAAVFNVCLAAKRFPPAWKVSTTILIHKKGPVEDISNWRPIALSNTCGKLFCSLLANRLSGWASANGLLSGAQKGFTPAEGCLEHNFLLQELLDEARRRGGELCVAWLDLANAFGSVPHSSLFSTLRSAGLTADQLRLIQDLYQGSATSVRHNGGMTAEIPFGAGVRQGCPLSPLLFNLMMETLIRPLVAMEGIHGADLHGSRISVLAYADDLALVAKSEASLRALLEAVVPAASWVGLRFKPEKCATLHVARREVRPTAFTIYGSPLRVLGEGEPYHHLGVPTGMRVDQTPVDTISRLEGEAATIFGSLLAPWQKLHALRTFLIPQLIFNLNTARIRKTCLRGLDNIVKAGCKRTLNLPARASAELVALPPSWGGAGLLPLADLSDLAAVAHAFRLLTCPDPKVAHLALEGLAVSAGQRSAARADREFLVAYLNGDFAGNSNVETTFSLARAARNRLSKRLPDLRWGWCGERDSFQLTVPGERSTSIVDRGSRSRVSSCLRSAMQLFYRSALSAKPDQGRVMRVAAACPTSNHFLYEGRHTRFADWRFIHRARLNVLPLNGCRRWGAGDRRCRRCGRHDETTAHVLCHCLPSMAVVTKRHDAVLGLLAASIRPSPGVEVRQNQRVPLDQLLPERNVPDNLARLRPDLVVIDRDRKTIKLVDVTMPYEDGWQSIVEARERKYAKYDPLAQTLRAGGYHVTVDAFVVGSLGAWDNANWGTLARLGVSRQYGVALSRKCVSTAIRWSRDLYVQHVTGVRQYSP

SEQ ID NO: 14920 - protein, 1191 aa, Homalodisca vitripennis
MDKTLFCALPLGQRLQCPECLEEGVECIRKREGMKRHMNQDHGGGWDISYVCCDVQFSCRQHRYALKQAKAHFSQEHQGADFLLPEEELGLCASSYNALQEKIFGIATPIRPMTPPIASPSTSSSSSPTLSPPRPLIRARSAAAIARNTHRRRIRERNVTTPREPLPVGHMMSPVLSTASPPTPPPHHDHGLSPPAPPVSPATPIAPPAAPVAGPPSPSPPPPGPPSSVGSAPPDSPASSSVDQPAFELSAWQREWVAKFTPEMPWEEFVDALDQLVASVTSASARPGQAQRGDRRDARSARPPMATRHHDAKEATRLQRLYRRAPRRAVREVLMAASPFCSIPGAAIEDHFRDCYSPRDGCVGAPPPNSLLPAVPPPPLLEATTPGEVLSLLRRTSNTAPGPDGVRYGVWRRRDPSGHVLAAVFNVCLAAKRFPPAWKVSTTILIHKKGPVEDISNWRPIALSNTCGKLFCSLLANRLSGWASANGLLSGAQEGFTPAEGCLEHNFLLQELLDEARRRGGELCVAWLDLANAFGSVPHSSLFSAQRSAGLTADQLRLIQDLYQGSVTSVRHNGGMTAEIPFGAGVRQGCPLSPLLFNLVMETLIRPLIAMEDIHGADLHGTRVSVLAYADDLALVAKSEASLRALLEAVVPAASWVGLKFKPAKCATLHVARRTVRPTEFTIDGAPLRVLGEGEPYQYLGVPTGMRVDQTPVDTIARLEGEAAAIFGSMLAPWQKLHALRTFLVPQLIFNFNTARIRKTSLRELDKLIKSGCKRVMNLPQRASAELIALPPSWGGAGLLPLSDLADLSAVAHAFRLLTSPDPKIAHLSLEGLAVSAGQRTAAGVDMAFLVSYLNGEIGGDTNVATTFSLARAAFNRLSKRLPDLRWGWCEERRTFQLSVPGERSTITVDGGSRSKLSSVLRLSLQFHFRSVLSNKPDQGRAVRVTAGCPSSNHFLYEGRHTRFADWRFIHRARLNVLPLIGCRRWGAGDRRCRRCGRHDETTAHVLCHCLPTMSVVSKRHDAVLDHLIAAIRPSPGVETRRNQRVPLDRLLANREVPDDLVRLRPDVVVIDDSRKTIRIVDVTMPYEDGWRAIVEARERKHAAYAPLARFLRSGGFTVTVDAFVVGALGAWDRANWDTLARLGVSRQYGVALSRRCVSTAVQWSRDLYVQHVTGVPQYRQTREQNLDQDR

SEQ ID NO: 14921 - protein, 1191 aa, Homalodisca vitripennis
MDKTLFCALPLGQRLQCRKCLEEGVQCIRKREGMKRHMNQDHGGGWDISYVCCDVEFSCRQHRYALKQAKAHFSQEHQGADFLLPEEELGLCASSYNALQEKIIGIATPIRPMTPPIASPSTSSSSSPTLSPPRPLIRARSAAAIARNTHRRRIRERNVTTPREPLPVGHMMSPVLSAASPPTPPPHHDHGLSPPAPPVSPATPIAPPAAPVAGPPSPSPPPPGPPSSVGSAPPDSPASSSVDQPAHELSAWQREWVAKFIPEMPWEEFIDALGQLVASVTSASARPGQAQRGDRRDARSARPPMATRHHDAKEATRLQRLYRRALRRAVREVLMAASPFCGIPGAAIEDHFRDCYSPRDGCVGAPPPNSLLPAVPPPPLLEATTPGEVLSLLRRTSNTAPGPDGVRYGVWRRRDPSGHVLAAVFNVCLAARRFPPAWKVSTTILIHKKGPVEDISNWRPIALSNTCGKLFCSLLANRLSGWASANGLLSGAQKGFTPAEGCLEHNFLLQELLDEARRRGGELCVAWLDLANAFGSVPHSSLFSALRSAGLTADQLRLIRDLYQGSVTSVRHNGGMTAEIPFGAGVRQGCPLSPLLFNLVMETLIRPLVAMEDIHGADLHGTRVSVLAYADDLALVAKSEASLRALLEAVVPAASWVGLKFKPAKCATLHVARRTVRPTEFMIDGAPLRVLGEGEPYQHLGVPTGMRVDQTPVDTIARLEGEAAAIFGSMLAPWQKLHALRTFLVPQLIFNFNTARIRKTSLRELDKLIKSGCKRVMNLPQRASAELIALPPSWGEAGLLPLSDLADLSAVAHAFRLLTSPDLKIAHLSLEGLAVSAGQRTAAGVDMAFLVSYLNGEIGGDTNVATTFSLARAAFNRLSKRLPDLRWGWCEERRTFQLSVPGERSTITVDGGSRSKLSSVLRLSLQFHFRSVLSNKPDQGRAVRVTAGCPSSNHFLYEGRHTRFADWRFIHRARLNVLPLNGCRRWGAGDRRCRRCGRHDETTAHVLCHCLPTMSVVSKRHDAVLDHLIAAIRPSPGVETRRNQRVPLDRLLANREVPDDLVRLRPDVVVIDDSRKIIRIIDVTMPYEDGWRAIVEARERKHAAYAPLARFLRSGGFTVTVDAFVVGALGAWDRANWDTLARLGVSRQYGVALSRRCVSTAVQWSRDLYVQHVTGVPQYRQTREQNLDQDR

SEQ ID NO: 14922 - protein, 1213 aa, Homalodisca vitripennis
MEAPPTLYIALPVTKRFQCPVCRESGVLTIRKREGLKRHLTQDHGPGWELSYVCCDIEFSCREHKYSLKRAKAHFEEQHQGTPFEVGDEDELGIASTSFDGLQDLILRVATPARPTQESQASPAPTSSSSSSPESPPTLQRAGSAAARARNALRRRRLPRDRDLTPPRVPLDHPPPAGLPSPPSPPPPLPSPVHPPLAPPPPSPEPSPGCPPLPDPPPSPATPCHGAMPLGRRSPGVPDPPPDPPSPGLPPGSPAELPDHLTAWQRQWLPLFIPGTPWDEFIVALDEMTASLSTAPQPTNPPRLPRRRAAAAPRDNRRDVREAARLQRLYRRAPRKAMREVLGSSSPFCSIPEEAIKRHFEASYSSRDGCVGVPPPNCLVPPALHPPPLLDSALPEEVSLLLRRASNTAPGPDGVRYNVLRRRDPTGHVLAAVFNLCIAARRFPPSWKSSSTVLIHKKDNPGDINNWRPIALSNTAGKLLCSLLADRLSRWASDNNLISGAQKGFAPAEGCLEHNFILQELLDDGRRRGSELCVAWLDLANAFGSVPHSALLAALRSAGLSQDQLRFIEDLYQGSSTSIRHSRGSTGPIAFGAGVRQGCPLSPILFNLVMEYLIRPLTALEDQHGAVLHGTSVSVLAYADDLALVARSEASLQALLDVVIPAAMWVGLRFKPTKCATLHVARRTTRPSVFRIYGAPLRVLGEGDSYQHLGVPTGMKVDQTPVATIARLEAETEAVLRSVLAPWQKLHALRTFIIPQLEFNLKTARIRKTALRSLDSKIKCGVKKIFNVPSRASAKLVYLPPSCGGAGLVPLADLSDLAAINHAFRLLTSPDARVASLALEGLAASAGQRSAARAGMEFLVGYLNGDFPGNSNVATTFSAARAALSRLKKRLPDLRWGWCAGRATFQITIPGDRALRIVDRDSLHALSASLRSSLQQHFRATLSAKPNQGRVATTCATANHMLHEGRYTRFADWRFVHRARLNVLPLNGCRRWGVNDRRCRRCGQHDRPRALPLHLQPRYWHHAKTQRRPGSPRRCHQTCGGSEVRVNQRVPLQALLQGRDDFPEEMVRCRPDVVMIDAHNKIVKIVDIAVPYEDGWRAIEAARERKLDTYGPLARMLTAGGYRTSVDAFIVGSLGAWDSANWGTLARLGVHRRYGTSLSRRCVSEAFAGAGTYMSLMCPASSSGKTDLPCVLFIYCMLFIIDYFNYRMLFSIY

SEQ ID NO: 14923 - protein, 907 aa, Homalodisca vitripennis
MAPPPPSPEPSPGRPPLPDPPPSPATPCHGAMPLGRRSPGAPDPPPDPPSPGLPPGSPAELPDHLTAWQHQWLPRFIPGTPWDEFIVALDEMTASLSTAPQVTNPPRLPRRRAAAAPRDSRRDVREAARLQRLYRRAPRKAMREVLGSSSPFCSIPEETIKRHFEASYTSRDGCAGVPPPNCLVPPAPHPPPLLDSALPEEISLLLRRASNTAPGPDGVRYNVWRRRDPTGHVLAAVFNLCITARRFSPSWKSSSTVLIHKKDNPGDINNWRHIALSNTAGKLLCSLLADRLSRWASENNLISGAQKGFTPAEGCLEHFILQELLDDARRRGSELFVAWLDLANAFGSVPHSTLLAALLVARSEASLQALLDVVIPAATWVGLRFKPTKCATLHVARRTTRPSVFRIYGAPLRVLGEGESYQHLGVPTGMKVDQNPVATIARLEAETEAVLQSVLAPWQKLHALRTFIVPQLEFILKTARIRKTALRSLDKKIKCGVKKIFNVPSRASAELVYLPPSCGGAGLVPLADLSDLAAINHAFRLLTSPDARVASLALEGLAASAGQRSAARAGMEFLVGYLNGDFPGNSNVATTFSAARAALNRLKKRLPDLRWGWCAGRATFQITIPGDRALRIVDRGSRHTLSANLRSSLQQHFRAILSAKPDQGRVARVTTTCATANHMLHEGRYTRFADWRFVHRARLNVLPLNGCRRWGVNDRRCRRCGQHDETTAHVLCHCTSSLATGITRRHNAVQDLLVAAIRPAEGVEVCVNQRVPLQALLQGRNDFPEKMVRCHPDVVMIDAHNKIVKIVDIAVPYEDGWRAIEAARERKLDTYGPLARMLTAGGYRTSVDAFVVGSLGAWDSANWGTLARLGVHRRYGTSLSRRCVSEAIRWSRDIYVTHVSGVQKWQD

SEQ ID NO: 14924 - protein, 1063 aa, Yoshiicerus persimilis
MFTTLRGLQIHWGMKHKGENLNDAFASIGSDTTVTTPKHKSCKKGLGRWSEEEMRLCAELEYDVTNDSYVGRAVAMAMLNKGSKRSFLAIQAILKRSEKYNEIRKAVFQDLENKELMQNNSESVTDTTISDTLREEVQIITVGVPDPTVGDTENSSPPVDTPQTGSVQVDGGSENDAIENGTAGIEEQASDNSMQTLLQHLVGHKSRKPNSLEAMVDIVCKRAIQGENVDEALNSLFEKWTSNWEIPLKIPQAKAPRDENKKYLTGRKLKRLKYMRMRNAWKKDRAKVSRKILNGKLEQKGTTADIPNFFEHWSAEFASDTSEVPNVENMQRKQEEYKVWDEIQEEELTFALRKMRVQSSKGPDGIPVKELKRLPTRLVQKLLNLIIYNGKIPKCLKRSYTVFIPKIDECKEPSDYRPISIASTVLRLFNKIIAKRIVRVAKFDFRQKAFLPIDGCAENVVLLEAIIANARTRVKPVYIAQLDMKNAYGSVYHKAVFQALKLNGGCEQLMGYVKDLYTDFCTTIVDKGVSKRVVVERGVLQGDPLSPVLFNMVIDQLLRKFPQNVGYPLAEKTIINGQAFADDLNAIASTEMGLRKILEAIELNGAPWGLKFNSKKCTYLAMVPVQGRTMTVRTNCVFKVNNGLIRGLKEDESWRYLGAYFSSRGICQGPQSIKVLLTRLKAATLKPQEKLFILRVHLIPKLIHTYSMSKLTAKKLEKCDRMIRNSLKGKHGLLHLPLDTVSDFFHTAVKDGGLGLLRFRFSIPTMVLRRFDRFDNCHEIIKLAASMPANQMRIQKATSLLATFEDLVASHRDQVNSVNRSRLISHNDGQPLAYAKDVSYAHEWVSNGSTAFFKGHEFIDAIKLRINAFPSNSRTSRGTTKVRLCRAGCGVTETQNHILQVCHRSYGAITRRHNYIRDILVTSLQKLGYEVVKEPQIVTELGVRKPDIIAMLKNKVYVIDPTVCGTQIHPNVAHNDKVKKYGTIQGIHDYILEKWPESETTFGSLAISNRGVVSKKSAELMMEMKVPKRTIKRCVLSTIRGSIRTYYQFLYNARKLRYSVASK

SEQ ID NO: 14925 - protein, 1067 aa, Amphibalanus amphitrite
MPKKECCKCSTRPCTGCSCVEHGRQCTSCRFGERCPNRKGSSGTEPDDLADFIADLKRHGRGRVLPHIPKIARIAVADTLAQCITTVITDGSPRAWKSFLTFAYAVIKAPKTRRNEVRHKTLTAAIRENIANFANDDLSEKDGSRPAASRRKTSDTNADLSRHVSSKLADGDVRGALRIITSDDSFASPTVEVIESIAGKHPEPPPDLRNLEPPDARTASLVATEADVLKAISSFPRSSSAGLDGIRPAHLQCLVAKPTAEAGARLLTALTALTNLALSGRIPEFALRAFFGASLIALRKKTGGLRPIAIGSVFRRIAAKVATNSVSRRIGTELRPTQLGVATRNGCEAAVHAVRAFVKHAVSSAQPTAIIKLDVSNAFNSVRRDTMLETARARVPSIYPLIWQAYATASPLYIGDSKVWSRTGIQQGDPLSSLLFSVAIDDILQGIDTDLNVWYLDDGTVGGPLDQVTSNIGRIKEQLADKGLQVNGSKCELVLLGADREVWQPDALLRLTELLSDIRLTRPEELQLLGAPICDDQVKAQLLTGKQLVNKLVSRVQCLEEAHQAFYLLKNYVCTPRLLYLLRSAPAFRSATILSEIDELVRQGITAVTNVALQGESWRQATLPVSLGGLGIRRVSDLALPAYIASLRSSAPLIMDIIPSMAESIDRLETSLHQRWKVETGLELPDASKQGRQRVWDLTAAAAEAAKLLEGSPDDRHRARLHAAAQPHSGAWLNALPVPSLGTLLDHETLRVAVALRVGAPVCAPHRCRCGSTVDTLGLHSLSCQLSAGRLPRHSALNDVIKRALHSAGMPSVLEPTGLDRDDGRRPDGMTTFPVTEGKCLIWDSTCVDTYASYIIGKSAVHAGAAAEAAESRKRRRYGALERRFKFQPIAVETSGSLGQSTVQFLKDVGRRIARESGDRRATEYLFQRVSLAVLRGNATSILMGAAHTTGSSIEPNDKDDTNWQAGSSENSCESRNRNDHECLLDTHDDKGSDIAVNDLVTILTDTETPSLMIETEQLPRSTDLLKKYRELYQEMRAQFIAQGLDRDPMSDPELARYLSRGGKGSK

SEQ ID NO: 14926 - protein, 1067 aa, Amphibalanus amphitrite
MPKKECCKCSTRPCTGCSCVKHGRQCTSCRFGERCPNRKGSSGTETDDLADFIADLKRHGRGRVLPHIPKSARIAVADTLAQCITTVITDGSPRAWKSFLSFAYAVIKAPKTRRNEVRHKTLTAAIRENIANFANDDLSEKDGSRPAASRRKASDTNADLSRHVSSKLADGDVRGALRIITSDDSFASPTVEVIESIADKHPEPPPDLRNLEPPDASTASLVATEADVLKAISSFPRSSSAGLDGIRPAHLQCLVAKPTAEAGARLLTALTALTNLALSGQIPEFALRAFFGASLIALRKKTGGLRPIAIGSVFRRIAAKVAANSVSRRIGTELRPTQLGVATRNGCEAAVHAVRAFVKHAVSSAQPTAIIKLDVSNAFNSVRRDTMLETARARVPSIYPFIWQAYATASPLYIGDSKVWSRTGIQQGDPLSSLLFSMAIDDISQGIDTDLNVWYLDDGTVGGPLDQVTKNIGRIKEQLADKGLQVNGSKCELVLLGADREVWQPDALLRLTDLLPDIRLTRPEELQLLGAPICDDQVKAQLLTGKQLVNKLVSRVQCLEEAHQAFYLLKNYVCAPRLLYLLRSAPAFRNATILSEIDELVRQGITAVTNVALQGDSWRQATLPVSLGGLGIRRVSDLALPAYIASLRSSAPLIMDIIPSMAESIDRLETSLHQRWKMETGLELPDASEQGRQRVWDLTAAAAEAAKLLEASPDDRHRARLHAAAQPHSGAWLNALPVPSLGTLLDHETLRVAVALRVGAPVCAPHRCRCGSTVDTLGLHSLSCQLSAGRLPRHSALNDVIKRALHSAGMPSVLEPTGLDRGDGRRPDGMTTFPFTEGKCLIWDSTCVDTYASYIIGKSAAHAGAAAEAAESRKRRRYGALERRFKFQPIAVETSGSLGQSTVQFLKDLGRRIARESGDRRATEYLFQRVSLAVLRGNATSLLMGAAHTTGSSIEPNDKDDTNWQAGGSEKSCESRNINDHECLLDTHDDKGSDIAVNDLVTILTDTETPSLIIETEQFPRSTDLLKKYRELYQEMRAQFIAQGLDRDPMSDPELARYLSRGGKGSN

SEQ ID NO: 14927 - protein, 1067 aa, Amphibalanus amphitrite
MPKKECCKCSTRPCTGCSCVKHGRQCTSCRFGERCPNRKGSSGTEPDDLADFIADLKRHGRGRVLPHIPKSARIAVADTLAQCITTVITDGSPRAWKSFLSFAYAVIKAPKTRRNKVRHKTLTAAIRENIANFANDDLFEKDGSRPAASRRKTSDTYADLSRHVSSKLADGDVRGALRIITSDDSFASPTVEVIESIADKHPEPPPDLRNLEPPDASTASLVATEADVLKAISSFPRSSSAGLDGIRPAHLQCLVAKPTAEAGARLLTALTALTNLALSGRIPEFALRAFFGASLVALRKKTGGLRPIAIGSVFRRIAAKVAANSVSRRIGTELRPIQLGVATRNGCEAAVHAVRAFVKHAVSSAQPTAIIKLDVSNAFNSVRRDTMLETARARVPSIYPLIWQAYATASPLYIGDSKVWSRTGIQQGDPLSSLLFSVAIDDILQGIDTDLNVWYLDDGTVGGPLDQVTSNIGRIKEQLADKGLQVNGSKCELVLLGADREVWQPDALLRLTELLPDIRLTRPEELQLLGAPICDDQVKAQLLTGKQLVNKLVSRVQCLEEAHQAFYLLKNYVCAPRLLYLLRSAPAFRSATILSEIDELVRQGITAVTNVALQGESWRQATLPVSLGGLGIRRVSDLALPAYIASLRSSAPLIMDIIPSMAESIDRLETSLHQPWKVETGLELPDASEQGRQRVWDLTAAAAEAAKLLEASPDDRHRARLHAAAQPHSGAWLNALPVPSLGTLLDHETLRVAVALRVGAPVCAPHRCRCGSTVDTLGLHSLSCQLSAGRLPRHSALNDVIKRALHSAGMPSVLEPTGLDRGDGRRPDGMTTFPFTEGKCLIWDSTCVDTYASYIIGKSAAHAGAAAEAAESRKRRRYGALERRFKFQPIAVETSGSLGQSTVQFLKDVGRRIARESGDRRATEYLFQRVSLAVLRGNATSLLMGAAHTTGSSIEPNDKDDTDWQAGGSENSCESRNRNDHECLLDTHDDKGSDIAVNDLATILTDTEAPSLMIETEQLPRSTDLLKKYRELYQEMRAQFIAQGLDRDPMSDPELARYLSRGGKGSK

SEQ ID NO: 14928 - protein, 983 aa, Amphibalanus amphitrite
MPKKECCKCSTRPCTGCSCVKYGRQCTSCRFGERCPNRKGSSGTEPDDLADFIADLKRHGRGRVLPHIPKSARIAVADTLAQCITTVITDGSPRAWKSFLSFAYAVIKAPKTRRNKVRHKTLTAAIRENIANFANDDLFEKDGSRPAASRRKTSDTNADLSRHVSSKLADGDVRGALRIITSDDSFASPTVEVIESIADKHPEPPPDLRNLEPPDASTASLVATEADVLKAISSFPRSSSAGLDGIRPAHLQCLVAKPTAEAGARLLTALTALTNLALSGRIPEFALRAFFGASLVALRKKTGGLRPIAIGSVFRRIAAKVAANSVSRRIGTELRPIQLGVATRNGCEAAVHAVRAFVKHAVSSAQPTAIIKLDVSNAFNSVRRDTMLETARARVPSIYPLIWQAYATASPLYIGDSKVWSRTGIQQGDPLSSLLFSVAIDDILQGIDTDLNVWYLDDGTVGGPLDQVTSNIGRIKEQLADKGLQVNGSKCELVLLGADREVWQPDALLRLTELLPDIRLTRPEELQLLGAPICDDQVKAQLLTGKQLVNKLVSRVQCLEEAHQAFYLLKNYVCAPRLLYLLRSAPAFRNATILSEIDELVRQGITAVTNVALQGESWRQATLPVSLGGLGIRRVSDLALPAYIASLRSSAPLIMDIIPSMAESIDRLETSLNQRWKVETGLELPDASEQGRQRVWDLTAAAAEAAKLLEASPDDRHRARLHAAAQPHSGAWLNALPVPSLGTLLDHETLRVAVALRVGAPVCAPHRCRCGSTVDTLGLHSLSCQLSAGRLPRHSALNDVIKRALHSAGMPSVLEPTGLDRGDGRRPDGMTTFPFTEGKCLIWDSTCVDTYASYIIGKSAVHAGAAAEAAESRKRRRYGALERRFKFQPIAVETSGSLGQSTVQFLKDVGRRIARESGDRRATEYLFQRVSLAVLRGNATSILMGAAHTTGRLHIKAYKILSYNHQKIQNRNIQRAKPTKQAG

SEQ ID NO: 14929 - protein, 910 aa, Cardiocondyla obscurior
MNQELAELFPQRTLESIKARRRRPDHREMVLSLLKDIEENLAEEENDVVEIPESNPILEFLEALPKPKLSTFKINMLHNIIEKARNEGKEATLHKVALYIKETFPPPTNNTRIKHKKKAGLSTANKRKLRRYEYAKTQNLWRKDRQRCISQILDKMGETMEPEKEIMEPYWREIMLSNSDSAPVTSPKEELLDIWTPIKIEDLKHIRIARSSAPGPDGISANLFRSIPTQVLLRLFNLLMWCEQLPEDLLMSRTIFLPKKKNAQQPGDFRPITIPSILIRGLHRILAQRMAEALNIDERQRAFRCTDGCADNIFLLDTILRYHRSMYKSVYMASIDVGKAFDSISHPAIKSILEEVGVPPPMLQYLQNVYKGSYTRIEGHGWRSKPIHPNRGVRQGDPLSPIIFNAMTHVMLRKLPNETGVSLGGQTINAAAFADDLLLFANTPMGLQQLIDIVTDYLASCGMHININKSITVAIRAVPHLKKTTVDTKITFNSSGQRLPNVNREDHWKYLGIMFSPEGRDKFKPAEAVEPLLKSLERAPLKPQQRLYALRTTVIPRLCYRLALGAVTIGSLNKTDNIIRSAIRRWLALPHDIPKAYFHATVGDGGLGIPSTRWRAPLQRRGRIIAALRTHEKKNLDEYAQKEITICTRRLTNNGIIYTNNEMIASRWAQLLHKSVDGMGLKASSKVAHQHQWLADGSKLLTGRDFINCNKARISALPTKSRCGRGRTMERRCRAGCFAQETLNHILQQCHRTHMARINRHNALVTYIAKKMPRNGYDVTYEPILKTTIGNRKPDLMGILGRTALIIDAQVVSEQTELNQAHNKKVNYYNDPAVIQSIKETYNVQDVKTTSITLSWKGIWSSKSATELRQLGLITTKDVKVLSTRVLIGDLAAYKIFNATTAVQYKRGIG

SEQ ID NO: 14930 - protein, 1027 aa, Cardiocondyla obscurior
MTSPRKTDPWGCQPLRFKIVGPKNRNHASDDVGGPSGLPNPTLPNDPDDETYICEYPGCNRPFNTIRGRGVHHQRAHKAWYDAQLKPAGDKTRWSKEEAALLARKEAELVHEYNPKFMNQKLMGFFPLRSLESIKSRRKRQDHKDMVAEILRTLEEQPEVGEDEDEIEIPEESLILAYLESLPRPELRSFKAEVLHNIIAEARRDGKLVTLQKVALYLRDVLPYTRKIRKRNTKSDKSQMSRRKLRKYEYATTQNSWLKNRQRCIAQILDQMGEETEPPQQILEPYWTEVMTRDSNKAPVEEREREELSEIWAPITVQDLKLMHMSNSSAPGPDGVSTRLFKSIPSLILIRLYNLILWCEQLPEDLLMSRTVFLPKKKNAEEPGDFRPITIPSVIVRGLHKILAKRMSSTLDIDERQRAFRATDGCADNIFLLDTILRHHRSVFKSVYLASLDVGKAFDSISHAAIEMVLKNVGVPAPMLRYLHNIYQGSYTRIEGNGWTSTPIHPKRGVRQGDPLSPILFNVMTHLMLKKLPMEIGVALGGETVNAAAFADDLLLFAATPMGLQKMIDTVCQYLSNCGMEINPNKSLTVAIRAAPHLKKTAVDTRITFTCGNQKLPHLCREDNWRYLGVTFSPEGRCRYKSAEVVSPLLKALEKAPLKPQQRIYALKTTVIPRLSYGLALGAVSVGALNKTDGLIRAAIRRWLTLPHDTPKAYYHASIKDGGMGIPSLRWIAPLQRRGRIIAALRTHERRNVDEFAQKEITTCVKRLSENGKVLTDKQMIDDRWAQLLYKAVDGVGFTDSRKVPQQHLWIADGTRMLSGRDYLNCNKIRIGALPTKSRSSRGRAQDRKCRAGCQAQETLNHILQHCHRTHAARISRHNAIAAYIARKMPRSGYQVLHEPLIQTANGARKPDLVGIIGRTALIIDAQVVSEQTNLNQAHARKVSYYEEPEMIQAIRQKYNIQEVKVTSITLSWKGVWSPKSATDLGRLGLITTRELKVVSTRALIGGLQAYRMFNAVTSVQFRRGIG

SEQ ID NO: 14931 - protein, 1032 aa, Cardiocondyla obscurior
MTSPRSKGPWGCQPLRLELVGPKKQNQASDDTDDGPSGSSDPAKAPTHPTDVTYKCEYPGCTRSFANNRGRGVHEQRAHKQWYDARLKPAGDKMRWSHEEATLLARKEAQLIRDQNPRFMNQEIIQFFPQRTLEAIKARRKRQNHKDLVTKFLKELEENSEEEAAEQEPEADIEELNPILEFLEALPRPELQTFKANDLHRIVQGARNDGKEATLQKLALYIREVLPPTINNTRIKPKKRTDTSKTTKRKLRKYEYATSQNLWRKDRRRCISQILDQMGDVREPPKEIMEPYWREVMLNDSKESPETTPSEVLSEIWLPIKMEDLKYIKIQRSSAPGPDGISARLFRSIPAQILIRLYNLLMWCEQLPEDLLMSRTVFIPKKKEAKEPGDFRPITVPSVLVRGLHKILAYRMAKCLDIDERQRAFRPTDGCADNVFLLDTILRFHRSNFKSVYMASLDVGKAFDSISHPAIENVLRGIGIPPPMLQYLSNVYKGSRTRIEGQGWRSAPIHPNRGVRQGDPLSPIIFNVMTHIMLKELPEEIGVSLGGKSINAAAFADDLLLFASTQIGLQKMINQVTDFLKSCGMNINPNKSMTVAIRAAPHLKKTAVDTQITFTSGRQKLPNLNREDHWKYLEISFSPEGRDKYKPIEVIEPLLKTLEKAPLKPQQRLYALRTAVIPRLCYRLALGAVTIGTLNKADNIIRSATRKWLALPHDTPKAYFHATVKDGGLGIPSIRWLAPLQRRGRIIAALRTHESRNMNEFARKEIAICDRRLTESGTTYTNNDMITNRWAQLLYKAVDGAGLKTSNKVQQQHNWIADGTRMLSGKDFILCNKVRIGALPTKSRCGRGRTTERRCRAGCAAQETLNHILQQCHRTHAARINRHNAVVAYIARKMPRCGYEVFQEPVLETCNGKRKPDLIGVIGRTALVIDGQVVSEQTDLNQAHMRKVNYYNEPTVTQAIMDKYNVQNIKITSITLSWKGVWSPRSAAELRKLGLITTKDLKVLSCRVLIGDLAAYRIFNATTTVQYRRGVG

SEQ ID NO: 14932 - protein, 1032 aa, Cardiocondyla obscurior
MTSPRSKGPWGCQPLRLELVGPKKQNQASDDTDDGPSGSSDPAKAPTHPTDVTYKCEYPGCTRSFANNRGRGVHEQRAHKQWYDARLKPAGDKMRWSHEEATLLARKEAQLIRDQNPRFMNQEIIQFFPQRTLEAIKARRKRQNHKDLVTKFLKELEENSEEEAAEQEPEADIEELNPILEFLEALPRPELQTFKANDLHRIVQGARNDGKEATLQKLALYIREVLPSTINNTRIKPKKGTDTSKTTKRKLRKYEYATSQNLWRKDRRRCISQILDQMGDVREPLKEIMEPYWREVMLNDSKESPETTPSEVLSEIWLPIKMEDLKYIKIQRSSAPGPDGISARLFRSIPAQILIRLYNLLMWCEQLPEDLLMSRTVFIPKKKEAKEPGDFRPITVPSVLVRGLHKILAYRMAKCLDIDERQRAFRPTDGCADNVFLLDTILRFHRSNFKSVYMASLDVGKAFDSISHPAIENVLRGIGIPPPMLQYLSNVYKGSRTRIEGQGWRSAPIHPNRGVRQGDPLSPIIFNVMTHIMLKELPEEIGVSLGGKSINAAAFADDLLLFASTQIGLQKMINQVTDFLKSCGMNINPNKSMTVAIRAAPHLKKTAVDTQITFTSGRQKLPNLNREDHWKYLGISFSPEGRDKYKPIEVIEPLLKTLEKAPLKPQQRLYALRTAVIPRLCYRLALGAVTIGTLNKADNIIRSATRKWLALPHDTPKAYFHATVKDGGLGIPSIRWLAPLQRRGRIIAALRTHESRNMNEFARKEIAICDRRLTESGTTYTNNDMITNRWAQLLYKAVDGAGLKTSNKVQQQHNWIADGTRMLSGKDFILCNKVRIGALPTKSRCGRGRTTERRCRAGCAAQETLNHILQQCHRTHAARINRHNAVVAYIARKMPRCGYEVFQEPVLETCNGKRKPDLIGVIGRTALVIDGQVVSEQTDLNQAHMRKVNYYNEPTVTQAIMDKYNVQNIKITSITLSWKGVWSPRSAAELRQLGLITTKDLKVLSCRVLIGDLAAYRIFNATTTVQYRRGVG

SEQ ID NO: 14933 - protein, 875 aa, Ceratina japonica
MEHTDAAQCDDSEPDSVQPESQFNLVTSVIDLFRSLQPLTGTDFRAEQLERICSGLTNLDVETVAQELEIYLLQTFPLKTKHKAPQAKPKNRPQTRRQARRAEYAITQRAWKKNPCGCLRRILTAKSSTSEPDRDAMFRFWQNMMTSGNNESPCIQNKKATIQELWKAIEPDEIRGAFPDLTTSPGPDGLTSRQLRAVPLRILTRILNLFLVCGRLPKHLLRSKTTLIPKKDGAMDPGDYRPITVSSVLTRTFHKILARRLMEHVKLDDRQSAFVQKDGCNANIFALDLILKYHRQNFKPLYIASFDIAKAFDSVSHEAIKIVIESMGLPRPMVDYIVDVYQRSTTRLSCNSWQSEEIKPTCGVKQGDPLSPVIFNLIMDNLLRLIPSEIGVDIGDSHYNALAFADDLLFIARTPKGLQIMIDEATSFLAQCGLRINTNKSFTIALTNIPHVKKSVVDCRSQFTCAGQRLPALKRDDEWKYLGIPFTPEGRTTTKPEARLLEAVEKLTKAPLKPQQRLFALRVMVMPSISHLLTLGETTLGRLKKIDNMARNAVRKWLCLPHDLVKAYFHASAKDGGLSIPSARWLMPLRRRERLIKLEKGGHATDPFLLQEIQRASRRLTENQFLHDSAAKVEERWARLLHDSVDGRGLRESRKVPHQHQWIQDGSKFLSGRDFLSATKFRINAMPTRSRTSRGRRKDRTCRGGCNAVETLNHIVQQCHRTHRARIERHNAVSKYVERALAKKSDKVEVEPHFTTPEGVRKPDLICIKDSMALVLDAQVVSEHIELDVAHNTKKEKYQPLETMIKDRYSVTSVSFTSVTLSYRGVWSGASARSLQEMGILKRSEMKIVSTRVLVGGLNAFWRFNKTTTMKTGIG

SEQ ID NO: 14934 - protein, 1050 aa, Ceratina japonica
MAPAGQCFFGSSQVSPLRPTVLGVSSPLDWSLVGPDRIIQASDEINLVGGPSGSTDPTSIRTENVEPNTEDPSLCRYPGCGKPFRNARGRGVHEQRAHKNWYDERQLSNTESKKAPWSAEESALLARQEARLVLEGERFINKALTSHFPNRTLESIKGQRRKPCHKEKVLQVVTELESTEAAQCQDSDPDSEQPESSQELRRSVIELFQSMNPLTGTEFHADVLERICSHLPNSDLEAVSQDLESYLLQTFPPQAKARIRVEQPDKRTQTRRQARRAEYAITQRAWKKNPCNCLKFILKGKSTTTEPDKDAMFRFWRNTMTSGNNESPCIQPKNAIIQELWNVIQPGEICEAFPDRNTSPGPDGLTARQLRVVRIHILVRTFNLFLLCGKLPKHLLRSRTTLIPKKDGAADPGDYRPITVSSVLTRTFHKVLARRLMQYVKLDERQSAFVPRDGCNENVFALDLVLRYHRQYFKPLYIASFDIAKAFDSVSHAAIKNVIETMGLPRPMVDYIMDVYQRSTTRLSCNNWVSDEISPTCGVKQGDPLSPIIFNMIMDNLLRLIPSEIGVDVGAGHFNALAFADDLLFITRTPKGLQLLIDEATSFLTKCGLRINAAKSFTVALTNIPHMKKSVVDGRSQFTCDGRRLPALKREDEWKYLGIPFTPEGRTTTKPEIRLSEAIERLTKAPLKPQQRLFALRVIVMPGIYHLLTLSETTLGRLKKIDSMARSAVRKWLCLPHDTVKAYFHASAKDGGLSIPSARWLMPLRRGERLKKLEKGGRTTKPFLLQEIQRAARRLTENQTLHDSIAKIEERWARLLHESIDGRGLRESRRMPQQHQWILDESRFLSGKDFLNATKFRINAMPTRSRTDRGQRKDRMCRGGCNVAETLNHVVQQCHRTHRARIERHNAVAKYVERALAKKFDKVEHEPHFATPGGLRKPDLIGINGPSAVVMDAQIVSEHMELDVAHSNKMEKYKPLEDLIKDRYAVSSVSHTSITLSYRGVWSGASARSLLNMGVLKRSELKIISTRVLIGGLSAFWRFNRTTTYRTGIG

SEQ ID NO: 14935 - protein, 916 aa, Lasioglossum lativentre
MCRYPGCGKILRNARGRGVHEQRAHKNWNDERLLANIESKKAPWSAEESALLVRQEVRLVLEGERYINKALTPLFPNRTLESIKGQRKKQAHKDRVLQIISETETTDAAQCQDSEQDSQHQESQSDLLTSVVKTFTSMEPLKGTEFHADQLERICSQLPIWDKETISAELEIYLLLTFPPATKAKRPAAMPLNRTQTRRQARRAEYAITQRAWRKNPCRCLRTILKGKSLSTTPDKDTMTRFWQTTMTCGSDESPCIESKKTMIPELWSVIEPYEIHKAFPDLTTSPGPDGLTSRQLRAVPLHILARIFNLFLVCGKLPKHLLCSKTTFIPKKDGATDPGDYRPITVSSVITRTFHKIMARRLMHHIELDKRQSAFLPRDGCNENIFALDLVLKYHRQNFKPLYVASFDIAKAFDSVSHMAIRNVIETMGLPRPMVDYIMDVYRRSTTRLSCSNWESDEINPTCGVKQGDPLSPIIFNMIMDNLLRLIPSEIGADIGEGHFNALAFADDLLFIARTPKGLQLMIDEATSFLTKCGLKINATKSFTVALTNIPHMKKSVVDSRAQFTCAGQRLPALKREDEWKYLVIPFTPQGRTTTKPESQLTEALDKLTKAPLKPQQRLFALRVMVLPGISHLLTLGETTLGRLKKIDTMARKAVRNWLCLPHDTVKAYFHANAKDGGLSIPSARWLMPLRRKERLMKLDRGGQTTDPFLSQEIQRAIRRLTDQQTTHDSVAKIEERWARLLHESIDGRGLKESRKVPQQHRWVLDGSRFLSGRDFLNAIKLRINALPTRSRTARGQRKDRMCRGGCNAIETLNHVVQQCHRTHRARIERHNAIIKYIERALAKKYDKVENEPHFTTSEGLRKPDLICKKGLMAVVLDAQVVSEHMETDMAHKTKAEKYKPLDALIRDRYEVQCV

SEQ ID NO: 14936 - protein, 844 aa, Lasioglossum albipes
MFTSMEPLKGCEFHADQLERICSQAPVWDKETISLELESYLLQTFPPASKTKRPAAPPLNRAQTRRQARRAEYAITQRAWKKNPCRCLRTIIKGKSMSSTPDKDTMVRFWQTTMTCASDESPCIVSKRSVMPELWSIINPVEIQMAFPDLTTSPGPDGLTSRQLRAVPLHILTRIFNLFLVCGKLPRHLLCSRTTLIPKKDGAVDPGDYRPITVSSVMTRTFHKIMARRLMHHVELDKRQSAFLPRDGCNENIFALDLILKYHRQNFKPLYVASFDIAKAFDSVSHKAIKNVIETMGLPRPMVDYIMDVYRRSTTRLMCGNWESEEINPTCGVKQGDPLSPFIFNMIMDNLLRLIPSEIGADIGEGHFNALAFADDLLFIARTPKGLQLLIDEATNFLTKCGLRINATKSFTVALTNVPHMKKSIVDSREQFTCSGRRLPALRREDEWKYLGVPFTPEGRTTTKPETQLSDAIDKLTKAPLKPQQRLFALRVMVLPGISHLLTLGETTLGRLKKIDTMARKAVRKWLCLPHDTVKAYFHANAKDGGLSIPSARWLMPLRRKERLTKLQTGCQSTDPFLSQEIHKAIRRLTEQQITHDSVAKIEGRWARLLHESIDGRGLRESRKVPQQHRWVMDGSRFLSGKDFLNSIKLRINALPTRSRTARGRRKDRMCRGGCNAVETLNHVVQQCHRTHRARIERHNAIIKYMERALAKKFDKVEYEPHFTTPEGLRKPDLICKKGSMAVVLDAQVVSEHMETDVAHKTKAEKYKPLESLIKDRYAVQSVSYTTVTLSCRGVWSEASASSLVKMKVLRKSELKILSTRVLIGGLNAFWRFNRTTITRTGIG

SEQ ID NO: 14937 - protein, 1121 aa, Megachile rotundata
MSLSIKDEVRHMQFTHHELTLQYACDYCKKIFPSYRSVSAHIPKCPSLREAPETPSSPQSERNTYSCSDCDRTFISKRGLSQHQRAAHPETRNLLRAEAAMPTVRPPRTGVAFTPDEVERMLELEIQLKNERFIAKAMTAFFPGKTCKQLRDKRCEPAYKRRRDEVLARNMADIPGPSSSMPGIRDTPSPPLLTLSSSSSSSSSSSSSEEVFVDAASTMEPPFDDSVEWRKFLWNTVSIERPCIEDIPERVKSIVERLWNLIDTKINGDPISQEEINTAYDWTMEFFTVDKTSKRPKPITSQSHKRKKKLSARAKRKATLYAVTQNLFRNSPASLSKCVRENIPIVREDSNGPSIEDFKSLYKNIWGQAGNVKNLDLPTNPQTFEGTTLLRAISMYDIKQRIKRTRPKSAAGPDGLMKRDVIKSGHLYILYPMFNLIVAAGRQPDAWRKNITKLLNKEGKDPSLPGSYRPITISPLFSRIFWGLIDQQLRLRINITPRQKGFVPEMGCFLNVNLLNEIIRIAKRKQGIVITQVDISRAFDTVPFSAILNALNAKGLPKVVVQLIMDSYSNISTQIQYQSSTFDISIKRGVKQGDPLSPLIFNIVMESLILKLESMPGFKINDRTNLSSLAFADDLMFLADNVEDARAQLNLLCQFLDSVDMDISIDKCAAFQIITSKDSWYIIDPHLTVAQGSIAFLGPDTPLSYLGAKISPWVGVKTDYSIQGLKACVGRVQSLALKPHQKVELMARHIIPHYLYGLILSIPSISVIRQLDQCVRVAVKEYLHLPQSTANDLIYCSKKDGGLGFPKLEAIVISAALKACLRFLNSSDPVIAEVARESFIEKRAVKLAARANIPWSSLNVKTIDDFKLNCKKDEARTWANLPSQGKGVKSFLDDKVGNEWLYRPTLLKPSRFITALKMRANVTADKVSLKRAGKSDQILCRHCKVVPETLGHIIGQCIYTKGLRIKRHDEICKFILDKILKNSSSSIITREPTLSCPGVGTLKPDLVIHNQDKVFIADVTVCHEDGSQLANARTNKVDKYKCLIPKLMFELKVPHAAVLPIVVGTRGAMSKSTVEALKLIGVGDRQSLRTISLCALRSSIEAYNIFMDYNSTLRPTLHDPG

SEQ ID NO: 14938 - protein, 1109 aa, Zootermopsis nevadensis
MELVFQCSDCDKQYIRKHAALCHLSKCTGRKETKVVRCPHCTDTFDTVSGLSQHKRHRHPLERNDERLAPVSRPGPPARAGLVFSAEEIETMLQLEESLKGDKFIAMKMAKLIEAKTAKQIRDKRKEPRYIAMRLARLSVTEVPTENRPPPNMLTRRGCRMANEPPAVVAGCLGEIGDLSQVIEEGEREEGPNPLIGEPVEVSQPSTASLSGGDHFNEDRASNNSSAIHSHNDIEAEAMWREGLVASLLAWETNECPKDAAEVIRKIMQATDLCRSQETMNEIYLIVLEYLGSKATPSTASGRSRPKASNGKSRKRAQKRYMYARTRDLYDKNPGLLAKHVRMGTDHTAQTGAELDRGEIKLLYDSLWGTKPCLRLTDPVAPQEPVSLDMFLGALKPEEVRLRVGRIKGSTAPGPDGIKRGALATWASQKVLSAFYNLILITGYLPTAWSQNRTTLIPKEGKDKTKVSDYRPITISSLLSRVFWGIMDQRLRSVVRQNPRQKGFVAEAGCFANMQILTELVRRMKSNSGGVAIQLDVCKAFDTVPHEALGPALARKGIPKFFVDLVVSSYHGVETSISHPSGDIKISLQRGVKQGDPLSPILFNLVMEALLEDLEAMPGYEIEDKNISCLAFADDLFLIASDAPKAQDLLDRTVEYLGALGMSISTSKSLAFEIRKLKDSWGLVDPGMERHGEKLPSIQAGDNLTYLGVQYSPWSGIDVGLVRTNLTNTLSRLSKLPLKPHQKLCLLQKHLVPHYLHQLALAVPAVSILKKMDQELRVAIKEFMHLPASICNGLIYCGKGDGGLGFPKLEELVTRISLGTGLKFSNSSDPAIRALLGCASSTANLHRLAASVRLPYPYTQGDLRKRKNRMIKEELQRWSDLIAQGRSVKSFAGDKVGNSIFYNPTLLKPCRFITALQLRTNTAGNRTALNRAVPQADVSCRKCGARKETLAHILGECIHTKAAVIRRHNEIRDLIMDKIMLNDKTVEVTKEPELQSEKGKLKPDLVVKNQSGVFVVDVTVRHEDGEYLKLAIKDKKDKYGVLLPAMQRERNVTTAEVLPIVVGTRGAMPAETIKCLNKLGINKSHQITISMMALRSSIELYHAFMDYDR

SEQ ID NO: 14939 - protein, 903 aa, Zootermopsis nevadensis
MTAVHQQPTWTMRTSAAHQSHDFEVSWKEGLMAFFLALDTKDVPKDVASVISGIRGAASTCCSRDTIDCLYSAVLGSLGRKTSPEPSLSQPKQKERRGKNKNKNKKRAEKRYKYARAQDLFRKSPGLLAKHVRLGTDYTAQNGAQLNREDIRLLYQSLWSTKPNLRLPTPVPPPETIDPSLFLGAITQDEVCRRVKKMKRSTAPGPDGIRADVLGNGPAQKLLCALFNLILISGNPPSAWSQNRTTLIPKEGKDGTKVTNYRPITISSLLSRLFWGIIDQRLRVVVHQNPRQKEFVAEAGCFANVHILLELVGRMKSANGGIDVQLDISKAFDTIPHEAIGPALAKKGLPTCFLDLVASSYEGVETSITHPKGNLNISLQRGVKQGDPLSPILFNLVMEPLLEELEGMPGYDIGQENISCLAFADDLFLFASSVPKAQALLDHTVGYLGALGMTISASKSSAFQIEKLKGTWALVDPGMERLGERIPAVEARTNLTYLGVKISPWSGIDMKLVRESMSSSLARLSKLPLKPNQKLTLLQYHLVPHYMHQLVLAVPAVTTLRDIDQELRVAIKQFLHLPSSITDGIFYCGKGDGGLGFPKLEHLVTRVSLGAGLNFTESRDPAIRALSGCTNTITRLRRLAQSARLPFPFVKDDLQKFKIRMQKEELKRWSELKAQGHAVKNLAGDKVGNSFLYDPKLLKPCRFITALQLRTNTAANRTSLNRAIPQASLYCRKCALAKETLGHILGQCIFTKAARIRRHNEIRDFIMDQVLKKDVTAEVTKEPELVSVEGKLKPDLVIKNQLGVFVVDVTVRHEDGEYLKDAKEEKEQKYGVLLPAMQRERLAPSAEVLPIVVGTRGAMPADTIECLVKLGIAKRHQKTISLMGLKSSIELYHAFLDYEHQIL

SEQ ID NO: 14940 - protein, 1097 aa, Zootermopsis nevadensis
MCDKRYIRKHAAQCHLPKCTGRQEAKAVQCPHCIETFDTVSGLSQHKRCRHPLERNAERLAPVLRPEKPARAGLVFSAEEIERMLQLEESLEGDKFIAMKMAKLMGTKTAKQIRDKRREPAYIARRLARKSVTEVLSEDRTSIEPPADVAECLGETGELSRAIEDVEREEHPVPSIGEPVEDSQPSTISLGGAGQLKELKELEAMEGRASSCSSAVRSIDDTEAEVKWREGLIASLLAWETNEGPKDAAEVINKIKQAAHLCPSQNTMNEIYVTVLEYLGSNATPSTASGRPKSIAGKSKSHKRAHKRYLYARTRDLYNKNPGLLAKHVRMGTDYIEQKGAELDRGEIKLLYDSLWGTKPCLRLADPAASQEAISLETFLGALTPDEVRNRVCRTKRSTAPGPDGIKVAALATGASQRVLCALYNLILITGILPSAWSQNRTTLIPKEGKDSAKVTNYRPITISSLLSRLFWGIMDQRLRSVVRQNPRQKGFVAEAGCFANVQILRELVGRMKSNNGGVAIQLDISKAFDTVPHEALGPALSRKGVPKFFVDLVLSSYEGVETSISHPKGDIRISLQRGVKQGDPLSPILFNLVMETLLEDLEAMPGYAIDDENISCLAFADDLLLFASDAPKAQDLLDCTVDYLGALGMSISASKSLAFQIRKLKDSWCLVDPGMERHGDRLPSMKAGDNLTYLGVQYSPWGGMDVSLVHKDLSNTLSRLSKLPLKPHQKLCLLEKYLVPHYLHQLVLAVPAVTALIRIDQELRVEIKKFMHLPASISNGLIYCGKGDGGLGFPKLEELVTRVSLGTGLRFANSGDPAIRALSGCASTTANLRRLATSVRLPYPYTLTDLRQRKNCMAREELKRWSEQSAQGRSVKTFAGDKVGNSILYKPTLLKPCRFITALQFRTNTAGNRTTLNRAVPQADLSCRKCGARKETLAHILGECIHNKPAVIRRHNEIRDLIMDTIMLNDKAAEVTKEPELQNGKGKLKPDLVVKNQAGVFVVDVTVRHEDGDYLKLARIEKKDKYGQLLPAMRRERGVPAAEVLPIVVGTRGAMPAETVKCLNKLGLKRDHLLTISMIALRSSIELYHAFMDYGR

SEQ ID NO: 14941 - protein, 1890 aa, Thelohanellus kitauei
MDKFSRKSKLKNDDRNEHSDPSDHPQPDSERSKAVRRLEKLFRKKSKLMKMRASLDSVYSENANNQEFKELIDKIELLLIKVQMEINERFKSLSASSPVPSPTEFDQHKEARHSKYRMTPEAEHSDNHRAQKMRKTQDATEKTKKSDCTTKVIKTPNYLNYLNEPCVTIPFKKRKGQIQIPDICTTQIPEFSKDREFKPKKRKINTCPEIQAQAFELGGFDDELDMAINAAQNDVKLSRKRQRTLKQKLDIFPKIANAFRPTRKFRASRTTSKKSQESNKAQTSSSSITSSAISKINCDEVTDGPDKVTQEPCATRKLIHNQDESLRSVISLVDNDNTSSTSSLSTKVDTSSSSITSLVISKINCDEVTDGPDKATQEPCATRKLILNQDVTDLKNRKESLRSVNSLVANDDKSSTSSLSTKVDTSSSSITSSTISKINCDEVTDGPDKVIQEPCATRKLIHSQNVRDLKNYKAETSVTTVDDQYETEKLPRSDENPTKSSLVLCEMDIDMDIAMDIDLLIKEARSSNTDKKLPAFWLNHEVDVLDSNEIHTIPLKRCSKGPNTTIKPGSCVVSDIPVKPSNIPKAPIPNHLTPTTTIRENTSNSLSRTKPKTSNITQSTQSTTIRNKNLSTQCNTGKVTVIDIPVRYPYLPKPFKEITDKSLTIDEIVRIRQQELASYTTKMKETSKCRVSDITCSENQTKHKPDRSSKRSLQTSAASTGLSKDTSSPSKPNNEINGGISTYKVDSNTKLPPVEQKFASCILDLASVHRKIFTFKNTTHIPLPCAEIRCNIGNCTTSLANLRCLKDHLRKKHKAGKFTLVCSRCMHFKCPSLPDLSNHLRKCAHSTAKPTTLTPLNRPRKHDSQTTNTSPTQESTGSILEIEMRPHCYSHQEPSPTDTPYTLEPVINTLTPPINNTTATCKVVVSDLPLKNSRKGKSNSMPKPQRGQILGLSEKITKQSTKSSKASIKELNDHRENLINMLRTINELRDPTEIDNKLNDFLNETYRVTQNCHINFRGSAPFTYTNPKRAIGTKRQLSDSGDAPKGNPANSAARQLNNLYRANPSRAFDIITQKSINIKCTVDPNDIAEHYKKIWCRHAKGPIVQPQNEPDLDILRPVSIEEVSSRLKSLKRSSAAGPDALFYNSWIWLFDDSNMETLADFISLIFKTKRVPDCLKIARTILLPKTENANPLKIDDFRPISITNTLYRLLTGILAARIQNIGTKIYNPAQRGFLKCDGCLLNTSDLIEVIRAGKCSKSLAIAYIDLRKAFDLVDHSKLLHQVGLKLGSDVQQLVHSLYDNAATYFEMGEIKSEALLLTNGVRQGCPLSPLLFNLALNPLLDELDSSDTGLNFASSFGNVTVSSLAYADDMIIISNNEQNLQKAMDKVDIWCNNFGMEVNASKCASLGIKDRVCIPLSIKSRNNIIPSLSTDDFYDYLGTRISLDTGIANSKFENLLKSCTSDAARVADSSLAPHNKLSMIKTFILPKLDHITRLSDVNKTDLANFMTQLRGMVKKFLDLPPSTSSDFFHTACSAGGLGFTDIVKNSFLQDARRLLLQLNAKSFTAPLTIERLYKSRSVDPNASNNTVAEILEMNQISQTFKFHELTINTVKKWGGKWIMAGNLVNLELPGKEQDISKLISVKDIRTYTANYHLNKLLACKAQGKCFKTVSKNHISNNFITTGGLPPVTYAWIHRARLDLLPTRSSLRIRNIISDMDSSNCRRCGTDIESLSHILNSCIISKNLQTARHDRILSKLVNNIKRSDKTVVRVNKKYPFNDSFRPDILILNNDSNIDYIIDVQVAFDSLKRMQFAHDLKIRKYSQLAQIHCEKTGRNLLVFPFIIGSLGSVFSKSLEISTALGISDKRSLKKLVTSCVRKSIMGSEKIYKSYFL

SEQ ID NO: 14942 - protein, 887 aa, Diaphorina citri
MRTDTPSRRLKHKVRIICRTHNTHSRYENNEELPRRVLDTLNQKLSVQVQKRKKYLTSNQRKLNNKTFRTSEKKFYRNLRKPNTDTQNELDILHIEQVEEYWSRLWSTAETHKQAHWIQDEKENHRDLPEMHFEEISIQQLTTVLTRTHNWKSPGPDKLQNFWYKRLTCTHEKIAAILTECIKHPDLFPAWLSQGVTYLLPKSASFQGDPAKGRPITCLNTIYKILTACISNALYEHLTNNNIMAEEQKGCVRMAKGCKEQLTIDQIVLEQASKDSRNLHACYIDYQKCFDSLPHSWLLEILSIYRVNPTIIRFLTSTMQNWKTVIETIDPNQRDSSRTNKTNTIQIKKGIYQGDCLSALWFCVALNPLSNLLRTTKIGFDIKSERRVLYKINHLVYMDDLKLYAASKNKLNELIQIVAKFSSDIQMKFGIDKCRFLSIHAGRMINTQEQGPMAIEPMSTDELYKYLGVMQSKQVAHSEMKKRLQTEFKSRLHKLMKSKLNGKNLVKAVNTYAIPAITYSFGIIKWTQTDLRNLQRTIRTTMTQYNYHHPKSCVERMILPRRKGGRGVLDIEALHDKQVKSLREYFVKKGDRSPLIKAIVEVDNRYTPLNLKSETYESSSLTTDEKENRWAQKSLHGRYYHALHDTNVDQEMSNRWLGESGLFAETEGFMLAIQDEVIATRNHIKYIIKDSNAPEDRCRRCGSTGETIDHVVSACPTLAQSDYLKRHNNVAKILYLELLKQHQIMKDPQRYYTYTPEPIIENENVKIYYDRTLHTGHTREHNRPDITIVDKKTKTATLVDIAVPLSRNMTRTRHEKINKYSDLAVEIKTMWNLNSVRIVPIIISSVGLIPKTLRGDLASLHLKPELIMQMQKAVIIDTCHTVRKFLQ

SEQ ID NO: 14943 - protein, 942 aa, Botryllus schlosseri
MPARSKPRWDDEEVLLLAREELSLIRSGKEKNINMQLEEIQAGRRTLDSIKGLRKQKRYKEVLAALKEEEAQAADTGLQHNTMDCSHSEETERISQPSPELERLVATDYPTIVAAVRSGNESKVKALIDREYERLAHDIALPSHQNNIGYVGSFPIRQSLRRASRERSVRIQELFKKNRRRCANHILEGKWKATSEPVPRDSVSRYWKNIFQREPPEDQRSFAAKPTLHDLARPITAEEFDSAIKYTECSAPDIDGLHFSDLKRLNREKVVSAYNLWMFTGCLPKALSHGVTTLIPEDPYNIKESTLRPITMDRVLVRGLHTILARRFDESFPPCRQNVFRAGDGLADYIYILRSTLSVCKRVLQPLCICLIDVSKAVDSLGHSTLVKACTRMGVPELLIRYIKNYYAGSTTRFKFGHETEDIKVTCGVKRGDPLSVHLFKATMDWALSALDDKLGIKIGTTINHFAFEDDVALIARTPFGLQNHLNALQYQLACSGMDLDIANCCSFRLAVDGKNKKWITDDRPFLKLSGEEVKAMGHREKSKYLGIGATVGQGRAEVTEDLHRKISEIDAAPLKPQQQLYIMANHLIPRMHHQLLLCHTSGEYLKTIDKHIRATIRGRLHLPHDTPYGFFHAPVSGGGLGLAPLQHLVPLLKTRRMKRLKASNDKVIKTIANLEEVHGKQRRTVKLQREDGRRITKKKDFRLALLERLHKSVDGKGLKVGAHFGDWANASLMSGETYIGAIKVRGNLMPTKVRRSRGRIGAPIHCDVCGRPSTLGHALQVCPRTRFKRIQRHNMIARAVTRDAKKAGLEVLWAPRIRTSQQLYKPDLVLVDRTKNVSFITDITVVADNADLDHEHERKCVKYNHPAIHRWVRARTKTERVTNSALALSWRGAISGKSVEDLVRVIGANKRGLSMYSAACLEGGYSCWVGYNQSAYRARMR

SEQ ID NO: 14944 - protein, 1161 aa, Piezodorus guildinii
MVRTRSQIASDESRVRAALEGMDSQPSTSAGSASGAPMPYGTVRPATTGLGTLNSDPGLDTIESPARGRGTTNQRNRQRRMKWDRNMNIAAIRAYFLATKSEKEKTGYRNRICRYWNDQYPEITITSQRLADQVKQILDRKFLSDSEITAIKAEVRNLFVRDSEGELDQVEDGHPVIVSRQLDTTSTNNQETQSLTELRSKMQKEHMLYYGIPLNSRPKIPKVPYSKRTLSAVKDVNEILAEHMSEEISLEDICHWIYVGGRTVALELELIKDEKRCDRSNESKDPPWKRRIKNKIENLRKKIGIITNYLRNPENASLKLKKKIDEIIVLNIGGVASCELRQTLSVYIDTLKQKLAVYANRIRRYTEAHSRRRQNRIFNTSERNFYKQLKPKANANQTALPDPKEVSEYWKDVWDHKQGYKRNAQWLEKICSNLADIEPMEAISISTEDITMALKQMKNWKASGPDKIQNYWLKYFSSVHSYLASWYQKLLCQEIEIPPNFCTGETYLIKKENKEKLEPQDLRPITCLNSVYKLLTTVIKNKLTDYIQGKGIMAVEQLGNKAGSRGCKELLIIDSFIAAQVAKKSRNLTVAWIDYRKAFDSVPHDWLLEVLRIYKVDQGIIDLLGRLMKNWNVSLCTPGHADKYIPIKRGIFQGDSLSPLWFCLALNPLSRLLEDTGKGYQLNFGAKLSHSFYMDDLKLYARSEEEMRILLNAVKGFSDDINMQLGTEKCGVLTVKKGKITAGDNMELSNEIIINQLRDTDSYKYLGMHQLLKFKADSKKLFEDEFRCRIKLILKSHLNGRNLIKAINTWAVPALAYSFGLLKWSKTDLERLDRMVRVQMVLNRKRHPKSSVARLYLPRKSGGRGLTSLLKLCREEENNLRRYMFNNDSMILSTIAALDANYTALNLVNRATPNNDTDYASLTETWKNKPLHGRFYHSLNETGIDVQTSLTWLKNGHLFPETEGFLFAIQDQAIATKAYRRHICGEDISDLCRLCKKSVESIQHVTSGCPILAGKEYLQRHNNAAKIVHQAIALKMNLLSSESPYYKYNPLPITTGHKTKIYWDHPIITDHTVLNNRPDILVIDKNRKLAQIVEIGVPSDDNLQKTVSEKKRKYQELAEELKQLYGLESCGIYPIILSCNGLIPESTLESIQQLELPVRIL

SEQ ID NO: 14945 - protein, 1212 aa, Aelia acuminata
MSGAADIIYLAVGIKCTYPSKMVRTRRQIASDESGVRAAPEGLDSQPSTSAGGASGASVSYVPVRPAAIGLSTINSELCLDTVESPARGRGTIGQTNRQRRMKWDRNMNIAAIRAYLLATHLETDKTGYRSRINHYWSEKYPQITVSSQRLADQVKQILERKFLSESEIMAIKQEVSLALVPNPERVTEVVENAESSIGNNLPATSPNNQGELQLKQIRNTLLREHILYDGIPLNSRPVIPKVPYSKQTLSTVRAVNGILAEHMSEEITLEEICHWIYVGARTVAMDLGLIKDRKNSDTSNKPGDPPWKRRIKKKIENLRCKIGIITNYLRSPENASSKLRKKIDEIIVLNIGGVASSELNQTLRIYMETLKQKLAVFANRIRRYTEAYNRRKQNSVFNTSERYFYKLLKPKENCNNIIYPNPSDTLNYWKGIWENEKYYNSDAYWLEKIRNSVTDLQPMEATSITADDVTKAIKLMKNWKASGPDKIQNYWLKYFTNTHSHLASWYQKLLSEEIIVPPNFCTGITYLIKKVNKEKLEPQDLRPITCLNGVYKLLTAILKNKLTEYIQAKSIMAVEQLGNKSGSKGCKELLIIDSFVAAQVTKRSRNIALSWIDYRKAFDSVPHDWLLEVLKIYKIDAAIIDLLKRLMQLWKISISTPTWNGEDINPYITIRRGIFQGDSLSPLWFCLALNPISKLLEDTGKGYQLNSETKLSHSFYMDDLKLYARNEDEMKALLKTVKTFSDDIKMDLGIDKCAVIYVKRGRIVEGTNMELSDDVVLNQLRETDSYKYLGLHQLLKFKANSKRIFEDEFVYRIKLVLKSHLNGRNTIKALNTWAVPALAYSFGVLKWTKTDLERLDRLVRVQMVLSRKRHPKSSVSRLYLPRKMGGRGLMSLLRLCREQENNLRTYIRCQNSNMLSTIASLDADYTALNLLNAENPSNDSDYATLKEEWKKKPLHGRFYHSLTDSGIDTKASLTWLINGHLFPETEGFLLAIQDQVIATRAYRKNICGENITDLCRLCKQTTESIQHVTSGCGILAGKEYLQRHNNAAKVVHQAIAEKMGLIDYYCPYYKYRPEPIISRQSVKMFWNHPMITDHTIQNNRPDILILDKGRKMVSIIEIGVPSDDNVHKVVIEKKKKIRRISGRNEEALWLKGKPHSTFDNIKQRLDTRRNHVFIARAGPSIWNDGENAGVSIVGHCKSSQEIYDNQIDRKF

SEQ ID NO: 14946 - protein, 1207 aa, Aelia acuminata
MSGAADIIYLAVGIKCTYPSKMVRTRRQIASDESGVRAAPEGLDSQPSTSAGGASGASVSYVPVRPAAIGLSTINSELCLDTVESPARGRGTTGQTNRQRRMKWDRNMNIAAIRAYLLATHLETDKTGYRSRINHYWSEKYPQITVSSQRLADQVKQILERKFLPESEIMAIKQEVSLALVPNPERVTEVVENAESSIGNNLPATSSNNQGELQLKKIRNTLLREHILYDGIPLNSRPVIPKVPYSKQTLSTVRAVNGILAEHMSEEITLEEICHWIYVGARTVAMDLGLIKDRKNSDTSNKPGDPPWKRRIKKKIENLRCKIGIITNYLRSPENASSKLRKKIDEIIVLNIGGVASSELNQTLRIYMETLKQKLAVFANRIRRYTEAYNRRKQNSVFNTSERYFYKLLKPKENCNNIIYPNPSDTLNYWKGIWENEKYYNSDAYWLEKIRNSVTDLQPMEATSITADDVTKAIKLMKNWKASGPDKIQNYWLKYFTNTHSHLASWYQKLLSEEIIVPPNFCTGITYLIKKVNKEKLEPQDLRPITCLNGVYKLLTAILKNKLTEYIQAKSIMAVEQLGNKSGSKGCKELLIIDSFVAAQVTKRSRNIALSWIDYRKAFDSVPHDWLLEVLKIYKIDAAIIDLLKRLMQLWKISISTPTWNGEDINPYITIRRGIFQGDSLSPLWFCLALNPISKLLEDTGKGYQLNSETKLSHSFYMDDLKLYARNEDEMKALLKTVKTFSDDIKMDLGIDKCAVIYVKRGRIVEGTNMELSDDVVLNQLRETDSYKYLGLHQLLKFKANSKRIFEDEFVYRIKLVLKSHLNGRNTIKALNTWAVPALAYSFGVLKWTKTDLERLDRLVRVQMVLSRKRHPKSSVSRLYLPRKMGGRGLMSLLRLCREQENNLRTYIRCQNSNMLSTIASLDADYTALNLLNAENPSNDSDYATLKEEWKNKPLHGRFYHSLTDSGIDTKASLTWLINGHLFPETEGFLLAIQDQVIATRAYRKNIFGENITDLCRLCKQTTESIQHVTSGCGILAGKEYLQRHNNAAKVVHQAIAEKMGLFDYYCPYYKYRPEPIISRQSVKMFWDHPMITDHTIQNNRPDILILDKGRKMVSIIEIGVPSDDNVHKVVIEKKRKYVELAEEMKKLYGLKESRILPLIISSNGLIPEETMSSLQELDLPSGTMVKMQESVLLGTARVVRKFMTIK

SEQ ID NO: 14947 - protein, 1218 aa, Aelia acuminata
MGGNLVSVCIPCQGRLISYHLAVGIKCTYPSKMVRTRRQIASDESGVRAAPEGLDSQPSTSAGGASGASVSYVPVRPAAIGLSTINSELCLDTVESPARGRGTIGQTNRQRRMKWDRNMNIAAIRAYLLATHLETDKTGYRSRINHYWSEKYPQITVSSQRLADQVKQILERKFLLESEIMAIKQEVSLALVPNPERVTEVVENAESSIGNNLPATSSNNQGESQLKQIRNTLLREHILYDGIPLNSRPVIPKVPYSKQTLSTVRAVNEILAEHMSEEITLEDICHWIYVGARTVAMDLGLIKDRKNSDTSNKPGDPPWKRRIKKKIENLRCKIGIITNYLRSPENASSKLRKKIDEIIVLNIGGVASSELNQTLRIYMETLKQKLAVFANRIRRYTEAYNRRKQNSVFNTSERYFYKLLKPKENCNNVIYPNPADTLNYWKGIWENEKYYNSDAYWLEKIRNSVTDLQPMEATSITADDVTKAIKLMKNWKASGPDKIQNYWLKYFTNTHSHLASWYQKLLSEEIIVPPNFCTGITYLIKKVNKEKLEPQDLRPITCLNGVYKLLTAILKNKLTEYIQAKSIMAVEQLGNKSGSKGCKELLIIDSFVAAQVTKRSRNIALSWIDYCKAFDSVPHDWLLEVLKIYKIDAAIIDLLKRLMQLWKISISTPTWNGEDINPYIIIRRGIFQGDSLSPLWFCLALNPISKLLEDRGKGYQLNSETKLSHSFYMDDLKLYARNEDEMKALLKTVKTFSDEIKMDLGIDKCAVIYVKRGKIVEGTNMELSDDVVLNQLRETDSYKYLGLHQLLKFKANSKRIFEDEFVYRIKLVLKSHLNGRNTIKASNTWAVPALAYSFGVLKWTKTDLERLDRLVRVQMVLSRKRHPKSSVSRLYLPRKMGDRGLMSLLRLCREQENNLRTYIRCQNSNMLSTIASLDADYTALNLLNAENPSNDSDYATLKEEWKNKPLHGRFYHSLTDSGINTKASLTWLINGHLFPETEGFLLAIQDQVIATRAYRKNICGENITDLCRLCKQTAESIQHVTSGCGILAGKEYLQRHNNAAKVVHQAIAEKMGLIDYYCPYYKYRPEPIISRQSVKMFWDHPMITDHTIQNNRPDILILDKGRKMVSIIEIGVPSDDNVHKVVIEKKRKYVELAEEMKKLYGLKESRILPLIISSNGLIPEETLSSLQELYLPSGTMVKMQESVLLGTARVVRKFMAIK

SEQ ID NO: 14948 - protein, 1218 aa, Aelia acuminata
MGGNLVSVCTPCQGRLISYHLAVGIKCIYPSKMVRTRRQIASDESGVRAAPEGLDSQPSTSAGGASGASVSYVPVRPAAIGLSTINSELCLDTVESPARGRGTIGQTNRQRRMKWDRNMNIAAIRAYLLATHLETDKTGYRSRINHYWSEKYPQITVSSQRLADQVKQILERKFLSESEIMAIKQEVSLALVLNPERVTEVVENAESSIGNNLPATSSNNQGESQLKQIRNTLLREHILYDGIPLNSRPVIPKVPYSKQTLSTVRAVNKILAEHMSEEITLEDICHWIYVGARTVAMDLGLIKDQKNSDTSNKPGDPPWKRRIKKKIENLRCKIGIITNYLRSPENASSKLRKKIDEIIVLNIGGVASSELNQTLRIYMETLKQKLAVFANRIRRYTEAYNRRKQNSVFNTSERYFYKLLKPKENCNNVIYPNPADTLNYWKGIWENEKYYNSDAYWLEKIRNSVTDLQPMEATSITADDVTKAIKLMKNWKASGPDKIQNYWLKYFTNTHSHLASWYQKLLSEEIIVPPNFCTGLTYLIKKVNKEKLEPQDLRPITCLNGVYKLLTAILKNKLTEYIQAKSIMAVEQLGNKSGSKGCKELLIIDYFVTAQVTKRSRNIALSWIDYCKAFDSVPHDWLLEVLKIYKIDAAIIDLLKRLMQLWKISISTPTWNGEDINPYIIIRRGIFQGDSLSPLWICLALNPISKLLEDTGKGYQLNSETKLSHSFYMDDLKLYARNEDEMKALLKTVKTFSDEIKMYLGIDKCAVIYVKRGKIVVGTNMELSDDVVLNQLRETDSYKYLGLHQLLKFKANSKRIFEDEFVYRIKLVLKSHLNGRNTIKALNTWAVPALAYSFGVLKWTKTDLERLDRLVRVQMVLSRKRHPKSSVSRLYLARKMGDRGLMSLLRLCREQEINLRTYIRCQNSNMLSTIASLDADYTALNLLNAENPSNDSDYATLKEEWKNKPLHGRFYHSLTDSGINTKASLTWLINGHLFPETEGFLLAIQDQVIATRAYRKNICGENITDLCRLCKQTAESIQHVTSGCGILAGKEYLQRHNNAAKVVHQAIAEKMGLIDYYCPYYKYRPEPIISRQSVKMFWDHPMITDHTIQNNRPDILILDKGRKMVSIIEIGVPSDDNVHKVVIEKKRKYVELAEEMKKLYGLKESRILPLIISSNGLIPEETLSSLQELYLPSGTMVKMQESVLLGTARVVRKFMAIK

SEQ ID NO: 14949 - protein, 1186 aa, Aelia acuminata
MVRTRRQIASDESGVRAAPEGLDSQPSTSAGGASGASVSYVPVRPAAIGLSTINPELCLDTVESPARGRGTTGQTNRQRRMKWDRNMNIAAIRAYLLATHLETDKTGYRSRIGHYWSEKYPQITVSSQRLADQVKQILERKFLSESEIMAIKQEVSLALVPNLERVTEVVENAESSIGNNLPVTSSNNQGELQLKQIRNTLLREHILYDGIPLNSRPVIPKVPYSKQTLSTVRAVNEILAEHMSEEITLEEICHWIYVGARTVAMDLGLIKDRKNSDTSNKPGDPPWKRRIKKKIENLRCKIGIITNYLRSPENASSKLRKKIDEIIVLNIGGVASSELNQTLRIYMETLKQKLAVFANRIRRYTEAYNRRKQNSVFNTSERYFYKLLKPKENCNNVIYPNPADTLNYWKGIWENEKYYNSDAYWLEKIRNSVTDLQPMEATSITADDVTKAIKLMKNWKASGPDKIQNYWLKYFTNTHSHLASWYQKLLSEEIIVPPNFCTGITYLIKKVNKEKLEPQDLRPITCLNGVYKLLTAILKNKLTEYIQAKSIMAVEQLGNKSGSKGCKELLIIDSFVAAQVTKRSRNIALSWIDYRKAFDSVPHDWLLEVLKIYKIDAAIIDLLKRLMQLWKISISTPTWNGEDINPYITIRRGIFQGDSLSPLWFCLALNPISKLLEDTGKGYQLNSETKLSHSFYMDDLKLYARNEDEMKALLKTVKTFSDDIKMDLGTDKCAVIYVKRGRIVEGTNMELSDDVVLNQLRKTDSYKYLGLHQLLKFKANSKRIFEDEFVYRIKVVLKSHLNGRNTIKALNTWAVPALAYSFGILKWTKTDLERLDRLVRVQMVLSRKRHPKSSVSRLYLPRKMGGRGLMSLLRLCREQENNLRTYIRRQNSNMLSTIASLDADYTALNLLNAENPSNDSDYATLKEEWKNKPLHGRFYHSLTDSGINTKASLTWLINGHLFPETEGFLLAIQDQVIATRAYRKNICGENITDLCRLCKQTAESIQHVTSGCAILAGKEYLQRHNNAAKVVHQAIAEKMGLIDYYCPYYKYRPEPIISRQSVKMFWDHPMITDHTIQNNRPDILILDKGRKMVSIIEIGVPSDDNVHKVVIEKKRKYVELAEEMKKLYGLKESRILPLIISSNGLIPEETLSSLQELDLPSGTMVKMQESVLLGTARVVRKFMTIK

SEQ ID NO: 14950 - protein, 1091 aa, Aelia acuminata
MSGGRLLSYHLAVGIKCIYPSKMVRTRRQIASDEFGVRAAPEGLDSQPSTSAGGASGASVSYVPVRPAAIGLSTINSELCLDTVESPALGRGTIGQTNRQRRMKCDRNMNIAAIRAYLLATHLETDKTGYRSRINHYWSEKYPQITVSSQRLADQVKQILERKFLSDSDIMAIKQEVSLALVPNPERVTEVVENAESSIGNNLPATSSNNQGELQLKQIRNTLLREHILYDGIPLNSRPVIPKVPYSKQTLSTVRAVNEILAEHMSEEITLEEICHWIYVGARTVAMDLGLIKDRKNSDTSNKPGDPLWKQRIKKKIENLRCKIGIITNYLRSPENASSKLRKKIDEIIVLNIGGVASSELNQTLRIYMKTLKLKLAVFANRIRRYTEAYNRRKQNSILNTSERYFYKLLKPKENCNNVTYPNPADTLNYWKGIWENEKYYNSDAYWLEKIINSVTDLQPMEATSITADDVTKAIKLMKNWKASGPDKIQNYWLKYFTNTHSHLASWYQKLLSEEIIVPPNFCTGITYLIKKVNKEKLEPQDLRPITCLNGVYKLLTAILKNKLTEYIQAKSIMAVEQLGNKSGSKGCKELLIIDSFVAAQVTKRSRNIALSWIDYRKAFDSVPHDWLLEVLKIYKIDAAIIDLLKRRMQLWKISISTPTWNGEDINPYITIRRGIFQGDSLSPLWFCLALNPISKLLEDTGKGYQLNSETKLSHSFYMDDFKLYARNEDEMKALLKTVKTFSDDIKMDLGIDKCAVIYVKRGRIVEGTNMELSDDVVLNQLRETDSYKYLGLHQLLKFKANSKRIFEDEFVYRIKLVLKSHLNGRNTIKALNTWAVPELAYSFGVLKWTKTDLERLDRLVRVQMVLSRKRHPKSSVSRLYLPRKMGGRGLMNLLRLCREQENNLRTYIRCQNSNMLSTIASLDADYTALNLLNAENPSNDSDYATLKEEWKNKPLHEHFYHSLTDSGINPKASLTWLINGHLFPETEGFLLAIQDQVIATRAYRKNICGENITDLCRLCKQTAESIQHVTSGCGILAGKEYLQRHNNAAKVVHQAIAEKMGLIDYYCPYISTVRNQSSPGKASRCSGIIP

SEQ ID NO: 14951 - protein, 1207 aa, Aelia acuminata
MSGAADIIYLAVGIKCTYPSKMVRTRRQIASDESGVRAAPEGLDSQPSTSAGGASGASVSYVPVRPAAIGLSTINSELCLDTVESPARGRGTIGQTNRRRRMKWDRNMNIAAIRAYLLATHLETDKTGYRSRISHYWSEKYPQITVSSQRLADQVKQILERKFLSESEIMAIKQEVSLALVPNPKRVTEVVENAESSIGNNLPATSSNNQGELQLKQIRNTLLREHILYDGIPLNSRPVIPKVPYSKQTLSTVRAVNGILAEHMSEEITLEEICHWIYVGARTVAMDLGLIKDRKNSDTSNKPGDPPWKRRIKKKIENLRCKIGIITNYLRSPENASSKLRKKIDEIIVLNIGGVASSELNQTLRIYMETLKQKLAVFANRIRRYTEAYNRRKQNSVFNTSERYFYKLLKPKENCNNIIYPNPSDTLNYWKGIWENEKYYNSDAYWLEKIRNSVTDLQPMEATSITADDVTKAIKLMKNWKASGPDKIQNYWLKYFTNTHSHLASWYQKLLSEEIIVPPNFCTGITYLIKKVNKEKLEPQDLRPITCLNGVYKLLTAILKNKLTEYIQAKNIMAVEQLGNKSGSKGCKELLMIDSFVAAQVTKRSRNIALSWIDYRKAFDSVPHDWLLEVLKIYKIDAAIIDLLKRLMQLWKISISTPTWNGEDINPYITIRRGIFQGDSLSPLWFCLALNPISKLLEDTGKGYQLNSETKLSHSFYMDDLKLYARNEDEMKALLKTVKTFSDDIKMDLGIDKCAVIYVKRGRIVEGTNMELSDDVVLNQLRETDSYKYLGLHQLLKFKANSKRIFEDEFVYRIKLVLKSHLNGRNTIKALNTWAVPALAYSFGVLKWTKTDLERLDRLVRVQMVLSRKRHPKSSVSRLYLPRKMGGRGLMSLLRLCREQENNLRTYIRCQNSNMLSTIASLDADYTALNLLNAENPSNDSDYATLKEEWKNKPLHGRFYHSLTDSGIDTKASLTWLINGHLFPETEGFLLAIQDQVIATRAYRKNICGENITDLCRLCKQTTESIQHVTSGCGILAGKEYLQRHNNAAKVVHQAIAEKMGLIDYYCPYYKYRPEPIISRQSVKMFWDHPMITDHTIQNNRPDILILDKGRKMVSIIEIGVPSDDNVHKVVIEKKRKYVELAEEMKKLYGLKESRILPLIISSNGLIPEETMSSLQELDLPSGTIVKIQESVLLGTARVVRKFMTIK

SEQ ID NO: 14952 - protein, 1207 aa, Aelia acuminata
MSGAADIIYLAVGIKCTYPSKMVRTRRQIASDESGVRAAPEGLDSQPSTSAGGASGASVSYVPVRPAAIGLSTINSELCLDTVESPARGRGTTGQTNRQRRMKWDRNINIAAIRAYLLATHLETDKTGYRSRINHYWSEKYPQITVSSQRLTDQVKQILERKFLSESEIMAIKQEVSLALVPNPERVTEVVENAESSIGNNLPATSSNNQGELQLKQIRNTLLREHILYDGIPLNSRPVIPKVPYSKQTLSTVRAVNGILAEHMSEEITLEEICHWIYVGARTVAMDLGLIKDRKNSDTSNKPGDPPWKRRIKKKIENLRCKIGIITNYLRSPENASSKLRKKIDEIIVLNIGGVASSELNQTLRIYMETLKQKLAVFANRIRRYTEAYNRRKQNSVFNTSERYFYKLLKPKENCNNIIYPNPSDTLNYWKGIWENEKYYNSDAYWLEKIRNSVTDLQPMEATSITADDVTKAIKLMKNWKASGPDKIQNYWLKYFTNTHSHLASWYQKLLSEEIIVPPNFCTGITYLIKKVNKEKLEPQDLRPITCLNGVYKLLTAILKNKLTEYIQAKSIMAVEQLGNKSGSKGCKELLIIDSFVAAQVTKRSRNIALSWIDYRKAFDSVPHDWLLEVLKIYKIDAAIIDLLKRLMQLWKISISTPTWNGEDINPYITIRRGIFQGDSLSPLWFCLALNPISKLLEDTGKGYQLNSETKLSHSFYMDDLKLYARNEDEMKALLKTVKTFSDDIKMDLGIDKCAVIYVKRGRIVEGTNMELSHDVVLNQLRETDSYKYLGLHQLLKFKANSKRIFEDEFVYRIKLVLKSHLNGRNTIKALNTWAVPALAYSFGVLKWTKTDLERLDRLVRVQMVLSRKRHPKSSVSRLYLPRKMGGRGLMSLLRLCREQENNLRTYIRCQNSNMLSTIASLDADYTALNLLNAENPSNDSDYATLKEEWKNKPLHGRFYHSLTDSGIDTKASLTWLINGHLFPETEGFLLAIQDQVIATRAYRKNICGENITDLCRLCKQTTESIQHVTSGCGILAGKEYLQRHNNAAKVVHQAIAEKMGLIDYYCPYYKYRPEPIISRQSVKMFWDHPMITDHTIQNNRPDILILDKGRKMVSIIEIGVPSDDNVHKVVIEKKRKFVELAEEMKKLYGLKESRILPLIISSNGLIPEETMSSLQELDLPSGTMVKMQESVLLGTARVVRKFMTIK

SEQ ID NO: 14953 - protein, 1207 aa, Aelia acuminata
MSGAADIIYLAVGIKCTYPSKMVRTRRQIASDESGVRAAPEGLDSQPSTSAGGASGASVSYVPVRPAAIGLSTINSELCLDTVGSPARGRGTIGQTNRQRRMKWDRNMNIAAIRAYLLATHLETDKTGYRSRISHYWSEKYPQITVSSQRLADQVKQILERKFLSESEIMAIKQEVSLALVPNPERVTEVVENAESSIGNNLPATSSNNQGELQLKKIRNTLLREHILYDGIPLNSRPVIPKVPYSKQTLSTVRAVNGILAEHMSEEITLEEICHWIYVGARTVAMDLGLIKDRKNSDTSNKPGDPPWKRRIKKKIENLRCKIGIITNYLRSPENASSKLRKKIDEIIVLNIGGVASSELNQTLRIYMETLKQKLAVFANRIRRYTEAYNRRKQNSVFNTSERYFYKLLKPKENCNNIIYPNPSDTLNYWKGIWENEKYYNSDAYWLEKIRNSVTDLQPMEATSITADDVTKAIKLMKNWKASGPDKIQNYWLKYFTNTHSHLASWYQKLLSEEIIVPPNFCTGITYLIKKVNKEKLEPQDLRPITCLNGVYKLLTAILKNKLTEYIQAKSIMAVEQLGNKSGSKGCKELLIIDSFVAAQVTKRSRNIALSWIDYRKAFDSVPHDWLLEVLKIYKIDAAIIDLLKRLMQLWKISISTPTWNGEDINPYITIRRGIFQGDSLSPLWFCLALNPISKLLEDTGKGYQLNSETKLSHSFYMDDLKLYARNEDEMKALLKTVKTFSDDIKMDLGIDKCAVIYVKRGRIVEGTNMELSDDVVLNQLRETDSYKYLGLHQLLKFKANSKRIFEDEFVYRIKVVLKSHLNGRNTIKALNTWAVPALAYSFGVLKWTKTDLERLDRLVRVQMVLSRKRHPKSSVSRLYLPRKMGGRGLMSLLRLCREQENNLRTYIRCQNSNMLSTIASLDADYTALNLLNAENPSNDSDYATLKEEWKNKPLHGRFYHSLTDSGIDTKASLTWLINGHLFPETEGFLLAIQDQVIATRAYRKNICGENITDLCRLCKQTTESIQHVTSGCGILAGKEYLQRHNNAAKVVHQAIAEKMGLIDYYCPYYKYRPEPIISRQSVKMFWDHPMITDHTIQNNRPDILILDKGRKMVSIIEIGVPSDDNVHKVVIEKKRKYVELAEEMKKLYGLKESRILPLIISSNGLIPEETMSSLQELDLPSGTMVKMQESVLLGTARVVRKFMTIK

SEQ ID NO: 14954 - protein, 1218 aa, Aelia acuminata
MGGNLVSVCTPCQGRLISYHLAVGIKCIYPSKMVRTRRQIASDESGVRAAPEGLDSQPSTSAGGASGASVSYVPVRPAAIGLSTINSELRLDTVESPARGRGTIGQTNRQRRMKWDRNMNIAAIRAYLLATHLETDKTGYRSRINHYWSEKYPQITVSSQRLADQVKQILERKFLSESEIMAIKQEVSLALVPNLERVTEVVENAESSIGNNLPATSSNNRGELQLQQIRNTLLREHILYDGIPLNSRPVIPKVPYSKQTLSTVRAVNEILAEHMSEEITLEEICHWIYVGARTVAMDLGLIKDRKNSDTSNKPGDPPWKRRIKKKIENLRCKIGIITNYLRSPENASSKLRKKIDEIIVLNIGGVASSELNQTLRIYMETLKQKLAVFANRIRRYTEAYNRRKQNSVFNTSERYFYKLLKPKENCNNVIYPNPADTLNYWKGIWENEKYYNSDAYWLEKIRNSVTDLQPMEATSITADDVTKAIKLMKNWKASGPDKIQNYWLKYFTNTHSHLASWYQKLLSEEIIVPPNFCTGITYLIKKANKEKLEPQDLRPITCLNGVYKLLTAILKNKLTEYIQAKSIMAVEQLGNKTGSKGCKELLIIDSFVAAQVTKRSRNIALSWIDYRKAFDSVPHDWLLEVLKIYKIDAAIIDLLKRLMQLWKISISTPTWNGEDINPYITIRRGIFQGDSLSPLWFCLALNPISKLLEDTGKGYQLNSETKLSHSFYMDDLKLYARNEDEMKALLKTVKTFSDDIKMDLGIDKCAVIYVKRGRIVEGTNMELSDDVVLNQLRETDSYKYLGLHQLLKFKANSKRIFEDEFVYRIKVVLKSHLNGRNTIKALNTWAVPALAYSFGILKWTKTDLERLDRLVRVQMVLSRKRHPKSSVSRLYLPRKMGGRGLMSLLRLCREQENNLRTYIRRQNSNMLSTIASLDADYTALNLLNAENPSNDSDYATLKEEWKNKPLHGRFYHSLTDSGINTKASLTWLINGHLFPETEGFLLAIQDQVIATRAYRKNICGENITDLCRLCKQTAESIQHVTSGCAILAGKEYLQRHNNAAKVVHQAIAEKMGLIDYYCPYYKYRPEPIISRQSVKMFWDHPMITDHTIQNNRPDILILDKGRKMVSIIEIGVPSDDNVHKVVIEKKRKYVELAEEMKKLYGLKESRILPLIISSNGLIPEETLSSLQELDLPSGTMVKMQESVLLGTARVVRKFMTIK

SEQ ID NO: 14955 - protein, 1038 aa, Aelia acuminata
MAIKQEVSLALVPNPERITEVVENAESSIGNNLPATSSNNQGELQLEQIRNTLLREHILYDGIPLNSRPVIPKVPYSKQTLSTVRAVNEILAEHMSEEITLEEICHWIYVGARTVAMDLGLIKDRKNSDTSNKPGDPPWKRRIKKKIENLRCKIGIITNYLRSPENASSKLRKKIDEIIVLNIGGVASSELNQTLRIYMETLKQKLAVFANRIRRYTEAYNRRKQNSVFNTSERNFYKLLKPKENCNNVVYPNPADTLNYWKGIWENEKYYNSDAYWLEKIRNSVTDLQPMEATSITADDVTKAIKLMKNWKASGPDKIQNYWLKYFTNTHSHLASWYQKLLSEEIIVPPNFCTGITYLIKKVNKEKLEPQDLRPITCLNGVYKLLTAILKNKLTEYIQAKSIMAVEQLGNKSGSKGCKELLIIDSFVAAQVTKRSRNIALSWIDYRKAFDSIPHDWLLEVLKIYKIDAAIIDLLKRLMQLWKISISTPTRNGEDINPNITIRRGIFQGDSLSPLWFCLALNPISKLLEDTGKGYQLNSETKLSHSFYMDDLKLYAKNEDEMKALLKTVKTFSDDIKMDLGIDKCAVIYVKRGRIVEGTNMELSDDVVLNQLRETDSYKYLGLHQLLKFKANSKRIFEDEFVYRIKLVLKSHLNGRNTIKALNTWAVPALAYSFGILKWTKTDLERLDRLVRVQMVLSRKRHPKSSVSRLYLPRKMGGRGLMSLLKLCREQENNLRTYIRCQNSNMLSTIASLDADYTALNLLNAENPSNDSDDATLKEEWKNKPLHGRFYHSLTDSGINTKASLTWLMNGHLFPETEGFLLAIQDQVIATRAYRKNICGENITDLCRLCKQTAESIQHVTSGCGILAGKEYLQRHNDAAKVVHQAIAEKMGLIDYYCPYYKYRPEPIISRQSVKMFWDHPMITDHTIQNNRPDILILDKGRKMVSIIEIGVPSDDNVHKVVTEKKRKYVELAEEMKKLYGLKESRILPLIISSNGLIPEETLSSLQELDLPSGTMVKMQESVLLGTARVVRKFMTIK

SEQ ID NO: 14956 - protein, 1207 aa, Aelia acuminata
MSGAADIIYLAVGIKCTYPSKMVRTRRQIASDESGVRAAPEGLDSQPSTSAGGASGASVSYVPVRPAAIGLSTINSELCLDTVESPARGRGTTGQTNRQRRMKWDRNMNIAAIRAYLLATHLETDKTGYRSRISHYWSEKYPQITVSSQRLADQVKQILERKFLSESEIMAIKQEVSLALVPNPERVTEVVENAESSIGNNLPATSSNNQGELQLKQIRNTLLREHILYDGIPLNSRPVIPKVPYSKQTLSTVRAVNGILAEHMSEEITLEEICHWIYVGARTVAMDLGLIKDRKNSDTSNKPGDPPWKRRIKKKIENLRCKIGIITNYLRSPENASSKLRKKIDEIIVLNIGGVASSELNQTLRIYMETLKQKLAVFANRIRRYTEAYNRRKQNSVFNTSERYFYKLFKPKENCNNIIYPNPSDTLNYWKGIWENEKYYNSDAYWLEKIRNSVTDLQPMEATSITADDVTKAIKLMKNWKASGPDKIQNYWLKYFTNTHSHLASWYQKLLSEEIIVPPNFCTGITYLIKKVNKEKLEPQDLRPITCLNGVYKLLTAILKNKLTEYIQAKSIMAVEQLGNKSGSKGCKELLIIDSFVAAQVTKRSRNIALSWIDYRKAFDSVPHDWLLEVLKIYKIDAAIIDLLKRLMQLWKISISTPTWNGEDINPYITIRRGIFQGDSLSPLWFCLALNPISKLLEDTGKGYQLNSETKLSHSFYMDDLKLYARNEDEMKALLKTVKTFSDDIKMDLGIDKCAVIYVKRGRIVEGTNMELSDDVVLNQLRETDSYKYLGLHQLLKFKANSKRIFEDEFVYRIKLVLKSHLNGRNTIKALNTWAVPALAYSFGVLKWTKTDLERLDRLVRVQMVLSRKRHPKSSVSRLYLPRKMGGRGLMSLLRLCREQENNLRTYIRCQNSNMLSTIASLDADYTALNLLNAENPSNDSDYATLKEEWKNKPLHGRFYHSLTDSGIDTKASLTWLINGHLFPETEGFLLAIQDQVIATRAYRKNICGENITDLCRLCKQTTESIQHVTSGCGILAGKEYLQRHNNAAKVVHQAIAEKMGLIDYYCPYYKYRPEPIISRQSVKMFWDHPMITDHTIQNNRPDILILDRGRKMVSIIEIGVPSDDNVHKVVIEKKRKYVELAEEMKKLYGLKESRILPLIISSNGLIPEETMSSLQELDLPSGTMVKMQESVLLGTARVVRKFMTIK

SEQ ID NO: 14957 - protein, 1038 aa, Strongylocentrotus purpuratus
MHTPYFVNKLCARVGLIRVAILLSALQPHTQASFIPYQPLKTASLKSAVIKDDKADLVSMTTKFTTPLLSREEWSKLNDELKDLLGPSHLELSTNSLSPAAAYTAFESIVREFLLSHNEFVCVNKRPNQQTTKETETSSCMKEARRIKNSLRKKAFNRNATESDRSEFFDALQLYDCLRRRGEEEERTASTAHQEKMYRNNFWNFSKKCVTAKIGDRPVGPSFNSADASKYFSARYDTNVTRMDASKVSWIPDAPAQQEEFNMDPIRPRDIRYVLRTKSSSSSPGPDGITYGILKKLTCTHHFLATLYSKLLSQPEPPSEWSRSKISLIHKKGSTNDPANFRMIALTSAVSKIYHQILSRRFTQYLTVNGYVDNSTQKAFIQGINGCIEDQCLTEVLNHARSKNKTAHVTFFDLEDAFGSLPHELIQLSLERFRIPSQVRQYLHKLYANLSGFVRTSEWQTEQFKLCKGVFQGDPLSPTLFIMAFNPLLEILQSEIQNGYDMNGTKIITTPYADDFNIITRNSRTHQRIINKINKLAKSMNLKLKPTKCRSHSICSGTPTTVQFKIENDAVRSVADDPHTFLGSLVSFHTSNTEISNYVISKVKSDLHNISSSLIRPEYKIAIYKRYYLPSIRFLLTVHDLTKTTLDNLDALTNKKLKEWAKIPQCGTPIAIYLKETLGITPISVLYKECQATAYTSSILKGDDKVQAALASRVERERQWVKRKSILLPIVETVTRIVEHINPTETQIRDPKILQRAQKSVKSNLREDTRKAWKEKLKTLVLQGNLLALTLEEELSVCWNSFIFDVPRRVMQFVLNSSIDTLPTKSNLVRWGKNVSDKCDLCGNRETLLHVLNYCNVQLTQGRYTWRHDNVLNVIHTALTKTKATVNDTPNPEIIVDLNQPNAHASSTIPREVIPTTDRPDLVLYWPNEKKLLIFELTVPFDLNISKAHEYKCNKYAPLIHDISARNFDVSLIAFEVGSRGLLTNHNFQSLKSLIKMANANVTAKTLSNQISKMAVVSSFSIFHARQDPAWTLPPLLQ

SEQ ID NO: 14958 - protein, 1873 aa, Caenorhabditis brenneri
MPLSISDCVHLVSAEGDTMNGRSTCGPLSRSSSVVSRSRSSPSPSVPPHPSPSIGPDTGLSAGIIGTSRGCSLWLPEVDNALSQWLRKGLERDHEVLVCGFEAAKPLSLSKARLLRKTPRNTGVVRHILEFDGRLVHTNCNETECVFSTLFSDMAVEVVRISLKCEPREPCEPCEPKCVLSILCSDKIVWISFECETCEPFPFFPDRKFREPIPFVFERMYDPRDPIPSFICWMYDLRQRMTPGTLPRNPVSEENKDNWRRPAVIKNEIRSMRSYLEENVKENRLNLLRRLRGGGEGKKMIRKLVAEKKSDTEVVCRILYPLDDRYECFVDGCETTSTMGYGSSDLKYMTTHIKKEHGVKVQWTYECSLCNKQAPFMGGAASKWVTAHMATKHTETVKLKLKPSISTTAKVAAKLDEIAVSLPKPRQVRGLRDPDEVKEKVAKPTLASTREEVKRNALRNMAPSVELSSQNQLTGAERPEETSEAMRLEECRTPEKIAELEGKIQTRTVTKKLSALKESMEKRTREEKVGKPSLAPIHEEVKKTARRSLAPLVEPSTFTHLTGASRLQAVRDAFSKANKDAAAKRRSSLAKPARLSEIMNTTFTKETVNETKEPVNDTDENIATIQPQVRIYRFNTWCLDHETTREAWLTGEVVDWFMGKVTEKKDQYRVFDSLIWSMYKLYGVGYILDLMRDPLTYFLPICEDNHWVLLVIDEKGIWYGDSKGAEPCREIAKFIEETKRERRMFPVPVPLQRDGVNCGVHICLMVKSILNGEPWYTEEEVKVFRRNVKRGLKEFGFELYSERIVYVREDSIKVNDEHDDDVVFLSEETNNTTFTIEQAEDPAEEDAQHLESPVKPVKLMELKIPKIEIKKKEIRRKPKQQIEKKRKVPTGKPDELLVRVRLWLEREVQSYFDSGKRFQRLEWILDVLTAAIHKATAGDEQAIERIEKRSPPLEVEEGEMSTQTEPKKRERKEKESGCEMKASHKEMYFKNRSKAFNVIIGKDSKQCEIPIETLQKFFEGTTAETNVPAEVLKEMGSRLPKLEALDWMEANFIESEVSDAMKKTKDTAPGVDGLRYHHLKWFDPEYKMLTLLYNECKNHRKIPSHWKEAETILLYKGGDETRPDNWRPISLMPTIYKLYSSLWNRRIRSVGGVMSKCQRGFQEREGCNESIGILRTAIDVAKGKRRNLSVAWLDLTNAFGSVPHELIKSTLESYGFPEMVTEIVMDMYRGASIRIKSKNEKSEQIVIKSGVKQGDPISPTLFNMCLENVIRRHLDSASGHRCIKTRVKVLAFADDMAILAENRDQLQTELNKLDKECESLNLIFKPVKCASLIIEGGMVNKNAEMVLRGKPIRNLDENGSYKYLGVHTGIATRVSTMQLLESVTKEMDLVNQSGMAPFQKLDCLKTFVLPKLTYMYANAIPKLTELKVFANLTMRMVKEIHEIPIKGSPLEYVQLPPSQGGLGVACPKITALITFLVNVMKKLWSSDSYIRKLYRDYLDEVAETETGMEEMTIEDIAKYLSGDVPIDKKAFGYNTFTRVRDVCNSLTNIGGAPLHKLKIVERDGDFAILVQATKEGMEKIFTCAQEKKLQQLLKAEVNTALAHRFFTEKPVKSAVMSVMRQYPQSNAFVKNGKNVSIAVHSWIHKARLNALHCNFNTYGENKSKVCRRCGKDVETQLHILQSCEYGLPKLINERHDAVLHVVRNLIRKGSKKDWKLKIDETVSSCNQLRPDIYMCSPDGKEVIMADVTCPYESGMQAMQESWNRKVTKYEGGFSHFQKMGKKFTVLPIVVGSLGTWWKPTTNSLVQLGIEKETIRRVIPELCSMTMEYSKDVYWNHIFGDTFRKPPMRFGVEKPKGNSWKKEGSEPKGAASSD

SEQ ID NO: 14959 - protein, 1959 aa, Caenorhabditis brenneri
MMPMCSSDCAFLVSAERDKTNGRSTLSGPLSRSSSVVSRSRLSPTPSSPQFPTPTPPYPGLKSPPPRMIGPLTNHTHTGRLIATAVETHGNFEVEMSVSHGFGTYQPMFLTRASIHDTEIRTMEVRHILEFDGRLVGDHFHPNCTISVICHFTISISTDSESPHNTPSLSVTVTNSYLKTKATTRCIPITTTGRVVEIMAFDPETRSELDGRLHEDVDLKYMLLGHYQFLCSNFGRHPSCSCTHTKEVTEADTHSVDLSLYTPFDRGDNSTCPVISTCHHTNTYKEINLISTINLYRDYIHTTLLQGHPLKPIPSLLVRGGGNPRTEINRRITRKLVPVALRDKPNEVHCRVLYPTKDQYQCFFRNCSTKSIVGYGAEDTKYMTTHIKNEHGVKVHWNYKCSICAVESPGYGMMSTRWMTAHMKQLHGVPTRAKPNKSMAATAAERLNEAAPSIPKPTSFPKIQEHKTPEKIKELEGKIQTRTVTKKLSALKEASAQKQGENQEEKVNTTKPRLSLISEIPNNPARRSLAPLVEPKPTTFNASSAVMARIQRLAAAREEASKASRLAIQKRRSSIAPAMSARSSEVFNTTFTKETTEPINTTDAKSDTNTTEIDNIDEIQPQPQLRVHCFNTWCLDHETTREAWLTGECVDWYLGTVTETNPQYRAFDSLVWPMYQIYGINWFMSLMQDPKLVYFLPICENKHWVLITMNQTQIWYGDSNHQEPCAIISNFITQTKRQLQHFLTPAPRQLDGVNCGVHVCLMVKTIVNNTPWHTEEDVKRFRSDMKARLREKGYNLYSERIIDATIKPTQSQTLDNNTTQDDDVIFIPQDEVNTTIDLEPSTQITMESDQSHTDDFGFLDKSVDLISEEVNNTTIDIEPPTSITIESNNSHTDVFGILDENLTSEEVNNTTYTTTPAEKPVEDVTHLTTPVFDAPKHNSVPETTKQKETPPPPVQQKQKPIRRKPKKQIEKKPKVPTGKPDDLKLRVQTWLKQQIQSYHDSGNSFQRLEWILDVLTAAIHKASAGDEQAITKIEKRSPPLETEQGEMSTQTDPKKRQPKEKGSDNKHTVNHRDLYYQNRPKTFNMIIGKDSKKCEIPIDTLQTFFEGTTAETNIPIEVLNEMGSRLPKLQALEWMEANFTQNEVSDAMKKTKDTAPGVDGLRYHHLKWFDPNYELLTLLYNECKIHRKIPNHWKEAETILLYKGGDEHKPDNWRPISLMPTIYKLYSSLWNRRIRSVNGVMSKCQRGFQEREGCNESIGILRTAIDAAKGKRRNLSVAWLDLTNAFGSIPHELIKHTLESYGFPQTVTDIVMDMYQGASIRIKNKTDKSDQIFIKSGVKQGDPISPTLFNMCLENVIRRHLDTSLGHKCINTRIKVLAFADDMAILAENRDQLQTELNKLDKDCESLNLIFKPVKCASLIIEKGRVNKNTHIVLRGKPIRNLDEKDSYKYLGINTGIETRVSTMTLLETVTKEMDLVNQSSLAQFQKLDCIKSFVLPKLTYMYANSTPKLTELKVFANMTMRAIKQIHSIPVKGSPLEYIQLPISRGGLGVACPKITALIAFLVNTMKKLWSSDNYIRKLYTDYLMEVARTEIVRRNINLQDVAEYLSNDTPIDKNAFGYNTFTRIRDVCNSLTNIQGAPLHKLKIVVKDDKLAILVQATKDGPEKVFTHVHEKKLQQMLKAEVNNALLHRFLTEKPVKSATTTVLLQHPQSNRFVRNGGKVSISAHKFVHRARLNQLACNFNAFGDNKSKECRRCGEALESQCHILQKCNFGLPKLITERHDSVLHRVANLIRNGSKKDWKLKIDKEQPGFNRLRPDIYLRSPDGKEIIMADVTCPYELSLENMHNAWNKKIRKYEEGFSHLQKLGKKLTVLPIVVGSLGTWWKPTTKSLVQLGIEQSTVNRVIPELCSMTLEYSKNIYWNHIYDDSFKKPPLQFGGDKPKGNSWKKDKGTTIPTSSN

SEQ ID NO: 14960 - protein, 1286 aa, Caenorhabditis brenneri
MYQIYGINWFMSLMQDPKLVYFLPICENKHWVLITMNQTQIWYGDSNHQEPCAIISNFITQTKRQLQHFLTPAPRQLDGVNCGVHVCLMVKTIVNNTPWHTEEDVKRFRSDMKTRLREKGYNLYSERIIDATMKPTQSQTLDNNITQDDDVIFIPQDEGNTTIDLEPSTQITMESDQSHTDDFGFLDKSVNLISEEVNNTTIDIEPPTSITIESNNSHTDDFGFLDENLTSQEVNNTTYTTTPAEKPVEDVTHLTTPVFDAPIHNSVPETTNQKETPPPTVQQKQKPIRRKPKKQIEKKPKVPTGKPDDLKLRVQTWLKQQIQSYHDSGNSFQRLEWILDVLTAAIHKASAGDEQAITKIEKRSPPLETKQGEMSTQTDPKKRQPKEKGSDNKHTVNHRDLYYQTRPKTFNMIIGKDSKKCEIPIDTLQTFFEGTTAETNIPIEVLNEMGSRLPKLQALEWMEANFTQNEVSDAMKKTKDTAPGVDGLRYHHLKWFDPNYELLTLLYNECKIHRKIPNHWKEAETILLYKGGDEHKPDNWRPISLMPTIYKLYSSLWNRRIRSVNGVMSKCQRGFQEREGCNESIGILRTAIDAAKGKRRNLSVAWLDLTNAFGSIPHELIKHTLESYGFPQIVTDIVMDMYQGASIRIKNKTDKSDQIFIKSGVKQGDPISPTLFNMCLENVIRRHLDTSLGHKCINTRIKVLAFADDMAILAENRDQLQTELNKLDKDCESLNLIFKPVKCASLIIEKGRVNRNTHIVLRDKPIRNLDEKDSYKYLGINTGIETRVSTMTLLETVTKEMDLVNQSSLAQFQKLDCIKSFVLPKLTYMYANSTPKLTELKVFANMTMRAIKQIHSIPVKGSPLEYIQLPISRGGLGVACPKITALIAFLVNTMKKLWSSDNYIRKLYTDYLMEVARTEIVRANINLQDVAEYLSNDTPIDKNAFGYNAFTRIRDVCNSLTNIQGAPLHKLKIVVKDDKLAILVQATKDGPEKVFTHVHEKKLQQMLKAEVNNALLHRFLTEKPVKSATTTVLLQHPQSNRFVRNGGKVSISAHKFVHRARLNQLACNFNAFGDNKSKECRRCGEALESQCHILQKCNFGLPKLITERHDSVLHRVANLIRNGSKKDWKLKIDKEQPGSNRLRPDIYLRSPDGKEIIMADVTCPYELSLENMHNAWNKKIRKYEEGFSHLQKLGKKLTVLPIVVGSLGTWWKPTTKSLVQLGIEQSTVNRVIPELCSMTLEYSKNIYWNHIYGDSFKKPPLQFGGDRPKGNSWKKDKGTTIPTTSN

SEQ ID NO: 14961 - protein, 1870 aa, Caenorhabditis brenneri
MPVCISDCVHLVSAEGDTMNGRSTCGPLSRSSSVVSRSRSSPSPSVPPHPSPSTSPDTGLSAGIIGTSRGCSLWLPEVDNALSQWLRKGLERDHEVLVCGFEAAKPLSLSKARLPRKTPRNTGVVRHILEFDGRLVHTNCNETECVLSTLCSEEAVEVVRISLKCEPREPCEPKCILSILCSDKIVWISFECELCEPFPFFTDRKFREPIPFVFERMYDPRDPIPSFICWMYDLRQRMTPGILPSNPLSPKNKDSWGRPAVIKNEIRSMRSYLEENVKENRLNLLRRLRGGGEGKKMIRKLVAEKKSDTEAVCRILYPLDDRYECFVDGCETTSTMGYGSSDLKYMTTHIKKEHGVKVQWTYECSLCNKQAPFMGGAASKWVTAHMATKHTQTAKLKLKPSISTTAKVAAKLDEIAVSLPKPRQVRVLRDPDEVKEKVVKPTLASTREEVKRNALRNMAPLVELSSQNQLTGAERPEETSEAIRLQECRTPEKIAELEGKIQTRTVTKKLSALKESMEKRTREEKVGKPSLAPIQEEVKKTARRSLAPLVEPSTFTHLTGASRLQAVRDAFSKANKDAAAKRRSSLAKPARLSEIMNTTFTKETVNETKEPVNDTDESIATIQPQVRVYRFNTWCLDHETTREAWLTGEVVDWFMGKVTEKKDQYRVFDSLVWSMYKFHGVEYVLDLMRDPLTYFLPICEHDHWVLLVIDEKGIWYGDSKGAEPCREIAKFIEETKRERRMFPVPVPLQRDGVNCGVHICLMVKSIVNGELWYTEEEVKVFRRNVKRSLKEFGFELYSEKIVYVRDDSIKVNEEHDDDVVFLSEETNNTTFTIEQAEDPAEEDAQHLESPVKPVKLMELKIPKIEIKKKEIRRKPKQQIEKKRKVPTGKPDELLVRVRLWLEREVQSYFDSGKRFQRLEWILDVLTAAIHKATAGDEQAIERIEKRSPPLEVEEGEMSTQTEPKKRERKEKESGCEMKASHKEMYFKNRSKAFNVIIGKDSKQCEIPIETLQKFFEGTTAETNVPAEVLKEMGSRLPKLEALDWMEANFIESEVSDAMKKTKDTAPGVDGLRYHHLKWFDPEYKMLTLLYNECKNHRKIPSHWKEAETILLYKGGDETRPDNWRPISLMPTIYKLYSSLWNRRIRSVGGVMSKCQRGFQEREGCNESIGILRTAIDVAKGKRRNLSVAWLDLTNAFGSVPHELIKSTLESYGFPEMVTEIVMDMYRGASIRIKSKNEKSEQIVIKSGVKQGDPISPTLFNMCLENVIRRHLDSASGHRCIKTKVKVLAFADDMAILAENRDQLQTELNKLDKECESLNLIFKPVKCASLIIERGMVNKNAEVVLRGKPIRNLDENGSYKYLGVHTGIATRVSTMQLLESVTKEMDLVNQSGMAPFQKLDCLKTFVLPKLTYMYANAIPKLTELKVFANLTMRMVKEIHEIPIKGSPLEYVQLPPSQGGLGVACPKITALITFLVNVMKKLWSSDSYIRKLYRDYLDEVAETETGMEEMTKEDIAKYLSGDVPIDKKAFGYNTFTRVRDVCNSLTKIVGAPLHKLKIVERDGDFAILVQATKEGMEKIFTCAQEKKLQQLLKAEVNTALAHRFFTEKPVKSAVMSVMRQYPQSNAFVKNGKNVSIAVHSWIHKARLNALHCNFNTYGENKSKVCRRCGKDVETQLHILQTCEYGLPKLINERHDAVLHVVRNLIRKGSKKDWKLKIDETVSSCNQLRPDIYMCSPDGKEIIMADVTCPYESGMQAMQESWNRKVTKYEGGFSHFHKMGKKFTVLPIVIGSLGTWWKPTTNSLVQLGIEKDTIRRVIPELCSMTMEYSKDVYWNHIFGDTFRKPPMRFGVEKPKGNSWKKEDSEPKGAASSD

SEQ ID NO: 14962 - protein, 1018 aa, Onthophagus taurus
MATHSRQSAQNGTGGGSSNQVVNLYNCESEGCGKSFSTQIGLGLHRSRAHRDEYNRDIRIPVRKVRWSAQDVTLLARLEAELIHRQGGVPDDINLRLVEEMPNRTFDSIKSQRKRATYRAILQEEIAKLSAVTTESAPTTEIPREVTSNEIEADHRGIVAKVAELAATVKPDSDMHKDLLHLAHEFVRGESYVELLNEFLRRHFLVPPRRQQHQSRGERRILTKRAQRREDYAKMQDLFRKNRSACARMVLDGASSVNIQDDSKFTDYWARMMTTPPPELLENREVESNAAFQHLAEPISVKEVCCALKGPAKAIGPDGVDLRKLRQTSISALCCIMNIIYASPVPDPHRAARVVFIPKTAEASGPEHFRPISVGSYLQRVLNKILARRMQATLDILALQRAFRPFDGTYENLNIIDAVIRDARRSRRELRLASLDLRKAFDMVSHDSIVNALTSRGYPKFFTRYVKNLYERSTTVISYGVSTRNIAPTRGVRQGDPLSPILFNLVLDEVFQSLSKEGFGYDTGVERILGVAYADDVILAADSKATLQRLLDTAVPMLEKRGLSINVDKSFSVTLVAAGKVKKVKVIDTPEFKIAGGLLPCRGVDAMWKYLGIMFDDRGRLPPNCASLSDFLDRISAAPLKPAQRLIILKDYLVPRFMHRLICSQTPTAKLLREYDQRIRNVVKRKWLHLDSSIPTGFLYAKNAHGGLGLPCLLTSVPRTRLARMMKLAASDHLAVNWACSTEGFIADMAKTKALCKQLQCTIENAQQESEYWARRLYDTFDGRHMRDAAKVPYVHRWLFGMPYLSGREFVNLVKCRINALPTRARLARGRPLYNDRCRHGCDQVETLNHVTQICGSTHRATVKRHDDICGYIAKSLRKFGHEVQREKLYRVPGCPGLKPDLVVITSNQVHVLDVEICGTSRDLRRARNDKICKYKVDWLANLLPCPEKKRVYGTITVSSTGIWNPDSAIDLMYLGFTKARLVDLTVQVIQGTLRTFRIFMEFKERRLGTRRTTRRVP

SEQ ID NO: 14963 - protein, 1317 aa, Panagrolaimus sp.
MKPFYQNLDNMSISASRSSTLLWSSEDDQIVIDACIDCRSSVTGFVSWAKALPLIRTAIKGRTDTAIKKRWQALKNQRNFNVPERRQSGTGTAARSIPTVVGVPTQQRPSNNENGTGSVDIDSSSSEDEPPRINPRVHTGLTSSSEDTSADERSENKITKKANSPSSDDSSVEESELNETYTVLPRTEDRESVERVVDDSGADVDRIDLSHMDLDSYYSSNLILGELGEPSKDPNQTDMSDHDSMRIIDPDDYDPISESLQNRCNVGVDSTSEESPVADDFEIYYDKVKKAFESVIGFTRRRTERRRLPVKELTDCESRAVNNLIMTAWNKGSNKSVSDQILSLNETLYAAVLAVSKYRKNSDSGHEKWLKNKQREIIKTRQTIGWAVTEQKIRALDDAKRTAKQEKGRQRVVREMRKVKSVDTEGFIAMMKDRLLCLKTEVLQRVKDHERKCLRIGAGACPNLKKFRKNPETGGGGGGLSVETATNFWKKLASPGRATNFEDPIIKDWLNAIREDCKSDPALDIEFRTAFKKASNWKAPGPDGIHNYYWKYVDSARRWLMSIFGRMLNNKVKCPYWLCRGRTVLLSKGGDPMDPSKYRPITCLNTCYKLLTGSMATYIHNRVKDTVAFPVEQRALRKREWACLIAQIKDLAISLDASQQRKRCIYVSWIDEEKAYDSIAHDLLIEMIKSLNLPSGFEYFLLSLIERWATRIEMFERGRIRIGRYYRILRGLLQGDSMSPLLFIILSSILSFWLNKHSKVVPKTQVMIYPEMTFNHQLYVDDLKLYARLCADLRVLWKTTNKVNHAIGMKINLAKSAATAKISLGDSSDPIPHLGAGQSYKYLGIAQLLRCDWDKTLQSLKEKIRTKCVEIFDNDLTVRQQITLYNAGVISMASYVFLNSFPKGKYASLIADAKDIDKEVRQILVHYKVRQQSSIVQRLYLDSDKLGLGLRSCEFEILTSTIIRGWYIQTEPQLKGPLNLFNTMTSRNKRNPISDMKVALNELNITDIEYVEAINSPKPSKSLRRLCHDKYQDILITKLKETRFYDRYFRNEILDITNSCIWMRFGKMNSVSLRNAMAVQEIQLTTKSHYSNMDNDKSCRICRNAVETPMHILTVCEHWLNTLITIRHDAIGRDIYYRMNRFLKLEPIRHDRKIPSKVICGKYELYWGYPQQTVSPLHHTRPDIVLVDHERKICLLVEIACVNPANIAGQEKVKRIRYSVNGEVKITTENMDTISNGNCLTAELTRKWNLRDIQLAVIVMGVCGEVSKNFSKEIDKILKFLELQGNTKVRTDLIERCQRSAVIGSSRIIKNHMVREA

SEQ ID NO: 14964 - protein, 1069 aa, Euglossa dilemma
MVKVRSHLLVGPAGNSLLWREAKTTSANTDPGGCQPSRSYSVGPKHINKPRIRIAKVGGPSGSSDPTTTERPSEAGNDISDSTMAHKCRVCEQRFKTPRGRGVHEQKKHKDWYDTNQLESVVNKKAHWSSEEAALLARQEAHLTYNGERFINQALLPYFPNRTIEAIKGQRRYANHKKKVLEIIQELDQPDIPQENQAEPGEQHPENAGTCLVDEISDIFSKLSPLQGTEFHTEHINQICANIKNWPVNRISEELEIYLLKIFPLPSPPGTTQKHSGRKHKTGNTTKRQQRRAQYALTQRAWRKNPYQCLRAILKKETAVNTPNKDTMVSFWRTVMTNDNSTTPGIKQVQQTIRALWEPIDCTEVKKAYPEIATAPGPDGVTSRQLRSMPVGLLTRILNLFMLCGKLPKHLLESRTTLIPKKETASEPGDFRPITISSVITRTHHKVLANRLLQHIDLDTRQKAFTPADGCAENTFLLDMVLRHHRQSFKSIYVASIDIAKAFDSVSHKTINDTLITMGLPGPMISYINHIYECSRTRLKCGDWTSDEIHPKCGVKQGDPLSPIIFNMVIDRLLRLIPTEIGVDIDGKHYNVFAFADDLIFIASTPQGLQQTLDLAVNFLSQCGLTINTNKSFTVAMRNVPHKKKSVVDVNTKFHCLGRTMPSMKRSDEWKYLGVPFTPEGRSIYEPERRITEDLETLTKAPLKPQQRLFALRTMILPSLYHILALGNTTLSRLKKVDASVRGAVRKWLSLPHDTPNAYIHASVKDGGLSIPSMRWLMPLRRKERLKGLIKRGVNPGPFISQEINITIRRLKDGHTDIDHRQKLEERWARLLHGTVDGAALKYSKNVPQQHRWIVEGNMFLSGKDFVNSAKMRINALPTRSRTTRGQRQDRLCRAGCNEMETLNHVLQRCHRTHATRIARHNAVAAYVKRALEKKYEKVDEEPHFNTDSGLRKPDLVAKHKDTAMVLDAQVVSEQTDLAKAHQKKIEYYKGLEETIKAKYRVTNVKFTSITLSCRGIWCRQSAEDLVEAKILKKSEMKVLSSRVLIGGINAFWTFNKATSVARKKTGIG

SEQ ID NO: 14965 - protein, 883 aa, Osmia bicornis
MSEPDVPQEEQAATEEQHSGEAGTCLINEISELFTVLNPLQGMDYHVSHLNGICENIKNWPVNRIFEELEIYLLKVFPAPTRTTQRKSDARKRTPKNGITKRRLRRAEYAQTQRAWRKNPFQCLRSILKRKTATNTPNKDVMTSFWRTVMTNDSSETPGTEHELQTIQALWKPIHSWEVKKAYPAITTAPGPDEVTSRQLRAMPLGILIRILNLFLLCGKIPKRLLESRTTLIPKKETASEPGDFRPITVSSVIARTFHKILANRLLRLVELDARQKAFNPVDGCAENVFLFDMILRHHRQNFKPLYLASVDIAKAFDSVTHRTISDTLVTKGLPGPMISYINYIYENSTTKLKCDGWISDEIHPKCGVKQGDPLSPIIFNMVIDRLLRQIPKEIGVDIAGIHYNVFAFADDLIFIASTPQGLQQTLDLAVKFLAQCGLVINTNKSFTVAMRNVPHMKRSVVDVNTKFQCLGRTMPAMKRSTEWKYLGIPFTPEGRSVFEPEQKLKDDLKVLTRAPLKPQQRLFALRTMVLPGLYHILTLGNTTLSRLKKVDTLVRGAVRKWLGLPHDTPNAYVHANAKDGGLSIPSMRWLMPLRRMERLEGLTKKGVGLGPFISQEISIAIRRLKDGQIIMDNRQKLEKRWAKILHESADGIALKYSRKVPQQHQWITEGNMFLSGRDFVNSAKLRINAMPTRSRTTRGRREDRLCRAGCNEKETLNHVLQRCHRTHGARVARHNAIAAYVKRALSKNAEIVDEEPHFNTENGLRKPDLVAKQKDTAMVVDAQVVSEQTDLNNAHEKKKEYYKELEEAIKTKYITTRVIFTSATISCRGVWSEQSAEDLVKTKILRKKELKVLSSRVLIGGINAFWIFNKSTSIARRRTGIG

SEQ ID NO: 14966 - protein, 883 aa, Osmia bicornis
MSEPDVPQEDQAATEDQNSGEAGTCLVNEIYELFTVLNPLQGTEYHISHLNEICENIKSWPVNRTFEELEIYLLKVFPASKGTTQRKNDARKCTPKKVITKRRLRRAEYAQTQRAWRKNPFQCLRSILKRKTATNTPNKDVMTSFWRTVMTNDSSETPGTEHELPTIQALWKPIEFWEVKKAYPAITTAPGPDEVTSRQLRAMPSGILIRILNLFLLCGKIPKRLLESKTTLIPKKETASEPGDFRPITVSSVIARTFHKVLANRLLRLVELDERQKAFMPVDGCAENVFLFDMVLRHHRQNFKPLYMASVDIAKAFDSVTHRTINDTLVTKGLPGPMISYINYIYENSTTRLKCDDWISDEIHPKCGVKQGDPLSPIIFNMVIDRLLRQIPKEIGVDIAGIHYNVFAFADDLIFIASTPKGLQQTLDLAVNFLAKCGLLINTNKSFTVAIRNVPHMKRSVVDANTKFQCLGRTMPAMKRSNEWKYLGIPFTPEGRSVFEPEQRLKDDLEVLTRAPLKPQQRLFALRTMILPSLYHILTLGNTTLSRLKKVDTLVRGAVRKWLGLPHDTPNAYIHANVKDGGLSVPSMRWLMPLRRMERLEGLTKKGVGLGPFISQEINIAIRRLKDGQMIMDTRPKLEKRWARVLHQSIDGMALKYSRKVPQQHQWITEGNMFLSGRDFVNSTKMRINALPPRSRITRGRREDRLCRAGCNEKETLNHVLQKCHRTHGARVARHNAIAAYVKRALSKKSEIVDEEPHFNTENGLRKPDLVAKLKDTAMVVDAQVVSEQTDLNNAHEKKIEYYKELEEAIKTKYRTTKVIFTSATISCRGIWSERSAEDLVKAKILKKKELKVLSSRVLIGGINAFWVFNKTTSIVTRRTGIG

SEQ ID NO: 14967 - protein, 1098 aa, Schmidtea mediterranea
MSSFFNTFPFEYFDRWDYVFWPIHWNGNHWLLYIADNINKSSLLLDPLTHCLSKEQLEFQSLLTNLVNKINNFIPNINNDNIVNNTNNNHPLQNNSYDCGVFICQFAFDYATSTTPIVFKIPEVYKIRNTISQIISTKLNNENELINEIKSGNRPKLYKRNRSSNFKIKVTKAKPLIHPLLVQLIRQLKELKINLTLTLDKIRDLVLSKNRKNFKVTTPLNNFYQNKNENIHILRDLFDKKPKTAFDKITVDNNDHLSISLDNIEENFENKLIPVIDLASVFPIPYFAEDSMSSQMSAEEILLAFQSSSDTAPGSDSIKYSDWREIDPEFEFLTFFFNYIIEIGLIPEQWRTFKTLLIIKPNKAHLANDISSYRPIAILDTSYRIFTKVLNRRLLGWIKNGNLLSKSQKGIIHPDGCSEHNFIITSLREMTNRKNYKKKSKLAELHLCYLDLADAFGSLPHELLWFTLKKLGLNTSTLTLFKNLYTDCKSVFICDHMNSKPIKVTKGVKQGCPLSMTLFCLSIDFIFKRIEKLNPDFTLQNINLNSLAYADDIVLIANSFDNIENLLREVYSLASKVGLEFRANKCGYYSSKLNQNYALKIGNDSIPNIANNDTYDYLGVPFGESKRQNIEKVIALNLSYFNKINKSILSPPQKIKALKLFLQSRLPFHLRNRVIDIQTLSSPHGRQGTNLERDIGYDEKIRHGLKSLFNIPSSLLNNSFLYAHTALGGLGITCANEDYMVQNVVHAFHLFTSKDTNIKHISIEELKSTVKSRNGGINPTERVALDWINGGSFNEGHVATWFTKVRKSIRDLKSKLNIIIKFKINENQVEMQIEAPSLQNNKAFFNYENKLDICHYLHELIGIIHFHKWNNCKSQGRLAQCISQSKLSNKLIIDGKMNDSDWLFAIKARNNILQLNYSAYRSLKNLDLKCRKCKAERESQAHILCHCNKDGRIKRHNRIQNLLAKILIDNNLVVDIDTKPFLTEINERPDLIITRNADKKIHLVDIKSPYDLVKNFDEARNNNLKKYAAIRNDLGSNTGFDVTLDTIVVGALGSWDPRNEDVLKMLGLSQDKIKCFAIDSCREAIKASHNMYKLHIMN

SEQ ID NO: 14968 - protein, 942 aa, Bembecia ichneumoniformis
MSNSDKVSCPYCPGCSRLFDTSRGLRVHIGHKHKEEIAAGLLLPSQSQSSQSHDDAPLPRRLDSLSQLKKTVRVLRHIPKGARNLAASRLCSIIDKCLFSNSAKDWFSLLSFAFTALRVPEKDGSVTLTAKVKRNIESSTCSDFSENTTKFRSTSVLGSIESKVHEGDLRGAVRLLMSDDSFAGSDPETLAALRSKHSTPSRPLDFPAAPDRSIPTLTVNKEDIASALSTFYSGSSSGLDGLRPEHLKELTSKSAGDHGPRLLSCLTKLCNFLFSGELNPEVCPFMYGATLCALSKKDGGIRPIAIGNTFRRLTAKLGCRAVRNTMADHLHPHQLGFGTRLGCEAAVHATRTFATEPENSGCVIIKLDIKNAFNCLERDVLLLEVRNKIPSLYAFLYQVYHSPSNLFFGDDLILSQVGVQQGDPLGPLIFSLAIHDIISELKSPLNIWYLDDGTIAGRPEVVEQDILTIIPRMKEIGLEVNTAKCEFFPCSSKSRSCFSLFENHIPGLVELNENSFNLLGSPIFPSGIPEAIKLRGALLTRAHERLQYISPHVAIVLLRSCFSAPKVTYLLRTTPTWLHPQEVASFDNTLKNSLQRIANVELTDVQWMQAGLPIRHGGLGVRRIGDIGLPAFLASAHGSAGLIANILSIDGDETRIPFVAEALKEWHAANLNTPDAPDRQRSWDEVASRRSIERLISDAAGVDVARLKAVSRPESGAWLHAIPSPHLGTLLDSDSFRVAVALRLGCNVCEPHICICGTRVEANGHHALSCSRCSGRFPRHNALNDLLRRALVSANIPCVLEPPGLSRSDGKRPDGLTLIPWQRGRCLIWDATCVSTFAPSHLAHTLRVAGSAAESAASIKRIKYAMLEQKYEFIPFAVETAGPWCSEAKVFVKDIGHILRVRGDDPRSASFLVQRISIAIQRGNAASVMGTFAPGTMAGGIF

SEQ ID NO: 14969 - protein, 766 aa, Bembecia ichneumoniformis
MSDDSFAGSDPETLAALRSKHSTPSRPLDFPAAPDRSIPTLTVNKEDIASALSTFYSGSSSGLDGLRPEHLKELTSKSAGDHGPRLLSCLTKLCNFLFSGELNPEVCPFMYGATLCALSKKDGGIRPIAIGNTFRRLTAKLGCRAVRNTMADHLHPHQLGFGTRLGCEAAVHATRTFATEPENSGCVIIKLDIKNAFNCLERDVLLLQVRNKIPSLYAFLYQVYHSPSNLFFGDDLILSQVGIQQGDPLGPLIFSLAIHDIISELKSPLNIWYLDDGTIAGRPEVVEQDILTIIPRMKEIGLEVNTAKCEFFPCSSKSRSCFSLFENHIPGLVELNENSFNLLGSPIFPSGIPEAIKLRGALLTRAHERLQYISPHVAIVLLRSCFSAPKVTYLLRTTPTWLHPQEVASFDNTLKNSLQRIANVELTDVQWMQAGLPIRHGGLGVRRIGDIGLPAFLASAHGSAGLIANILSIDGDETRIPFVAEALKEWHAANLNTPDAPDRQRSWDEVASRRSIERLISDAAGVDVARLKAVSRPESGAWLHAIPSPHLGTLLDSDSFRVAVALRLGCNVCEPHICICGTRVEANGHHALSCSRCSGRFPRHNALNDLLRRALVSANIPCMLEPPGLSRSDGKRPDGLTLIPWQRGRCLIWDATCVSTFAPSHLAHTLRVAGSAAESAASIKRIKYAMLEQKYEFIPFAVETAGPWCSEAKVFVKDIGHILRVRGDDPRSASFLVQRISIAIQRGNAASVMGTFAPGTMAGGIF

SEQ ID NO: 14970 - protein, 766 aa, Bembecia ichneumoniformis
MSDDSFAGSDPETLAALRSKHSTPSRPLDFPAAPDRSIPTLTVNKEDIASALSTFYSGSSSGLDGLRPEHLKELTSKSAGDHGPRLLSCLTKLCNFLFSGELNPEVCPFMYGATLCALSKKDGGIRPIAIGNTFRRLTAKLGCRAVRNTMADHLHPHQLGFGTRLGCEAAVHATRTFATEPENSGCVIIKLDIKNAFNCLERDVLLLEVRNKIPSLYAFLYQVYHSPSNLFFGDDLILSQVGVQQGDPLGPLIFSLAIHDIISELKSPLNIWYLDDGTIAGRPEVVEQDILTIIPRMKEIGLEVNTAKCEFFPCSSKSRSCFSLFENHIPGLVELNENSFNLLGSPIFPSGIPEAIKLRGALLTRAHERLQYISPHVAIFLLRSCFSAPKVTYLLRTTPTWLHPQEVASFDNTLKNSLQRIANVELTDVQWMQAGLPIRHGGLGVRRIGDIGLPAFLASAHGSAGLIANILSIDGDETRIPFVAEALKEWHAANLNTPDAPDRQRSWDEVASRRSIERLISDAAGVDVARLKAVSRPESGAWLHAIPSPHLGTLLDSDSFRVAVALRLGCNVCEPHICICGTRVEANGHHALSCSRCSGRFPRHNALNDLLRRALVSANIPCVLEPPGLSRSDGKRPDGLTLIPWQKGRCLIWDATCVSTFAPSHLAHTLRVAGSAAESAASIKRIKYAMLEQKYEFIPFAVETAGPWCSEAKVFVKDIGHILRVRGDDPRSASFLVQRISIAIQRGNAASVMGTFAPGTMAGGIF

SEQ ID NO: 14971 - protein, 942 aa, Bembecia ichneumoniformis
MSNSDKVSCPYCPGCSRLFDTSRGLRVHIGHKHKEEIAAGLLLPSQSQSSQSHDDAPLPRRLDSLSQLKKTVRVLRHIPKGARNLAASRLCSIIDKCLFSNSVNDWFSLLSFAFTALRVPEKDGSVTLTAKVKRNIESSTCSDFSENTTKFRSTSVLGSIESKVHEGDLRGAVRLLMSDDSFAGSDPETLAALRSKHSTPSRPLDFPAAPDRSIPTLTVNKEDIASALSTFYSGSSSGLDGLRPEHLKELTSKSAGDHGPRLLSCLTKLCNFLFSGELNPEVCPFMYGATLCALSKKDGGIRPIAIGNTFRRLTAKLGCRAVRNTMADHLHPHQLGFGTRLGCEAAVHATRTFATEPENSGCVIIKLDIKNAFNCLERDVLLLEVRNKIPSLYAFLYQVYHSPSNLFFGDDLILSQVGVQQGDPLGPLIFSLAIHDIISELKSPLNIWYLDDGTIAGRPEVVEQDILTIIPRMKEIGLEVNTAKCEFFPCSSKSRSCFSLFENHIPGLVELNENSFNLLGSPIFPSGIPEAIKLRGALLTRAHERLQYISPHVAIVLLRSCFSAPKVTYLLRTTPTWLHPQEVASFDNTLKNSLQRIANVELTDVQWMQAGLPIRHGGLGVRRIGDIGLPAFLASAHGSAGLIANILSIDGDETRIPFVAEALKEWHAANLNTPDAPDRQRSWDEVASRRSIERLISDAAGVDVARLKAVSRPESGAWLHAIPSPHLGTLLDSDSFRVAVALRLGCNVCEPHICICGTRVEANGHHALSCSRCSGRFPRHNALNDLLRRALVSANIPCVLEPPGLSRSDGKRPDGLTLIPWQRGRCLIWDATCVSTFAPSHLAHTLRVAGSAAESAASIKRIKYAMLEQKYEFIPFAVETAGPWCSEAKVFVKDIGHILRVRGDDPRSASFLVQRISIAIQRGNAASVMGTFAPGTMAGGIF

SEQ ID NO: 14972 - protein, 942 aa, Bembecia ichneumoniformis
MSNSDKVSCPYCPGCSRLFDTSRGLRVHIGHKHKEEIAAGLLLPSQSQSSQSHDDAPLPRRLDSLSQLKKTVRVLRHIPKGARNLAASRLCSIIDKCLFSNSVNDWFSLLSFAFTALRVPEKDGSVTLTAKVKRNIESSTCSDFSENTTKFRSTSVLGSIESKVHEGDLRGAVRLLMSDDSFAGSDPETLAALRSKHSTPSRPLDFPAAPDRSIPTLTVNKEDIASALSTFYSGSSSGLDGLRPEHLKELTSKSAGDHGPRLLSCLTKLCNFLFSGELNPEVCPFMYGATLCALSKKDGGIRPTAIGNTFRRLTAKLGCRAVRNTMADHLHPHQLGFGTRLGCEAAVHATRTFATEPENSGCVIIKLDIKNAFNCLERDVLLLEVRNKIPSLYAFLYQVYHSPSNLFFGDDLILSQVGVQQGDPLGPLIFSLAIHDIISELKSPLNIWYLDDGTIAGRPEVVEQDILTIIPRMKEIGLEVNTAKCEFFPCSSKSRSCFSLFENHIPGLVELNENSFNLLGSPIFPSGIPEAIKLRGALLTRAHERLQYISPHVAIVLLRSCFSAPKVTYLLRTTPTWLHPQEVASFDNTLKNSLQRIANVELTDVQWMQAGLPIRHGGLGVRRIGDIGLPAFLASAHGSAGLIANILSIDGDETRIPFVAEALKEWHAANLNTPDAPDRQRSWDEVASRRSIERLISDAAGVDVARLKAVSRPESGAWLHAIPSPHLGTLLDSDSFRVAVALRLGCNVCEPHICICGTRVEANGHHALSCSRCSGRFPRHNALNDLLRRALVSANIPCVLEPPGLSRSDGKRPDGLTLIPWQRGRCLIWDATCVSTFAPSHLAHTLRVAGSAAESAASIKRIKYAMLEQKYEFIPFAVETAGPWCSEAKVFVKDIGHILRVRGDDPRSASFLVQRISIAIQRGNAASVMGTFAPGTMAGGIF

SEQ ID NO: 14973 - protein, 1391 aa, Ennomos quercinarius
MESRQSRYHLRSLPGGDRRGASGAGAGCHSMRTIGSGESSRRASVSSVSRARDTRVDATAEKQTQQTHTPLSPSSTQSLFDSPVTSPLSFELQYRTRFLSTSTTVSEDVVQEAPAINPAPTTEKTRARKKWTSEMNEHIWRTYLIVTELETKARGYLDPLHRQFIEKFPEMDVSKQRVGDQRRAIVRNNLIAMSTREAIKTNVVQFLQNPNLRQVLNPDNDQQLSNPVSQTNNTGTRMRWTDDLNEAIIRTYLKITQLETNRTAYRKALHASILEQYPNLSHLTEQRVADQRRVIINNKLVTEERLQEIRLEVEQSLNRQTHEESVNNNSLHELHETLIATNDTLSDLRIEPTEIENSSLTPDTQVTNTQNQINTEQHYDEHLNKKIIESFRTAYDNFIDTEPTQRPYIPKQKPSKRLSYIITFIDTQILPKYISTEDNFNTTHTLIYCAAYTTAICNGSKIKQFEENNQRMTGQVVTPHWQIRLENKIQKLREDIGRMTQYNRGNRSSRLVLHIDHIKEKYQIHSRHENPNETNEEFLDSLKQKLNATCSRLRRYTNCTLRKNQNIQFNNNEKPFYRNLTIETANLRENNDNNSEAVLPSAEIFHQFWSNIWATPVSHNDKADWITEETKKLDTVPQMQYQHLPVETFINVLKKTHNWKTPGTDHIHNYFYKKLKTMHPMLHNHICEFIQSPENMPGFITQGINFMIPKDKNIDNVSKYRPITCLQTIYKIITASIAQLINDHIITNNILAQEQKGCRKGSQGCKEQLLIDSIAMKHNITNKRDICTMYIDYRKAFDSIPHTWLTYILRHYKIHPTIVTFLSNAMQNWQTRLEIRNKDHPIQTDFIPIKRGIFQGDALSPLWFCLALNPLSNLLNNTNNGLAITTNDSNFKLTHLMYMDDIKLYSNTTSSLHDLADITQRFSRDINMEFGIDKCKTFTLHKGRIIKSDDYVLDSGEHVDPLDYNETYKYLGFQQSRQIHQKQTKTDITRKYKHRLNVIAKSQLNSTNLFKAINSFAIPILTYSFGIIKWSTTDLKKLQCLINKTLTTHRKHHPRSCTQRLTLPRSEGGRGLIDAVNLQITTLRNFFYEQAEHSQLHKTMVDSDKKFTPLNLHDKNIQRNQHITDIKDKIRTWEQKSLHGRHRHALQQEHIDKSASNAWLKRGELFPETEGFMLGIQDQVIDTGNYQRYIIRRPNYNDKCRHCHSASETIQHITGACKSIAQTDYKHQHDQVAAIIHQFLALKYNLITEKLPYYKYTPQTVLENTNYKLYWDRTIITDKAVHYNRPDITVLNKQMKTVYLIDVAICNTHNLNATHTEKIAKYTDLSIEIKTQWRVNATRTIPIIISTTGVIPKTLHTSLSTLCIPPTSFILLQKAVILNTCRIVRKFLTNC

SEQ ID NO: 14974 - protein, 1394 aa, Ennomos quercinarius
MESRQSRYHLRSLPGGDRRGASGAGAGCHSMRTIGSGESSRRASVSSVSRARDTRVDATAEKQTQQTHTPLSPSSTQSLFDSPVTSPLSFELQYRTRFLSTSTTVSEDVVQEAPAINPAPTTEKTRARKKWTSEMNEHIWRTYLIVTELETKTRGYLDPLHRQFIEKFPEMDVSKQRVGDQRRAIVRNNLIAMSTREAIKTNVVQLLQNPNLRQVLNPDNDQQLSNPVSQTNNTGTRMRWTDDLNEAIIRTYLKITQLETNRTAYRKALHASILEQYPNLSHLTEQRVADQRRVIINNKLVTDERLQEIRLEVEQSLNRQTHEESVNNNSLHELHETLIATNDTLSDLRIEPTEIENSSLTPDTQVTNTQSQINTEQYYDEHLNNKIIESFRTAYDNFIDTEPTQRPYIPKQKPSKRLSYIITFIDTQILPKYISTEDNFNTTHTLIYCAAYTTAICNGSKIKQLQENNQRMAGQVVKPHWQIRLENKIQKLREDIGRMTQYNRGNRSFRLVLHIDHIKEKYQIHSRHENPNETNEEFLDSLKQKLNATCSRLRRYTNCTLRKNQNIQFNNNEKQFYRNLTIETANLRENNNNNSEAVLPSAEIFHQFWSNIWATPVSHNDKADWITEETKKLDTVPQMQYQHLPVETFINVLKKTHNWKTPGSDHIHNYFYKKLKTVHPMLHNHICEFIQSPENMPGFITQGITFMIPKDKNIDNVSKYRPITCLQTIYKIITASIAQLINDHIITNNILAQEQKGCRKGSQGCKEQLLIDSIAMKHNITNKRDTCTMYIDYRKAFDSIPHTWLTYILRHYKIHPTIVTFLSNAMQNWQTRLEIRNKDHPIQTDFIPIKRGIFQGDALSPLWFCLALNPLSNLLNNTNNGLAITTNDSNFKLTHLMYMDDIKLYSNTTSSLHDLADITQRFSRDINMEFGIDKCKTFTLHKGRIIKSDDYVLDSGEHVDPLDYNETYKYLGFQQSRQIHQKQTKTEITRKFKHRLNVIAKSQLNSRNLFKAINSFAIPILTYSFGIIKWSTTDLKKLQCLINKTLTTHRKHHPRSCTQRLTLPRSEGGRGLIDAVNLHNSQITTLRKFFYEQAEHSQLHKTMVDSDKKFTPLNLHDKNIQRNQHITDIKDKIRTWEQKSLHGRHRHALQQEHVDKSASNAWLKRGELFPETEGFMLGIQDQVIDTGNYQRYIIRRPNYNDKCRHCHSASETIQHITGACKSIAQTDYKYRHDQVAAIIHQILALKYNLITEKLPYYKYTPQTVLENTNYKLYWDRTIITDKTVHYNRPDITVLNKQMKTVYLIDVAICNTHNLNATHTEKIAKYTDLSIEIKTQWRVNATRTIPIIISTTGVIPKTLHTSLSTLCIPPTSYILLQKAVILNTCRIVRKFLTNC

SEQ ID NO: 14975 - protein, 1387 aa, Ennomos quercinarius
MESRQSRYHLRSLPGGDRRGASGAGAGCHSMRTIGSGESSRRASVSSVSRARDTRVDATAEKQTQQTHTPLSPSSTQSLFDSPVTSPLSFELQYRTRFLSTSTTVSEDVVQEAPAINPAPTTEKTRARKKWTSEMNEHIWRTYLIVTELETKARGYLRDPLHRQFIEKFPEMDVSKQRVGDQRRAIVRNNLIAMSTREAIKTNVVQLLQNPNLRQVLNPDNDQQLSNPVSQTNNTGTRMRWTDDLNEAIIRTYLKITQLETNRTAYRKALHASILEQYPNLSHLTEQRVADQRRVIINNKLVTEERLQEIRLEVEQSLNRQTHEESVNNNSLHELHETLIATNDTLSDLRIEPTEIENSSLTPDTQVTNTQNQINTEQHYDEHLNNKIIESFRTAYDNFIDTEPTQRPYIPKQKPSKRLSYIITFIDTQILPKYISTEDNFNTTHTLIYCAAYTTAICNGSKIKQLEENNQRMAGQVVKPHWQIRLENKIQKLREDIGRMTQYNRGNRSSRLVLHIDHIKEKYQIHSRHENPNETNEEFLDSLKQKLNATCSRLRRYTNCTLRKNQNIQFNNNEKQFYRNLTIETANLRENNDNNSEAVLPSAEIFHQFWSNIWATPVSYNDKADWITEETKKLDTVPQMQYQHLPVETFINVLKKTHNWKTPGSDHIHNYFYKKLKTMHPMLHNHICEFIQSPENMPGFITQGITFMIPKDKNIDNVSKYRPITCLQTIYKIITASIAQLINNHIITNNILAQEQKGCRKGSQGCKEQLLIDSIAMKHNITNKRDICTMYIDYRKAFDSIPHTWLTYILRHYKIHPTIVTFLSNAMQNWPTRLEIRNKDHPIQTDFIPIKRGIFQGDALSPLWFCLALNPLSNLLNNTNNGLAITTNDSNFKLTHLMYMDDIKLYSNTTSSLHDLADITQRFSRDINMEFGIDKCKTFTLHKGRIIKSDDYVLDSGEHVDPLNYNETYKYLGFQQSRQIHQKQTKTDITRKFKHRLNVIAKSQLNSRNLFKAINSFAIPILTYSFGIIKWSTTDLKKLQCLINKTLTTHRKHHPRSCTQRLTLPRSEGGRGLIDAVNLHNSQITTLRNFFYEQAEHSQLHKTMVDSDKKFTPLNLHDKNIQRNQHITDIKDKIRTWEQKSLHGRHRHALQQEHIDKSASNAWLKRGELFPETEGFMLGIQDQVIDTGNYQRYIIRRPNYNDKCRHCHSASETIQHITGACKSIAQTDYKHRHDQVAAIIHQFLALKYKLITEKLPYYKYTPQTVLENTNYKLYWDRTIITDKTVHYNRPDITVLNKQMKTVYLIDVAICNTHNLNATHTEKIAKYTDLSIEIKTQWRVNATRTIPIIISTTGVIPKTLHTSLSTLCIPPTSYILLQKSVILNTCRS

SEQ ID NO: 14976 - protein, 1157 aa, Ennomos quercinarius
MRWTDDLNEAIIRTYLKITQLETNRTAYRKALHASILEQYPNLSHLTEQRVADQRRVIINNKLVTEERLQEIRLEVEQSLNRQTHEESVNNNSLHELHETLIATNDTLSDLRIEPTEIENSSLTPDTQVTNTQNQINTEQHYDEHLNNKIIESFRTAYDNFIDTEPTQRPYIPKQKPSKRLSYIITFIDTQILPKYISTEDNFNTTHTLIYCAAYTTAICNGSKIKQLEENNQRMAGQVVKPHWQIRLENKIQKLREDIGRMTQYNRGNRSSRLVLHIDHIKEKYQIHSRHENPNEINEEFLDSLKQKLNATCSRLRRYTNCTLRKNQNIQFNNNEKQFYRNLTIETANLRENNDNNSEAVLPSAEIFHQFWSNIWATPVSYNDKADWITEETKKLDTVPQMQYQHLPVETFINVLKKTHNWKTPGSDHIHNYFYKKLKTMHPMLHNHICEFIQSPENMPGFITQGITFMIPKDKNIDNVSNYRPITCLQTIYKIITASIAQLINNHIITNNILAQEQKGCRKGSQGCKEQLLIDSIAMKHNITNKRDICTMYIDYRKAFDSIPHTWLTYILRHYKIHPTIVTFLSNAMQNWQTRLEIRNKDHPIQTDFIPIKRGIFQGDALSPLWFCLALNPLSNLLNNTNNGLAITTNDSNFKLTHLMYMDDIKLYSNTTSSLHDLADITQRFSRDINMEFGIDKCKTFTLHKGRIIKSDDYVLDSGEHVDPLDYNETYKYLGFQQSRQIHQKQTKTDITRKFKHRLNVIAKSQLNVRNLFKAINSFAIPILTYSFGIIKWSTTDLKKLQCLINKTLTTHRKHHPRSCTQRLTLPRSEGGRGLIDAVNLHNSQITTLRNFFYEQAEHSQLHKTMVDSDKKFTPLNLHDKNIQRNQHITDIKDKIRTWEQKSLHGRHRHALQQEHIDKSASNAWLKRGELFPETEGFMLGIQDQVIDTGNYQRYIIRRPNYNDKCRHCHSASETIQHITGACKSIAQTDYKHRHDQVAAIIHQFLALKYKLITEKLPYYKYTPQTVLENTNYKLYWDRTIITDKTVHYNRPDITVLNKQMKTVYLIDVAICNTHNLNATHTEKIAKYTDLSIEIKTQWRVNATRTIPIIISTTGVIPKTLHTSLSTLCIPPTSYILLQKAVILNTCRIVRKFLTNC

SEQ ID NO: 14977 - protein, 1394 aa, Ennomos quercinarius
MESRQSRYHLRSLPGGDRRGASGAGAGCHSMRTIGSGESSRRASVSSVSRARDTRVDATAEKQTQQTHTPLSPSSTQSLFDSPVTSPLSFELQYRTRFLSTSTTVSEDVVQEAPAINPAPTTEKTRARKKWTSEMNEHIWRTYLIVTELETKARGYLDPLHRQFIEKFPEMDVSKQRVGDQRRAIVRNNLIAMSTREAIKTNVVQLLQNPNLRQVLNPDNDQQLSNPVSQTNNTGTRMRWTDDLNEAIIRTYLKITQLETNRTAYRKALHASILKQYPNLSHLTEQRVADQRRVIINNKLVTEERLQEIRLEVEQSLNRQSHEESVNNNSLHELHETLIATNDTLSDLRIEPTEIENSSLTPDTQVTNTQNQINTEQHYDEHLNNKIIESFRTAYDNFIDTEPTQRPYIPKQKPSKRLSYIITFIDTQILPKYISTEDNFNTTHTLIYCAAYTTAICNGSKIKQLEENNQRMAGQVVKPHWQIRLENKIQKLREDIGRMTQYNRGNRSSRLVLHIDHIKEKYQIHSRHENPNETNEEFLDSLKQKLNATCSRLRRYTNCTLRKNQNIKFNNNEKQFYRNLTIETANLRENNDNNSEAVLPSAEIFHQFWSNIWATPVSYNDKADWITEETKKLDTVPQMQYQHLPVETFINVLKKTHNWKTPGSDHIHNYFYKKLKTMHPMLHNHICEFIQSPENMPGFITQGITFMIPKDKNIDNVSKYRPITCLQTIYKIITASIAQLINNHIITNNILAQEQKGCRKGSQGCKEQLLIDSIAMKHNITNKRDICTMYIDYRKAFDSIPHTWLTYILRHYKIHPTIVTFLSNAMQNWQTRLEIRNKDHPIQTDFIPIKRGIFQGDALSPLWFCLALNPLSNLLNNTNNGLAITTNDSNFKLTHLMYMDDIKLYSNTTSSLHDLADITQRFSRDINMEFGIDKCKTFTLHKGRIIKSDDYVLDSGEHVDPLDYNETYKYLGFQQSRQIHQKQTKTDITRKFKHRLNVIAKSQLNSRNLFKAINSFAIPILTYSFGIIKWSTTDLKKLQCLINKTLTTHRKHHPRSCTQRLTLPRSEGGRGLIDAVNLHNSQITTLRNFFYEQAEHSQLHKTMVDSDKKFTPLNLHDKNIQRNQHITDIKDKIRTWEQKSLHGRHRHALQQEHIDKSASNAWLKRGELFPETEGFMLGIQDQVIDTGNYQRYIIRRPNYNDKCRHCHSASETIQHITGACKSIAQTDYKHRHDQVAAIIHQFLALKYKLITEKLPYYKYTPQTVLENTNYKLYWDRTIITDKTVHYNRPDITVLNKQMKTVYLIDVAICNTHNLNATHTEKIAKYTDLSIEIKTQWRVNATRTIPIIISTTGVIPKTLHTSLSTLCIPPTSYILLQKAVILNTCRIVRKFLTNC

SEQ ID NO: 14978 - protein, 1394 aa, Ennomos quercinarius
MESRQSRYHLRSLPGGDRRGASGAGAGCHSMRTIGSGESSRRASVSSVSRARDTRVDATAEKQTQQTHTPLSPSSTQSLFDSPVTSPLSFELQYRTRFLSTSTTVSEDVVQEAPAINPAPTTEKTRARKKWTSEMNEHIWRTYLIVTELETKARGYLDPLHRQFIEKFPEMDVSKQRVGDQRRAIVRNNLIAMSTREAIKTNVVQLLQNPNLRQVLNPDNDQQLSNPVSQTNNTGTRMRWTDDLNEAIIRTYLKITQLETNRTAYRKALHASILEQYPNLSHLTEQRVADQRRVIINNKLVTEERLQEIRLEVEQSLNRQTHEESVNNNSLHELHETLIATNDTLSDLRIEPTEIENSSLTPDTQVTNTQNQINTEQHYDEHLNNKIIESFRTAYDNFIDTEPTQRPYIPKQKPSKRLSYIITFIDTQILPKYISTEDNFNTTHTLIYCAAYTTAICNGSKIKQLEENNQRMAGQVVKPHWQIRLENKIQKLREDIGRMTQYNRGNRSSRLVLHIDHIKEKYQIHSRHENPNETNEEFLDSLKQKLNATCSRLRRYTNCTLRKNQNIQFNNNEKQFYRNLTIETANLRENNDNNSEAVLPSAEIFHQFWSNIWATPVSYNDKADWITEETKKLDTVPQMQYQHLPVETFINVLKKTHNWKTPGSDHIHNYFYKKLKTMHPMLHNHICEFIQSPENMPGFITQGITFMIPKDKNIDNVSKYRPITCLQTIYKIITASIAQLINNHIITNNILAQEQKGCRKGSQGCKEQLLIDSIAMKHNITNKRDICTMYIDYRKAFDSIPHTWLTYILRHYKIHPTIVTFLSNAMQNWQTRLEIRNKDHPIQTDFIPIKRGIFQGDALSPLWFCLALNPLSNLLNNTNNGLAITTNDSNFKLTHLMYMDDIKLYSNTTSSLHDLADITQRFSRDINMEFGIDKCKTFTLHKGRIIKSDDYVLDSGEHVDPLDYNETYKYLGFQQSRQIHQKQTKTDITRKFKHRLNVIAKSQLNSRNLFKAINSFAIPILTYSFGIIKWSTTDLKKLQCLINKTLTTHRKHHPRSCTQRLTLPRSEGGRGLIDAVNLHNSQITTLRNFFYEQAEHSQLHKTMVDSDKKFTPLNLHDKNIQRNQHITDIKDKIRTWEQKSLHGRHRHALQQEHIDKSASNAWLKRGELFPETEGFMLGIQDQVIDTGNYQRYIIRRPNYNDKCRHCHSASETIQHITGACKSIAQTDYKHRHDQVAAIIHQFLALKYKLITEKLPYYKYTPQTVLENTNYKLYWDRTIITDKTVHYNRPDITVLNKQMKTVYLIDVAICNTHNLNATHTEKIAKYTDLSIEIKTQWRVNATRTIPIIISTTGVIPKTLHTSLSTLCIPPTSYILLQKAVILNTCRIVRKFLTNC

SEQ ID NO: 14979 - protein, 1394 aa, Ennomos quercinarius
MESRQSRYHLRSLPGGDRRGASGAGAGCHSMRTIGSGESSRRASVSSVSRARDTRVDATAEKQTQQTHTPLSPSSTQSLFDSPVTSPLSFELQYRTRFLSTSTTVSEDVVQEAPAINPAPTTEKTRARKKWTSEMNEHIWRTYLIVTELETKARGYLDPLHRQFIEKFPEMDVSKQRVGDQRRAIVRNNLIAMSTREAIKTNVVQLLQNPNLRQVLNPDNDQQLSNPVSQTNNTGTRMRWTDDLNEAIIRTYLKITQLETNRTAYRKALHASILEQYPNLSHLTEQRVADQRRVIINNKLVTEERLQEIRLEVEQSLNRQTHEESVNNNSLHELHETLIATNDTLSDLRIEPTEIENSSLTPDTQVTNTQNQINTEQHYDEHLNNKIIESFRTAYDNFIDTEPTQRPYIPKQKPSKRLSYIITFIDTQILPKYISTEDNFNTTHTLIYCAAYTTAICNGSKIKQLEENNQRMAGQVVKPHWQIRLENKIQKLREDIGRMTQYNRGNRSSRLVLHIDHIKEKYQIHSRHENPNETNEEFLDSLKQKLNATCSRLRRYTNCTLRKNQNIQFNNNEKQFYRNLTIETANLRENNDNNSEAVLPSAEIFHQFWSNIWATPVSYNDKADWITEETKKLDTVPQMQYQHLPVETFINVLKKTHNWKTPGSDHIHNYFYKKLKTMHPMLHNHICEFIQSPENMPGFITQGITFMIPKDKNIDNVSKYRPITCLQTIYKIITASIAQLINNHIITNNILAQEQKGCRKGSQGCEEQLLIDSIAMKHNITNKRDICTMYIDYRKAFDSIPHTWLTYILRHYKIHPTIVTFLSNAMQNWQTRLEIRNKDHPIQTDFIPIKRGILQGDALSPLWFCLALNPLSNLLNNTNNGLAITTNDSNFKLTHLMYMDDIKLYSNTTSSLHDLADITQRFSRDINMEFGIDKCKTFTLHKGRIIKSDDYVLDSGEHVDPLDYNETYKYLGFQQSRQIHQKQTKTNITRKFKHRLNVIAKSQLNSRNLFKAINSFAIPILTYSFGIIKWSTTDLKKLQCLINKTLTTHRKHHPRSCTQRLTLPRSEGGRGLIDAVNLHNSQITTLRNFFYEQAEHSQLHKTMVDSDKKFTPLNLHDKNIQRNQHITDIKDKIRTWEQKSLHGRHRHALQQEHIDKSASNAWLKRGELFPETEGFMLGIQDQVIDTGNYQRYIIRRPNYNDKCRHCHSASETIQHITGACKSIAQTDYKHRHDQVAAIIHQFLALKYKLITEKLPYYKYTPQTVLENTNYKLYWDRTIITDKTVHYNRPDITVLNKQMKTVYLIDVAICNTHNLNATHTEKIAKYTDLSIEIKTQWRVNATRTIPIIISTTGVIPKTLHTSLSTLCIPPTSYILLQKAVILNTCRIVRKFLTNC

SEQ ID NO: 14980 - protein, 1394 aa, Ennomos quercinarius
MESRQSRYHLRSLPGGDRRGASGAGAGCHSMRTIGSGESSRRASVSSVSRARDTRVDATAEKQTQQTHTPLSPSSTQSLFDSPVTSPLSFELQYRTRFLSTSTTVSEDVVQEAPAINPAPTTEKTRARKKWTSEMNEHIWRTYLIVTELETKARGYLDPLHRQFIEKFPEMDVSKQRVGDQRRAIVRNNLIAMSTREAIKTNVVQLLQNPNLRQVLNPDNDQQLSNPVSQTNNTGTRMRWTDDLNEAIIRTYLKITQLETNRTAYRKALHASILEQYPNLSHLTEQRVADQRRVIINNKLVTEERLQEIRLEVEQSLNRQSHEESVNNNSLHELHETLIATNDTLSDLRIEPTEIENSSLTPDTQVTNTQNQINTEQHYDEHLNNKIIESFRTAYDNFIDTEPTQRPYIPKQKPSKRLSYIITFIDTQILPKYISTEDNFNTTHTLIYCAAYTTAICNGSKIKQLEENNQRMAGQVVKPHWQIRLENKIQKLREDIGRMTQYNRGNRSSRLVLHIDHIKEKYQIHSRHENPNETNEEFLDSLKQKLNATCSRLRRYTNCTLRKNQNIKFNNNEKRFYRNLTIETANLRENNDNNSEAVLPSAEIFHQFWSNIWATPVSYNDKADWITEETKKLDTVPQMQYQHLPVETFINVLKKTHNWKTPGSDHIHNYFYKKLKTMHPMLHNHICEFIQSPENMPGFITQGITFMIPKDKNIDNVSKYRPITCLQTIYKIITASIAQLINNHIITNNILAQEQKGCRKGSQGCKEQLLIDSIAMKHNITNKRDICTMYIDYRKAFDSIPHTWLTYILRHYKIHPTIVTFLSNAMQNWQTRLEIRNKDHPIQTDFIPIKRGIFQGDALSPLWFCLALNPLSNLLNNTNNGLAITTNDSNFKLTHLMYMDDIKLYSNTTSSLHDLADITQRFSRDINMEFGIDKCKTFTLHKGRIIKSDDYVLDSGEHVDPLDYNETYKYLGFQQSRQIHQKQTKTDITRKFKHRLNVIAKSQLNSRNLFKAINSFAIPILTYSFGIIKWSTTDLKKLQCLINKTLTTHRKHHPRSCTQRLTLPRSEGGRGLIDAVNLHNSQITTLRNFFYEQAEHSQLHKTMVDSDKKFTPLNLHDKNIQRNQHITDIKDKIRTWEQKSLHGRHRHALQQEHIDKSASNAWLKRGELFPETEGFMLGIQDQVIDTGNYQRYIIRRPNYNDKCRHCHSASETIQHITGACKSIAQTDYKHRHDQVAAIIHQFLALKYKLITEKLPYYKYTPQTVLENTNYKLYWDRTIITDKTVHYNRPDITVLNKQMKTVYLIDVAICNTHNLNATHTEKIAKYTDLSIEIKTQWRVNATRTIPIIISTTGVIPKTLHTGLSTLCIPPTSYILLQKAVILNTCRIVRKFLTNC

SEQ ID NO: 14981 - protein, 1362 aa, Ennomos quercinarius
MRTIGSGESSRRASVSSVSRARDTRVDATAEQQMQLNPPLSPSSTQSLFDSPVTSPPSFELQYRTRFLSTSTESENVVQEAFAIDPVPITEKTRARKKWTTEMNEFIIRTYLVVTKLESKPRGYLDILHKQFVEKFPEMDVSKQRVGDQRRAIIRNKLISDDALEAIKQDAKNSLDTSNRDQTQSQSSISVEPNIIPSTQTQPTTNKNSSRMRWTDDINEAIIRNYYKITSLETNTTAYRKLLHSSVIEQFPNISHVSEQRIADQRRVIIHNKLITKQRLQEIRKEVEDSLDCTHSSNHTELELNDTQYEQVNTTDNRHTSLEVHPALQNTDNYQDNMTIQEQHSQNWNDEHLNKKIEETFRMTYENFRDTDPTQRPYIPKQKPSKKLTYIITYLNLQVLPQYKSLDQTFLVTQTIIYCAAYTTATCNGAKIKQVDDSPQTNKKDKRPSWQIRLENKILKLRQDVGRMTQYIQGNRSCRLIMYVSEIKQKYRIHSRHEEPNKSDEQFLDSLKQRLNAVCSRLRRYTSCTQRKIQNAQFYNNEKQFYRSLSKETPHLQTNNNNTDTQMPTAEALHQFWSNIWAKPVQHNSEAQWIKDDVLKMEGSPQMQFQFIPIDIFIDVLQKTHNWKTPGTDHIHNYFYKKLTSMHPIIHNHINEFIQSPEIMPSFLTQGVTYMIPKDNDLKNPAKYRPITCLQTIYKVITACIAELIYKHAIDCNILAEEQKGCRKSSQGCKEQLTIDNIVMRHTINNKRELHTMYIDYQKAYDSVPHTWLTYILHHYKVHPTIISFLEKAMEHWQTKLKIKNTIDSVETDVIPIKRGIFQGDALSPLWFCLALNPLSHILNNSNNGIVITNDDTNFTTISHLMYMDDIKLYSNNTPSLHRLADATQEFSNDIYMQFGIDKCKTFTLRKGKVDHEEYSLNTGEQVDPLDQNATYKYLGFQQSHQINQKLTKSEITKKFKHRLNILIKSQLNSRNLIQAINTFAIPILTYSFGIINWSKTDLKRKQSLINTTLTNHRKHHPRSCVQRMTLPRNEGGRGLIDIVNLHNKQITTLRNYFHSKAEHCRLHKSIAEADKRITPLNLHDRNNQPSEHITSNKDKISTWRQKSLHGRHRHELDQQHVDKSASNAWLQRGELFPETEGFMLGIQDQIIDTGNYQRYIIRRPNYNDKCRHCHIASETIQHITGACKSIAQTEYKHRHDQVAAIVHQTLAYKYKLVKEKIPYYKYKPEIVLENSNFKLYWDRTIITDKTIHYNRPDITVLDKHKKVVYLIDIAVCNTHNLTTTHTEKVAKYTDLSIEIKTQWQVNTTRTIPIIVSTTGVIPKTLHTSLKTLGIPPTSYILLQKAAILNTCRIVRKFLNNC

SEQ ID NO: 14982 - protein, 1392 aa, Ennomos quercinarius
MESGHKRYNLRSLPGGDRRGASGASAGCHSMRTIGSGESSRRASVSSVSRARDTRVDATAEQQMQLNPPLSPSSTQSLFDSPVTSPPSFELQYRTRFLSTSTESENVVQEAFAIDPVPITEKTRARKKWTTEMNEFIIRTYLVVTKLESKPRGYLDILHKQFVEKFPEMDVSKQRVGDQRRAIIRNKLISDDALEAIKQDAKNSLDTSNRDQTQSQSSISVEPNIIPSTQIQPTTNKNSSRMRWTDDINEAIIRNYYKITSLETNTTAYRKLLHSSVIEQFPNISHVSEQRIADQRRVIIHNKLITKQRLQEIRKEVEDSLDCTHSSNHTELELNDTQYEQVNTTDNRHTSLEVHPALQNTDNYQDNMTIQEQHSQNWNDEHLNKKIEETFRMTYENFRDTDPTQRPYIPKQKPSKKLTYIITYLNLQVLPQYKSLDQTFLVTQTIIYCAAYTTATCNGAKIKQVDDSPQTNKKDKRPSWQIRLENKILKLRQDVGRMTQYIQGNRSCRLIMYVSEIKQKYRIHSRHEEPNKSDEQFLDSLKQRLNAVCSRLRRYTSCTQRKIQNAQFYNNEKQFYRSLSKETPHLQTNNNNTDTQMPTAEALHQFWSNIWAKPVQHNSEAQWIKDDVLKMEGSPQMQFQFIPIDIFIDVLQKTHNWKTPGTDHIHNYFYKKLTSMHPIIHNHINEFIQSPEIMPSFLTQGVTYMIPKDNDLKNPAKYRPITCLQTIYKVITACIAELTYKHAIDCNILAEEQKGCRKSSQGCKEQLTIDNIVMRHTINNKRELHTMYIDYQKAYDSVPHTWLTYILHHYKVHPTIISFLEKAMEHWQTKLKIKNTIDSVETDVIPIKRGIFQGDALSPLWFCLALNPLSHILNNSNNGIVITNDDTNFTTISHLMYMDDIKLYSNNTPSLHRLADATQEFSNDIYMQFGIDKCKTFTLRKGKVDHEEYSLNTGEQVDPLDQNATYKYLGFQQSHQINQKLTKSEITKKFKHRLNILIKSQLNSRNLIQAINTFAIPILTYSFGIINWSKTDLKRKQSLINTTLTNHRKHHPRSCVQRMTLPRNEGGRGLIDIVNLHNKQITTLRNYFHSKAEHCRLHKSIAEADKRITPLNLHDRNNQPSEHITSNKDKISTWRQKSLHGRHRHELDQQHVDKSTSNAWLQRGELFPETEGFMLGIQDQIIDTGNYQRYIIRRPNYNDKCRHCHIASETIQHITGACKSIAQTKYKHRHDQVAAIVHQTLAYKYKLVKEKIPYYKYKPEIVLENSNFKLYWDRTIITDKTIHYNRPDITVLDKHKKLVYLIDIAVCNTHNLTTTHTEKVAKYTDLSIEIKTQWQVNTTRTIPIIVSTTGVIPKTLHTSLKTLGIPPTSYILLQKAAILNTCRIVRKFLNNC

SEQ ID NO: 14983 - protein, 1392 aa, Ennomos quercinarius
MESGHKRYNLRSLPGGDRRGASGAGAGCHSMRTIGSGESSRRASVSSVSRARDTRVDATAEQQMQLNPPLSPSSTQSLFDSPVTSPPSFELQYRTRFLSTSTESENVVQEAFAIDPVPITEKTRARKKWTTEMNEFIIRTYLVVTKLESKPRGYLDILHKQFVEKFPEMDVSKQRVGDQRRAIIRNKLISDDALEAIKQDAKNSLDTSNRDQTQSQSSISVEPNIIPSTQTQPTTNKNSSRMRWTDDINEAIIRNYYKITSLETNTTAYRKLLHSSVIEQFPNISHVSEQRIADQRRVIIHNKLITKQRLQEIRKEVEDNLDCTHSSNHTELELNDTQYEQVNTTDNRHTSLEVHPALQNTDNYQDNMTIQEQHSQNWNDEHLNKKIEETFRMTYENFRDTDPTQRPYIPKQKPSKKLTYIITYLNLQILPQYKSLDQTFLVTQTIIYCAAYTTATCNGAKIKQVDDSPQTNKKDKRPSWQIRLENKILKLRQDVGRMTQYIQGNRSCRLIMYVSEIKQKYRIHSRHEEPNKSDEQFLDSLKQRLNAVCSRLRRYTSCTQRKIQNAQFYNNEKQFYRSLSKETPHLQTNNNNTDTQMPTAEALHQFWSNIWAKPVQHNSEAQWIKDDVLKMEGSPQMQFQFIPIDIFIDVLQKTHNWKTPGTDHIHNYFYKKLTSMHPIIHNHINEFIQSPEIMPSFLTQGVTYMIPKDNDLKNPAKYRPITCLQTIYKVITACIAELIYKHAIDCNILAEEQKGCRKSSQGCKEQLTIDNIVMRHTINNKRELHTMYIDYQKAYDSVPHTWLTYILHHYKVHPTIISFLEKAMEHWQTKLKIKNTIDSVETDVIPIKRGIFQGDALSPLWFCLALNPLSHILNNSNNGIVITNDDTNFTTISHLMYMDDIKLYSNNTPSLHRLADATQEFSNDIYMQFGIDKCKTFTLRKGKVDHEEYSLNTGEQVDPLDQNATYKYLGFQQSHQINQKLTKSEITKKFKHRLNILIKSQLNSRNLIQAINTFAIPILTYSFGIINWSKTDLKRKQSLINTTLTNHRKHHPRSCVQRMTLPRNEGGRGLIDIVNLHNKQITTLRNYFHSKAEHCRLHKSIAEADKRITPLNLHDRNNQPSEHITSNKDKISTWRQKSLHGRHRHELDQQHVDKSASNAWLQREELFPETEGFMLGIQDQIIDTGNYQRYIIRRPNYNDKCRHCHIASETIQHITGACKSIAQTEYKHRHDQVAAIVHQTLAYKYKLVKEKIPYYKYKPEIVLENSNFKLYWDRTIITDKTIHYNRPDITVLDKHKKVVYLIDIAVCNTHNLTTTHTEKVAKYTDLSIEIKTQWQVNTTRTIPIIVSTTGVIPKTLHTSLKTLGIPPTSYILLQKAAILNTCRIVRKFLNNC

SEQ ID NO: 14984 - protein, 1009 aa, Ennomos quercinarius
MDIYHFSRESFSPKIIIIIPTQRPYIPKQKPSKKLTYIITYLNLQVLPQYKSLDQTFLVTQTIIYCAAYTTATCNGAKIKQVDDSPQTNKKDKRPSWQIRLENKILKLRQDVGRMTQYIQGNRSCRLIMYVSEIKQKYRIHSRHEEPNKSDEQFLDSLKQRLNAVCSRLRRYTSCTQRKIQNAQFYNNEKQFYRSLSKETPHLQTNNNNTDTQMPTAEALHQFWSNIWAKPVQHNSEAQWIKDDVLKMEGSPQMQFQFIPIDIFIDVLQKTHNWKTPGTDHIHNYFYKKLTSMHPIIHNHINEFIQSPEIMPSFLTQGVTYMIPKDNDLKNPAKYRPITCLQTIYKVITACIAELIYKHAIDCNILAEEQKGCRKSSQGCKEQLTIDNIVMRHTINNKRELHTMYIDYQKAYDSVPHTWLTYILHHYKVHPTIISFLEKAMEHWQTKLKIKNTIDSVETDVIPIKRGIFQGDALSPLWFCLALNPLSHILNNSNNGIVITNDDTNFTTISHLMYMDDIKLYSNNTPSLHRLADATQEFSNDIYMQFGIDKCKTFTLRKGKVDHEEYSLNTGEQVDPLDQNATYKYLGFQQSHQINQKLTKSEITKKFKHRLNILIKSQLNSRNLIQAINTFAIPILTYSFGIINWSKTDLKRKQSLINTTLTNHRKHHPRSCVQRMTLPRNEGGRGLIDIVNLHNKQITTLRNYFHSKAEHCRLHKSIAEADKRITPLNLHDRNNQPSEHITSNKDKISTWRQKSLHGRHRHELDQQHVDKSASNAWLQRGELFPETEGFMLGIQDQIIDTGNYQRYIIRRLNYNDKCRHCHIASETIQHITGACKSIAQTEYKHRHDQVAAIVHQTLAYKYKLVKEKIPYYKYKPEIVLENSNFKLYWDRTIITDKTIHYNRPDITVLDKHKKVVYLIDIAVCNTHNLTTTHTEKVAKYTDLSIEIKTQWQVNTTRTIPIIVSTTGVIPKTLHTSLKTLGIPPTSYILLQKAAILNTCRIVRKFLNNC

SEQ ID NO: 14985 - protein, 1392 aa, Ennomos quercinarius
MESGHKRYNLRSLPGGDRRGASGAGAGCHSMRTIGSGESSRRASVSSVSRARDTRVDATAEQQMQLNPPLSPSSTQSLFDSPVTSPPSFELQYRTRFLSTSTESENVVQEAFAIDPVPITEKTRARKKWTTEMNEFIIRTYLVVTKLESKPRGYLDILHKQFVEKFPEMDVSKQRVGDQRRAIIRNKLISDDALEAIKQDAKNSLDTSNRDQTQSQSSISVEPNIIPSTQTQPTTNKNSSRMRWTDDINEAIIRNYYKITSLETNTTAYRKLLHSSVIEQFPNISHVSEQRIADQRRVIIHNKLITKQRLQEIRKEVEDSLDCTHSSNHTELELNDTQYEQVNTTDNRHTSLEVHPALQNTDNYQDNMTIQEQHSQNWNDEHLNKKIEETFRMTYENFRDTDPTQRPYIPKQKPSKKLTYIITYLNLQVLPQYKSLDQTFLVTQTIIYCAAYTTATCNGAKIKQVDDSPQTNKKDKRPSWQIRLENKILKLRQDVGRMTQYIQGNRSCRLIMYVSEIKQKYRIHSRHEEPNKSDEQFLDSLKQRLNAVCSRLRRYTSCTQRKIQNAQFYNNEKQFYRSLSKETPHLQTNNNNTDTQMPTAEALHQFWSNIWAKPVQHNSEAQWIKDDVLKMEGSPQMQFQFIPIDIFIDVLQKTHNWKTPGTDHIHNYFYKKLTSMHPIIHNHINEFIQSPEIMPSFLTQGVTYMIPKDNDLKNPAKYRPITCLQTIYKVITACIAELIYKHAIDCNILAEEQKGCRKSSQGCKEQLTIDNIVMRHTINNKRELHTMYIDYQKAYDSVPHTWLTYILHHYKVHPTIISFLEKAMEHWQTKLKIKNTIDSVETDVIPIKRGIFQGDALSPLWFCLALNPLSHILNNSNNGIVITNDDTNFTTISHLMYMDDIKLYSNNTPSLHRLADATQEFSNDIYMQFGIDKCKTFTLRKGKVDHEEYSLNTGEQVDPLDQNATYKYLGFQQSHQINQKLTKSEITKKFKHRLNILIKSQLNSRNLIQAINTFAIPILTYSFGIINWSKTDLKRKQSLINTTLTNHRKHHPRSCVQRMTLPRNEGGRGLIDIVNLHNKQITTLRNYFHSKAEHCRLHKSIAEADKRITPLNLHDRNNQPSEHITSNKDKISTWRQKSLHGRHRHELDQQHVDKSASNAWLQRGELFPETEGFMLGIQDQIIDTGNYQRYIIRRPNYNDKCRHCHIASETIQHITGACKSIAQTEYKHRHDQVAAIVHQTLAYKYKLVKEKIPYYKYKPEIVLENSNFKLYWDRTIITDKTIHYNRPDITVLDKHKKVVYLIDIAVCNTHNLTTTHTEKVAKYTDLSIEIKTQWQVNTTRTIPIIVSTTGVIPKTLHTSLKTLGIPPTSYILLQKAAILNTCRIVRKFLNNC

SEQ ID NO: 14986 - protein, 1389 aa, Crocallis elinguaria
MMESQQKRYNLRPLPGGDRRGASGADAGCHSMRTIGSGVSTRRASASSSSCAQDAWVNATAELEPQQQILSPSSTQSLFISPITSPLSFGTGYRSRATSTSTDPEDVVQEAFANNLVPTTGKARARKKWTSEMNEFIVRTYLIVTKLETKPRGYLDTLHKEFTGKFPEMDVSKQRVGDQRRAIFRNKLIPEDTLELIKTDVKKYFDNLNATQNYSNLTIANTTSNTLTQTNSSTGTRMRWSDEINEAIIRSYFKITQLETNKTAYRKPLHTSIIEEFPNISHVSEQRIADQRRVIMCNKLITNQRLQEIRREVEECLRLQIGSQSQEDTSQNDIHHSEIHFMHNPFANIELGVTIQNTENTPINTIEQEQRNESYHDEPLNNKILETFKSAYDKYIDTDPTKRPYIPKQKTSKRLSYIVNYLNSNVLPQYKSAEHTFTTTQTLIYCAAYTTAVCNGSKIKQNEEDSPQFNRKDKRPFWQIRLENRIQKIRQDIGRMTQYMHGNRSCRVTVLIDEIKANNRIHSRHEKANETDEEFLDSLKQKLNATCSRLRRYVSCTQRKNQNTQFYNNEKQFYRNLSTETPHLPNNNNSNTQMPTADALHQFWSNIWATPVQHNQEAQWIHEDAKKMETIPEMQFEVIPVDTFVNILKKTHNWKTPGTDHIHNFFYKKLTIMHPILHKHINDFIQSPETLPSFITQGVTYMIPKDNNDLENPAKYRPITCLQTIYKIITACIADLIYKHVTDENILSEEQKGCRKSSQGCKEQLSIDSIAMKHTINNKRDIHTMYIDYRKAFDSVPHTWLTYILHHYKVHPTLVTFLTNTMEYWYTKLKIKHDGNFIETGLIPIKRGIFQGDALSPLWFCLALNPLSNALNNSDDGLKITNEQTSFTLSHLMYMDDIKLYGNNTPSLHRLADITQEFSNDIHMQFGIDKCKTFTLHKGRTEFEDYVLNTGERVDPLDPNTSYKYLGFQQSRQIHQKQTKTEITRKFKHRLNILIKSQLNSRNLIQAINTFAIPILTYSFGIINWSKTDLKRTQCLINTTLTTHRKHHPRSCVQRITLPRNEGGRGVIDIVNLHNKQITKLRSYFHEKSEQSQLHKAIADADKRITPLNLHDKNTQTNEHITSKKDKILAWAQKSLHGRHRYDLEQQHVDKNASNAWLKHGKLFPETEGFMLGIQDQVIDTGNYQRHIIRRPNYNDKCRHCHVASETIQHITGACKSIAQTEYKHRHDQIAAIVHQTLAYKYKLIEEKVPYYKYKPQVILENGDYKLYWDRTIITDKTIHYNRPDITVLDKQNKSVYLIDIAVCNTHNLTTTHTEKIAKYTDLSIEIKTQWRVNTTRTIPIIISTTGVIPKTLHISLNTIGMPPWSYILLQKAAILNTCRIVRKFLSNC

SEQ ID NO: 14987 - protein, 1317 aa, Protographium marcellus
MMESGQRRYNLRSLPGGDRRGASGADAGCHSMRTIGGGVSSRRASASSVSRKRGTRVDVTADPQRTNTPLSLSSTQSLFESPVTSPLSFELPYRTRFLSTSTDSESVVQEAYATNPVPIPERNKKRARRKWTSEMNEFLIRTYLIITKLETKPGRYLDSLHQQFKEKYPEMEASKQRVGDQRRAIVRNKLITDNDLERIKMEVKNSLDALNKNITETQQTRENSELMSYTSSHTRKNYTRMRWTNDINEAIIRSYFKITLLETNTTAYRKPLHTSIIEQFPSLSHVSEQRIADQRRVIIHNKLIKNGRLQEIRKEVEESINVLQNEIIMNQDAHEVNSTQSEAVNNSLTYLDLDFTTQSTIRDQQNAELEEQHVENWQNEQLNNKIADTYKVTYERFIGTDPTKRPYIPKQKQSKTLTYIINYLNSLVIPKYISIDQTFLKTQTLIYCAAYTTAICNGLKIKQSETDNSQTNKTGKRPAWQIRLENKIYKLRQNIGRMTQYIQGNVSGRLIIHVNAIKEKYWIHSRHEERNQSDDQFLDSLKQRLNAASSRLRRYLQCTQRKQQNTQFHNNEKQFYRNLSKDLPHIHTNNNITDNQQPDIQTLHQFWANIWAKSVQHNLDAEWIKEDAHKLESTPQMQFNLIPIDTFINIIKKTHNWKTPGTDHIHNYYYKKLTILHPVIFNHINNFIQFPETIPLFINEGQTYMIPKGNDLKNPAKYRPITCLQTIYKIITACIAELIYKHVTDNNILAEEQKGCRKNSQGCKEQLTIDSIVMKHTIKNKKELHTMYIDYQKAYDSVPHSWLTYILYHYKIHPTIISFLETTMKHWKTKLKIKNSIYSVETDIIPIKRGIFQGDALSPLWFCLALNPLSHILNNLTNGLHISNDDTNYTISHLMYMDDIKLYSNNKPSLHSLADATQDFSNDIHMHFGIDKCKTFTYRKGKIDPEHYTLNTGEKIDPLDQNATYKYLGFQQTNQINQKRTKSEIINKFKHRINILMKTQLNSRNLFKAINMFAIPILTYSFGIINWSKTDLKRAQTLVNTTLTNHRKHHPRSCSQRTTLPRNEGGRGLIDILNLHNKQINTLRCYFHDKSQHSRLHKVIINADKHYTPLNLHDRNSQSNEYIISNNDKISTWRQKSLHGRHRHDLEQQYVDKNASNLWLQRGELFPETEGFMLGIQDQVIDTRNYQRYIIRRPNYNDKCRKCQVTSETIQHITGACKAIVQTDYKHRHDQVAAIVHQSLALKYKLIAEKVPYYKYKPQSVIENSNYKMYWDRTIITDKTVHYNRPDITVLDKENKLVYLIDIAVCNTHNLASSHTE

SEQ ID NO: 14988 - protein, 756 aa, Hypermnestra helios
MTQYINGNQSFRLILYINEIKEKYRIHSKHENRNETDQQFLDSIKQKLNATCNRLRRYVICTRRKNQNAQFCNNEKQFYRNLLKETPSSHLSNNSEGSQILPTNKLHQFWSDIWATPIRHNEEAHWIQKEAQDLASVPQMQFQFIPIDIFIKIIKKTHNWKTPGTDNIHNYFYKKLTSMHPILYNHINEFIRSPEIMPPFLSQGITYMIPKDNDTENPAKYRPITCLQTIYKIITACIAELTYTHVIDNNILAEEQKGCRKSSQGCKEQLVIDSITMKHTIKNNRELHTMYIDYRKAFDSVPHTWLIFILHHYKVHPTLISFLSNVMKYWHTKLKIKNSENFIETDVIPIKRGIFQGDALSPLWFCLALNPLSYILNNSNNGLKIVNEHTSFSISHLMYMDDIKLYSNNTLSLHHLADTTQEFSNDIHMEFGIDKCKTFTFRKGKPEQKEYVLNSGEHVDPLDKNASYKYLGLQQSRQIHQKETKSEVIKKFKHRLNILTKSQLSSRNLIQAINTFAIPTLTYSFGIVSWSNTDLKRNQCLINTTLTTSRKHHPRSCVQRITLPRDEGGRGVIDIINLHNKQITNLRCYFHTKSEHSELHKAISDADKQITPLNLHNKNIQHNQHITSNQDKISAWKLKSLHGRHRKDLEQQHIDKNASNAWLQRGELFPETEGFMLGIQDQVIDTRNYQRYIIRHPNYNDKCRLCHTTSETIQHVTGACKAIAQTEYKHRHDQVAAIVHQSLAYKYKLVGDKIPY

SEQ ID NO: 14989 - protein, 1301 aa, Hypermnestra helios
MIMITITISITVTITITITVTVLITITITTIIIITIAIAIAITIAIAIAISITITISITIAIANNNSISNSNNNSNSNNNKNNNNNNNNDNDNDNDIDNGNDNDNGNGIDNDYDDKTLNTDENIVHNQQDMPNPSIVVSKTKTASNAFNSRIRWTDDMNEAIIRHYLKITLLETNKTAYRKPLQLGIIEQFPNISHVSEQRIADQRRVIIRNKLITNQRLQQIRKEVEESLNTNACSQTDKEITQCDTQSYLMNTADNPFASTELEFTTVNIEQTQINQATLEQHNERHCQDNQLNNKIFDTFRITYDKYTNTDPTQRPYIPKQKASKRLSYIINFLNNVVLPQYKSTEHTFITTHTLIYCAAYTTATCNGSKIKQFEDPQPNKKEKRPFWQIRLENKIHKLRQDIGTMTQYINGNRSSRLILHIKEIKKKYRIHSKHENRNETDQQFLDSIKQKLNATCSRLRRYVICTRRKNQNAQFCNNEKQFYRNLLKETPSSHLSNNSEGSQILPTNKLHQFWSDIWATPIRHNEEAHWIQKEAQDLASVPQMQFQFISIDIFIKIIKKTHNWKTPGTDNIHNYFYKKLTSMHPILYNHINEFIRSPEIMPPFLSQGITYMIPKDNDIENPAKYRPITCLQTIFKIITAFIAELTYTHVIDNNILAEEQKGCRKSSQGCKEQLVIDSIAMKHTIKNNRELHTMYIDYRKAFDSVPHTWLIFILHHYKVHPTLISFLSNVMKYWHTKLKIKNSENFIETDVIPIKRGIFQGDALSPLWFCLALNPLSYILNNSNNGLKIINEHTSFSISHLMYMDDIKLYSNNTLSLHHLADTTQEFSNDIHMEFGIDKCKTFTFRKGKPEQKEYVLNSGEHVDPLDKNASYKYLGLQQSRQIHQKETKSEVIKKFKHRLNILTKSQLSSRNLIQAINTFAIPTLTYSFGIVSWSNTDLKRNQCLINTTLTTSRKHHPRSCVQRITLPRDEGGRGVIDIINLHNKQITNLRCYFHTKSEHSELHKAISDADKQITPLNLHNKNTQHNQHITSNQDKISAWKLKSLHGRHRKDLEQQHIDKNASNAWLQRGELFPETEGFMLGIQDQVIDTRNYQRYIIRRPNYNDKCRLCHTTSETIQHVTGACKAIAQTEYKHRHDQVAAIVHQSLAYKYKLVGDKIPYYKYKPQTVLENSNFKLYWDRTIITDKTVHCNRPDITVLDKQKKSVFLIDIAVCNTHNLATTHTEKIAKYTDLSIEIKTQWRVNTIKTIPIILSTTGVIPTTLHTSLNTLGIPPTTYILLQKAALLNTCRIVRKFLTN

SEQ ID NO: 14990 - protein, 1388 aa, Erannis defoliaria
MSKNTMIESGKRRYNLRPLPGGDRRGASGAGAGCYSMRTIGSGVSSRRASVSSPPCTRGARVNVTADPQMQQEPVSPSSTQSLFESPASSLLSFEMQSRSRITSISTNPEDVVQEARADILVPTPGIPRARKKWTEEMNKFIIRTYLTVTKLETIPRGYLDPLHRHFIEKFPDMEVTKQRVGDQRRAIMRNKLLKDNTLQLIKSEVRHHLESQVSDSNTTPNHSNTPEITPNSETQLNLTCRMRWSDDVNEAIIRHYYRITQLESNKTAYRKQLHASIIEQFPHISHVSEQRIADQRRVIINNKLITDQRLRQIRHEVEQNLSAHTRTLNLIQLTQDDTPHTMINTDNPFLDVEFEITPQDTVNTRENETNQEQPNEEQLNNKISQTFKTAYENFINTDPTKRPYIPKQKTSKKLVYIVTYLNSEVLPKYMNDNQNFITTQTLIYCAAFTSATCNGSKIKQNESNTSPPRPKDRKPFWQIRIENKINILRQDIGRLTQYIKGNRSSRLVTNVTKIKEKYKIHSRHESPNETDEQYLDSLKQKLNATCSRLRRYTECTKRKTQNGQFSNNEKQFYRELSKNTEHISISDSRNPQIIPSADELHKFWSNIWAKPIQHNQDAPWILEDAQKFDAIPQMQFQYIPIDIFIDTLNKTHNWKTPGTDHIHNYFYKKLTTMHPILHNHINEFIQSPETLPPFVTQGITYMIPKENDTTNPAKYRPITCLQTIYKIISACICELVHQHVAEHNILAEEQKGCRKGSQGCKEQLTIDSIIMRHTVNNKRELHTMYIDYRKAFDSVPHTWLTYILKHYKIHPTLVTFLSHTMNHWQTRLKIRNGESSIETGFIPIKRGIFQGDAFSPLWFCLALNPLSHILNNSDNGLKILNSHTNISIAHLMYMDDIKLYSNDTASLHCLADLTQEFSNDIQMQFGIDKCKTFTLCDSQVVSESYELNTGEQVDPLSENETYKYLGFQQSRQIPQKETKTEILKKFRNRLNVLAKSQLYSRNLIQAINTFAIPTLTYSFGIINWTKTDLKKTQCLINTTLTSQRKHHPRSCVQRMTLPRNDGGRGIIDTLNLHNKQITSLRNYFHKKSEESRLHKAIVEADKRITPLNLNNPNIQRNQQITSNEDKIDAWKQKSLHGRHRHDLEQPHVDKSASNTWLRRGDLFPETEGFMLGIQDQVIDTRNYQRYIIRRPNYNDKCRQCHVASETIQHITGACKSIVQTDYKHRHDQLAAIVHQSLAYKYKLVLEKIPYYKYTPQTILENQNYKLYWDRTIVTDKTIHFNRPDITVLDKNNKSVFLIDIAVCNTHNLISTHTEKIAKYVDLSIEIKTQWRVNTVRTIPIVVSTTGVIPKTLHTSLDTIGISPTSYILLQKAAILNTCRIIRKFLNF

SEQ ID NO: 14991 - protein, 1388 aa, Erannis defoliaria
MSKNTMMESGKRRYNLRPLPGGDRRGASGAGAGCYSMRTIGSGVSSRRASVSSPPCTRGARVNVTADPQMQQEPVSPSSTQSLFESPASSPLSFEMQSRSRITSISTNPEDVVQEARADILVPTPGIPRARKKWTEEMNEFIIRTYLTVTKLETIPRGYLDPLHRHFIEKFPDMEVTKQRVGDQRRAIMRNKLLKDNTLQLIKSEVRHHLESQVSDLNTTPNHSNTPEITPNSETQLNLTCRMRWSDDVNEAIIRHYYRITQLESNKTAYRKQLHASIIEQFPHISHVSEQRIADQRRVIINNKLITDQRLRQIRHEVEQNLSAHTRTLNLIQLTQDDTPHTMINTDNPFLDVEFEITPQDTVNTRENETNQEQPNEEQLNNKISQTFKTAYENFINTDPTKRPYIPKQKTSKKLVYIVTYLNSEVLPKYMNDNQNFITTQTLIYCAAFTSATCNGSKIKQNESNTSPPRPKDRKPFWQIRIENKINILRQDIGRMTQYIKGNRSSRLVTNVTKIKEKYKIHSRHESPNETDEQYLDSLKQKLNATCSRLRRYTECTKRKTQNGQFSNNEKQFYRELSKNTEHISISDSRNPQIIPSADELHKFWSNIWAKPIQHNQDAPWILEDAQKIDAIPQMQFQYIPIDIFIDTLNKTHNWKTPGTDHIHNYFYKKLTTMHPILHNHINEFIQSPETLPPFVTQGITYMIPKENDTTNPAKYRPITCLQTIYKIISACICELVHQHVAEHNILAEEQKGCRKGSQGCKEQLTIDSIIMRHTVNNKRELHTMYIDYRKAFDSVPHTWLTYILKHYKIHPTLVTFLSHTMNHWQTRLKIRNGESSIETGFIPIKRGIFQGDAFSPLWFCLALNPLSHILNNSDNGLKILNSHTNISIAHLMYMDDIKLYSNDTASLHCLADLTQEFSNDIQMQFGIDKCKTFTLCDSQVVSESYELNTGEQVDPLSENETYKYLGFQQSRQIPQKETKTEILKKFRNRLNVLAKSQLYSRNLIQAINTFAIPTLTYSFGIINWTKTDLKKTQCLINTTLTSQRKHHPRSCVQRMTLPRNDGGRGIIDTLNLHNKQITSLRNYFHKKSEESRLHKAIVEADKRITPLNLNNPNIQRNQQITSNEDKIDAWKQKSLHGRHRHDLEQPHVDKSASNTWLRRGDLFPETEGFMLGIQDQVIDTRNYQRYIIRRPNYNDKCRQCHVASETIQHITGACKSIVQTDYKHRHDQLAAIVHQSLAYKYKLVLEKIPYYKYTPQTILENQNYKLYWDRTIVTDKTIHFNRPDITVLDKNNKSVFIIDIAVCNTHNLISTHTEKIAKYVDLSIEIKTQWRVNTVRTIPIVVSTTGVIPKTLHTSLDTIGISPTSYILLQKAAILNTCRIVRKFLNF

SEQ ID NO: 14992 - protein, 1388 aa, Agriopis aurantiaria
MMESGKRYNLRSLPGGDRRGASGAGAGCHSMRTIGSGESSRRASVSSTSCARGVRVDATADQRMQQEPVSPSSTQSLFESPASSPLSFEIQFRSHTTSISTNTEDVVQEAHADDLVPTTGKARARKKWTQEMNEFIIRTYLKETKLETKPRGYLDHLHRQFTEKFPEMNASKQRVGDQRRAIMRNKSITENTLQLIKADVKRYLDTQTSNSNTTHNDYNTLEATPNNETQVNLITSRMRWSDDVNEAIIRNYFRITQLESNRTAYRKPLHASIIEQFPHISHVSEQRIADQRRVIINNKLITDERLQEIRQEVEESLDIQTHTLISEEITQNNTLHTLPSTIDDPFLNVEFEFTSQNTVESIGNATNHELSNEEQWQDEQLNSKISDTFKTAYDNFIDTDPTKRPYIPKQKHSKRLLYIVTYIDLQILPKYKSTDNTFTITHTLIYCAAYTTAICNGSKIRQLNNDTTPPKKQDRKPAWQIRLENKISKLRQDIGRMTQYIKGNRHIRLVSHVAEIKEKYRIHSRHENPNETDEQYLDSLKQNLNATCSRLRRYIDCTNRKNQNAQFYNNEKQFYRDLSKNTDHLNTPDNSRDSQIPTADALHGFWSNIWSKPIHHNHEAQWISEDAQRLDSVPQMQFELIPIDTFIHTLKNTHNWKTPGTDHIHNYFYKKLTTMHPVLHNHINDFIESPETLPPFVAQGITYMIPKDNDCTNPAKYRPITCLQTIYKIITACISELIYKHVVKHNILAEEQKGCRKGSQGCKEQLTIDTIVMKHTINNNRELHTMYIDYRKAFDSVPHTWLTYILQHYKIHPTLVTFLSSTMNQWQTKLKIKNAENSTETDIISIKRGIFQGDAFSPLWFCLALNPLSHMLNNTDNGLKITNLHTNNSITHLMYMDDIKLYSNNTPSLHHLADATQEFSDDIQMQFGIDKCKTFTLCNGEKLLESYQLNTGEQVDPLNQNETYKYLGFQQSHQIPQKETKTEILKKFKHRLNILAKTQLYSRNLTQAINTFAIPILTYSFGIINWTKTDLKRTQSSINTTLTTQRKHHPRSCVQRMTLPRNEGGRGIIDVLNLHNKQITGLRNYFHNKSKQSQLHKAIVDADRRVTPLNLHNQNTQRNQQITSNEEKIIAWNQKSLHGRHRHDLEQQHVDKNASNAWLRRGELFPETEGFMLGIQDQVIDTGNYQRYIIRRTNYNDKCRQCHVASETIQHITGACKSIAQTDYKHRHDQVAAIVHQSLAYKYKLVEEKMPYYKYKPQTVLENQNYKIYWDRTIVTDKTIHYNRPDITVLDKQNKSVFLIDIAVCNTHNLTSTHTEKIAKYVDLSIEIKTQWRVNTTRTVPIVISTTGVIPKTLHTSLHTLGIPSTTYILLQKAAILNTCRIVRKFLT

SEQ ID NO: 14993 - protein, 1380 aa, Agriopis aurantiaria
MMESGKKYNLRPLPGGDRRGASGAGAGCHSMRTIGSGESSRRASVSSTSCARGVRVDATADQRMQPEALSPSSTQSLFESPVSSPLSFEIQLRSRTTSISTNPEDVVQQANADNLVPTTGKARARKKWTSEMNEFIIRTYLTATILETKPRGYLDPLYKQFTEKFPEMGASRQRVGDQRRAIMRNKLITDDTLQIIKAEVKNHLETQISDLNNAPETSLSTETQVNARMRWSDDVNEAIIRHYFRITQLETNKTAYRKPLHASIIEQFPNIAHVSEQRVADQRRVIINNKLISDQRVQEIRREVELNLGTQTRTREEISQHDTNTTETLPNTMIDPFVNSDFEFTPHHTADNVGNLTTQEQHNEEQWPDEQLNNKISGTFKETYNNFINSEPANRPYIPKQKESKRLSYIVTYLNSHILPKYKSDEHNFLATQTLIYCSAYTTAICNGSKIRQSENNTPQPKRKDSKPPWQVRLENKILKLRQNIGRMVQYIKGNRSYRLVLHIGQIKEKYKIHSRHESPNETDEQFLDSLKQNLNATCSRLRRYTDCTKRKNQNAQFHNNEKQFYRDLAKETPHMNTPVNSRDFQMPTPDALHQFWSNIWAKPIEHNHKAKWIQEDAHKLESIPQMQFQFVPIDTFITTLKKTHNWKTPGTDHIHNYFYKKLTTMHPTLHKHINEFIQSPETLPPFLTHGITYMIPKDNDLENPAKYRPITCLQTFYKIITACISKLIYEHITEHNILAEEQKGCRKGSQGCKEQLTIDSIVMKHTINNKKELHTMYIDYRKAFDSVPHTWLTYILQHYKIHPTLVSFLSNLMNQWQTKLKVLNSENTIETDAIPIKRGIFQGDAFSPLWFCLALNPLSHILNSSNNGLEIANSHNNFSIAHLMYMDDIKLYSNNTQSLHHLADITQEFSNDIKMEFGIDKCKTFSLCDGKVVPEAYELNTGEQVDPLNQNDTYKYLGFQQSRQIPQKETKNEILRKFKHRLNILTKSQLYSRNLTQAINTFAIPILTYSFGIIKWTKTDLKKTQTTINTTLTTQRKHHPRSCVQRMTLPRNEGGRGIIDILNLHNKQINSLRNYFHNKSEHSQLHKAIVDADRRITPLNLYNLNLQRNQHITTNEDKIATWKQKSLHGRHCHDLDQPHVDKNASNAWLRRGELFPETEGFMLGIQDQVIDTGNYQRYIIRRPNYNDKCRQCHIASETIQHITGACKSIAQTDYKHRHDQLAAVVHQSLAYKYKLVEEKVPYYKYKPQTILENQNYKLYWDRTIVTDKTIHYNRPDITVLDKQNKSVFLIDIAVCNTHNLISTHTEKIAKYVDLSIEMRTQWRVNTTRTVPIVVSTTGVIPKTLHSSLHTLGIPPTTYILLQKAAILNTCRIVRKFLNT

SEQ ID NO: 14994 - protein, 1388 aa, Agriopis aurantiaria
MMESGKRYNLRSLPGGDRRGASGAGAGCHSMRTIGSGESSRRASVSSTSCARGVRVDATADQRMQQEPVSPSSTQSLFESPASSPLSFEIQFRSHTTSISTNTEDVVQETHADDLVPTTGKARARKKWTQEMNEFIIRTYLKETKLETKPRGYLDHLHRQFTEKFPEMNASKQRVGDQRRAIMRNKSITENTLQLIKADVKRYLDTQTSNSNTTHNDSNTLEATPNNETQVNLITSRMRWSDDVNEAIIRNYFRITQLESNRTAYRKPLHASIIEQFPHISHVSEQRIADQRRVIINNKLITDERLQEIRQEVEESLDIQTHTLISEEITQNNTLHTLPSTIDDPFLNVEFEFTSQNTVDSIGNATNHELSNEEQWQDEQLNSKISDTFKTAYDNFIDTDPTKRPYIPKQKHSKRLLYIVTYIDLQILPKYKSTDNTFTITHTLIYCAAYTTAICNGSKIRQLNNDTTPPKKQDRKPAWQIRLENKISKLRQDIGRMTQYIKGNRHIRLVSHVAEIKEKYRIHSRHENPNETDEQYLDSLKQNLNATCSRLRRYIDCTNRKNQNAQFYNNEKQFYRDLSKNTDHLNTPDNSRDSQIPTADALHGFWSNIWSKPIHHNHEAQWISEDAQRLDSVPQMQFELIPIDTFIHTLKNTHNWKTPGTDHIHNYFYKKLTTMHPVLHNHINDFIESPETLPPFVAQGITYMIPKDNDCTNPAKYRPITCLQTIYKIITACISELIYKHVVKHNILAEEQKGCRKGSQGCKEQLTIDTIVMKHTINNNRELHTMYIDYRKAFDSVPHTWLTYILQHYKIHPTLVNFLSSTMNQWQTKLKIKNAENSTETDIISIKRGIFQGDAFSPLWFCLALNPLSHMLNNTDNGLKITNLHTNNSITHLMYMDDIKLYSNNTPSLHHLADATQEFSDDIQMQFGIDKCKTFTLCNGEKILESYQLNTGEQVDPLNQNETYKYLGFQQSHQIPQKETKIEILKKFKHRLNILAKTQLYSRNLTQAINTFAIPILTYSFGIINWTKTDLKRTQSSINTTLTTQRKHHPRSCVQRMTLPRNEGGRGIIDVLNLHNKQITGLRNYFHNKSKQSQLHKAIVDADRRVTPLNLHNQNTQRNQQITSNEEKIIAWNQKSLHGRHRHDLEQQHVDKNASNAWLRRGELFPETEGFMLGIQDQVIDTGNYQRYIIRRTNYNDKCRQCHVASETIQHITGACKSIAQTDYKYRHDQVAAIVHQSLAYKYKLVEEKMPYYKYKPQTVLENQNYKIYWDRTIVTDKTIHYNRPDITVLDKQNKSVFLIDIAVCNTHNLTSTHTEKIAKYVDLSIEIKTQWRVNTTRTVPIVISTIGVIPKTLHTSLHTLGIPSTTYILLQKAAILNTCRIVRKFLT

SEQ ID NO: 14995 - protein, 787 aa, Cydia splendana
MSDDTVAPSSPETLANLQLKHPAPSRPLLFPPEPDRSCPPLTVTPEEVAQALGSFNSASAAGLDGIHPSHLKELISGSAGENGLRLLECLTRLCNFLLSGQLNPLVCPYMYGASLCALSKKDGGLRPIAVGSVFRRLTAKLGCYAVRDEMAPYLQPCQLGFGTKLGCEAAIHAVRAFALDPNNADCIIIKLDIRNAFNSLERDTLLAEVREKVPALYPFLHQCYSSPSKLFFNGALIPSQVGAQQGDPLGPLVFSLAIQKAISRCRSPLNIWYLDDGTLGGRPEEVEQDLLALLPVFRELGLEGNSSKCEFFPCSAISQPSFTLFGTLLPGVKELSAQNFDLLGSPIFPAAIPEAFKAREQLLRSAGERLKKLSAHVALTLLRSCFAVPKVMYFLRTVPAWLHPGHIESFDLVVKECAECVLNVALNSDQWDLASLPIRSGGFGIRRVRDVCLPAFLASAAGVVDLVTKILSVDGGKATIPFASAALSAWEALNPSAPVPEKPFLQRLWDEVGIKRLFDSLLNNASGVDRARLNAASVPESGAWLHALPSPNLGTLLDNDSLRVAVALRLGCDVCQPHICICGTMVESSGHHALSCCRCAGRFPRHHALNDIIRRALLSANVPCVLEPPGLSRSDGKRPDGLTLVPWERGKCLLWDATCVSTFAASHLGRTVRSAGAAAEQAASLKRDKYSGLSNFLFVPLAVETSGCWCAEAKTFLGELGRRLQQRGLDPRSGSFLAQRLSIAIRACNSNIRIFEFVEYSACFDIRIFGRSGFEYSNIFYYYKKSI

SEQ ID NO: 14996 - protein, 947 aa, Pammene fasciana
MSDSLSLSLCPHCPNSARTFTAHGLKVHIGRMHKGVSRTSPCISVQPASQHIHTGSSNVRGLDDLASLKQSVRVLRHIPKGARNLAAGKLCDIIEKCVDSNGAAEWFELLSFAFSALKVPESVGVGSLTSKVKRNIDSSCVSCAIEDVAGTAGPRATSVLKTIESKVFEGDLTGAVRVLMSEDKVAPSGPDTFSILQSKHPAPSRPLVFPQEPDRSFVALVVTPEEVAQALGSFNNGSAAGVDGIRPAHLKELVSASAGENGRRLLECLARLCNFLLSGQLNPVVCPFIYGASLCALSKKDGGLRPIAIGSTLRRLTSKLGCRAVREEMAAYLRPCQLGFGTRLGCEAAIHATRAFAVDQGNADSIILKLDIKNAFNSVERDVLLSEVREKVPSLYPFLFQVYSSPSNLFYDGSLVLSQVGAQQGDPLGPLVFSLAIHKAISELQSPLNIWYLDDGTIGGKPEEVERDLLVLLPRFRDLGLEVNPGKCEFYPCSTDSRISFSGFSTLLPGLKELSAQNFSLLGSPIFREDVPAAFEARRQLLLLAAERLKGLSAHVAFVLLRVCFAVPRLTYFLRTVPAWLFPDLIDSFDRVVKEAIEDLLNVSLSTDQWAQASLPIRSGGLGIRCVRDVSLPAFLASVGGVGDLVTQIMSLDGGRVSIPFASDALVAWQALNPSSPIPEKPDRQRLWDEIGVKRVFRGLLERAVGVDRARLNAVSEPESGAWLHALPSPHLGTLLDNDSVRVAVALRLGCDVCEPHVCICGSMVESNGHHALSCCRCAGRFPRHHALNDIVRRALVSAGIPCVLEPPGLSRSDGKRPDGLTLIPWEKGKSLLWDATCVSTFAASHIGRTMRAAGAAAEVAAVRKREKYAAFVNYLFVPLAVETTGCWCSEAKLFLGQLGRRLRERGLDPRSGSFLVQRLSIAVQRGNAASVMGTFAYGAMRGDLFD

SEQ ID NO: 14997 - protein, 949 aa, Cydia pomonella
MSDPSSLCFLCPHCPGSTRTFTAHGLKVHIGRMHKGSPRASSSEPSQAVPQPANVDVPGVVGLHDLAVLKKSVHVLRHIPKGARSLAAGKLSGLIDRCVSANGENEWTALLSFAYSALRVPDAARAGSLTTKVKQNIDSTWGIDGMEVIETDTRAASSYSILRTIEFKVFEGDLRGAVRVLMSEDAIAPSSPETLVALQSKHPAPSRQLVFPQEPDRSSVALTVDPADVAQALGSFNSGSAAGLDGIRPAHLQELTSGSAGDNGLRLLESLTKLCNFLLSGQLNPVVCPFVYGASLCALSKKDGGIRPIAIGNTFRRLVAKLGCRAVKEEMATYLCPLQLGFGTSLGCEAAIHATRAFASDPSNEECVIVKLDIKNAFNTIERDVLLAEVKEKVPSLYPFLFQVYASPSNLFYNGSLISSQVGAQQGDPLGPLVFSLAIHKAISVLQSPLNIWYLDDGTLGGRPEVVEQDLITLLPRFRELGLVVNSNKCEYFPCGPDSQLSSPSFCGFLPGLRVLSSQTFYLLGSPIFPDAIPEAFEVRRQLLLTARERLKHISAHVSLLLLRVCFAVPKLMYFLRTVPTWLYPAHIDSFDGVLKESVELLLNVSLNSNQWDLASLPVRTGGLGVRRARDVSLPAFLASAAGVGGLVTQILSSNGDEVAIPYAADAWTVWSALNPGTPVPDRLDRQRSWDDIGVKRAFDGLMENATGVDRARLNAVSRPESGAWLQALPSPHLGTLLDNDSMRVAVALRLGCEVCEPHVCICGSMVERDGHHALSCCRCAGRYPRHHALNDIIRRALVSANVPCVLEPPGLSRSDGKRPDGLTLVPWERGRCLLWDATCVNTFAVSHINRTMRSAGAAAELASVRKRAKYAALASYIFVPLAVETTGCWCDEAKTFIGEVGRRMRECGHDPRSGSFLMQRLSIAVQRGNAASVMGSFASGGARGELCG

SEQ ID NO: 14998 - protein, 952 aa, Cydia splendana
MQAPTRVRCPHCPNSPRTFTEHGLKVHIGHIHKDVPRTTLSPSPSPSVAVQQQRRVLSDDSGSTSCFEDLATFRKSVRVLRHIPRGARNLAAGKLCDVIDRCIDTNGVSEWFELLSFAYSALKAPEAAGPGNLTTKVKRNIASVGLIDTLGVEAESVALRPHSVLRTIESKVFEGDLRGAVRVLMSDDSVAPSSPETLANLQLKHPAPSRPLLFPPEPDSSCPPLTVRPEEVAQALGSFNSASAAGLDGIRPSHLKELTSGSAGDNGLRLVECLTRLCNFLLSGQLNPLVCPYVYGASLCALSKKDGGLRPIAVGSVFRRLTAKLGCNAVRDEMASYLQPCQLGFGTKLGCEAAIHAVRAFALDPNNADCIIIKLDIKNAFNSLERDTLLAEVREKAPALYPFLYQSYSSPSKLFFNGSLIPSQVGAQQGDPLGPLIFSLAIQKVISRSRSPLNVWYLDDGTLGGRPEEVEQDLLALLPLFRELGLEVNSSKCEFFPCSANSQPSFSLFCALLPGLKELSTQNFNLLGSPMFPAAIPEAFKVREQLLRSAGERLKKLSAHVALTLLRSCFAVPKVMYFLRTVPAWLHPGHMDSFDLVVKECAEGVLNVSLNSNQWDLASLPIRSGGIGIRRVRDVCLPAFLASAAGAVDLVTKILSLDGGKAEIPFASDALSAWEALNPGASVPEQPFRQRLWDEVGIKRLFDCLLGKASGADRARLNAALAPESGAWLHALPSPNLGTLLDNDSLRVAVALRLGCDVCQPHLCICGSMVESNGHHALSCCRCAGRFPRHHALNDIVRRALVSANVPCVLEPPGLSRSDGKRPDGLTLVPWEKGKCLLWDATCVSTFAATHLGRTVRSAGAAAEQAASLKRDKYSGLTNYLFVPLAVETSGCWCAEAKTFLGELGRRLQQRGLDPRSGSFLAQRLSIAVQRGNAASVMGTFAPGAMRGGLFD

SEQ ID NO: 14999 - protein, 947 aa, Cydia splendana
MQATTLSQCPYSPNSSRTFTEHGLKVHITRKHRTRPTALPPTLTVQPQQRQQALSGNSSCIDLDDLATLKQSVRVLRHIPKGARNLAAGKLCQAIEQCIKNNGTPDWFALLSFAYSALKAPDSTSAGNLTTKVKRNIVSSGVIDSLFVEAEPAALRPPSILRTIESKVYEGDLRGAVRVLMSDDGIAPPNPETLATLVSKHPAPSRPLTFPPEPDNSCPALSVKLEEVSQALGSFNNSSAAGLDGIRPSHLKELTSSAAGENGPRLLEYLTKLCNFLLSGQLNPAVSPYIYGASLCALSKKDGGLRPIAIGSVFRRLTAKLGCRAVRDEMASYLQPYQLGFGTKLGCEAAIHATRAFVLDPKNADSVIIKIDLKNAFNSVERDVLLSEVREKIPILYPFLHQVYSSPSKLFFNESLIQSQVGAQQGDPLGPLIFSLAIQKAISGPQSPLNVWYLDDGTLGGKPEEVYQDLVTLLPLLHNLGLEVNTNKCEFFPCSANSHSSLPSFSTLLPGLKELSSQNFHLLGSPIFPDAVPGAFKTREQLLLLARERLRKLSAHVALTLLRSCFAVPRITYFLRTVPTWLHPTHMDSFDLALKESAECLLNVSLNHDQWDQASLPIRNGGLGIRRSRDVSLPAFLASAAGVVDLVTKILPLDGAKATIPYAAEALSAWKTLNSDAPVPDKPYRQRLWDDVVVKRLLDSLIHTAAGSDRARLIAASRPESGAWLHALPSPNLGTLLDSDSMRVAVALRLGCDVCQPHQCICGSTVESNGHHALSCCRCAGRFPRHHALNDIIRRALVLANVPCMLEPPGLSRSDGKRPDGLTLVPWERGKCLLWDATCVSTFAASHLSRTIRSAGAAAEHAASLKKAKYSALSGYLFVPLAVETSGCWCAEGMSFLRELGRRLLERGLDPRSGFFLMQRLSIAVQRGNAASVMGTFASGAARDGLQ

SEQ ID NO: 15000 - protein, 948 aa, Apotomis turbidana
MSDSSSLLSCPHCHNSSRTFTAHGLKVHIGRMHKGIPRASSPLAAQAGSQVAPSNNPNVRGFEDLAALKQSVRVLRHIPKGARNLAAGRLSDLIDKCVCSNGTEEWFDFLSFAYSALKAPGAGGSGNLTSKVKRNIVSACLVDSVESITAEAVVSRTPSVLKTVEGKVFEGDLTGAVRILMSDDGIASSGPETLAILQSKHPAPSRQLLLPPEPDRSIPSLTVKSEDIVQALYSFNSSSAAGLDGVRPVHLKELTSVSAGDNGPRLLECLAKLCNFLLSGQLNPAVSPYIYGASLCALSKRDGGIRPIAIGSVYRRLTAKLGCCAVRDEMAAYLQPCQLGFGTKLGCEAAIHATRAFSGNPNNAESVIIKIDIKNAFNSVERDVLLSEVRDKVPSLYPFLFQVYASPSNLFYGDSLILSRVGAQQGDPLGPLVFSLAIQKAISELQSPLNIWYLDDGTLGGRPEEVEQDLLRLLPRFRELGLEVNCGKCEFFPCGTNSVNSFPVFSALLPGLKVLSPETFNLLGSPIFPEAIPEAFEARRQLLLVAVQRLKELSAHVALVLLRVCFAVPKLTYFLRTVPAWLHPNLIDTFDCVVRESLERVLNVSLNEVQWAQASLPVRTGGLGVRRVRDVSLPAFLASAGGVVDLVTQILSPNGDRATIPYASDALAAWTALNPSAVMPDRPDRQRLWDEAGVQRIFNNLLENSVGADTARLIAVSKPEAGAWLHALPSPHLGTLLDNDSMRVAVALRLGCDVCEPHVCICGTMVESSGHHALSCRRCAGRFPRHHALNDLVRRALVLANVPCILEPPGLSRTDGKRPDGLTLVPWKSGKCLLWDATCVSTFAASHIGRSVRVAGAAAERAALRKREKYSALSNYLFVPLAVETTGCWCSEAKEFLAELGRRLREAGLDPRSGSFLMQRLSIAVQRGNAASVMGTFASGRTGSEDFV

SEQ ID NO: 15001 - protein, 948 aa, Apotomis turbidana
MSDSSSLLSCPHCHNSSRTFTAHGLKVHIGRMHKGIPRASSPLAAQSGSQIAPSNNPNVRGFEDLAALKQSVRVLRHIPKGARNLAAGRLSDLIDKCVCSNGTEEWFDFLSFAYSALKAPGAGGSGNLTSKVKRNIVSACLVDSVESITAEAVVSRTPSVLKTVEGKVFEGDLTGAVRILMSDDGIASSGPETLAILQSKHPAPSRQLLLPPEPDRSIPSLTVKSEDIVQALYSFNSSSAAGLDGVRPVHLKELTSVSAGDNGPRLLECLAKLCNFLLSGQLNPAVSPYIYGASLCALSKRDGGIRPIAIGSVYRRLTAKLGCCAVRDEMAAYLQPCQLGFGTKLGCEAAIHATRAFSGNPNNAESVIIKIDIKNAFNSVERDVLLSEVRDKVPSLYPFLFQVYASPSNLFYGDSLILSRVGAQQGDPLGPLVFSLAIQKAISELQSPLNIWYLDDGTLGGRPEEVEQDLLRLLPRFRELGLEVNCGKCEFFPCGTNSVNSFPVFSALLPGLKVLSPETFNLLGSPIFPEAIPEAFEARRQLLLVAVQRLKELSAHVALVLLRVCFAVPKLTYFLRTVPAWLHPNLIDTFDCVVRESLERVLNVSLNEVQWAQASLPVRTGGLGVRRVRDVSLPAFLASAGGVVDLVTQILSPNGDRATIPYASDALAAWTALNPSAVMPDRPDRQRLWDEAGVQRIFNNLLENSVGADTARLIAVSKPEAGAWLHALPSPHLGTLLDNDSMRVAVALRLGCDVCEPHVCICGTMVESSGHHALSCRRCAGRFPRHHALNDLVRRALVLANVPCILEPPGLSRTDGKRPDGLTLVPWKSGKCLLWDATCVSTFAASHIGRTVRVAGAAAERAALRKREKYSALSNYLFVPLAVETTGCWCSEAKEFLAELGRRLREAGLDPRSGSFLMQRLSIAVQRGNAASVMGTFASGRTGSEDFV

SEQ ID NO: 15002 - protein, 948 aa, Apotomis turbidana
MSDSSSLLSCPHCHNSSRTFTAHGLKVHIGRMHKGIPRASSPLAAQSGSQIAPSNNPNVRGFEDLAALKQSVRVLRHIPKGARNLAAGRLSDLIDKCVCSNGTEEWFDFLSFAYSALKAPGAGGSGNLTSKVKRNIVSACLVDSVESITAEAVVSRTPSVLKTVEGKVFEGDLTGAVRILMSDDGIASSGPETLAILQSKHPAPSRQLLLPPEPDRSIPSLTVKSEDIVQALYSFNSSSAAGLDGVRPVHLKELTSVSAGDNGPRLLECLAKLCNFLLSGQLNPAVSPYIYGASLCALSKRDGGIRPIAIGSVYRRLTAKLGCCAVRDEMAAYLQPCQLGFGTKLGCEAAIHATRAFSGNPNNAESVIIKIDIKNAFNSVERDVLLSEVRDKVPSLYPFLFQVYASPSNLFYGDSLILSRVGAQQGDPLGPLVFSLAIQKAISELQSPLNIWYLDDGTLGGRPEEVEQDLLRLLPRFRELGLEVNCGKCEFFPCGTNSVNSFPVFSALLPGLKVLSPETFNLLGSPIFPEAIPEAFEARRQLLLVAVQRLKELSAHVALVLLRVCFAVPKLTYFLRTVPAWLHPNLIDTFDCVVRESLERVLNVSLNEVQWAQASLPVRTGGLGVRRVRDVSLPAFLASAGGVVDLVTQILSPNGDRATIPYASDALAAWTALNPSAVMPDRPDRQRLWDEAGVQRIFNNLLENSVGADTARLIAVSKPEAGAWLHALPSPHLGTLLDNDSMRVAVALRLGCDVCEPHVCICGTMVESSGHHALSCRRCAGRFPRHHALNDLVRRALVLANVPCILEPPGLSRTDGKRPDGLTLVPWKSGKCLLWDATCVSTFAASHIGRTVRVAGAAAERAALRKHEKYSALSNYLFVPLAVETTGCWCSEAKEFLAELGRRLREAGLDPRSGSFLMQRLSIAVQRGNAASVMGTFASGRTGSEDFV

SEQ ID NO: 15003 - protein, 947 aa, Cydia splendana
MQATTLSQCPYSPNSSRTFTEHGLKVHITRKHRTRPTALPPTLTVQPQQRQQALSGNSSCIDLDDLATLKQSVRVLRHIPKGARNLAAGKLCEAIEQCIKNNGTPDWFALLSFAYSALKAPDSTSAGNLTTKVKRNIVSSGVIDSLFVEAEPAALRPPSILRTIESKVYEGDLRGAVRVLMSDDGIAPPNPETLATLVSKHPAPSRPLTFPPEPDNSCPALSVKLEEVSQALGSFNNSSAAGLDGIRPSHLKELTSSAAGENGPRLLEYLTKLCNFLLSGQLNPAVSPYIYGASLCALSKKDGGLRPIAIGSVFRRLTAKLGCRAVRDEMASYLQPYQLGFGTKLGCEAAIHATRAFVLDPKNADSVIIKIDLKNAFNSVERDVLLSEVREKIPILYPFLHQVYSSPSKLFFNESLIQSQVGAQQGDPLGPLIFSLAIQKAISGPQSPLNVWYLDDGTLGGKPEEVYQDLVTLLPLLHNLGLEVNTNKCEFFPCSANSHSSLPSFSTLLPGLKELSSQNFHLLGSPIFPDAVPGAFKTREQLLLLARERLRKLSAHVALTLLRSCFAVPRITYFLRTVPTWLHPTHMDSFDLALKESAECLLNVSLNHDQWDQASLPIRNGGLGIRRSRDVSLPAFLASAAGVVDLVTKILPLDGAKATIPYAAEALSAWKTLNSDAPVPDKPYRQRLWDDVVVKRLLDSLIHTAAGSDRARLIAASRPESGAWLHALPSPNLGTLLDSDSMRVAVALRLGCDVCQPHQCICGSTVESNGHHALSCCRCAGRFPRHHALNDIIRRALVLANVPCMLEPPGLSRSDGKRPDGLTLVPWERGKCLLWDATCVSTFAASHLSRTIRSAGAAAEHAASLKKAKYSALSGYLFVPLAVETSGCWCAEGMSFLRELGRRLLERGLDPRSGFFLMQRLSIAVQRGNAASVMGTFASGAARDGLQ

SEQ ID NO: 15004 - protein, 947 aa, Cydia splendana
MQATTLSQCPYSPNSSRTFTEHGLKVHITRKHRTRPTALPPTLTVQPQQRQQALSGNSSCIDLDDLATLKQSVRVLRHIPKGARNLAAGKLCEAIEQCIKNNGTPDWFALLSFAYSALKAPDSTSAGNLTTKVKRNIVSSGVIDSLFVEAEPAALRPPSILRTIESKVYEGDLRGAVRVLMSDDGIAPPNPETLATLVSKHPAPSRPLTFPPEPDNSCPALSVKLEEVSQALGSFNNSSAAGLDGIRPSHLKELTSSAAGENGPRLLEYLTKLCNFLLSGQLNPAVSPYIYGASLCALSKKDGGLRPIAIGSVFRRLTAKLGCRAVRDEMASYLQPYQLGFGTKLGCEAAIHATRAFVLDPKNADSVIIKIDLKNAFNSVERDVLLSEVREKIPILYPFLHQVYSSPSKLFFNESLIQSQVGAQQGDPLGPLIFSLAIQKAISGPQSPLNVWYLDDGTLGGKPEEVYQDLVTLLPLLHNLGLEVNTNKCEFFPCSANSHSSLPSFSTLLPGLKELSSQNFHLLGSPIFPDAIPGAFKTREQLLLLARERLRKLSAHVALTLLRSCFAVPRITYFLRTVPTWLHPTHMDSFDLALKESAECLLNVSLNHDQWDQASLPIRNGGLGIRRSRDVSLPAFLASAAGVVDLVTKILPLDGAKATIPYAAEALSAWKTLNSDAPVPDKPYRQRLWDDVVVKRLLDSLIHTAAGSDRARLIAASRPESGAWLHALPSPNLGTLLDSDSMRVAVALRLGCDVCQPHQCICGSTVESNGHHALSCCRCAGRFPRHHALNDIIRRALVLANVPCMLEPPGLSRSDGKRPDGLTLVPWERGKCLLWDATCVSTFAASHLSRTIRSAGAAAEHAASLKKAKYSALSGYLFVPLAVETSGCWCAEGMSFLRELGRRLLERGLDPRSGFFLMQRLSIAVQRGNAASVMGTFASGAARDGLQ

SEQ ID NO: 15005 - protein, 771 aa, Cydia splendana
MSDDTVAPSSPETLANLQLKHPAPSRPLLFPPEPDRSCPPLTVTPEEVAQALGSFNSASAAGLDGIHPSHLKELISGSAGENGLRLLECLTRLCNFLLSGQLNPLVCPYMYGASLCALSKKDGGLRPIAVGSVFRRLTAKLGCYAVRDEMAPYLQPCQLGFGTKLGCEAAIHAVRAFALDPNNADCIIIKLDIRNAFNSLERDTLLAEVREKVPALYPFLHQCYSSPSKLFFNGALIPSQVGAQQGDPLGPLVFSLAIQKAISRCRSPLNIWYLDDGTLGGRPEEVEQDLLALLPVFRELGLEGNSSKCEFFPCSAISQPSFTLFGTLLPGVKELSAQNFDLLGSPIFPAAIPEAFKAREQLLRSAGERLKKLSAHVALTLLRSCFAVPKVMYFLRTVPAWLHPGHIESFDLVVKECAECVLNVALNSDQWDLASLPIRSGGFGIRRVRDVCLPAFLASAAGVVDLVTKILSVDGGKATIPFASAALSAWEALNPSAPVPEKPFLQRLWDEVGIKRLFDSLLNNASGVDRARLNAASVPESGAWLHALPSPNLGTLLDNDSLRVAVALRLGCDVCQPHICICGTMVESSGHHALSCCRCAGRFPRHHALNDIIRRALLSANVPCVLEPPGLSRSDGKRPDGLTLVPWERGKCLLWDATCVSTFAASHLGRTVRSAGAAAEQAASLKRDKYSGLSNFLFVPLAVETSGCWCAEAKTFLGELGRRLQQRGLDPRSGSFLAQRLSIANIAIQRGNAASVMGTFSPGAMRGGLFE

SEQ ID NO: 15006 - protein, 952 aa, Pammene fasciana
MQAPPRSQCPYCPNSPRTFSAHGLKVHIGHLHKDVCRVTPSPSPSGASVATGGPPQVLAGGSALSNLDDLATLKKTRRVLRHIPKGARNLAAGKLCDVIDRCVNTNGTSEWFGLLSFAYSALKVPDAGGAGSLTTKVKHNIESADVSDSLFVDSGLVASRPPSALRTIESKVFEGDLRGAVRVLMSEDDVAPSNPETLASLLSKHPVPSRPLLFPPEPDRSCPALLVESEEVAQALSSFNNSSAAGLDGIRPSHLKELISGSAGDHGLRLLECLTKLCNFLLSGQLNPAVCPYMYGASLCALSKKDGGLRPIAIGSVFRRLAAKLGCSAVRDEMAAYLQPCQLGFGTKLGCEAAIHAVRAFALDPNNADCVIIKLDIKNAFNTLERDTLLSEALEKVPTLYPFLYQAYSSPSKLFFDGSPILSQVGAQQGDPLGPLIFSLAIQKVISRSRTPLNVWYLDDGTLGGKPQEVQADLLTLLPLLRELGLEVSTVKCEFFPCSANSRSSISTFAGLLPGIKELSVQSFSLLGSPIFPDAVPEAFRVREQLLRLANERLKKLSAHVALTLLRSCFAVPKLMYFLRTVPTWLHPVHMNSFDLALKESAECLLNVCLSPEQWDLASLPIRSGGLGIRRARDVSLPAFLASAAGVVDLVTRIFSLDGDKASIPYASDAFSAWEALNPGAIVPDKPYRQRMWDDVGVTRLFDSLLQGAAGADRARLNAVSKPESGAWLHALPSPNLGTLLDNDSLRVAVALRLGCDVCQPHECICGSMVESNGHHALSCGRCAGRFPRHHALNDIIRRALVSANIPCVLEPPGLSRSDGKRPDGLTLVPWERGKCLLWDATCVSTFAPTHLSRTVRSAGAAAEQAASLKRAKYSVLSNYLFIPLAVETSGCWCAEAKVFLGGLGRRLQERGLDPRSGSFLAQRLSIAIQRGNAASVMGTFAPGMMRGGLFE

SEQ ID NO: 15007 - protein, 953 aa, Pammene fasciana
MNVNSSSLRTCPHCPSSSRTFTPHGLCVHIGRMHKDVHRSAPARVTQSGLSTNSQSLVQSVTQGALSLESLAKLKQSVRVLRHIPKGARNLAAGKMCDLIDKCTDTNGTAEWVDFLTFAYSALRTPDATGSGNLTTKVKRNIDSAFVECPFSDIGGGGSSRSPSVLKTVESKVYEGDLRGAVRVLMSDDAVAQSSPEVFATLQAKHPAPSRPLSFPPEPDESTPTYKVNEESVAQALGSFNSGSAAGLDGIRPVHLKELTSGSAGDNGRRLLGCLTKLCNFLLEGRLSAEVRPYVFGASLCALSKKDGGLRPIAVGSTFRRLTAKLGCAAVREEMAAYLRPCQMGFGTRLGCEAAIHAARAFAVDPGKADCVIIKLDIKNAFNSIERDVLLSEVKERVPSLYPFLFQIYSSPSNLFFNESLILSQVGAQQGDPLGPLVFSLAIHKIISGLLSPLNVWYLDDGTLGGMPEIVEQDLRTLLPRLKDLGLEVNTSKCEFFPCSAESRASFPSFCNLLPDLKEISPHSFNLLGSPIFPAAIPEAFEMRRQLLLAARDRLRNLPAQVALVLLRICFAVPKITYFLRTVPTWLYPDSVDSFDLELRESVESLLNVSLSSDQWSLASLPIRSGGLGIRCARDVGLPAFLASAGGVGSLVTDILSSNGDRATIPFASDALAAWLALNPGVQLPERPDRQRAWDDVGIKRVFEGLVGRAVGVDRARLLAVSRPEAGAWLRALPSPHLGTLLDDDSMRVAVALRLGCDVCERHLCICGSMVESNGHHALSCGRCAGRFPRHHALNDIVRRALVSANVPCVLEPSGLSRTDGKRPDGLTLVPWHRGKCLLWDATCVSTFAASHLGRTTCTAGAAAETAALRKRDKYSALQNYLFVPLAVETTGCWGSEAIQFIKEIGRRLTERGHDPRSGSFLVQRLSIAIQRGNAASVMGTFAPGMSRGGLFD

SEQ ID NO: 15008 - protein, 947 aa, Cydia splendana
MQATTLSQCPYSPNSSRTFTEHGLKVHITRKHRTRPTALPPTLTVQPQQRQQALSGNSSCIDLDDLATLKQSVRVLRHIPKGARNLAAGKLCEAIEQCIKNNGTPDWFALLSFAYSALKAPDSTSAGNLTTKVKRNIVSSGVIDSLFVEAEPAALRPPSILRTIESKVYEGDLRGAVRVLMSDDGIAPPNPETLATLVSKHPAPSRPLTFPPEPDNSCPALSVKLEEVSQALGSFNNSSAAGLDGIRPSHLKELTSSAAGENGPRLLEYLTKLCNFLLSGQLNPAVSPYIYGASLCALSKKDGGLRPIAIGSVFRRLTAKLGCRAVRDEMASYLQPYQLGFGTKLGCEAAIHATRAFVLDPKNADSVIIKIDLKNAFNSVERDVLLSEVREKIPILYPFLHQVYSSPSKLFFNESLIQSQVGAQQGDPLGPLIFSLAIQKAISGPQSPLNVWYLDDGTLGGKPEEVYQDLVTLLPLLHNLGLEFNTNKCEFFPCSANSHSSLPSFSTLLPGLKELSSQNFHLLGSPIFPDAVPGAFKTREQLLLLARERLRKLSAHVALTLLRYCFAVPRITYFLRTVPTWLHPTHMDSFDLALKESAECLLNVSLNHDQWDQASLPIRNGGLGIRRSRDVSLPAFLASAAGVVDLVTKILPLDGAKATIPYAAEALSAWKTLNSDAPVPDKPYRQRLWDDVVVKRLLDSLIHTAAGSDRARLIAASRPESGAWLHALPSPNLGTLLDSDSMRVAVALRLGCDVCQPHQCICGSTVESNGHHALSCCRCAGRFPRHHALNDIIRRALVLANVPCMLEPPGLSRSDGKRPDGLTLVPWERGKCLLWDATCVSTFAASHLSRTIRSAGAAAEHAASLKKAKYSALSGYLFVPLAVETSGCWCAEGMSFLRELGRRLLERGLDPRSGFFLMQRLSIAVQRGNAASVMGTFASGAARDGLQ

SEQ ID NO: 15009 - protein, 947 aa, Cydia splendana
MQATTLSQCPYSPNSSRTFTEHGLKVHITRKHRTRPTALPPTLTVQPQQRQQALSGNSSCIDLDDLATLKQSVRVLRHIPKGARNLAAGKLCEAIEQCIKNNGTPDWFALLSFAYSALKAPDSTSAGNLTTKVKRNIVSSGVIDSLFVEAEPAALRPPSILRTIESKVYEGDLRGAVRVLMSDDGIAPPNPETLATLVSKHPAPSRPLTFPPEPDNSCPALSVKLEEVSQALGSFNNSSAAGLDGIRPSHLKELTSSAAGENGPRLLEYLTKLCNFLLSGQLNPAVSPYIYGASLCALSKKDGGLRPIAIGSVFRRLTAKLGCRAVRDEMASYLQPYQLGFGTKLGCEAAIHATRAFVLDPKNADSVIIKIDLKNAFNSVERDVLLSEVREKIPILYPFLHQVYSSPSKLFFNESLIQSQVGAQQGDPLGPLIFSLAIQKAISGPQSPLNVWYLDDGTLGGKPEEVYQDLVTLLPLLHNLGLEVNTNKCEFFPCSANSHSSLPSFSTLLPGLKELSSQNFHLLGSPIFPDAVPGAFKTREQLLLLARERLRKLSAHVALTLLRSCFAVPRITYFLRTVPTWLHPTHMDSFDLALKESAECLLNVSLNHDQWDQASLPIRNGGLGIRRSRDVSLPAFLASAAGVVDLVTKILPLDGAKATIPYAAEALSAWKTLNSDAPVPDKPYRQRLWDDVVVKRLLDSLIHTAAGSDRARLIAASRPESGAWLHALPSPNLGTLLDSDSMRVAVALRLGCDVCQPHQCICGSTVESNGHHALSCCRCAGRFPRHHALNDIIRRALVLANVPCMLEPPGLSRSDDKRPDGLTLVPWERGKCLLWDATCVSTFAASHLSRTIRSAGAAAEHAASLKKAKYSALSGYLFVPLAVETSGCWCAEGMSFLRELGRRLLERGLDPRSGFFLMQRLSIAVQRGNAASVMGTFASGAARDGLQ

SEQ ID NO: 15010 - protein, 948 aa, Apotomis turbidana
MSDSSSLLSCPHCHNSSRTFTAHGLKVHIGRMHKGVPRASSPLAAQSGSQVAPSNNPNVRGFEDLAALKQSVRVLRHIPKGARNLAAGRLSDLIDKCVCSNSTEEWFDFLSFTYSALKAPGAGGSGNLTSKVKRNIVSACLVDSVENITAEAVVSRTPSVLKTVEGKVFEGDLTGAVRILMSDDGIASSGPETLAILQSKHPAPSRQLLLPPEPDRSIPSLTVKSEDIVQALYSFNSSSAAGLVGVRPVHLKELTSVSAGDNVPRLLECLAKLCNFLLSGQLNPAVSPYIYGASLCALSKRAGGIRPIAIGSVYRRLTAKLGYCAVRDEMAAYLQPCQLGFGTKLGCEAAIHATRAFSGNPNNAESVIIKIDIKNAFNSVERDVLLSEVRNKVPSLYPFLFQVYASPSNLFYGDSLILSRVGAQQGDPLGPLVFSLAIQKAISELQSPLNIWYLDDGTLGGRPEEVEQDLLRLLPRFRELGLEVNCGKCEFFPCGTNSFNFFQVFSALLPGLKVLSPETFNLFGSPIFPEAIPEAFEARRQLLLVAVQRLKELSAHVALVLLRVCFAVPKLTYFLRTVPAWLHPNLIDTFDCVVRESLERVLNVSLNEVQWAQASLPVRTGGLGVRRVRDVSLPAFLASAGGVVDLVTQILSPNGDRATIPYASDALAAWTALNPSAVMPDRPDRQRLWDEAGVQRIFNSLLENSVGADTARLIAVSKPEAGAWLHAVPSPHLGTLLDNDSMRVAVALRLGCDVCEPHVCICGTMVESSGHHALSCRRCAGRFPRHHALNDLVRRALVLANVPCILEPPGLSRTDGKRPDGLTLVPWKSGKCLLWDATYVSTFAASHIGRTVRVAGAAAERADLRKREKYSALSNYLFVPLAVETTGCWCSEAKEFLAELGRRLREAGLDPRSGSFLMQRLSIAVQRGNAASVMGTFASGRTGSEDFV

SEQ ID NO: 15011 - protein, 950 aa, Signeta flammeata
MSNPSLLSTCPHCPNSSRTFSSHGLKVHIGRMHKSMPHTFTSDQIQSVSATLSQQTLPRNCSTLGLKELASMKRSVRVLRHIPKGARNLAADKMSVLIDRCIDSNSIADWIALLSFAYSALKAPAQTGSGNLTAKVKHNIIANLTPLGTEHTGLASQRPPSILRTIQSKVFEGDLRGAVKVLMSNDKVAPSNHKTLDILQSKHPAPSRPLVFPPEPDSSVPAFEVKAVDVAQALSSFNSGSAAGLDGIRPVHLKELTSGSAGDSGIRLLESLTKLCNFLLSGKLNVAVCPYIYGASLCALSKKDGGLRPIAVGSTFRRLTAKLGCHAVRQEMASYLRPCQLGFGTRLGCEAAIHATRSFSLDVGNADCVIIKLDIKNAFNSIERDVLLSEVRERVPSIYPFLFQAYSSPSNLFFDESLVLSQVGAQQGDPLGPLVFSLAIHKAISDLQSPLNIWYLDDGTLGGKPERVQQDLLTLLPRFRELGLEVNTSKCEFFPCSANSRDSFPSFCALLPGLKELSAQTFNLLGSPIFSEAIPEAFEVRRELLLTAREKLKNLPAHVALHLLRFCFAVPKLTYFLRTVPTWLYTTHIDSFDYVLKETVECLLNVSLNSDQWDLASLPIRNGGLGLRRVRDVSLPAFLASAAGVVDLVTELFSFDGCKATIPYASDARAAWLSLNPGSPVPEKLDCQRSWDDIGVKRVFDCQLERAVGVDRARLNAISSPESGAWLHALPSPHLGTLLDDDSLRVAVALRLGCNVCEPHICICGTMVESNGHHALSCCRCAGRFPRHHALNDIIRRALVSANIPCVLEPQGLSRSDGKRPDGLTLVPWQKGKCLLWDATCVCTFATSHLGRTMRMAGAAAEVAALRKHEKYSVLANYQFVPLAVETTGCWGSEAKHFFREVGRRFRERGLDPRSESFLVQRLSIAVQRGNAASVLGTFAPGMTRGGLFD

SEQ ID NO: 15012 - protein, 947 aa, Cydia splendana
MQATTLSQCPYSPNSSRTFTEHGLKVHITRKHRTRPTALPPTLTVQPQQRQQALSGNSSCIDLDDLATLKQSVRVLRHIPKGARNLAAGKLCEAIEQCIKNNGTPDWFALLSFAYSALKAPDSTSAGNLTTKVKRNIVSSGVIDSLFVEAEPAALRPPSILRTIESKVYEGDLRGAVRVLMSDDGIAPPNPETLATLVSKHPAPSRPLTFPPEPDNSCPALSVKLEEVSQALGSFNNSSAAGLDGIRPSHLKELTSSAAGENGPRLLEYLTKLCNFLLSGQLNPAVSPYIYGASLCALSKKDGGLRPIAIGSVFRRLTAKLGCRAVRDEMASYLQPYQLGFGTKLGCEAAIHATRAFVLDPKNADSVIIKIDLKNAFNSVERDVLLSEVRENIPILYPFLHQVYSSPSKLFFNESLIQSQVGAQQGDPLGPLIFSLAIQKAISGPQSPLNVWYLDDGTLGGKPEEVYQDLVTLLPLLHNLGLEVNTNKCEFFPCSANSHSSLPSFSTLLPGLKELSSQNFHLLGSPIFPDAVPGAFKTREQLLLLARERLRKLSAHVALTLLRSCFAVPRITYFLRTVPTWLHPTHMDSFDLALKESAECLLNVSLNHDQWDQASLPIRNGGLGIRRSRDVSLPAFLASAAGVVDLVTKILPLDGAKATIPYAAEALSAWKTLNSDAPVPDKPYRQRLWDDVVVKRLLDSLIHTAAGSDRARLIAASRPESGAWLHALPSPNLGTLLDSDSMRVAVALRLGCDVCQPHQCICGSTVESNGHHALSCCRCAGRFPRHHALNDIIRRALVLANVPCMLEPPGLSRSDGKRPDGLTLVPWERGKCLLWDATCVCTFAASHLSRTIRSAGAAAEHAASLKKAKYSALSGYLFVPLAVETSGCWCAEGMSFLRELGRRLLERGLDPRSGFFLMQRLSIAVQRGNAASVMGTFASGAARDGLQ

SEQ ID NO: 15013 - protein, 948 aa, Apotomis turbidana
MNDSSSLLSCPHCHNSSRTFTAHGLKVHIGRMHKGIPRASSPLAAQSGSQIAPSNNPNVRGFEDLAALKQSVRVLRHIPKGARNLAAGRLSDLIDKCVCSNGTEEWFDFLSFAYSALKAPGAGGSGNLTSKVKRNIVSACLVDSVESITAEAVVSRTPSVLKTVEGKVFEGDLTGAVRILMSDDGIASSGPETLAILQSKHPAPSRQLLLPPEPDRSIPSLTVKSEDIVQALYSFNSSSAAGLDGVRPVHLKELTSVSAGDNGPRLLECLAKLCNFLLSGQLNPAVSPYIYGASLCALSKRDGGIRPIAIGSVYRRLTAKLGCCAVRDEMAAYLQPCQLGFGTKLGCEAAIHATRAFSGNPNNAESVIIKIDIKNAFNSVERDVLLSEVRDKVPSLYPFLFQVYASPSNLFYGDSLILSRVGAQQGDPLGPLVFSLAIQKAISELQSPLNIWYLDDGTLGGRPEEVEQDLLRLLPRFRELGLEVNCGKCEFFPCGTNSVNSFPVFSALLPGLKVLSPETFNLLGSPIFPEAIPEAFEARRQLLLVAVQRLKELSAHVALVLLRVCFAVPKLTYFLRTVPAWLHPNLIDTFDCVVRESLERVLNVSLNEVQWAQASLPVRTGGLGVRRVRDVSLPAFLASAGGVVDLVTQILSPNGDRATIPYASDALAAWTALNPSAVMPDRPDRQRLWDEAGVQRIFNNLLENSVGADTARLIAVSKPEAGAWLHALPSPHLGTLLDNDSMRVAVALRLGCDVCEPHVCICGTMVESSGHHALSCRRCAGRFPRHHALNDLVRRALVLANVPCILEPPGLSRTDGKRPDGLTLVPWKSGKCLLWDATCVSTFAASHIGRTVRVAGAAAERAALRKREKYSALSNYLFVPLAVETTGCWCSETKEFLAELGRRLREAGLDPRSGSFLMQRLSIAVQRGNAASVMGTFASGRTGSEDFV

SEQ ID NO: 15014 - protein, 952 aa, Cydia splendana
MQAPTRVRCPHCPNSPRTFTEHGLKVHIGHIHKDVPRTTLSPSPSPSVAVQQQRRVLSDDSGRTSCFEDLATFRKSVRVLRHIPRGARNLAAGKLCDVIDRCIDTNGVSEWFELLSFAYSALKAPEAAGPGNLTTKVKRNIASVGLIDTLGVEAESVALRPHSVLRTIESKVFEGDLRGAVRVLMSDDSVAPSSPETLANLQLKHPAPSRPLLFPPEPDSSCPPLTVRPEEVAQALGSFNSASAAGLDGIRPSHLKELTSGSAGDNGLRLLECLTRLCNFLLSGQLNPLVCPYVYGASLCALSKKDGGLRPIAVGSVFRRLTAKLGCNAVRDEMASYLQPCQLGFGTKLGCEAAIHAVRAFALDPNNADCIIIKLDIKNAFNSLERDTLLAEVREKAPALYPFLYQSYSSPSKLFFNGSLIPSQVGAQQGDPLGPLIFSLAIQKVISRSRSPLNVWYLDDGTLGGRPEEVEQDLLALLPLFRELGLEVNSSKCEFFPCSANSQPSFSLFCALLPGLKELSTQNFNLLGSPMFPAAIPEAFKVREQLLRSAGERLKKLSAHVALTLLRSCFAVPKVMYFLRTVPAWLHPGHMDSFDLVVKECAEGVLNVSLNSNQWDLASLPIRSGGIGIRRVRDVCLPAFLASAAGAVDLVTKILSLDGGKAEIPFASDALSAWEALNPGASVPEQPFRQRLWDEVGIKRLFDCLLGKASGADRARLNAALAPESGAWLHALPSPNLGTLLDNDSLRVAVALRLGCDVCQPHLCICGSMVESNGHHALSCCRCAGRFPRHHALNDIVRRALVSANVPCVLEPPGLSRSDGKRPDGLTLVPWEKGKCLLWDATCVSTFAATHLGRTVRSAGAAAEQAASLKRDKYSGLTNYLFVPLAVETSGCWCAEAKTFLGELGRRLQQRGLDPRSGSFLAQRLSIAVQRGNAASVMGTFAPGAMRGGLFD

SEQ ID NO: 15015 - protein, 947 aa, Cydia splendana
MQATTLSQCPYSPNSSRTFTEHGLKVHITRKHRTRPTALPPTLTVQPQQRQQALSGNSSCIDLDDLATLKQSVRVLRHIPKGARNLAAGKLCEAIEQCIKNNGTPDWFALLSFAYSALKAPDSTSAGNLTTKVKRNIVSSGVIDSLFVEAEPAALRPPSILRTIESKVYEGDLRGAVRVLMSDDGIAPPNPETLATLVSKHPAPSRPLTFPPEPDNSCPALSVKLEEVSQALGSFNNSSAAGLDGIRPSHLKELTSSAAGENGPRLLEYLTKLCNFLLSGQLNPAVSPYIYGASLCALSKKDGGLRPIAIGSVFRRLTAKLGCRAVRDEMASYLQPYQLGFGTKLGCEAAIHATRAFVLDPKNADSVIIKIDLKNAFNSVERDVLLSEVREKIPILYPFLHQVYSSPSKLFFNESLIQSQVGAQQGDPLGPLIFSLAIQKAISGPQSPLNVWYLDDGTLGGKPEEVYQDLVTLLPLLHNLGLEVNTNKCEFFPCSANSHSSLPSFSTLLPGLKELSSQNFHLLGSPIFPDAVPGAFKTREQLLLLARERLRKLSAHVALTLLRSCFAVPRITYFLRTVPTWLHPTHMDSFDLALKESAECLLNVSLNHDQWDQASLPIRNGGLGIRRSRDVSLPAFLASAAGVVDLVTKILPLDGAKATIPYAAEALSAWKTLNSDAPVPDKPYRQRLWDDVVVKRLLDSLIHTAAGSDRARLIAASRPESGAWLHALPSPNLGTLLDSDLMRVAVALRLGCDVCQPHQCICGSTVESNGHHALSCCRCAGRFPRHHALNDIIRRALVLANVPCMLEPPGLSRSDGKRPDGLTLVPWERGKCLLWDATCVSTFAASHLSRTIRSAGAAAEHAASLKKAKYSALSGYLFVPLAVETSGCWCAEGMSFLRELGRRLLERGLDPRSGFFLMQRLSIAVQRGNAASVMGTFASGAARDGLQ

SEQ ID NO: 15016 - protein, 947 aa, Pammene fasciana
MSDSLSLSLCPHCPNSARTFTAHGLKVHIGRMHKGVSRTSPCISVQPASQHIHTGSSNVRGLDDLASLKQSVRVLRHIPKGARNLAAGKLCDIIEKCVDSNGAAEWFELLSFAFSALKVPESVGVGSLTSKVKRNIDSSCVSCAIEDVAGTAGPRATSVLKTIESKVFEGDLTGAVRVLMSEDKVAPSGPDTFSILQSKHPAPSRPLVFPQEPDRSFVALVVTPEEVAQALGSFNNGSAAGVDGIRPAHLKELVSASAGENGRRLLECLARLCNFLLSGQLNPVVCPFIYGASLCALSKKDGGLRPIAIGSTLRRLTSKLGCRAVREEMAAYLRPCQLGFGTRLGCEAAIHATRAFAVDQGNADSIILKLDIKNAFNSVERDVLLSEIREKVPSLYPFLFQVYSSPSNLFYDGSLVLSQVGAQQGDPLGPLVFSLAIHKAISELQSPLNIWYLDDGTIGGKPEEVERDLLVLLPRFRDLGLEVNPGKCEFYPCSTDSRISFSGFSTLLPGLKELSAQNFSLLGSPIFREGVPAAFEARRQLLLLAAERLKGLSAHVAFVLLRVCFAVPRLTYFLRTVPAWLFPDLIDSFDRVVKEAIEDLLNVSLSTDQWAQASLPIRSGGLGIRCVRDVSLPAFLASVGGVGDLVTQIMSLDGGRVSIPFASDALVAWQALNPSSPIPEKPDRQRLWDEIGVKRVFRGLLERAVGVDRARLNAVSEPESGAWLHALPSPHLGTLLDNDSVRVAVALRLGCDVCEPHVCICGSMVESNGHHALSCCRCAGRFPRHHALNDIVRRALVSAGIPCVLEPPGLSRSDGKRPDGLTLIPWEKGKSLLWDATCVSTFAASHIGRTMRAAGAAAEVAAVRKREKYVAFVNYLFVPLAVETTGCWCSEAKLFLGQLGRRLRERGLDPRSGSFLVQRLSIAVQRGNAASVMGTFAYGAMRGDLFD

SEQ ID NO: 15017 - protein, 952 aa, Cydia splendana
MQAPTRVRCPHCPNSPRTFTEHGLKVHIGHIHKDVPRTTLSPSPSPSVAVQQQRRVLSDDSGSTSCFEDLATFRKSVRVLRHIPRGARNLAAGKLCDVIDRCIDTNGVSEWFELLSFAYSALKAPEAAGPGNLTTKVKRNIASVGLIDTLGVEAESVALRPHSVLRTIESKVFEGDLRGAVRVLMSDDSVAPSSPETLANLQLKHPAPSRPLLFPPEPDSSCPPLTVRPEEVAQALGSFNSASAAGLDGIRPSHLKELTSGSAGDNGLRLLECLTRLCNFLLSGQLNPLVCPYVYGASLCALSKKDGGLRPIAVGSVFRRLTAKLGCNAVRDEMASYLQPCQLGFGTKLGCEAAIHAVRAFALDPNNADCIIIKLDIKNAFNSLERDTLLAEVREKAPALYPFLYQSYSSPSKLFFNGSLIPSQVGAQQGDPLGPLIFSLAIQKVISRSRSPLNVWYLDDGTLGGRPEEVEQDLLALLPLFRELGLEVNSSKCEFFPCSANSQPSFSLFCALLPGLKELSTQNFNLLGSPMFPAAIPEAFKVREQLLRSVGERLKKLSAHVALTLLRSCFAVPKVMYFLRTVPAWLHPGHMDSFDLVVKECAEGVLNVSLNSNQWDLASLPIRSGGIGIRRVRDVCLPAFLASAAGAVDLVTKILSLDGGKAEIPFASDALSAWEALNPGASVPEQPFRQRLWDEVGIKRLFDCLLGKASGADRARLNAALAPESGAWLHALPSPNLGTLLDNDSLRVAVALRLGCDVCQPHLCICGSMVESNGHHALSCCRCAGRFPRHHALNDIVRRALVSANVPCVLEPPGLSRSDGKRPDGLTLVPWEKGKCLLWDATCVSTFAATHLGRTVRSAGAAAEQAASLKRDKYSGLTNYLFVPLAVETSGCWCAEAKTFLGELGRRLQQRGLDPRSGSFLAQRLSIAVQRGNAASVMGTFAPGAMRGGLFD

SEQ ID NO: 15018 - protein, 947 aa, Pammene fasciana
MSDSLSLSLCPHCPNSARTFTAHGLKVHIGRMHKGVSRTSPCISVQPASQHIHTGSSNVRGLDDLASLKQSVRVLRHIPKGARNLAAGKLCDIIEKCVDSNGAAEWFELLSFAFSALKVPESVGVGSLTSKVKRNIDASCVSCAIEDVAGTAGPRATSVLKSIESKVFEGDLTGAVRVLMSEDKVAPSGPDTFSILQSKHPAPSRPLVFPQEPDRSFVALVVTPEEVAQALGSFNNGSAAGVDGIRPAHLKELVSASAGENGRRLLECLARLCNFLLSGQLNPVVCPFIYGASLCALSKKDGGLRPIAIGSTLRRLTSKLGCRAVREEMAAYLRPCQLGFGTRLGCEAAIHATRAFAVDQGNADSIILKLDIKNAFNSVERDVLLSEVREKVPSLYPFLFQVYSSPSNLFYDGSLVLSQVGAQQGDPLGPLVFSLAIHKAISELQSPLNIWYLDDGTIGGKPEEVERDLLVLLPRFRDLGLEVNPGKCEFYPCSTDSRISFSGFSTLLPGLKELSAQNFSLLGSPIFREGVPAAFEARRQLLLLAAERLKGLSAHVAFVLLRVCFAVPRLTYFLRTVPAWLFPDLIDSFDRVVKEAIEDLLNVSLSTDQWAQASLPIRSGGLGIRCVRDVSLPAFLASVGGVGDLVTQIMSLDGGRVSIPFASDALVAWQALNPSSPIPEKPDRQRLWDEIGVKRVFRGLLERAVGVDRARLNAVSEPESGAWLHALPSPHLGTLLDNDSVRVAVALRLGCDVCEPHVCICGSMVESNGHHALSCCRCAGRFPRHHALNDIVRRALVSAGIPCVLEPPGLSRSDGKRPDGLTLIPWEKGKSLLWDATCVSTFAASHIGRTMRAAGAAAEVAAVRKREKYAAFVNYLFVPLAVETTGCWCSEAKLFLGQLGRRLRERGLDPRSGSFLVQRLSIAVQRGNAASVMGTFASGAMRGDLFD

SEQ ID NO: 15019 - protein, 952 aa, Cydia splendana
MQAPTRVRCPHCPNSPRTFTEHGLKVHIGHIHKDVPRTTLSLSPSPSVAVQQQRRVLSDDSGSTSCFEDLATFRKSVRVLRHIPRGARNLAAGKLCDVIDRCIDTNGVSEWFELLSFAYSALKAPEAAGPGNLTTKVKRNIASVGLIDTLGVEAESVALRPHSVLRTIESKVFEGDLRGAVRVLMSDDSVAPSSPETLANLQLKHPAPSRPLLFPPEPDSSCPPLTVRPEEVAQALGSFNSASAAGLDGIRPSHLKELTSGSAGDNGLRLLECLTRLCNFLLSGQLNPLVCPYVYGASLCALSKKDGGLRPIAVGSVFRRLTAKLGCNAVRDEMASYLQPCQLGFGTKLGCEAAIHAVRAFALDPNNADCIIIKLDIKNAFNSLERDTLLAEVREKAPALYPFLYQSYSSPSKLFFNGSLIPSQVGAQQGDPLGPLIFSLAIQKVISRSRSPLNVWYLDDGTLGGRPEEVEQDLLALLPLFRELGLEVNSSKCEFFPCSANSQPSFSLFCALLPGLKELSTQNFNLLGSPMFPAAIPEAFKVREQLLRSAGERLKKLSAHVALTLLRSCFAVPKVMYFLRTVPAWLHPGHMDSFDLVVKECAEGVLNVSLNSNQWDLASLPIRSGGIGIRRVRDVCLPAFLASAAGAVDLVTKILSLDGGKAEIPFASDALSAWEALNPGASVPEQPFRQRLWDEVGIKRLFDCLLGKASGADRARLNAALAPESGAWLHALPSPNLGTLLDNDSLRVAVALRLGCDVCQPHLCICGSMVESNGHHALSCCRCAGRFPRHHALNDIVRRALVSANVPCVLEPPGLSRSDGKRPDGLTLVPWEKGKCLLWDATCVSTFAATHLGRTVRSAGAAAEQAASLKRDKYSGLTNYLFVPLAVETSGCWCAEAKTFLGELGRRLQQRGLDPRSGSFLAQRLSIAVQRGNAASVMGTFAPGAMRGGLFD

SEQ ID NO: 15020 - protein, 952 aa, Pammene fasciana
MQAPPRSQCPYCPNSPRTFSAHGLKVHIGHLHKDVCRVTPSPSPSGASVATGGPPQVLAGGSALSNLDDLATLKKTRRVLRHIPKGARNLAAGKLCDVIDRCVNTNGTSEWFGLLSFAYSALKVPDAGGAGSLTTKVKHNIESADVSDSLFVDSGLVASRPPSALRTIESKVFEGDLRGAVRVLMSEDDVAPSNPETLASLLSKHPVPSRPLLFPPEPDRSCPALLVKSEEVAQALSSFNNSSAAGLDGIRPSHLKELISGSAGDHGLRLLECLTKLCNFLLSGQLNPAVCPYMYGASLCALSKKDGGLRPIAIGSVFRRLAAKLGCSAVRDEMAAYLQPCQLGFGTKLGCEAAIHAVRAFALDPNNADCVIIKLDIKNAFNTLERDTLLSEALEKVPTLYPFLYQAYSSPSKLFFDGSPILSQVGAQQGDPLGPLIFSLAIQKVISRSRTPLNVWYLDDGTLGGKPQEVQADLLTLLPLLRELGLEVSTVKCEFFPCSANSRSSISTFAGLLPGIKELSVQSFSLLGSPIFPDAVPEAFRVREQLLRLANERLKKLSAHVALTLLRSCFAVPKLMYFLRTVPTWLHPVHMNSFDLALKESAECLLNVCLSPEQWDLASLPIRSGGLGIRRARDVSLPAFLASAAGVVDLVTRIFSLDGDKASIPYASDAFSAWEALNPGAIVPDKPYRQRMWDDVGVTRLFDSLLQGAAGADRARLNAVSKPESGAWLHALPSPNLGTLLDNDSLRVAVALRLGCDVCQPHECICGSMVESNGHHALSCGRCAGRFPRHHVLNDIIRRALVSANIPCVLEPPGLSRSDGKRPDGLTLVPWERGKCLLWDATCVSTFAPTHLSRTVRSAGAAAEQAASLKRAKYSVLSNYLFIPLAVETSGCWCAEAKVFLGELGRRLQERGLDPRSGSFLAQRLSIAIQRGNAASVMGTFAPGMMRGGLFE

SEQ ID NO: 15021 - protein, 959 aa, Cydia splendana
MFNMADASLLSVCPYCPNSSKKFSPHGLKVHIGHKRKDVSRPVSPQPPSVLQRDTLSGPQPAAQTAEPSVLGLGDLAILKQSVKVLRHIPKGARNLAAGKMSDLIDRCLDTNGTGEWFALLSFAYSALKTPEAADPGNLTTKVKRNIDSAHAFTSAEDWGAEAGITNRPSLTKTVESKVFEGDLRGAVRVLMSADGVAPLCPETLAALQSKHPAPSRRLTFPQDPDNSFPAYSVRPEEVAQALGSFSSSSAAGLDGIRPAHLKELTSGSAGENGLRLLESLTKLCNFLLSGQVNLEVCPYIYGASLCALSKKDGGIRPIAIGSTFRRLAAKLGCRAVREEMASYLQPSQLGFGTKLGCEAAIHATRSFSVDPNNADCVIIKIDLKNAFNSIERDILLAEVREKVPSLYPFLFQVYSLPSFLFYSGTQILSQVGAQQGDPFGPLVFSLGIQKAISEIQSPLNIWYLDDGTIGGKPEEVERDLLTLLPRLRELGLEVNSAKCEFFPCSAGARSSFPSFYDILPGLKEVSGQNFNLLGSPIFAEAVPEAFEVRRQLLLMARERLEKLSAHVALVLLRVCFAVPKLMYFLRTVPTWLHPVQMDSFDCDLRESVESLLNVALNPEQWDLASLPIRSGGLGVRRVRDVSLPAFLASASGVVDLVTRILSPNGNRVSIPYAADALAAWMALNPNAPRPEKPDVQRLWDDVGVKRIVEGLIENAVGADRARLLAGSAPESGAWLQALPSPHLGTLLDNDSMRVAVALRLGCDVCVPHLCICGTMVESNGHHALSCGRCAGRFPRHHALNDLVRRALVSANVPCMLEPPGLSRSDGKRPDGLTLVPWQRGKCLLWDATCVSTFAASHIGRTVRAAGAAAEVAALRKREKYAELDGYLFVPLAVETAGCWCSEAREFFKEVGNRLRDRGLDPRSGSFLVQRLSIAIQRGNAASVLGTFAPGMTRGGIFD

SEQ ID NO: 15022 - protein, 946 aa, Cydia splendana
MQATTTAHSQCPHCPNSSRTFCPHGLKVHIGLKHKTQTIAPSLTPTIQRQVSPDNTNSVDLDDLATLKQSVRVLRHIPKGARNLAAGKLSDTIDKCLYSNSTADWFSLLSFAYTALKAPEKNGTSSLTTIVKRNIESSGAIDSLFVEADAAALRPPSVLRTIESKVYEGDLKGAVRILMSDDSVAPSNPETLASLELKHPAPSRPLLFPPEPDRSCPALSAKPDEVALALSSFNNSSAAGLDGIRPLHLKELTSGSTSDNASRLLECLTKLCNFLLSGQLNPAVCPYIYGASLCALSKKDGGIRPIAIGSVFRRLTAKLGCRAVRDEMASYLQPRQLGFATKLGCEAAIHATRTFTLNPSNADCVIVKLDIKNAFNSLERDSMLLEVKEKVPALYPFLYQAYSSNSKLFFSESPIISQVGAQQGDPLGPLIFSLGIQKAISTPRSPLNVWYLDDGIIGGKPEEVREDLLTLLPLLKELGLEVNSSKCEFYPCSADSRESFPSFSAILPELKELSTQKFKLLGSPIFPEAVPEAFQIREQLLHFAKERLKNLSAHVSLTLLRSCFAVPRLTYFLRTVPTWLYPEHIDSFDRTLKESAECLLNVSLNLDQWDLASLPIRNGGLGLRRARDVSLPAFLASAAGVVELVSKILSLDGDRTTIPYASDAQSAWMALNSGASVPEKPFLQRCWDVVGVKRIFDSLMTNAVGADRARLNAASRPESGAWLHALPSPNLGTLLDNDSLRVAVALRLGCDVCQPHLCICGSMVESNGHHALSCCRCAGRFPRHHALNDIIRRALVSANIPSTLEPPGLSRSDGKRPDGLTLVPWEKGKCLLWDATCVSTFAPSHLCRTIRTAGAAAEVAALHKHQKYSALTNYLFVPVAVETSGCWCAEAKTFLREVGRRMQQRGLDPRSGFFLVQRLSIAIQRGNAASVMGTFAPGVARGGLFE

SEQ ID NO: 15023 - protein, 953 aa, Pammene fasciana
MNVNSSSLRTCPHCPSSSRTFTPHGLCVHIGRMHKDVHRSAPARVTQSGLSTNSQSLVQSVTQGALSLESLAKLKQSVRVLRHIPKGARNLAAGKMCDLIDKCTDTNGTAEWVDFLTFAYSALRTPDATGSGNLTTKVKRNIDSAFVECPFSDIGGGGSSRSPSVLKTVESKVYEGDLRGAVRVLMSDDAVAQSSPEAFATLQAKHPAPSRPLSFPPEPDESTPAYKVNEESVAQALGSFNSGSAAGLDGIRPVHLKELTSGSAGDNGRRLLGCLTKLCNFLLEGRLSAEVRPYVFGASLCALSKKDGGLRPIAVGSTFRRLTAKLGCAAVREEMAAYLRPCQMGFGTRLGCEAAIHAARAFAVDPGKADCVIIKLDIKNAFNSIERDVLLSEVKERVPSLYPFLFQIYSSPSNLFFNESLILSQVGAQQGDPLGPLVFSLAIHKIISGLLSPLNVWYLDDGTLGGKPEIVEQDLRTLLPRLKDLGLEVNTSKCEFFPCSAESRASFPSFCNLLPDLKEISPHSFNLLGSPIFPAAIPEAFEMRRQLLLAARDRLRNLPAQVALVLLRICFAVPKITYFLRTVPTWLYPDSVDSFDLELRESVECLLNVSLSSDQWSLASLPIRSGGLGIRCARDVGLPAFLASAGGVGSLVTDILSSNGDRATIPFASDALAAWLALNPGVQLPERPDRQRAWDDVGIKRVFEGLVGRAVGVDRARLLAVSRPEAGAWLRALPSPHLGTLLDDDSMRVAVALRLGCDVCERHLCICGSMVESNGHHALSCGRCAGRFPRHHALNVIVRRALVSANVPCVLEPSGLSRTDGKRPDGLTLVPWHRGKCLLWDATCVSTFAASHLGRTTCTAGAAAETAALRKRDKYSALENYLFVPLAVETTGCWGSEAIKFIKEIGRRLTERGHDPRSGSFLVQRLSIAIQRGNAASVMGTFAPGMSRGGLFD

SEQ ID NO: 15024 - protein, 954 aa, Zygaena filipendulae
MSNLSTLSTCPHCPGSSRTFTSHGLKVHIGRMHKSAQHSPSATLTHVSADDARQRTHGSGTNNNGVHLADLATLKHSIRVLRHIPKGARNLAACKLSDIINKCISNNGAEEWCALLTFAYSALRAPDKAGPGNLTAKVKSNLELACGPLEPETELSTRQPTVLRTIESKVFEGDLRGAVRVLMSDDTVAPSNSETLATLQSKHPSPSRPLSIPSGPDRSVPACQFGVEDIAQALGSFYSSSAAGLDGIRPGHLRELTSGSAGDSGVRLLESLTRLCNFLLRGELNPEVCPYLYGASLCALTKKSGGLRPIAVGSTFRRLTAKLGCRAVKEVMAAYLQPHQLGFGTRLGCEAAIHATRAFSVSSQNAGCVIVKLDLKNAFNTVERDAILQAVMKNAPSLYPFLFQVYSSPSNLFYKQTLILSQVGAQQGDPLGPLAFSLAIQEAISNLKSPLNVWYLDDGTLGGEPEIVEQDLRTLIPRFRELGLEVNSKKCEFFPCSAESRDYFPSFCSLLPGLRELSIQSFNLLGSPIFPDAVPEAFELRRQLLVTAQERLKNLSAHVALILLRVCFAVPKITYFLRTVPTWLFPVHIDSFDATLRETVESLLNVSLGGDQWSLASLPIRDGGLGVRRVRDVSLPAFLASSCGVVDLVTNILSVDGDKASVPYASDALVAWSALNPSAGSPENPDRQRSWDEVGVKRVLESLLEGVVGADRARLMAVSRPESGAWLQALPSPHMGTLLDDVSMRVAVALRLGCDVCEPHTCICGAMVGSSGHHALSCRRSAGRFSRHHALNDIVRRALTSADVPCALEPSGLSRSDGKRPDGMTLVPWQNGKCLLWDATCVCTFAESHLGRTARAPGAAAEVAALRKREKYSALVNYAFVPLAVETTGCWGSEAKAFFRELGRRLRERGHDSRSEAFLVQRLSLAIQRGNAASVMGTFAPGMKRGGLFDERLD

SEQ ID NO: 15025 - protein, 950 aa, Zygaena filipendulae
MSHLSSLSTCPHCPGSSRTFTSHGLKVHIGRMHKSAQHSPSATLTHVSADDARQRTHGSGTNNNGVHLADLATLKHSIRVLRHIPKGARNLAACKLSDIINKCISNNGAEEWCALLTFAYSALRAPDKAGPGNLTAKVKSNLELACGPLEPETELSTRQPTVLRTIESKVFEGDLRGAVRVLMSADTVAPSISETLATLQSKHPSPSRPLSIPSGPDRSVPACQFGVEDIAQALGSFYSSSAAGLDGIRPGHLRELTSGSAGDSGVRLLESLTRLCNFLLRGELNPEVCPYLYGASLCALTKKGGGLRPIAVGSTFRRLTAKLGCRAVKEVMAAYLQPHQLGFGTRLGCEAAIHATRAFSVSSQNAGCVIVKLDLKNAFNTVERDAILRAVMKNVPSLYPFLFQIYSSPSNLYYYQTLILSQVGAQQGDPLGPLAFSLAIQEAISNLKSPLNIWYLDDGTLGGEPEIVEQDLQTLIPRFRELGLEVNSKKCEFFPCSAESRDYFPSFCSLLPGLRELSIQSFNLLGSPIFPDAVPEAFELRRQLLVTARERLKNLSAHVALILLRVCFAVPKITYFLRTVPTWLFPDHIDSFDATVRETVESLLNVSLGDDQWSLASLPIRDGGLGVRRARDVSLPAFLASSCGVVNLVTNILSIDGDKASVPYASDALVAWSALNPSADSPENPDRQRSWDEVGVKRVLESLLEGVVGADRARLMAVSRPESGAWLQALPSPHMGTLLDDVSMRVAVALRLGCDVCEPHACICGAMVGSNGHHALSCRRSAGRFSRHHALNDIVRRALTSADIPCALEPSGLSRSDGKRPDGMTLVPWQNGKCLLWDATCVCTFADSHLGRTARVPGAAAEVAALRKREKYSALVNYAFVPLAVETTGCWGSEAKAFFRELGRRLRERGHDSRSEAFLVQRLSLAIQRGNAASVMGTFAPGMKRGGLFD

SEQ ID NO: 15026 - protein, 949 aa, Notocelia uddmanniana
MSVPSTLLMCPHCPNSYRSFTAHGLKVHTGRMHKNVPRAMQPPGPAQSDCTASQQALYINVGLDDLPTLKQSVPVLRHIPKGARNLAAGKMSDLIDRCIDTNGTAEWVALLSFAYSAFRAPEKSGSGNLTTKVKRNIDSSGFDDNLSSLRLEPGSPRPPSVLRAIQSKVFEGDLRGAVRVLMSDDGIAPSNPQTLVTLQSKHPHPSRPLAFPPEPDRSFCALQVKAEVVAQALSTFYNGSAAGIDGLRPAHLKELISASAGDNGIRLLESLTKLCNFLLSGQLNIEVCPYIYGASLCALSKKDGGIRPIAVGSTLRRLTSKLGCYAVREEMAAYLGPHQLGFGTKLGCEAAIHATRAFSIDRRNVDCVIVKLDIKNAFNSIERDVLLSEVKEKVPSLYPFLYQAYSSPSNLFYNNSLILSQVGAQQGDPLGPLIFSLAIQKVILELQSPLNVWYLDDGTLGGKPERVEQDLLTLLPRFKELGLEVNFNKCEYFPCSADSRTSFPAFSALLPGLKELSVQTFNVLGSPIFSDAIPDGIELRRQILLNAKDRLKNLSAHVALILLRFCFAVPKVTYFLRTVPVWLHPIHLNSFDSVLKETTECLLNVSFNANQWELAVLPIRNGGLGLRRARDVSLPAFLASTYAVVDLVTDIFSLDGDRVIIPYASDAVITWSALNQSVQVPEKPDRQRSWDEIGVKRVFDALMEDALGVDRARLNAVSRPESGAWLHALPSPHLGTLLDNDSLRVAVAFRLGCDVCEPHICICGTMVESNGHHALSCCRCAGRFPRHYALNDIVRRALISANVPCVLEPLGLSRSDGKRPDGMTLVPWQKGKCLLWDATCVSTFAASHLGHTIRSAGAAAELAANRKREKYSALTNYLFVPLAVETTGCWGTEAKKFLREIGRRLRERGHDTRSESFLVQRLSIAIQRGNAASVFGTFAPGMIRGGLFD

SEQ ID NO: 15027 - protein, 955 aa, Apotomis turbidana
MSDLNVLCVCPHCPDSSKTFTAHGLRVHIGRMHKDVPRPVSPRPLAVSPRNARSVSQPAASSASPSVLGFDELPRLKQSVRVLRHIPKGARNLAAGKMAEVINRCIDTNGAVEWFTLLSFAYSAFKTPDTTDPGNLTTKVKRNIDSACTFGSVNDCVGTEVVRSSSLKKTIESKVFEGDLRGAVRVLMSDDRMAPSGPETLMALQSKHPAPSRPLVFPQEPNNSIRALSVSTEDVAQAISSFSSSSSAGLDGIRPAHLKELISGSAGDNGLRLLESLTKLCNFLLSGQLNLEVCPYIYGASLCALAKKGGGIRPIAIGSTFRRLVAKLGCRAVREEIASYLRPSQLGFGTKLGCEAAIHATRAFSVDPNNAECVLIKLDIKNAFNSIERDVLLSEVKEKVPSLYPFLFQVYASPSFLYYNGSPISSQVGAQQGDPLGPLVFSLGIQKAISELKSPLNVWYLDDGTLGGTPEVVKQDLITLLPRFRDLGLEVNAGKCEFYPCSADSRSSFSTFSDLLPGLTELSAQTFSLLGSPIFPDAVPQAFEVRRQLLLSVRERLKDLSAHVALVLLRVCFAVPKLTYFLRTVPTWLHPELLDSFDDVLRESIESLVNVSLNPDQWALASLPIRIGGLGVRRARDVCLPAFLASAGGVEPLVTQILYSDGNRVAVPFAADALEAWKAVNPGEPPPERKDIQRLWDDVGVKRVFEGLLGTAVGVDRARLLAGSVSESGAWLHALPSPHLGTLLDNDSLRVAVALRLGCDVCVPHLCICGTMVESSGHHALSCCRCAGRFPRHHALNDIIRRTLVSAGVPCLLEPPGLSRLDGKRPDGMTLVPWQKGKCLLWDATCVSTFAASHIGRTSVLAGAAAETAAFRKREKNACLRGYLFVPLAVETSGCWCAEAKAFLKELGGRLREKGYDARSGSFLAQRLSIAVQRGNAASVLGTFAPGMVRGGLFE

SEQ ID NO: 15028 - protein, 924 aa, Apotomis turbidana
MHKDVPRPVSPRPLAVSPRNARSVSQPAASSASPSVLGFDELPRLKQSVRVLRHIPKGARNLAAGKMAEVINRCIDTNGAVEWFTLLSFAYSAFKTPDTTDPGNLTTKVKRNIDSACTFGSVNDCVGTEVVRSSSLKKTIESKVFEGDLRGAVRVLMSDDGMAPSGPETLMALQSKHPAPSRPLVFPQEPNNSIRALSVSTEDVAQAISSFSSSSSAGLDGIRPAHLKELISGSAGDNGLRLLESLTKLCNFLLSGQLNLEVCPYIYGASLCALAKKGGGIRPIAIGSTFRRLVAKLGCRAVREEIASYLRPSQLGFGTKLGCEAAIHATRAFSVDPNNAECVLIKLDIKNAFNSIERDVLLSEVKEKVPSLYPFLFQVYASPSFLYYNGSPISSQVGAQQGDPLGPLVFSLGIQKAISELKSPLNVWYLDDGTLGGTPEVVKQDLIALLPRFRDLGLEVNAGKCEFYPCSADSRSSFSTFSDLLPGLTELSAQTFSLLGSPIFPDAVPQAFEVRRQLLLSVRERLKDLSAHVALVLLRVCFAVPKLTYFLRTVPTWLHPELLDSFDDVLRESIESLVNVSLNPDQWALASLPIRIGGLGVRRARDVCLPAFLASAGGVEPLVTQILYSDGNRVAVPFAADALEAWKAVNPGEPPPERKDIQRLWDDVGVKRVFEGLLGTAVGVDRARLLAGSVSESGAWLHALPSPHLGTLLDNDSLRVAVALRLGCDVCVPHLCICGTMVESSGHHALSCCRCAGRFPRHHALNDIIRRTLVSAGVPCLLEPPGLSRSDGKRPDGMTLVPWQKGKCLLWDATCVSTFAASHIGRTSVLAGAAAETAAFRKREKYACLRGYLFVHLAVETSGCWCAEAKAFLKELGGRLREKGYDARSGSFLAQRLSIAVQRGNAASVLGTFAPGMVRGGLFE

SEQ ID NO: 15029 - protein, 951 aa, Apotomis turbidana
MSDPSLPTRFMCPHCTISYRSFTAHGLKVHTGRMHKDVSRAMRPPGPTQSDFSASQQALRGTVGLDDLATLKQSVPVLRHFPKGARNLAAGKMSELIDICIESNGTAEWFALLSFAYSAFRAPEKSGSGNLTTKVKRNIVSSGFEDYLSSLQLEPGPPRQPSVLRTIQSKVFEGDLRGAVRILMSDDGVAPSNPETLATLQSKHPPPSRPLALPPEPDRSVSALEVKAEDVAQALSTFYNGSAAGLDGLRPAHLKELTSASAGDNGFRFLECLSKLCNFLLSGQLNIAICPYIYGASLCALSKKDGGIRPIAVGSTLRRLTAKLGCYAVREEMAAYLGPHQLGFGTKLGCEAAIHATRAFSMDQRNADCVIVKLDIKNAFNSIERDVLLSEVREKVPSLYPFLFQVYSSPSNLFYNNSLILSQVGAQQGDPLGPLTFSLAIQKVILGLQSPLNVWYLDDGTLGGKPETVEQDLLTLLPRFRELGLEVNLKKCEYFSCSANSRPSFPTFSALLPGLKELSIQTFNLLGSPIFPDAIPEAFEVRRQLLLNTKDRLKNLSAHIALTLLRFCFAVPKVTYFLRTVPVWLHPVHVDSFDSVLKETVECLLNVSLNANQWDLAALPIRNGGLGLRRARDVIYPAFLASTYGVVDLVNDICSLDGGRVNIPYASDAVLAWSALNPNADVPENPVRQRSWDDVGVKRVFDALREEAVGVDRARLNAVSRPESGAWLHALPSPHLGTLLDNDSLRVAVAFRLGCDVCEPHVCICGTMVESNGHHALSCCRCAGRFSRHYALNDIVRRALISANVPCVLEPSGLSRTDGKRPDGMTLVPWKKGKCLLWDATCVSTFAASHLGHTTRSAGAAAEVAANRKREKYSALTNYLFVPLAVETTGVWSSDALKFLREVGRRLRERGHDTRSESFLVQRLSIAVQRGNAASVLGTFAPGTIRGGLFD

SEQ ID NO: 15030 - protein, 950 aa, Zygaena filipendulae
MSNLSSLSTCPHCPGSSRTFTSHGLKVHIGRMHKSAQHSPSATLTHVSADDARQRTHGSGTNNNGVHLADLATLKHSIRVLRHIPKGARNLAACKLSDIINKCISNNGAEEWCALLTFAYSALRAPDKAGPGNLTAKVKSNLELACGPLEPETELSTRQPTVLRTIESKVFEGDLRGAVRVLMSDDTVAPSNSETLATLQSKHPSPSRPLSIPSGPDRSVPACQFGVEDIAQALGSFYSSSAAGLDGIRPGHLRELTSGSAGDSGVRLLESLTRLCNFLLRGELNPEVCPYLYGASLCALTKKGGGLRPIAVGSTFRRLTAKLGCRAVKEVMVAYLQPHQLGFGTRLGCEAAIHATRAFSVSSQNAGCVIVKLDLKNAFNTVERDAILRAVMKNVPSLYPFLFQIYSSPSNLYYYQTLILSQVGAQQGDPLGPLAFSLAIQEAISNLKSPLNIWYLDDGTLGGEPEIVEQDLQTLIPRFKELGLEVNSKKCEFFPCSAESRDYFPSFCSLLPGLRELSIQSFNLLGSPIFPDAVPEAFELRRQLLVTARERLKNLSAHVALILLRVCFAVPKITYFLRTVPTWLFPVHIDSFDATVRETVESLLNVSLGDDQWSLASLPIRDGGLGVRRARDVSLPAFLASSCGVVNLVTNILSIDGDKASVPYASDALVAWSALNPSADSPENPDRQRSWDEVGVKRVLESLLEGVVGADRARLMAVSRPESGAWLQALPSPHMGTLLDDVSMRVAVALRLGCDVCEPHACICGAMVGSNGHHALSCRRSAGRFSRHHALNDIVRRALTSADIPCALEPSGLSRSDGKRPDGMTLVPWQNGKCLLWDATCVCTFADSHLGRTARAPGAAAEVAALRKREKYSALVNYAFVPLAVETTGCWGSEAKAFFRELGRRLRERGHDSRSEAFLVQRLSLAIQRGNAASVMGTFAPGMKRGGLFD

SEQ ID NO: 15031 - protein, 955 aa, Apotomis turbidana
MSDLNVLCVCPHCPDSSKTFTAHGLRVHIGRMHKDVPRPVSPRPLAVSPRNARSVSQPAASSASPSVLGFDELPRLKQSVRVLRHIPKGARNLAAGKMAEVINRCIDTNGAAEWFTLLSFAYSAFKTPDTTDPGNLTTKVKRNIDSACTFGSVNDCVGTEVVRSSSLKKTIESKVFEGDLRGAVRVLMSDDGMAPSGPETLMALQSKHPAPSRPLVFPQEPNNSIRALSVSTEDVAQAISSFSSSSSAGLDGIRPAHLKELISGSAGDNGLRLLESLTKLCNFLLSGQLNLEVCPYIYGASLCALAKKGGGIRPIAIGSTFRRLVAKLGCRAVREEIASYLRPSQLGFGTKLGCEAAIHATRAFSVDPNNAECVLIKLDIKNAFNSIERDVLLSEVKEKVPSLYPFLFQVYASPSFLYYNGSPISSQVGAQQGDPLGPLVFSLGIQKAISELKSPLNVWYLDDGTLGGTPEVVKQDLIALLPRFRDLGLEVNAGKCEFYPCSADSRSSFSTFSDLLPGLTELSAQTFSLLGSPIFPDAVPQAFEVRRQLLLSVRERLKDLSAHVALVLLRVCFAVPKLTYFLRTVPTWLHPELLDSFDDVLRESIESLVNVSLNPDQWALASLPIRIGGLGVRRARDVCLPAFLASAGGVEPLVTQILYSDGNRVAVPFAADALEAWKAVNPGEPPPERKDIQRLWDDVGVKRVFEGLLGTAVEVDRARLLAGSVSESGAWLHALPSPHLGTLLDNDSLRVAVALRLGCDVCVPHLCICGTMVESSGHHALSCCRCAGRFPRHHALNDIIRRTLVSAGVPCLLEPPGLSRSDGKRPDGMTLVPWQKGKCLLWDATCVSTFAASHIGRTSVLAGAAAETAAFRKREKYACLRGYLFVPLAVGSSGCWCAEAKAFLKELGGRLREKGYDARSGSFLAQRLSIAVQRGNAASVLGTFAPGMVRGGLFE

SEQ ID NO: 15032 - protein, 955 aa, Apotomis turbidana
MSDLNVLCVCPHCPDSSKTFTAHGLRVHIGRMHKDVPRPVSPRPLAVSPRNARSVSQPAASSASPSVLGFDELPRLKQSVRVLRHIPKGARNLAAGKMAEVINRCIDTNGAVEWFTLLSFAYSAFKTPDTTDPGNLTTKVKRNIDSACTFGSVNDCVGTEVVRSSSLKKTIESKVFEGDLRGAVRVLMSDDGMAPSGPETLMALQSKHPAPSRPLVFPQEPNNSIRALSVSTEDVAQAISSFSSSSSAGLDGIRPAHLKELISGSAGDNGLRLLESLTKLCNFLLSGQLNLEVCPYIYGASLCALAKKGGGIRPIAIGSTFRRLVAKLGCRAVREEIASYLRPSQLGFGTKLGCEAAIHATRAFSVDPNNAECVLIKLDIKNAFNSIERDVLLSEVKEKVPSLYPFLFQVYASPSFLYYNGSPISSQVGAQQGDPLGPLVFSLGIQKAISELKSPLNVWYLDDGTLGGTPEVVKQDLIALLPRFRDLGLEVNAGKCEFYPCSADSRSSFSTFSDLLPGLTELSAQTFSLLGSPIFPDAVPQAFEVRRQLLLSVRERLKDLSAHVALVLLRVCFAVPKITYFLRTVPTWLHPELLDSFDDVLRESIESLVNVSLNPDQWALASLPIRIGGLGVRRARDVCLPAFLASAGGVEPLVTQILYSDGNRVAVPFAADALEAWKAVNPGEPPPERKDIQRLWDDVGVKRVFEGLLGTAVGVDRARLLAGSVSESGAWLHALPSPHLGTLLDNDSLRVAVALRLGCDVCVPHLCICGTMVESSGHHALSCCRCAGRFPRHHALNDIIRRTLVSAGVPCLLEPPGLSRSDGKRPDGMTLVPWQKGKCLLWDATCVSTFAASHIGRTSVLAGAAAETAAFRKREKYACLRGYLFVPLAVETSGCWCAEAKAFLKELGGRLREKGYDARSGSFLAQRLSIAVQRGNAASVLGTFAPGMVRCGLFE

SEQ ID NO: 15033 - protein, 955 aa, Apotomis turbidana
MSDLNVLWVCPHCPDSSKTFTAHGLRVHIGRMHKDVPRPVSPRPLAVSPRNARSVSQPAASSASPSVLGFDELPRLKQSVRVLRHIPKGARNLAAGKMAEVINRCIDTNGAAEWLTLLSFAYSAFKTPDTTDPGNLTTKVKRNIDSACTFGSVNDCVGTEVLRSSSLKKTIESKVFEGDLRGAVRVLMSGDGMAPSGPETLMALQSKHPAPSRPLVFPQEPNNSIRALSVSTEDVAQAISSFSSSSSAGLDGIRPAHLKELISGSAGDNGLRMLESLTKLCNFLLSGQLNLEVCPYIYGASLCALAKKGGGIRPIAIGSTFRRLVAKLGCRAVREEIASYLRPSQLGFGTKLGCESAIHATRAFSVDPNNAECVLIKLDIKNAFNSIERDVLLSEVKEKVPSLYPFLFQVYASPSFLYYNGSPINSQVGAQQGDPLGPLVFSLRIQKAISELKSPLNVWYLDDGTLGGTPEVVKQDLIALLPRFRDLGLEVNAGKCEFYPCSADSRSSFSAFSDLLPGLTELSAQTFSLLDSPIFPDAVPQAFEVRRQLLLSVRERLKDLSAHVALVLLRVCFAVPKLTYFLRTVPTWLHPELLDSFDDVLRESIESLVNVSLNPDQWALASLPIRSGGLGVRRARDVCLPAFLASAGGVEPLVTQILYSDSNRVAVPFAADALEAWKAVNPGEPPPERKDIQRLWDDVGVKRVFEGLLGTAVGVDRARLLAGSVSESGTWLHALPSPHLGTLLDNDSLRVAVALRLGCDVCVPHLCICGTMVESSGHHALSCCRCAGRFPRHHALNDIIRRALVSAGVPCLLEPPGLSRSDGKRPDGMTLVPWQKGKCLLWDATCVSTFAASHIGRTSVLAGAAAETAAFRKREKYACLRGYLFVPLAVETSGCWCAEAKAFLKELGGRLREKGYDARSGSFLAQRLSIAVQRGNAASVLGTFAPGMVRGGLFE

SEQ ID NO: 15034 - protein, 949 aa, Notocelia uddmanniana
MSVPSTLLMCPHCPNSYRSFTAHGLKVHTGRMHKNVPRAMQPPGPAQSDCTVSQQALYINVGLDDLPTLKQSVPVLRHIPKGARNLAAGKMSDLIDRCIDTNGTAEWVALLSFAYSAFRAPEKSGSGNLTTKVKRNIDSSGFDDNLSSLRLEPGSPRPPSVLRAIQSKVFEGDLRGAVRVLMSDDGIAPSNPQTLVTLQSKHPHPSRPLAFPPEPDRSFCALQVKAEVVAQALSTFYNGSAAGIDGLRPAHLKELISASAGDNGIRLLESLTKLCNFLLSGQLNIEVCPYIYGASLCALSKKDGGIRPIAVGSTLRRLTSKLGCYAVREEMAAYLGPHQLGFGTKLGCEAAIHATRAFSIDRRNVDCVIVKLDIKNAFNSIERDVLLSEVKEKVPSLYPFLYQAYSSPSNLFYNNSLILSQVGAQQGDPLGPLIFSLAIQKVILELQSPLNVWYLDDGTLGGKPERVEQDLLTLLPRFKELGLEVNFNKCEYFPCSADSRTSFPAFSALLPGLKELSVQTFNVLGSPIFSDAIPDAIELRRQILLNAKDRLKNLSAHVALILLRFCFAVPKVTYFLRTVPVWLHPIHLNSFDSVLKETTECLLNVSFNANQWELAVLPIRNGGLGLRRARDVSLPAFLASTYAVVDLVTDIFSLDGDRVIIPYASDAVITWSALNQSAQVPEKPDRQRSWDEIGVKRVFDALMEDALGVDRARLNAVSRPESGAWLHALPSPHLGTLLDNDSLRVAVAFRLGCDVCEPHICICGTMVESNGHHALSCCRCAGRFPRHYALNDIVRRALISANVPCVLEPLGLSRSDGKRPDGMTLVPWQKGKCLLWDATCVSTFAASHLGHTIRSAGAAAELAANRKREKYSALTNYLFVPLAVETTGCWGTEAKKFLREIGRRLRERGHDTRSESFLVQRLSIAIQRGNAASVFGTFAPGMIRGGLFD

SEQ ID NO: 15035 - protein, 949 aa, Notocelia uddmanniana
MSVPSTLLMCPHCPNSYRSFTAHGLKVHTGRMHKNVPRAMQPPGPAQSDCTASQQALYINVGLDDLPTLKQSVPVLRHIPKGARNLAAGKMSDLIDRCIDTNGTAEWVALLSFAYSAFRAPEKSGSGNLTTKVKRNIDSSGFDDNLSSLRLEPGSPRPPSVLRAIQSKVFEGDLRGAVRVLMSDDGIAPSNPQTLVTLQSKHPHPSRPLAFPPEPDRSFCALQVKAEVVAQALSTFYNGSAAGIDGLRPAHLKELISASAGDNGIRLLESLTKLCNFLLSGQLNIEVCPYIYGASLCALSKKDGGIRPIAVGSTLRRLTSKLGCYAVREEMAAYLGPHQLGFGTKLGCEAAIHATRAFSIDRRNVDCVIVKLDIKNAFNSIERDVLLSEVKEKVPSLYPFLYQAYSSPSNLFYNNSLILSQVGAQQGDPLGPLIFSLAIQKVILELQSPLNVWYLDDGTLGGKPERVEQDLLTLLPRFKELGLEVNFNKCEYFPCSADSRTSFPAFSALLPGLKELSVQTFNVLGSPIFSDAIPDAIELRRQILLNAKDRLKNLSAHVALILLRFCFAVPKVTYFLRTVPVWLHPIHLNSFDSVLKETTECLLNVSFNANQWELAVLPIRNGGLGLRRARDVSLPAFLASTYAVVDLVTDIFSLDGDRVIIPYASDAVITWSALNQSAQVPEKPDRQRSWDEIGVKRVFDALMEDALGVDRARLNAVSRPESGAWLHALPSPHLGTLLDNDSLRVAVAFRLGCDVCEPHICICGTMVESNGHHALSCCRCAGRFPRHYALNDIVRRALISANVPCVLEPLGLSRSDGKRPDGMTLVPWQKGKCLLWDATCVSTFAASHLGHTIRSAGAAAELAANRKREKYSALTNYLFVPLAVETTGCWGTEAKKFLREIGRRLRERGHDTRSESFLVQRLSIAIQRGNAASVFGTFAPGMIRGGLFD

SEQ ID NO: 15036 - protein, 943 aa, Cydia splendana
MQATSTSHSQCPHCPNSSRTFCPHGLKVHTGLKHKTQTIAPSLTPTIQRQVPPNNTNSVDLDDLAILKQSVRVLRHIPKGARNLAAGKLSDTIDKCLHSNSTADWFSLLSFAYTALKAPEKNGACSLTTIVKRNIESSGAIDSLFVEADAAALRPPSVLRTIESKVYEGDLKGAVRILMSDDRVAPSNPETLASLVLKHPAPSRPLLFPPEPDRSCPALSAKPDEVAQALSSFNNSSAAGLDGIRPLHLKELTSGSTSDNGSRLLECLTKLCNFLLSGQLNPAVCPYIYGASLCALSKKDGGIRPIAIGSVFRRLTAKLGCRAVRDEMASYLQPRQLGFATKLGCEAAIHATRTFTLNPSNTDCVIVKLDIKNAFNSLERDSMLLEVKEKVPALYPFLYQAYSFNSKLFFSESPIISQVGAQQGDPLGPLIFSLGIQKAISTPRSPLNVWYLDDGILGGKPEEVREDLLTLLPLLKELGLEVNSSKCEFYPCSADSRESFPSFSAILPGLKELSTQNFQLLGSPIFPEAVPEAFQIREQLLHFAKERLKNLSAHVSLTLLRSCFAVPRLTYFLRTVPTWLYPEHIDSFDRTLKESAECLLNVSLNTDQWDLASLPIRNGGLGLRRARDVSLPAFLASATGVVELVSKILSLDGDRTTIPYASDAQSAWMALNSGASVPEKPFLQRCWDVVGVKRIFDSLMTNAVGADRARLNAASRPESGAWLHALPSPNLGTLLDNDSLRVAVALRLGCDVCQPHLCICGSMVESNGHHALSCCRCAGRFPRHHALNDIIRRALVSANIPSTLEPPGLSRSDGKRPDGLTLVPWEKGKCLLWDATCVSTFAPSHLCRTAGAAAEVAALQKHQKYSALTNYLFVPVAVETSGCWCAEAKTFLREVGRRLQERGLDPRSGFFLVQRHRIAIQRGNAASVMGTFAPGVARGGLFQ

SEQ ID NO: 15037 - protein, 946 aa, Cydia splendana
MQATTTSHSQCPHCPNSSRTFCPHGLKVHIGLKHKTQTIAPSLTPTIQRQVSPDNTNSVDLDDLATLKQSVRVLRHIPKGARNLAAGKLSDTIDKCLYSNSTADWFSLLSFAYTALKAPEKNGTSSLTTIVKRNIEPSWAIDSLFVEADAAALRPPSVLRTIESKVYEGDLKGAVRILMSDDNVAPSNPETLASLELKHPAPSRPLLFPPEPDRSCPALSAKPDEVAQALSSFNKSSAAGLDGIRPLHLKELTSGSTSDNASRLLECLTKLCNFLLSGQLNPAVCPYIYGASLCALSKKDGGIRPIAIGSVFRRLTAKLGCRAVRDEMASYLQPRQLGFATKLGCEAAIHATRTFTLNPSNADCVIVKLDIKNAFNSLERDSMLLEVKEKVPALYPFLYQAYSSNSKLFFSESPIISQVGAQQGDPLGPLIFSLGIQKAISTPRSPLNVWYLDDGIIGGKPEEVREDLLTLLPLLKELGLEVNSSKCEFYPCSADSRESFPSFSAILPGLKELSTQKFKLLGSPIFPEAVPEAFQIREQLLHFAKERLQNLSAHVSLTLLRSCFAVPRLTYFLRTVPTWLYPEHIDSFDRTLKESAECLLNVSLNSDQWDLASLPIRNGGLGLRRARDVSLPAFLASAAGVVELVSKMLSLDGDRTTIPYASDAQSAWMALNSGASVPEKPFLQRCWDVVGVKRIFDSLMTNAVGADRARLNAASRPESGAWLHALPSPNLGTLLDNDSLRVAVALRLGCDVCQPHLCICSSMVESNGHHALSCCRCAGRFPRPHALNDIIRRALVSANIPSTLEPPGLSRSDGKRPDGLTLVPWEKGKCLLWDATCVSTFAPSHLCRTIRTAGAAAEVAALHKHQKYSALTNYLFVPVAVETSGCWCAEAKTFLREVGRRMQQRGLDPRSGFFLVQRLSIAIQRGNAASVMGTFAPGVARGGLFE

SEQ ID NO: 15038 - protein, 946 aa, Cydia splendana
MQATSTSHSQCPHCPNSSRTFCPHGLKVHIGLKHKTQTIAPSLTLTIQRQVPPNNTNSVDLDDLAILKQSVRVLRHIPKGARNLAAGKLSDTIDKCLHSNNTADWFSLLSFAYTALKAPEKNGASSLTTIVKRNIESSGAIDSLFVEADAAALRPPSVLRTIESKVYEGDLKGAVRILMSDDRVAPSNPETLASLVLKHPAPSRPLLFPPEPDRSCPALSAKPDEVAQALSSFNNSSAAGLDGIRPLHLKELTSGSTSDNGSRLLECLTKLCNFLLSGQLNPAVCPYIYGASLCALSKKDGGIRPIAIGSVFRRLTAKLGCRAVRDEMASYLQPRQLGFATKLGCEAAIHATRTFTLNPSNTDCVIVKLDIKNAFNSLERDSMLLEVKEKVPALYPFLYQAYSFNSKLFFSESPIISQVGAQQGDPLGPLIFSLGIQKAISTPRSPLNVWYLDDGILGGKPEEVREDLLTLLPLLKELGLEVNSSKCEFYPCSADSRESFPSFSAILPGLKELSTQNFQLLGSPIFPEAVPEAFQIREQLLHFAKERLKNLSAHVSLTLLRSCFAVPRLTYFLRTVPTWLYPEHIDSFDRTLKESAECLLNVSLNTDQWDLASLPIRNGGLGLRRARDVSLPAFLASATGVVELVSKILSLDGDRTTIPYASDAQSAWMALNSGASVPEKPFLQRCWDVVGVKRIFDSLMTNAVGADRARLNAASRPESGAWLHALPSPNLGTLLDNDSLRVAVALRLGCDVCQPHLCICGSMVESNGHHALSCCRCAGRFPRHHALNDIIRRALVSANIPSTLEPPGLSRSDGKRPDGLTLVPWEKGKCLLWDATCVSTFAPSHLCRTIRTAGAAAEVAALQKHQKYSALTNYLFVPVAVETSGCWCAEAKTFLREVGHRLQERGLDPRSGFFLVQRLSIAIQRGNAASVMGTFAPGVARGGLFQ

SEQ ID NO: 15039 - protein, 950 aa, Hedya salicella
MSDLSLLSGCPHCPNSNRNFTAHGLRVHIGRMHKDIPRPVSPGLSQPQAPQPAQLDSSRVLGLDDLGTLKQSVRVLRHVPKGARSLAAGKLRDLIDGCIDTNGTAEWFALLSFAYSALKAPETAGPGNLTTKVKRNIDSAVTVNSVGDSEVVGVNARSPSVLRTVESKVFDGDIRGAVRVLMSDDAVAPSNLETLAALRSKHPSPSRELVFPLQPGGSLSTCTVTPEDVVQALGSFNNSSAAGLDGIRPAHLKELTSGTAGDNGLRLLESLARLCNFLFSGQLNPVVCPYMYGASLCALSKKDGGLRPIAIGSTFRRLAAKLGCRAVREEMAAFLRPHQLGFGTRLGCEAAIHATRAFAGAPGNAECVIVKLDIKNAFNSLERDTLLSEVKEKLPSLYPFLFQVYSSPSNLFYNGSLILSQVGAQQGDPLGPLVFSLAIQKAISELKSPLNIWYLDDGTLGGRPEEVKNDLIALLPRFRELGLEVNACKCEFFPCSVNSRASFPDFGSLLPGLRELSVQTFNLLGSPIFTDAVPEAFEIRRQLLLTSRERLKGLSAHVALVLLRVCFAIPRLTYFLRTVPTWLYPAHIDSFDTVLKESVECTLNVSLSSEQWDLASLPIRNGGLGIRRTRDVGLPAFLASAHGVECLVTQILSLDDGDRATMPYASDALAAWSALNPGTPAPEKLDRQRLWDDVGVKRVLDGLLVNANGVEKARLNAVSRPDAGAWLHALPSPHLGTLLDNDSLRVAVALRLGCDVCEPHLCICGTMVESSGHHALSCCRCAGRFPRHHALNDIVRRALISAGVPCVLEPPGLSRTDGKRPDGLTLVPWERGRCLLWDATCVSTFAASHLSRTMRVPGAAAELAAVRKREKYSVLANYLFVPLAVETTGCWCSEAKTFFVEVGRRLRERGLDPRSRSFLVQRLAVAVQRGNAASLMGTFAPGVTRGGLFD

SEQ ID NO: 15040 - protein, 950 aa, Hedya salicella
MSDLSLLSGCPHCANSNRNFTAHGLRVHIGRMHKDIPRPVSPGLSQPQAPQPAQLDSSRVLGLDDLGTLKQSVRVLRHVPKGARSLAAGKLRDLIDGCIDTNGTAEWFALLSFAYSALKAPETAGPGNLTTKVKRNIDSAVTVNSVGDSVVVGVNARSPSVLRTVESKVFDGDIRGAVRVLMSDDAVAPSNLETLAALRSKHPSPSRELVFPLQPDGSLSTCTVTPEDVVQALGSFNNSSAAGLDGIRPAHLKELTSGTAGDNGLRLLESLARLCNFLFSGQLNPVVCPYMYGASLCALSKKDGGLRPIAIGSTFRRLAAKLGCRAVREEMAAFLRPHQLGFGTRLGCEAAIHATRAFAGAPGNAECVIVKLDIKNAFNSLERDTLLSEVKEKLPSLYPFLFQVYSSPSNLFYNGSLILSQVGAQQGDPLGPLVFSLAIQKAISELKSPLNIWYLDDGTLGGRPEEVKNDLIALLPRFRELGLEVNACKCEFFPCSVNSRASFPDFGSLLPGLRELSVQTFNLLGSPIFTDAVPEAFEIRRQLLLTSRERLKGLSAHVALVLLRVCFAIPRLTYFLRTVPTWLYPAHIDSFDTVLKESVECTLNVSLSSEQWDLASLPIRNGGLGIRRTRDVGLPAFLASAHGVECLVTQILSLDDGDRATMPYASDALAAWSALNPGTPAPEKLDRQRLWDDVGVKRVLDGLLVNANGVEKARLNAVSRPDAGAWLHALPSPHLGTLLDNDSLRVAVALRLGCDVCEPHLCICGTMVESSGHHALSCCRCAGRFPRHHALNDIVRRALISAGVPCVLEPPGLSRTDGKRPDGLTLVPWERGRCLLWDATCVSTFAASHLSRTMRVPGAAAELAAVRKREKYSVLANYLFVPLAVETTGCWCSEAKTFFVEVGRRLRERGLDPRSGSFLVQRLAVAVQRGNAASVMGTFAPGVTRGGLFD

SEQ ID NO: 15041 - protein, 950 aa, Hedya salicella
MSDLSLLSGCPHCANSNRNFTAHGLRVHIGRMHKDIPRPVSPGLSQPQAPQPAQLDSSRVLGLDDLGTLKQSVRVLRHVPKGARSLAAGKLRDLIDGCIDTNGTAEWFALLSFAYSALKAPETAGPGNLTTKVKRNIDSAVTVNSVGDSVVVGVNARSPSVLRTVESKVFDGDIRGAVRVLMSDDAVAPSNLETLAALRSKHPSPSRELVFPLQPDGSLSTCTVTPEDVVQALGSFNNSSSAGLDGIRPAHLKELTSGTAGDNGLRLLESLARLCNFLFSGQLNPVVCPYMYGASLCALSKKDGGLRPIAIGSTFRRLAAKLGCRAVREEMAAFLRPHQLGFGTRLGCEAAIHATRAFAGAPGNAECVIVKLDIKNAFNSLERDTLLSEVKEKLPSLYPFLFQVYSSPSNLFYNGSLILSQVGAQQGDPLGPLVFSLAIQKAISELKSPLNIWYLDDGTLGGRPEEVKNDLIALLPRFRELGLEVNACKCEFFPCSVNSRASFPDFGSLLPGLRELSVQTFNLLGSPIFTDAVPEAFEIRRQLLLTSRERLKGLSAHVALVLLRVCFAIPRLTYFLRTVPTWLYPAHIDSFDTVLKESVECTLNVSLSSEQWDLASLPIRNGGLGIRRTRDVGLPAFLASAHGVECLVTQILSLDDGDRATMPYASDALAAWSALNPGTPAPEKLDRQRLWDDVGVKRVLDGLLVNANGVEKARLNAVSRPDAGAWLHALPSPHLGTLLDNDSLRVAVALRLGCDVCEPHLCICGTMVESSGHHALSCCRCAGRFPRHHALNDIVRRALISAGVPCVLEPPGLSRTDGKRPDGLTLVPWERGRCLLWDATCVSTFAASHLSRTMRVPGAAAELAAVRKREKYSVLANYLFVPLAVEKTGCWCSEAKTFFVEVGRRLRERGLDPRSGSFLVQRLAVAVQRGNAASVMGTFAPGVTRGGLFD

SEQ ID NO: 15042 - protein, 948 aa, Cydia splendana
MSDFSSSSLSLCPHCPNSTRTFSAHGLKVHIGLKHNSVSRASPCPAPSTSQPADTDGSSLGLADLATLKRSVRVLRHIPRGARNLAAGKLCNIIDKCITSNGRAEWFLLLSFAYSAFKVPGTIGTGNLTTKVKRNVESACAPCVFEEFAETGASRLPTVLKTVECKVFEGDLTGAVRVLMSDDGVAPSSAETLSILQSKHPAPSRPLVFPQEPDRSFTALTVSPEDVAQALASFNNSSAAGVDGIRPVHLKELVSASAGDSGCRLLEGLAKLCNFLLSGQLNPEVCPYIYGASLCALSKKDGGVRPIAIGSTFRRLVAKLGCRAVREEMAAYLRPCQLGFGTTLGCEAAIHATRAFTEDSRNKDCVIVKLDVKNAFNSVERDVLLSEVREKVPSLYPFLFQVYSSPSNLFYNGSLVLSQVGAQQGDPLGPLVFSLAIQKAISGLTSPLNIWYLDDGTLGGKPEDVQRDLLTLLPRFQVLGLEVNPKKCEFFPCSAEARDSFATFSHLLPGLKEVSAQSFALLGSPICSEAIPEAFEERRQLLLVAAERLGDLPAHVALVLLRVCFAVPKIIYFLRTVPAWLYLDHIDSFDYVLKESVERLLNVSLNPDQWVLASFPIRNGGLGIRRARDVSLPAFLASSEGVVGLVTKILSVNGDRPTIPFASDAVAAWRTLNPNVPMPDKLDRQRLWDDIGVRRVFDGLLEGAVGADKARLLAVSRPEAGAWLHALPSPHMGTLLDNNSMRVAVALRLGCDVCEPHICICGTMVESSGHHALSCCRCVRRFPRHHALNDIVRRALLSANVPCMLEPPGLSRSDGKRPDGLTLIPWEKGKCLLWDATCVSTFAASHMGRTVRAAGAAAELAALRKRDKYSALLTKYLFVPLAVETSGCWCAEAKIFLSELGQRLREGGHDPRSGSFLMQRLSIAVQRGNAASVMGIFASGRARDGLFD

SEQ ID NO: 15043 - protein, 952 aa, Apotomis turbidana
MSDLSPLSTCPHCRDSSRTFSARGLKVHIGRMHKDVRCAVAPDPSQPVVSGPQQAHTNNCGATGLGDLASLRQSVRVLRHIPKGARNLAASKLSDVIDRCIDTNGTAEWRALLTFSYSAFKAPESTGSSNLTAKVNHNIDSVGGADLLGNAHLSAASSRSPSVLKTIQSKVFEGDLRGAVRVLMSDDVVAPSSPETLATLQLKHPPPSRPLVLPLEPDKSIPAQEVKVEDVARALGSFNNGSAAGLDGIRPSHLKELTSSSAGDSGSRLLESLMKLCNFLLSGQLNVEVCPYIYGASLCALSKKDGGLRPIAVGSTFRRLTAKLGCFAVRERMAAYLQPHQLGFGTQLGCEAAIHATRAFALDLKNSESVIVKLDIKNAFNSVERDVLLSEVKDKVPSLYPFLYQVYSSPTNLFYNDSLILSQVGAQQGDPLGPLAFSLAIHKAISELKSPLNIWYVDDGTLGGKPEIVKRDLLTLLPRLQHLGLEVNAAKCKFFPCSPESSGSFQSFSAMLPGLKQITPDLFSLLEAPIFPVAIPEAFEERRQLLSTARDRLGDLPAHVALVLLRVCFAVPKLTYFLRTVPAWLCPEDIDSFDSILKESMEIILNVSLDASQWQQASLPIRNGGLGIRRARDVCLPAFLASASGVVDLVSQIFALDQDKATIPYASEAQAAWVALNPSAALPDKPERQRSWDDVGVKRVVDSQLESASGVERARLNAVLRPESGAWLQALPSPHLGTLLDDNSLRVAVALRLGCDVCEPHLCICGTRVESNGHHALSCCRCAGRFPRHHALNDIIRRALVSANVPCLLEPPGLSRTDGKRPDGVTLVPWQRGKCLLWDATCVSTFAASHLGRTTRSAGAAAEVAACRKRDKYSVLTSNYIFVPFAVETTGCWGSEARAFIAEIGRRLRERGLDPRSGSFLVQRLSIAIQRGNAASVMGTFAPGMTRGGLFD

SEQ ID NO: 15044 - protein, 948 aa, Notocelia uddmanniana
MNNASLSLACPHCSNSSRTFTAHGLKVHIGRMHKGIARSSNSQSMSSVQPHAQVVQTGNTVALRLADLATLKQNVRVLRHIPKGARNLAAGMLSDIIDRGIATNSTEDWTALLTFAYTALRTPETTQEGNLTAKVKSNVASASIDVPLRLGGTEVAAPRAPSVVRTIESKVFDGDLRGAVRVLMSDDGVALPSPETLATLQSKHPPPSRLLEVPLEPDISIPSYSAEVEHVVKSITSFNSSSAAGLDGIRPVHLKELTSASAGDSGTRLLGCLTKLCNFLLSGKINPDVCPYMYGVSLCALSKKDGGLRPIAVGSVFRRLTAKLGCCAVRGEMAAYLRPCQLGFGTRLGCEAAIHATRAFSLDPDHADSVIIKLDLKNAFNSIERDVLLREVREKVPSLYPFLFQIYSSPSYLFYNESLILSQVGAQQGDPLGPLVFSLAIQRVISELQSPLNVWYLDDGTLGVKPEVVMKDLTTLLPRFRELGLEVNSAKCEVFPCSAHVSPTVSSFRDLLPGLRVLSDQTFNLLGSPIFPAAIHDAFDLRRHLLLAARARLKDLSAHVALTLLRFCFAAPKLTYLLRTVPAWLHPAEVDSFDGVLKETMESILNVSLSSDHQWELASLPIRSGGLGIRRARDISLPAFLASACGVLGLVTNILSLEGDKVTIPYASVAWNAWAALNPSATRPENPDRQRSWDDVGVRRAVDRIVEGAQGVDRARLRAVSMPESGAWLHALPSPHLGTLLDDESMRVAVALRLGCDVCEPHLCICGAMVESSGHHALSCCRCAGRFSRHHALNDIVRRALVSANVPCVLEPSGLSRTDGKRPDGLTLVPWQKGKCLLWDATCVSTFAASHLGRTVGAAGAAAEAAACRKRDKYSALANYIFVPLAVETMGCLCSEARTFLMEVGRRLRERGHDPRSGSFLLQRLSIAIQCGQRDGHLCTRNDTGRAI

SEQ ID NO: 15045 - protein, 952 aa, Notocelia uddmanniana
MNNASLSLACPHCSNSSRTFTAHGLKVHIGRMHKGIARSSNSQSMSSVQPHAQVVQTGNTVALRLADLATLKQNVRVLRHIPKGARNLAAGMLSDIIDRGIATNSTEDWTALLTFAYTALRTPETTQEGNLTAKVKSNVASASIDVPLRLGGTEVAAPRAPSVVRTIESKVFDGDLRGAVRVLMSDDGVALPSPETLATLQSKHPPPSRLLEVPLEPDISIPSYSAEVEHVVKSITSFNSSSAAGLDGIRPVHLKELTSASAGDSGTRLLGCLTKLCNFLLSGKINPDVCPYMYGASLCALSKKDGGLRPIAVGSVFRRLTAKLGCCAVRGEMAAYLRPCQLGFGTRLGCEAAIYATRAFSLDPDHADSVIIKLDLKNAFNSIERDVLLREVREKVPSLYPFLFQIYSSPSYLFYNESLILSQVGAQQGDPLGPLVFSLAIQRVISELQSPLNVWYLDDGTLGGKPEVVMKDLTTLLPRFRELGLEVNSAKCEVFPCSAHVSPTVSSFRDLLPGLRVLSDQTFNLLGSPIFPAAIHDAFDLRRHLLLAARARLKDLSAHVALTLLRFCFAAPKFTYLLRTVPAWLYPAEVDSFDRVLKETMESILNVSLSSDHQWELATLPIRSGELGIRRARDISLPAFLASACGVLGLVTNILSLEGDKVTIPYASDAWNAWAALNPSATRPENPDRQRSWDDVGVRRAVDRIVEGAQGVDRARLRAVSMPESGAWLHALPSPHLGTLLDDESMRVAVALRLGCDVCEPHLCICGAMVESSGHHALSCCRCAGRFSRHHALNDIVRRALVSANVPCVLEPSGLSRTDGKRPDGLTLVPWQKGKCLLWDATCVSTFAASHLGRTVGAAGAAAEAAACRKRDKYSALANYIFVPLAVETMGCWCSEARTFLMEVGRRLRERGHDPRSGSFLLQRLSIAIQRGNAASVMGTFAPGMTRGGLFD

SEQ ID NO: 15046 - protein, 1196 aa, Adalia bipunctata
MKMEPILSLGRESLPGERQGMSGADAGQDSMRSVGGRVLRKRAPVIQQNTAPRQQREVETDIMAEDRNATPPAGSTTVRRTARRGARNARIKWSREMNIEVMRAFYYVNNCDDKPLPGWRYSLYTEFTKRHPELQLTEGNIADRKNVIIRKGYLTRQELDEIKREMGYTINQEQIVGSQNEEPTEQLERPEDTARDLSVTRTAHQDSPQYRQLYDTFYSNLAQYESTDPLNRPILPKLNFNSTAKNNIERLNEILAEHLSTQWTLEQVHLSLYCAAITVIGQNGQKIYIPRTSEQKVKNETPAWKRRLMQDVDKLRGKVDVLDEFLRENKSRKVLNKVRKIAISAGLDLESPRHRELIVDLKDRLRQQAKAKGARLRRYNELTKRKQQNAEYLRDRKKFFRSLEKPSEISSNQHADINNEEFRQYWSSLWSESGQLQRNTSWLTDIEHQASEIVEMKTDLFTVEEISNIVKNTSNWKAPGPDRLHNFWVKQFPACFPSLARCFSEALEDPFKIPTFLTQGNTYMLHKRGDRSKPENYRPITCLSVVYKLFTSLVNNAIYRHCEANNILEEEQKGCSRGSAGCKHQLTIDAVVLKQAQARRRNLSLCYIDYQKAFDTVPHDWLVRVLEIYKICPKIKAVLQHLMSTWKTNILINNINAGTVKISRGIFQGDALSPMWFCIALNPLSTLLKNTNIGYRPAMRNPRKLTHLLYMDDLKLFGENQKQLHSLIDIVRSFSTDIDMSFGLDKCAIVNIKKGKMENTQEQFQDIHSMLPEETYKYLGGIPQNQRIDHTRLKAEFTAKYKNRVTKVLNTKLSAKNQIDALNSWATPALTYTFGVLKWSDADLNELDRLTRRLMTKFRCLHTNASVKRLYLPRRDGGRGLLNIYKLCRTQEKNLRQRLLESEDILMKLVTTEDKGYTPLNLQHRELTFDITTRSEDISTWREQALHGRFPKHLEGENVDKLASLSWLNAGQLYPETEGFLMAIQDRVIRTRNYEKHCLKLNVEDKCRKCGAFGESIEHIIAGCRVLADNAYLGRHNQVAKIVHQQLALRHGFLDTCPPYYKYQPAAVLETDAAVLYWDRPITTDRSVDYNRPDLVFIEKDQKYGVIIDVAVPLTHNIGRTESEKITKYENLAMELKNMWQLSKVTIIPLVISAEGVMSKSFKKNLQKIEISQRIAGYAQQAVALQTCHIVRKFLN

SEQ ID NO: 15047 - protein, 1194 aa, Adalia bipunctata
MKMVNLTSLGNESLPGERQGMSGADAGHDSMRSVGGRVLRKRAPVIQQNTAPPEHQEVESQNMAEDHATPAAGSTTVRRTARRGARNARIKWSREMNVEVMRAFYYVNNCDDKPLPGWRYSLYTEFTKRHPELQLTEGNIADRKNVIIRKGYLTRQELDEIKREMGYTINQEQIVGSQNEEPAETLERPADTARDLSVTRTAHQDSPQYRQLYDTFYSNLAQYESTDPLNRPILPKLNFNSTAKNNIERLNEILTEHLRTQWTLEQVHLSLYCAAITVIGQNGQKIYTPRTSEQKVKNQTPAWKRRLMQDVDKLRGKVDVLDEFLKDNKSRKVLNKVRKIATSAGLDLESPRHKEFIVDLKDRLRQQDKAKGARLRRYNELTKRKQQNAKYMRDRKKFFRSLEKSSEISTNQQADINNVQFRQYWSSLWSESGQLQRNASWLTDIEHQASEIVEMKTDLFTVEEISNIVKNTSNWKAPGPDRLHNFWVKQFPACFPSLARCFSEALGDPFKIPTFLTQGNSYMLHKRGDRTKPENYRPITCLSVVYKLFTSLVNNAIYRHCEANNILEEEQKGCSRGSAGCKHQLTIDAVVLKQAQARRRNLSLCYIDYQKAFDTVPHDWLLKVLEIYKICPKIRAVLQHLMSTWKTNILVNNINAGTVKISRGIFQGDALSPMWFCIALNPLSTLLKNTNIGYRPAMRNPRKLTHSLYMDDLKLFGENQKQLHSLIDIVRSFSKDIDMSFGVDKCAIVNIRKGKMENTQEQFQDIHSMLLEENYKYLGIPQNQRIDHTRLKAEFTAKYKSRVTKVLNTKLSARNQIDALNSWATPALTYTFGVLKWSDADLNELDRLTRRLMTKFRCLHTNASVKRLYLPRRDGGRGLLNIYKLCRTQEKNLRQRLLESEDSLMKLVTTEDKGYTPLNLQHRELTFDITTRSEDISIWREQALHGRFPKHLEGENVDKLASLSWLNAGQLYPETEGFLTAIQDRVIRTLNYEKHCLKLNVEDKCRKCGAVGESIEHIIAGCRVLADNAYLGRHNQVAKIVHQQLALRHGFLDTCPPYYKYQPAAVLETDAAVLYWDRPITTDRSVDYNRPDLVFIEKDQKYGVIIDVAVPLTHNIGRTESEKITKYENLAMELKNMWQLSKVTIIPLVISAEGVMSKSFKKNLEKIEISQRIAGYAQQAVALQTCHIVRKFLN

SEQ ID NO: 15048 - protein, 1194 aa, Adalia bipunctata
MKMVNLMSLGNESLPGERQGMSGADAGHDSMRSVGGRVLRKRAPVMQQNTAPPEHQEVESQNMAEDHATPPAGSTTVRRTALRGARNARIKWSREMNVEVMRAFYYVNNCDDKPLPGWRYSLYTEFTKRHPELQLTEGNIADRKNVIIRKGYLTRQELDEIKREMGYTINQEQIVGSQNEEPAEPLERLADTARDLSVTRTAHQDSPQYRQLYDAFHSNLAQYESTDPLNRPILPKLNFNSTAKNNIERLNEILAEHLSTQWTLEQVHLSLYCAAITVIGHNGQKIYTPRTSEQKVKNQTPAWKRRLMQDVDKLRGKVDVLDEFLKDNKSRKVLNKVRKIATSAGLDLESPRHTEFIVDLKDRLRQQAKAKGARLRRYNELTKRKQQNAEYMRDRKKFFRSLEKPSEISTNQQADINNDEFRQYWSSLWSESGQLQRNASWLTDIEHQASEIVGMKTDLFTVEEISNIVKNTSNWKAPGPDRLHNFWVKQFPACFPSLARCFSEALGDPFKIPTFLTQGNSYMLHKRGDRSKPENYRPITCLSVVYKLFTSLVNNAIYRHCEANNILEEEQKGCSRGSAGCKHQLTIDAVVLKQAQARRRNLSLCYIDYQKAFDTVPHDWLLKVLEIYKICPKIRAVLQHLMSTWKTNILINNIHAGTVKISRGIFQGDALSPMWFCIALNPLSTLLKNTNIGYRPAMRNPRKLTHLMYMDDLKLFGENQKQLHSLIDIVRSFSKDIDMSFGVDKCAIVNIRKGKMENTQEQFQDIHSMLPEETYKYLGIPQNQRIDHTRLKAEFTAKYKSRVTKVLNTRLSARNQIDALNSWATPALTYTFGVLKWSDADLNELDRLTRRLMTKFRCLHTNASVRRLYLPRRDGGRGLLNIYKLCRTQEKNLRQRLLESEDSLMKLVTTEDKGYTPLNLQHRELTFDITTRIEDISIWREQALHGRFPKHLEGENVDKLASLSWLNAGQLYPETEGFLTAIQDRVIRTRNYEKHCLKLNVEDKCRKCGAVGESIEHIIAGCRVLADNAYLGRHNQVAKIVHQQLALRHGFLDTCPPYYKYQPAAVLETNAAVLYWDRPITTDRSVDYNRPDLVFIEKDQKYGVIIDVAVPLTHNIGRTESEKITKYENLAMELKNMWQLSKVTIIPLVISAEGVMSKSFKKNLQKIEVSQRIAGYAQQAVALQTCHIVRKFLN

SEQ ID NO: 15049 - protein, 933 aa, Adalia bipunctata
MDVGTSPLISVLCCHHSNRTKWAKDLHPRTSEQKVKNQTPAWKRRLMQDVDKLRGKVDVLDEFLKDNKSRKVLNKVRKIATSAGLDLESPRHKEFIVDLKDRLRQQAKAKGARLRRYNELTKRKQQNAEYMRDRKKFFRSLEKPSEISTNPQADINNDEFRQYWSSLWSESGQLQRNASWLTDIEHQASEIVEMKTDLFTVEEISNILKNTSNWKAPGPDRLHNFWVKQFPACFPSLARCFSEALGDPFKIPTFLTQGNSYMLHKRGDRSKPENYRPITCLSVVYKLFTSLVNNAIYRHCEANNILEEEQKGCSRGSAGCKHQLTIDAVVLKQAQARRRNLSLCYIDYQKAFDTVPHDWLLKVLEIYKICPKIRAVLQHLLSTWKTNILINNIHAGTVKISRGIFQGDALSPMWFCIALNPLSTLLKNTNIGYRPAMRNPRKLTHLLYMDDLKLFGENQKQLHSLIDIVRSFSKDIDMSFGVDKCAIVNIRKGKMENTQEQFEDIHSMLPEETYKYLGIPQNQRIDHTRLKAEFIAKYKSRVTKVLNTKLSARNQIDALNSWATPALTYTFGVLKWSDADLNELDRLTRRLMTKFRCIHTSASVKRLYLPRRDGGRGLLNIYKLCRTQEKNLRQRLLESEDSLMKLVTTEDKGYTPLNLQYRELTFDITTRSEDISIWREQALHGRFPKHLEGENVDKLASLSWLNAGQLYPETEGFLTAIQDRVIRTLNYEKHCLKLNVEDKCRKCGAVGESIEHIIAGCRVLADNAYLGRHNQVAKIVHQQLALRHGFLDTCPPYYKYQPAAVLETDAAVLYWDRPITTDRSVDYNRPDLVFIEKDQKYGVIIDVAVPLTHNIGKTESEKITKHENLAMELKNMWQLSKVTIIPLVISAEGVMSKSFKKNLQKIEISQRIAGYAQQAVTLQTCHIVRKFLN

SEQ ID NO: 15050 - protein, 1254 aa, Adalia bipunctata
MFFHWFIGEIPAQAENGRPMKKNNNNKPARVWSGFCHATWGVTSPRPELPGPPRVNGGKPMKMVNLTSLGNESLPGERQGMSGADAGHDSMRSVGGRVLRKRAPVIQQNTAPPEHQEVESQNMAEDHATPAAGSTTVRRTARRGARNARIKWSREMNVEVMRAFYYVNNCDDKPLPGWRYSLYTEFTKRHPELQLTEGNIADRKNVIIRKGYLTRQELDEIKREMGYTINQEQIVGSQNEEPAETLERPADTARDLSVTRTAHQDSPQYRQLYDTFYSNLAQYESTDPLNRPILPKLNYNSTAKNNIEWLNEILTEHLRTQWTLEQVHLSLYCAAITVIGQNGQKIYTPRTSEQKVKNQTPAWKKRLMQDVDKLRGKFDVLDEFLKDNKSRKVLNKVRKIATSAGLDLESPRHKEFIVDLKDRLRQQAKAKGARLRRYNELTKRKQQNAEYMRDRKKFFRSLEKSSEISINQQADINNVQFRQYWSSLWSESGQLQRNASWLTDIEHQASEIVEMKTDLFTVEEISNIVKNTSNWKAPGPDRLHNFWVKQFPACFPSLARCFSEALGDPFKIPTFLTQGNSYMLHKRGDRTKPENYRPITCLSVVYKLFTSLVNNAIYRHCEANNILEEEQKGCSRGSAGCKHQLTIDAVVLKQAQARRRNLSLCYIDYQKAFDTVPHDWLLKVLEIYKICPKIRAVLQHLMSTWKTNILVNNINAGTVKISRGIFQGDALSPMWFCIALNPLSTLLKNTNIGYRPAMRNPRKLTHLLYMDDLKLFGENQKQLHSLIDIVRSFSKDIDMSFGVDKCAIVNIRKGKMENTQEQFQDIHSMLPEETYKYLGIPQNQRIDHTRLKAEFTAKYKSRVTKVLNTKLSARNQIDALNSWATPALTYTFGVLKWSDADLNELDRLTRRLMTKFRCLHTNASVKRLYLPRRDGGGGLLNIYKLCRTQEKNLRQRLLESEDSLMKLVTTEDKGYTPLNLQHRELTFDITTRSEDISIWREQALHGRFPKHLEGENVDKLASLSWLNAGQLYPETEGFLTAIQDRVIRTRNYEKHCLKLNVEDKCRKCGAVGESIQHIIAGCRVLADNAYLGRHNQVAKIVHQQLALRHGFLDTCPPYYKYQPAAVLETDAAVLYWDRPITTDRSVDYNRPDLVFIEKDQKYGVIIDVAVPLTHNIGRTESEKITKYENLAMELKNMWQLSKVTIIPLVISAEGIMSKSFKKNLEKIEISQRIAGYAQQAVALQTCHIVRKFLN

SEQ ID NO: 15051 - protein, 1194 aa, Adalia bipunctata
MKMVNLTSLGNESLPGERQGMSGADAGHDSMRSVGGRVLRKRAPVIQQNTAPPEHQEVESQNMAEDHATPAAGSTTVRRTARRGARNARIKWSREMNVEVMRAFYYVNNCDDKPLPGWRYSLYTEFTKRHPELQLTEGNIADRKNVIIRKGYLTRQELDEIKREMGYTINQEQIVGSQNEEPAETLERPADTARDLSVTRTAHQDSPQYRQLYDTFYSNLAQYESTDPLNRPILPKLNYNSTAKNNIEWLNEILTEHLRTQWTLEQVHLSLYCAAITVIGQNGQKIYTPRTSEQKVKNQTPAWKKRLMQDVDKLRGKVDVLDEFLKDNKSRKVLNKVRKIATSAGLDLESPRHKEFIVDLKDRLRQQAKAKGARLRRYNELTKRKQQNAEYMRDRKKFFRSLEKSSEISINQQADINNVQFRQYWSSLWSESGQLQRNASWLTDIEHQASEIVEMKTDLFTVEEISNIVKNTSNWKAPGPDRLHNFWVKQFPACFPSLARCFSEALGDPFKIPTFLTQGNSYMLHKRGDRTKPENYRPITCLSVVYKLFTSLVNNAIYRHCEANNILEEEQKGCSRGSAGCKHQLTIDAVVLKQAQARRRNLSLCYIDYQKAFDTVPHDWLLKVLEIYKICPKIRAVLQHLMSTWKTNILVNNINAGTVKISRGIFQGDALSPMWFCIALNPLSTLLKNTNIGYRPAMRNPRKLTHLLYMDDLKLFGENQKQLHSLIDIVRSFSKDIDMSFGVDKCAIVNIRKGKMENTQEQFQDIHSMLPEETYKYLGIPQNQRIDHTRLKAEFTAKYKSRVTKVLNTKLSARNQIDALNSWATPALTYTFGVLKWSDADLNELDRLTRRLMTKFRCLHTNASVKRLYLPRRDGGRGLLNIYKLCRTQEKNLRQRLLESEDSLMKLVTTEDKGYTPLNLQHRELTFDITTRSEDISIWREQALHGRFPKHLEGENVDKLASLSWLNAGQLYPETEGFLTAIQDRVIRSRNYEKHCLKLNVEDKCRKCGAVGESIEHIIAGCRVLADNAYLGRHNQVAKIVHQQLALRHGFLDTCPPYYKYQPAAVLETDAAVLYWDRPITTDRSVDYNRPDLVFIEKDQKYGVIIDVAVPLTHNIGRTESEKITKYENLAMELKNMWQLSKVTIIPLVISAEGIMSKSFKKNLEKIEISQRIAGYAQQAVALQTCHIVRKFLN

SEQ ID NO: 15052 - protein, 1110 aa, Adalia bipunctata
MNIEVMRAFYYVNNCDDKPLPGWRYSLYTEFTKRHPELQLTEGNIADRKNVIIRKGYLTRQELDEIKREMGYTINQDQIVGNHNEEPSEPLETPAETARVPVTRTAHQECPQYRQLYDTFFGNLAQYETTDPLNRPILPKLKFNSTAKNNIEWLNEILAEHLSTQWTLEQVHLSLYCAAITVIGQNGQKIYIPRTSEQKVKNETPAWKKRLTQDVDKLRGKVDVLDEFLRNNKSRKVLNKVRKIATSAGLDLESIRHRELVVDLKDRLRQQAKAKGARLRRYNELTKRKQQNAEYARDRKKFFRSLEKPSEISSDQQADVNNEEFRQYWSSLWSESGQLRRNTSWLRDIEQHASEIVEMRTDIFTVEDISNIIKNTSNWKAPGPDRLQNFWVKQFPACFPSLARCFSEALEDPLKIPAFLTQGNTYMLHKKGDLNNPENYRPITCLSVVYKLFTSLVNNAIYRHCEANNILEEEQKGCSRGSAGCKHQLTIDAVVLKQAQARRRNLSLCYIDYQKAFDTVPHDWLVKVLEIYKICPKIQAVLQHLMSTWRTNILINNINAGTVKISRGIFQGDALSPMWFCMALNPLSTLLKNTNIGYRPAMRNPRKLSHLLYIDDLKLFGENQKQLHSLIDIVRSFSTDIDMSFGLDKCAIVNIRKGKMENTQEQFQDIHSMLPEETYKYLGIPQNQRIDHTRLKAEFTAKYKNRVTKVLNTKLSAKNQIDALNSWATPALTYTFGVLKGSDADLNELDRLTRRLMTKFRCLHTNASVKRLYLPRRDGGRGLLNIYKLCRTQEKNLRQRLLESEDSLMKLVTTEDKGYTPLNLQHRELTFDITTRSEDISTWREQALHGRFPKHLEGENVDKLASLLWLNAGQLYPETEGFLTAIQDRVIRTRNYEKHCLKLNVEDKCRKCGAVGESIEHIIAGCRVLADNAYLGRHNQVAKIVHQQLALRHGFLDTCPPYYKYQPAAVLETDTAVLYWDRPITTDRTVDYNRPDLVFIEKDQKYGIVIDVAVPLTHNIGRTESEKITKYENLAIELKNMWQLSKVTIIPLVISAEGVMSKSFKRNLRKIGLSQRIAGYAQQAVALQTCHIVRKFLNWWEELNCFFTGS

SEQ ID NO: 15053 - protein, 1238 aa, Adalia bipunctata
MEIIIIIIIHTARVWCGLCHATWGVTSPRPELPGPPRVNGGKPMKMEPILSLGRESLPGERQGMSGADAGHDSMRSVGGRVLRKRATVIQQNTAPRQQREVETDIMAEDRNATPPAGSTTVRRTACRGARNARIKWSREMNIEVMRAFYYVNNCDDKPLPGWRYSLYTEFTKRHPELQLTEGNIADRKNVIIRKGYLTRQELDEIKREMGYTINQEQIVGSQNEEPTEQLEKPADTARDLSVTETAHQDSPQYRQLYDTFYSNLAQYESTDPLNRPILPKLNFNSTAKNNIERLNEILAEHLSTQWTLEQVHLSLYCAAITVIGQNGQKIYIPRTSEQKAKNETPAWKRRLMQDVDKLRGKVDVLDEFLRENKSRKVVNKVRKIAISAGLNLESPRHRELIVDLKDRLRQQAKAKGARLRRYNELTKRKQQNAEYLRDRKKFFRSLENPSEISSNQHADINNEEFRQYWSSLWSESGQLQRNTSWLTDIEHQASEIVEMKTDLFTVEEISNIVKNTSNWKAPGPDRLHNFWVKQFPACFPSLARCFSEALEDPFKIPTFLTQGNTYMLHKRGDRSKPENYRPITCLSVVYKLFTTLVNNAIYRHCEANNILEEEQKGCSRGSAGCKHQLTIDAVVLKQAQARRRNLSLCYIDYQKAFDTVPHDWLVRVLEIYKICPKIKAVLQHLMSTWKTNILINNINAGTVKISRGIFQGDALSPMWFCIALNPLSTLLKNTNIGYKPAMRNPRKLTHLLYMDDLKLFGENQKQLHSLIDIVRSFSTDIDMSFGLDKCAIVNIRKGKMENTQEQFQDIHSMLPKETYKYLGIPQNQRIDHTRLKAEFTAKYKNRVTKVLNTKLSAKNQIDALNSWATPALTYTFGVLKWSDADLNELDRLTRRLMTKFRCLHTNASVKRLYLPRRDGGRGLLNIYKLCRTQEKNLRQRLLESKDSLMKLVTTEDKGYTPLNLQHRELTFDITTRSEDISTWREQALHGRFPKHLEGENVDKLASLSWLNAGQLYPETEGFLMAIQDRVIRTRNYEKHCLKLNVEDKCRKCGAFGESIEHIIAGCRVLADNAYLGRHNQVAKIVHQQLALRHGFLDTCPPYYKYQPAAVLETDAAVLYWDRPITTDRSVDYNRPDLVFIEKDQKYGVIIDVAVPLTHNIGKTESEKITKYENLAMELKNMWQLSKVTIIPLVISAEGVMSKSFKKNLQKIEISQRIAGYAQQAVALQTCHIVRKFLN

SEQ ID NO: 15054 - protein, 1195 aa, Adalia bipunctata
MKMEPILSLGRESLPGERQGMSGADAGHDSMRSVGGRVLRKRAPVIQQNTAPRQQREVETDIMAEDRNATPPAGSTTVRRTARRGARNARIKWSREMNIEVMRAFYYVNNCDDKPLPGWRYSLYTEFTKRHPELQLTEGNIADRKNVIIRKGYLRRQELDEIKREMGYTINQEQIVGNHNEEPSEPLETPAETARDLSVTRTAHQDSPQYRQLYDTFYSNLAQYESTDPLNRPILPKLNFNSTAKNNIERLNEILAEHLSTQWTLEQVHLSLYCAAITVIGQNGQKIYIPRTSEQKVKNETPAWKRRLMQDVDKLRGKVDVLDEFLRENKSRKVLNKVRKIAISAGLDLESPRHRELIVDLKDRLRQQAKAKGARLRRYNELTKRKQQNAEYLRDRKKFFRSLEKPSEISSNQHADINNEEFRQYWSSLWSESGQLQRNTSWLTDIEHQASEIVEMKTDLFTVEEISNIVKNTSNWKAPGPDRLHNFWVKQFPACFPSLARCFSEALEDPFKIPTFLTQGNTYMLHKRGDRSKPENYRPITCLSVVYKLFTTLVNNAIYRHCEANNILEEEQKGCSRGSAGCKHQLTIDAVVLKQAQARRRNLSLCYIDYQKAFDTVPHDWLVRVLEIYKICPKIKAVLQHLMSTWKTNILINNINAGTVKISRGIFQGDALSPMWFCIALNPLSTLLKNTNIGYRPAMRNPRKLTHLLYMDDLKLFGENQKQLHSLIDIVRSFSTDIDMSFGLDKCAIVNIRKGKMENTQEQFQDIHSMLPEETYKYLGIPQNQRIDHTRLKAEFTAKYKNRVTKVLNTKLSAKNQIDALNSWATPALTYTFGVLKWSDADLNELDRLTRRLMTKFRCLHTNASVKRLYLPRRDGGRGLLNIYKLCRTQEKNLRQRLLESEDSLMKLVTTEDKGYTPLNLQHRELTFDITTRSEDISTWREQALHGRFPKHLEGENVDKLASLSWLNAGQLYPETEGFLMAIQDRVIRTRNYEKHCLKLNVEDKCRKCGAFGESIEHIIAGCRVLADNAYLGRHNQVAKIVHQQLALRHGFLDTCPPYYKYQPAAVLETDAAVLYWDRPITTDRSVDYNRPDLVFIEKDQKYGVIIDVAVPLTHNIGRTESEKITKYENLAMELKNMWQLSKVTIIPLVISAEGVMSKSFKKNLQKIEISQRIAGYAQQAVALQTCHIVRKFLN

SEQ ID NO: 15055 - protein, 1195 aa, Adalia bipunctata
MEMENKSSLGKESLPGERQGMSGADAGHDSMRSVGGRVLRKRAPVIQQNTAPPEHQEVESQNMAEDQNATPPAGSTTVRRTARRGARNTRIKWSREMNVEVMRAFYYVNNCDDKPLPGWRYSLYTEFTKRHPELQLTEGNIADRKNVIIRKGYLTRQELDEIKREMGYTINQEQIVGIQNEEPTEPLERPADTARDLSVTRTAHQDSPQYRQLYDTFYSNLAQYESTDPLNRPILPKLNFNSTAKNNIERLNEILAEHLSTQWTLEQVHLSLYCAAITVLGQNGQKIYTPRTSEQKVKNQTPAWKRRLMQDVDKLRGKVDVLDEFLKDNKSRKVLNKVRKIATSAGLDLESPRYKEFIVDLKDRLRQQAKAKGARLRRYNELTKRKQQNAEYVRDRKKFFRSLEKPSEISSNQQADINNDEFRQYWSSLWSESGQLQRNTSWLMDIEHQASEIVEMKTDLFTVEEISNIVKNTSNWKAPGPDRLHNFWVKQFPACFPSLARCFSEALEDPFKIPTFLTQGNSHMLHKRGDRSKPENYRPITCLSVVYKLFTTLVNNAIYRHCEANNILEEEQKGCSRGSAGCKHQLTIDAVVLKQAQARRRNLSLCYIDYQKAFDTVPHDWLLKVLEIYKICPKIKAVLQHLMSTWKTNILINNINAGTVKISRGIFQGDALSPMWFCIALNPLSTLLKNTNIGYRPAMRNPRKLTHLLYMDDLKLFGENQKQLHSLIDIVRSFSKDIDMSFGIDKCAIVNIRKGKMENTQEQFQDIHSMLPEETYKYLGIPQNQRIDHTRLKAEFTAKYKSRVAKVLNTKLSARNQIDALNSWATPALTYTFGVLKWSDADLNELDRLTRRLMTKFRCLHTNASVKRLYLPRRDGGRGLLNIYKLCRTQEKNLRQRLLESEDSLMKLVTTEDKGYTPLNLQHRELTFDITTKSEDISIWREQALHGRFPKHLEGENIDKLASLSWLNAGKLYPETEGFLTAIQDRVIRTRNYEKHCLKLNVEDKCRKCGAVGESIEHVIAGCRVLADNAYLGRHNQVAKIVHQQLALRHGFLDTCPPYYKYQPAAVLETDAAVLYWDRPITTDRSVDYNRPDLVFIEKDQKYGVIIDVAVPLTHNIGRTESEKITKYENLAMELKNMWQLSKVTIIPLVISAEGVMSKSFKKNLQKIEISQRIAGYAQQAVALQTCHIVRKFLN

SEQ ID NO: 15056 - protein, 1241 aa, Adalia bipunctata
MVRNNNNNNNNNKPARVWCGLCHATWGVTSPRPELPGPPRVNGGKPMKMETILSLGRESLPGERQGMSGADAGHDSMRSVGGRVLRKRAPVIQQNTAPRQQREVETDIMAEDRNATPPAGLTTVRRTARRGARNARIKWSREMNIEVMRAFYYVNNCDDKPLPGWRYSLFTEFTKRHPELQLTEGNIADRKNVIIRKGYLTREELDEIKREMGYTINQEQIVGSQNEEPTEQLERPADTARDLSVTRTAHQDSPQYRQLYDTFYSNLAQYESTDPLNRPILPKLNFNSTAKNNIERLNEILAEHLSTQWTFEQVHLSLYCAAITVIGQNGQKIYIPRTSEQKVKNETPAWKRRLMQDVDKLRGKVDVLDEFLRENKSRKVLNKVRKLAISAGLDLESPRHRELIVDLKDRLRQQAKAKGARLRRYNELTKRKQQNAEYLRDRKKFFRSLEKPSEISSNQHADINNEEFRQYWSSLWSESGQLQRNTSWLTDIEHQASEIVEMKTDLFTVEEISNIVKNTSNWKAPGPDRLHNFWVKQFPACFPSLARCFSEALEDPFKIPTFLTQGNTYMLHKRGDRSKPENYRPITCLSVVYKLFTTLNNNAIYRHCEANNILEEEQKGCSRGSAGCKHQLTIDAVVLKQAQARRRNLSLCYIDYQKAFDTVPHDWLVRVLEIYKICPKIKAVLQHLMSTWKTNILINNINAGTVKISRGIFQGDALSPMWFCIALNPLSTLLKNTNIGYRPAMRNPRKLTHLLYMDDLKLFGENQKQLHSLIDIVRSFSTDIDMSFGLDKCAIVNIRKGKMENTQEQFQDIHSMLPEETYKYLGIPQNQRIDHTRLKAEFTAKYKNRVTKVLNTKLSARNQIDALNSWATPALTYTFGVLKWSDADLNELDRLTRRLMTKFRCLHTNASVKRLYLPRRDGGRGLLNIYKLCRTQEKNLRQRLLESEDSLMKLVTTEDKGYTPLNLQHRELTFDITTRSEDISTWREQALHGRFPKHLEGENVDKLASLSWLNAGQLYPETEGFLMAIQDRVIRTRNYEKHCLKLNVEDKCRKCGAFGESIEHIIAGCRVLADNAYLGRHNQVAKIVHQQLALRHGFLDTCPPYYKYQPAAVLETDAAVLYWDRPITTDRSVDYNRPDLVFIEKDQKYGVIIDVAVPLTHNIGRTESEKITKYENLAMELKNMWQLSKVTIIPLVISAEGVMSKSFKKNLQKIEISQRIAGYAQQAVALQTCHIVRKFLN

SEQ ID NO: 15057 - protein, 1239 aa, Adalia bipunctata
MRKNNNNNNNNTARVWCGLCHATWGVTSPRPELPGPPRVNGGKPMKMEIISSLGKESLPGERQGMSGADAGHDSMRSVGGRVLRKRAPVIQQNTAPPEPREVESQNMADDQNATPPAGSTTVRRTARRGARNTRIKWSREMNVEVMRAFYYVNNCDDKPLPGWRYSLYTEFTKRHPELHLTEGNIADRKNVIIRKGYLTRQELDEIKREMGCAINQEQIVGIHNEESTEPLERPEDTARDLSVTRTAHQDSPQYRQLYDTFYSNLAQYESTDPLNRPILPKLNFNSTAKNNIERLNEILAEHLSTQWTLEQVHLSLYCTATTVIGQNGQKIYTPRTSEQKVKNQTPAWKRRLMQDVDKLRGKVDVLDEFLKDNKSRKVLNKVRKIATSAGLDLESPRYKEYIVDLKDRLRQQAKAKGARLRRYNELTKRKQQNAEYVRDRKKFFRSLEKPSEISSNQQADINNDEFRQYWSSLWSESGQLQRNTSWRRDIEHNASEIVEMRTDIFTVEDISNTVKNTSNWKAPGPDRLHNFWVKQFPACFPSLARCFSEALEDPFKIPTFLTQGNSHMLHKRGDRSKPENYRPITCLSVVYKLFTTLVNNAIYRHCEANNILEEEQKGCSRGSAGCKHQLTIDAVVLKQAQARRRNLSLCYIDYQKAFDTVPHDWLLKVLEIYKICPKIRAVLQHLMSTWKTNILINNINAGTVNISRGIFQGDALSPMWFCIALNPLSTLLKNTNIGYRPAMRNPRKLTHLLYMDDLKLFGENQKQLHSLINIVRSFSKDIDMSFGVDKCAIVNIRKGKMENTQEQFQDIHSMLPEETYKYLGIPQNQRIDHTRLKAEFTAKYQSRVTKVLNTKLSARNQIDALNSWATPALTYTFGVLKWSDADLNELDRLTRRLMTKFRCLHTNASVKRLYLPRRDGGRGLLNIYKLCRTQEKNLRQRLLESEDSLMKLVTTEDKGYTPLNLQHRELTFDITTRSEDISTWREQALHGRFPKHLEGENVDKLTSLSWLNAGQLYPETEGFLMAIQDRVIRTRNYEKHCLKLNVEDKCRKCGAFGESIEHIIAGCRVLADNAYLGRHNQVAKIVHQQLALRHGFLDTCPPYYKYQPAAVLETDAAVLYWDRPITTDRSVDYNRPDLVFIEKDQKYGVIIDVAVPLTHNIGKTESEKITKYENLAMELKNMWQLSKVTIIPLVISAEGVMSKSFKKNLQKIEISQRIAGYAQQAVALQTCHIVRKFLN

SEQ ID NO: 15058 - protein, 1195 aa, Adalia bipunctata
MKMENKSSLGKESLPGERQGMSGADAGHGSMRSVGGRVLRKRAPVIQQNTAPPEHQEVESQNMAEDQNATPPAGSTTVRRTARRGARNTRIIWSREMNVEVMRAFYYVNNCDDKPLPGWRYSLYTEFTKRHPELQLTEGNIADRKNVIIRKGYLTRQELDEIKREMGYTINQEQIVGIQNEEPTEPLERPADTARDLSVTRTAHQDSPQYRQLYDTFYSNLAQYESTDPLNRPILPKLNFNSTAKNNIERLNEILAEHLSTQWTLEQVHLSLYCAAITVLGQNGQKIYTPRTSEQKVKNQTPAWKRRLMQDVDKLRGKVDVLDEFLKDNKSRKVLNKVRKIATSAGLDLESPRYKEFIVDLKDRLRQQAKAKGARLRRYNELTKRKQQNAEYVRDRKKFFRSLEKPSEISSNQQADINNDEFRQYWSSLWSESGQLQRNTSWLMDIEHQASEIVEMKTDLFTVEEISNIVKNTSNWKAPGPDRLHNFWVKQFPACFPSLARCFSEALEDPFKIPTFLTQGNSHMLHERGDRSKPENYRPITCLSVVYKLFTTLVNNAIYRHCEANNILEEEQKGCSRGSAGCKHQLTIDAVVLKQAQARRRNLSLCYIDYQKAFDTVPHDWLLKVLEIYKICPKIKAVLQHLMSTWKTNILINNINAGTVKISRGIFQGDALSPMWFCIALNPLSTLLKNTNIGYRPAMRNPRKLTHLLYMDDLKLFGENQKQLHSLIDIVRSFSKDIDMSFGIDKCAIVNIRKGKMENTQEQFQDIHSMLPEETYKYLGIPQNQRIDHTRLKAEFTAKYKSRVTKVLNTKLSARNQIDALNSWATPALTYTFGVLKWSDADLNGLDRLTRRLMTKFRCLHTNASVKRLYLPRRDGGRGLLNIYKLCRTQEKNLRQRLLESEDSLMKLVTTEDKGYTPLNLQHRELTFDITTRSEDISIWREQALHGRFPKHLEGENIDKLASLSWLNAGQLYPETEGFLTAIQDRVIRTRNYEKHCLKLNVEDKCRKCGAVGESIEHVIAGCRVLADNAYLGRHNQVAKIVHQQLALRHGFLDTCPPYYKYQPAAVLETDAAVLYWDRPITTDRSVDYNRPDLVFIEKDQKYGVIIDVAVPLTHNIGRTESEKITKYENLAMELKNMWQLSKVTIIPLVISAEGVMSKSFKKNLQKIEISQRIAGYAQQAVALQTCHIVRKFLN

SEQ ID NO: 15059 - protein, 1238 aa, Adalia bipunctata
MEIIIIIIIHTARVWCGLCHATWGVTSPRPELPGPPRVNGGKPMKMEPILSLGRESLPGERQGMSGADAGHDSMRSVGGRVLRKRATVIQQNTAPRQQREVETDIMAEDRNATPPAGSTTVRRTACRGARNARIKWSREMNIEVMRAFYYVNNCDDKPLPGWRYSLYTEFTKRHPELQLTEGNIADRKNVIIRKGYLTRQELDEIKREMGYTINQEQIVGSQNEEPTEQLEKPADTARDLSVTETAHQDSPQYRQLYDTFYSNLAQYESTDPLNRPILPKLNFNSTAKNNIERLNEILAEHLSTQWTLEQVHLSLYCAAITVIGQNGQKIYIPRTSEQKAKNETPAWKRRLMQDVDKLRGKVDVLDEFLRENKSRKVVNKVRKIAISAGLNLESPRHRELIVDLKDRLRQQAKAKGARLRRYNELTKRKQQNAEYLRDRKKFFRSLENPSEISSNQHADINNEEFRQYWSSLWSESGQLQRNTSWLTDIEHQASEIVEMKTDLFTVEEISNIVKNTSNWKAPGPDRLHNFWVKQFPACFPSLARCFSEALEDPFKIPTFLTQGNTYMLHKRGDRSKPENYRPITCLSVVYKLFTTLVNNAIYRHCEAKNILEEEQKGCSRGSAGCKHQLTIDAVVLKQAQARRRNLSLCYIDYQKAFDTVPHDWLVRVLEIYKICPKIKAVLQHLMSTWKTNILINNINAGTVKISRGIFQGDALSPMWFCIALNPLSTLLKNTNIGYKPAMRNPRKLTHLLYMDDLKLFGENQKQLHSLIDIVRSFSTDIDMSFGLDKCAIVNIRKGKMENTQEQFQDIHSMLPKETYKYLGIPQNQRIDHTRLKAEFTAKYKNRVTKVLNTKLSAKNQIDALNSWATPALTYTFGVLKWSDADLNELDRLTRRLMTKFRCLHTNASVKRLYLPRRDGGRGLLNIYKLCRTQEKNLRQRLLESKDSLMKLVTTEDKGYTPLNLQHRELTFDITTRSEDISTWREQALHGRFPKHLEGENVDKLASLSWLNAGQLYPETEGFLMAIQDRVIRTRNYEKHCLKLNVEDKCRKCGAFGESIEHIIAGCRVLADNAYLGRHNQVAKIVHQQLALRHGFLDTCPPYYKYQPAAVLETDAAVLYWDRPITTDRSVDYNRPDLVFIEKDQKYGVIIDVAVPLTHNIGKTESEKITKYENLAMELKNMWQLSKVTIIPLVISAEGVMSKSFKKNLQKIEISQRIAGYAQQAVALQTCHIVRKFLN

SEQ ID NO: 15060 - protein, 1195 aa, Adalia bipunctata
MKMVNSMSLGNESLPGERQGMSGADAGHDSMRSVGGRVLRKRAPVMQQNTAPPEHQEVESQNMAEDTNATPPAGSTTVRRTARRGARNARIKWSREMNIEVLRAFYYVNNCDDKPLPGWRYSLYTEFTKRHPELQLTEGNIADRKNVIIRKSYLTRQELDEIKREMGYTINQEQIVGSQNEEPTESLEGPADTARDLSVTRTAHQDSPQYRQLYDTFYSNLAQYESTDPLNRPILPKLKFNSTAKNNIERLNEILAEHLSTQWTLEQVHLSLYCAAITVIGQNGQKIYIPRTSEQKVKNETPAWKRRLMQDVDKLRGKVDVLDEFLKDNKSRKVLNKVRKIATSAGLDLKSPRHRELIVDLKDRLRQQAKAKGARLRRYNELSKRKQQNAEYVRDRKKFFRNLGKPSEIPSNQHADISNDEFRQYWRSLWSESGQFQRNTSWLRDIEHHASEIVEMRTDIFTVEDISNIIKNTSNWKAPGPDRLQNFWVKQFPACFPSLARCFSEALEDPFKIPAFLTQGNTYMLHKKGDPNNPENYRPITCLSVVYKLFTSLVNNAIYRHCEANNILEEEQKGCSRGSAGCKHQLTIDAVVLKQAQARRRNLSLCYIDYQKAFDTVPHDWLVKVLEIYKICPKIRAVLQHLMSTWRTNILINNINAGTVKISRGIFQGDALSPMWFCMALNPLSTLLKNTNIGYRPAMRNPRKLSHLLYIDDLKLFGENQKQLHSLMDIVRSFSKDIDMSFGLDKCAIINIGKGKMESTQEQFQDIHSMLPEETYKYLGIPQNQRIDHTRLKAEFTAKYKNRVTKVLNTKLSAKNQIDALNSWATPTLTYTFGVLKWSDADLNELDRLTRRLMTKFRCLHTNASVKRLYLPRRDGGRGLLNIYKLCRTQEKNLRQRLLECEDSLMKLVTTEDKGYTPLNLQHRELTFDITTRSEDISIWREQALHGRFPKHLEGENVDKLASLSWLNAGQLYPETEGFLTAIQDRVIRTRNYEKHCLKLNVEDKCRKCGAVGESIEHIIAGCRVLADNAYLGRHNQVAKIVHQQLALRHGFLDTCPPYYKYQPAAVLETDTAVLYWDRPITTDRTVDYNRPDLVFIEKDQKYGVIIDVAVPLTHNIGRTESEKITKYENLAIELKNMWQLSRVTIIPLVISAEGVMSKSFKRNLQKLELSQRIAGYAQQAVALQTCHIVRKFLN

SEQ ID NO: 15061 - protein, 1250 aa, Adalia bipunctata
MLVYFKVGYVRNNNNNNNNNYTPARVWCGLCHATWGVTSPRPELPGPPRVNGGKPMKMERILSLGRESLPGERQGMSGADAGHDSMRSVGGRVLRKRAPVIQQNTAPRQQREVETDIMAEDRNATPPAGSTTVRRTARRGARNARIKWSREMNIEVMRAFYYVNNCDDKPLPGWRYSLYTEFTKRHPELQLTEGNIADRKNVIIRKGYLTRQELDEIKREMGYTINQEQIVGSQNEEPTEQLERPADTARDLSVTRTAHQDSPQYRQLYDTFYSNLAQYESTDPLNRPILPKLNFNSTAKNNIERLNEILAEHLSTQWTLEQVHLSLYCAAITVIGQNGQKIYIPRTSEQKVKNETPAWKRRLMQDVDKLRGKVDVLDEFLRENKSRKVLNKVRKIAISAGLDLESPRHRELIVDLKDRLRQQAKAKGARLRRYNELTKRKQQNAEYLRDRKRFFRSLEKPSEISSNQHADINNEEFRQYWSSLWSESGQLRRNTSWLTDIEHQASEIVEMKTDLFTVEEISNIVKNTSNWKAPGPDRLHNFWVKQFPACFPSLARCFSEALEDPFKIPTFLTQGNTYMLHKRGDRSKPENYRPITCLSVVYKLFTTLVNNAIYRHCEANNILEEEQKGCSRGSAGCKHQLTIDAVVLKQAQARRRNLSLCYIDYQKAFDTVPHDWLVRVLEIYKICPKIKAVLQHLMSTWKTNILINNINAGTVKISRGIFQGDALSPMWFCIALNPLSTLLKNTNIGYRPAMRNPRKLTHLLYMDDLKLFGENQKQLHSLIDIVRSFSTDIDMSFGLDKCAIVNIRKGKMENTQEQFQDIHSMLPEETYKYLGIPQNQRIDHTRLKAEFTAKYKNRVTKVLNTKLSAKNQIDALNSWATPALTYTFGVLKWSDADLNELDRLTRRLMTKFRCLHTNASVKRLYLPRRDGGRGLLNIYKLCRTQEKNLRQRLLESEDSLMKLVTTEDKGYTPLNLQHRELTFDITTRSEDISTWREQALHGRFPKHLEGENVDKLASLSWLNAGQLYPETEGFLMAIQDRVIRTRNYEKHCLKLNVEDKCRKCGAFGESIEHIIAGCRVLADNAYLGRHNQVAKIVHQQLALRHGFLDICPPYYKYQPAAVLETDAAVLYWDRPITTDRSVDYNRPDLVFIEKDQKYGVIIDVAVPLTHNIGKTESEKITKYENLAMELKNMWQLSKVTIIPLVISAEGVMSKSFKKNLQKIEISQRIAGYAQQAVALQTCHIVRKFLN

SEQ ID NO: 15062 - protein, 1238 aa, Adalia bipunctata
MEIIIIIIIHTARVWCGLCHATWGVTSPRPELPGPPRVNGGKPMKMEPILSLGRESLPGERQGMSGADAGHDSMRSVGGRVLRKRATVIQQNTAPRQQREVETDIMAEDRNATPPAGSTTVRRTACRGARNARIKWSREMNIEVMRAFYYVNNCDDKPLPGWRYSLYTEFTKRHPELQLTEGNIADRKNVIIRKGYLTRQELDEIKREMGYTINQEQIVGSQNEEPTEQLEKPADTARDLSVTETAHQDSPQYRQLYDTFYSNLAQYESTDPLNRPILPKLNFNSTAKNNIERLNEILAEHLSTQWTLEQVHLSLYCAAITVIGQNGQKIYIPRTSEQKAKNETPAWKRRLMQDVDKLRGKVDVLDEFLRENKSRKVVNKVRKIAISAGLNLESPRHRELIVDLKDRLRQQAKAKGARLRRYNELTKRKQQNAEYLRDRKKFFRSLENPSEISSNQHADINNEEFRQYWSSLWSESGQLQRNTSWLTDIEHQASEIVEMKTDLFTVEEISNIVKNTSNWKAPGPDRLHNFWVKQFPACFPSLARCFSEALEDPFKIPTFLTQGNTYMLHKRGDRSKPENYRPITCLSVVYKLFTTLVNNAIYRHCEANNILEEEQKGCSRGSAGCKHQLTIDAVVLKQAQARRRNLSLCYIDYQKAFDTVPHDWLVRVLEIYKICPKIKAVLQHLMSTWKTNILINNINAGTVKISRGIFQGDALSPMWFCIALNPLSTLLKNTNIGYKPAMRNPRKLTHLLYMDDLKLFGENQKQLHSLIDIVRSFSTDIDMSFGLDKCAIVNIRKGKMENTQEQFQDIHSMLPKETYKYLGIPQNQRIDHTRLKAEFTAKYKNRVTKVLNTNLSAKNQIDALNSWATPALTYTFGVLKWSDADLNELDRLTRRLMTKFRCLHTNASVKRLYLPRRDGGRGLLNIYKLCRTQEKNLRQRLLESKDSLMKLVTTEDKGYTPLNLQHRELTFDITTRSEDISTWREQALHGRFPKHLEGENVDKLASLSWLNAGQLYPETEGFLMAIKDRVIRTRNYEKHCLKLNVEDKCRKCGAFGESIEHIIAGCRVLADNAYLGRHNQVAKIVHQQLALRHGFLDTCPPYYKYQPAAVLETDAAVLYWDRPITTDRSVDYNRPDLVFIEKDQKYGVIIDVAVPLTHNIGKTESEKITKYENLAMELKNMWQLSKVTIIPLVISAEGVMSKSFKKNLQKIEISQRIAGYAQQAVALQTCHIVRKFLN

SEQ ID NO: 15063 - protein, 1194 aa, Adalia bipunctata
MKMVNESSLGKESLPGERQGMSGADARHDSMRSVGGRVLRKRAPVIQQNTAPPEHREVESQNMAGDQNATSPAGSTTVRRTARRGARNARIKWSREMNIEVMRAFYYVNNCDDRPLPGWRYSLYTEFTKRHPELQLTEGNIADRKNVIIRKGYLTRQELDEIKREMGYTINQDQIVRNHNDEPSEPLETPAETARVPVTRTAHQECPQYRQLYDTFFGNLAQYETTDPLNRPSLPKLKFNSTAKNNIEWLNEILAEHLSTQWTLEQVHLSLYCAAITVIGQNGQKIYIPRTSEQKVKNETPAWKKRLMQDVDKLRGKVDVLDEFLRNNKSRKVLNKVRKIAKSAGLDLESPRRRELVVDLKDRLRQQAKAKGARLRRYNELSKRKQQNAEYVRDRKKFFRSLEKPSEITSNQHANISNDEFRQYWRSLWSESGQFQRNTSWLRDIEQHASEIVEMRTDIFTVEDISNIIKNTSNWKAPGPDRLQNFWVKQFPACFPSLARCFSEALEDPLKIPAFLTQGNTYMLHKKGDLNNPENYRPITCLSVVYKLFTSLVNNAIYRHCEANNILEEEQKGCSRGSAGCRHQLTIDAVVLKQAQARRRNLSLCYIDYQKAFDTVPHDWLVKVLEIYKICPKIQAVLQHLMSTWRTNILINNINAGTVKISRGIFQGDALSPMWFCMALNPLSTLLKNTNIGYRPAMRNPRKLSHLLYIDDLKLFGENQKQLHSLIDIVRSFSTDIDMSFGLDKCAIVNIRKGKMENTQEQFQDIHSMLPEETYKYLGIPQNQRIDHTRLKAEFTAKYKNRVTKVLNTKLSAKNQIDALNSWATPALTYTFGVLKWSDADLNELDRLTRRLMTKFRCLHTNASVKRLYLPRKDGGRGLLNIYKLCRTQEKNLRQRLLESEDSLMKLVTTEDKGYTPLNLQHRELTFDITTRSEDISIWREQALHGRFPKHLEGENVDKLASLSWLNAGQLYPETEGFLTAIQDRVIRTRNYEKHCLKLNVEDKCRKCGAVGESIEHIIAGCRVLADNAYLGRHNQVAKIVHQQLALRHGFLDTCPPYYKYQPAAVLETDTAVLYWDRPITTDRTVDYNRPDLVFIEKDQKYGIVIDVAVPLTHNIGRTESEKITKYENLAIELKNMWQLSKVTIIPLVISAEGVMSKSFKRNLQKIELSQRIAGYAQQAVALQTCHIVRKFLN

SEQ ID NO: 15064 - protein, 1238 aa, Adalia bipunctata
MEIIIIIIIHTARVWCGLCHATWGVTSPRPELPGPPRVNGGKPMKMEPILSLGRESLPGERQGMSGADAGHDSMRSVGGRVLRKRAPVIQQNTAPRQQREVETDIMAEDRNATPPAGSTTVRRTACRGARNARIKWSREMNIEVMRAFYYVNNCDDKPLPGWRYSLYTEFTKRHPELQLTEGNIADRKNVIIRKGYLTRQELDEIKREMGYTINQEQIVGSQNEEPTEQLEKPADTARDLSVTETAHQDSPQYRQLYDTFYSNLAQYESTDPLNRPILPKLNFNSTAKNNIERLNEILAEHLSTQWTLEQVHLSLYCAAITVIGQNGQKIYIPRTSEQKAKNETPAWKRRLMQDVDKLRGKVDVLDEFLRENKSRKVVNKVRKIAISAGLNLESPRHRELIVDLKDRLRQQAKAKGARLRRYNELTKRKQQNAEYLRDRKKFFRSLENPSEISSNQHADINNEEFRQYWSSLWSESGQLQRNTSWLTDIEHQASEIVEMKTDLFTVEEISNIVKNTSYWKAPGPDRLHNFWVKQFPACFPSLARCFSEALEDPFKIPTFLTQGNTYMLHKRGDRSKPENYRPITCLSVVYKLFTTLVNNAIYRHCEANNILEEEQKGCSRGSAGCKHQLTIDAVVLKQAQARRRNLSLCYIDYQKAFDTVPHDWLVRVLEIYKICPKIKAVLQHLMSTWKTNILINNINAGTVKISRGIFQGDALSPMWFCIALNPLSTLLKNTNIGYKPAMRNPRKLTHLLYMDDLKLFGENQKQLHSLIDIVRSFSTDIDMSFGLDKCAIVNIRKGKMENTQEQFQDIHSMLPEETYKYLGIPQNQRIDHTRLKAEFTAKYKNRVTKVLNTNLSAKNQIDALNSWATPALTYTFGVLKWSDADLNELDRLTRRLMTKFRCLHTNASVKRLYLPRRDGGRGLLNIYKLCRTQEKNLRQRLLESKDSLMKLVTTEDKGYTPLNLQHRELTFDITTRSEDISTWREQALHGRFPKHLEGENVDKLASLSWLNAGQLYPETEGFLMAIQDRVIRTRNYEKHCLKLNVEDKCRKCGAFGESIEHIIAGCRVLADNAYLGRHNQVAKIVHQQLALRHGFLDTCPPYYKYQPAAVLETDAAVLYWDRPITTDRSVDYNRPDLVFIEKDQKYGVIIDVAVPLTHNIGKTESEKITKYENLAMELKNMWQLSKVTIIPLVISAEGVMSKSFKKNLQKIEISQRIAGYAQQAVALQTCHIVRKFLN

SEQ ID NO: 15065 - protein, 913 aa, Adalia bipunctata
MDKRSTFPDPVNRRLKMKLLPGKKRLMQDVDKLRGKVDVLDEFLKDNKSRKVLNKVRKIAASAGVDLRSPRHKELMVELKDRLRQQAKAKGARLRRYNELTKRKQQNAEYVRDRKKFFRSLEKPSEISSNLHAGISNGEFRQYWSSLWSETGRFQGNTCWLRNIEHQASEIVEMRTDLFTVEEISNIVKNTSNWKAPGPDRLHNFWVKQFTSCFPSLARCFSEALEDPIKIPTFLTQGNSYMLHKRGDRSKPDNYRPITCLSVLYKLFTSLVNNAIYRHCEANNILEEEQKGCSRGSAGCKHQLTIDAVVLKQAQARRRNLSICYIDYQKAFDTVPHDWLVKVLEIYKICPKIKAVLQHLMSTWRTNILINNINAGTVKISRGIFQGDALSPMWFCMALNPLSTLLKNTNIGYRPAMRNPRKLSHLLYIDDLKLFGENQNQLHSLIDIVRSFSRDIDMSFGLDKCAIINIKKGKMENTQEQFQDICSMLPEETYKYLGIPQNQRIDHTRLKAEFTAKYKNRVTKVLNTKLSAKNQIDALNSWATPALTYTFGVLKWSDADLNELDRLTRRLMTKFRCLHTNASVKRLYLPRRDGGRGLLNIYRLCRTQEKNLRRRLLESEDSLMKLVTTEDKGYTPLNLQHRELTFDITTRSEERSLWREQALHGRFPKHLEGENVDKLASLSWLNAGHLYPETEGFLTAIQDRVIRTRNYEKHCLKLNVEDKCRKCGAVGESIEHVIAGCRVLADNAYLGRHNQVAKIVHQQLALRHGFLDTCPPYYKYQPAAVLETDAAVLYWDRPITTDRTVDYNRPDLVFIEKDQKYGVIIDVAVPLTHNIGKTESEKITKYENLAIELKNMWQLSKVTIIPLVISAEGVMSKSFKRNLQKIELSQRIAGYAQQAVALQTCHIVRKFLN

SEQ ID NO: 15066 - protein, 1195 aa, Adalia bipunctata
MKMVKLMSLGNESLPGERQGMSGADAGHDSMRSVGGRVLRKRAPVIQQNTAPPEHQEVESQNMAEDQNATPPAGSTTVRRTARRGARNTRIKWSREMNIEVMRAFYYVNNCDDKPLPGWRYSLYTEFTRRHPELQLTEGNIADRKNVIIRKSYLTRQELDEIKREMGYTINQEQIVGNQNEEPTEPLERPADTARDLSVTRTAHQDSPQYRQLYDTFHSNLAQYESTDPLNRPILPKLNFNSTAKNNIERLNEILAEHLSTQWTLEQVHLSLYCAAITVIGQNGQKIYIPRPSEQKVKNETPAWKKRLMQDVDKLRGKVDVLDEFLKDNKSRKVLNKVRKIAASAGVDLRSPRHKELMVELKDRLRQQAKAKGARLRRYNELTKRKQQNAEYVRDRKKFFRSLEKPSEISSNLHAGISNGEFRQYWSSLWSETGRFQGNTSWLRDIEHQASEIVEMRTDLFTVEEISNIVKNTSNWKAPGPDRLHNFWVKQFTSCFPSLARCFSEALEDPIKIPTFLTQGNSYMLHKRGDRSKPDNYRPITCLSVLYKLFTSLVNNAIYRHCEANNILEEEQKGCSRGSAGCKHQLTIDAVVLKQAQARRRNLSICYIDYQKAFDTVPHDWLVKVLEIYKICPKIKAVLQHLMSTWRTNILINNINAGTVKISRGIFQGDALSPMWFCMALNPLSTLLKNTNIGYRPAMRNPRKLSHLLYIDDLKLFGENQNQLHSLIDIVRSFSRDIDMSFGLDKCAIINIKKGKMENTQEQFQDICSMLPEETYKYLGIPQNQRIDHTRLKAEFTAKYKNRVTKVLNTKLSAKNQIDALNSWATPALTYTFGVLKWSDADLNELDRLTRRLMTKFRCLHTNASVKRLYLPRRDGGRGLLNIYRLCRTQEKNLRRRLLESEDSLMKLVTTEDKGYTPLNLQHRELTFDITTRSEERSLWREQALHGRFPKHLEGENVDKLASLSWLNAGHLYPETEGFLTAIQDRVIRTRNYEKHCLKLNVEDKCRKCGAVGESIEHVIAGCRVLADNAYLGRHNQVAKIVHQQLALRHGFLDTCPPYYKYQPAAVLETDAAVLYWDRPITTDRTVDYNRPDLVFIEKDQKYGVIIDVAVPLTHNIGKTESEKITKYENLAIELKNMWQLSKVTIIPLVISAEGVMSKSFKRNLQKIELSQRIAGYAQQAVALQTCHIVRKFLN

SEQ ID NO: 15067 - protein, 1316 aa, Adalia bipunctata
MHEIQKMHDLSTFLYFDVVRTVYTRDVQNKNNKHNNNNNSPARRYHFVVYGCDNPADPGHSEPMSDTYTLSLGKQSLPGDRQGASGVGAGRDSMRDTNGRMLRRQAPAIQEAMPSNEEDIDEERVQAQRGRHKWTPEQHSLLSALYRRSKPKRSVGGRVLRKRAPVIQQSTAPPEHQEVESQNMQEDQNATPPAGSTTVRRTARRGARNARIKWSREMNIEVMRAFYYVNNCDDKPLPGWRYSLYTEFTKRHPELQLTEGNIADRKNVIIRKSYLTRQELDEIKREMGYTINQEQIVGSQNEEPTEPLERPADTARDLSVTRTTHQDSPQYRQLYDTFHSNLAQYEYTDPLNRPILPKLNFNSTAKNNIERLNEILAEHLSTQWTLEQVHLSLYCAAITVIGQNGQKIYIPRTSEQKVKNETPAWKRRLMQDVDKLRGKVDVLDEFLKDNKSRKVLNKVRKIATSAGVDLRSPRHKELMVELKDRLRQQAKAKGARLRRYNELSKRKQQNAEYVRDRKKFFRSLEKPSEISSNLHAGISNGEFRQYWSSLWSETGRFQENTSWLRDIEHQASEIVEMRTDLFTVEEISNIVKNTSNWKAPGPDRLHNFWVKQFTSCFPSLARCFSEALEDPIKIPTFLTQGNSYMLHKRGDRSKPDNYRPITCLSVLYKLFTSLVNNAIYRHCEANNILEEEQKGCSRGSAGCKHQLTIDAVVLKQAQARRRNLSLCYIDYQKAFDTVPHDWLVKVLEIYKICPKIKAVLQHLMSTWRTNILINNINAGTVKISRGIFQGDALSPMWFCMALNPLSTLLKNTNIGYRPAMRNPRKLSHLLYIDDLKLFSENQNQLHSLIDIVRSFSRDIDMSFGLDKCAIINIKKGKMENTQEQFQDICSLLPEETYKYLGIPQNQRIDHTRLKAEFTAKYKNRVTKVLNTKLSAKNQIDALNSWATPALTYTFGVLKWSDADLNELDRLTRRLMTKFRCLHTNASVKRLYLPRRDGGRGLLNIYRLCRTQEKNLRRRLLESEDSLMKLVTTEDKGYTPLNLQHRELTFDISTRSEDRSLWREQALHGRFPKHLEGENVDKLASLSWLNAGHLYPETEGFLTAIQDRVIRTRNYEKHCLKLNVEDKCRKCGAVGESIEHVIAGCRVLADNAYLGRHNQVAKIVHQQLALRHGFLDTCPPYYKYQPAAVLETDAAVLYWDRPITTDRTVDYNRPDLVFIEKDQKYGVIIDVAVPLTHNIGKTESEKITKYENLAIELKNMWQLSKVTIIPLVISAEGVMSKSFKRNLQKIELSQRIAGYAQQAVALQTCHIVRKFLN

SEQ ID NO: 15068 - protein, 1241 aa, Adalia bipunctata
MSIHYNNNNNNNNKTARVWCGFCHATWGVTSPRPELPGPPRVNGGKPMKMVNESSLGKESLPGERQGMSGADARHDSMRSVGGRVLRKRAPVIQQNTAPPEHREVESQNMAEHPNATSPAGSTTVRRTARRGARNARIKWSREMNIEVMRAFYYVNNCDDRPLPGWRYSLYTEFTKRHPELQLTEGNIADRKNVIIRKGYLTRQELDEIKREMGYTINQDQIVGNHNEEPSEPLETPAETARVPVTRAAHQECPQYRQLYDTFFGNLAQYETTDPLNRPILPKLKFNSTAKNNIEWLNEILAEHLSTQWTLEQVHLSLYCAAITVIGQNGQKIYIPRTSEQKVKNETPAWKKRLMQDVDKLRGKVDVLDEFLRNNKSRKVLNKVRKIATSAGLDLESPRHRELMIDLKDRLRQQAKAKGARLRRYNELTKRKQQNAEYVRDRKKFFRSLEKPSEIRSNQHANISNDEFRQYWSSLWSESGQFQRNTSWLRDIEQHASEIVEMRTDIFSVEDISNIIKNTSNWKAPGPDRLQNFWVKQFPACFPSLARCFSEALEDPLKIPAFLTQGNTYMLHKKGDLNNPENYRPITCLSVVYKLFTSLVNNAIYRHCEANNILEEEQKGCSRGSAGCKHQLTIDAVVLKQAQARRRNLSLCYIDYQKAFDTVPHDWLVKVLEIYKICPKIQAVLQHLMSTWRTNILINNINAGTVKISRGIFQGDALSPMWFCMALNPLSTLLKNTNIGYRPAMRNPRKLSHLLYIDDLKLFGENQKQLHSLIDIVRSFSTDIDMSFGLDKCAIVNIRKGKMENTQEQFQDIHSMLPEETYKYLGIPQNQRIDHTRLKAEFTAKYKNRVTKVLNTKLSAKNQIDALNSWATPALTYTFGVLKWSDADLNELDRLTRRLMTKFRCLHTNASVKRLYLPRRDGGRGLLNIYKLCRTQEKNLRQRLLESEDSLMKLVTTEDKGYTPLNLQHRELTFDITTRSEDISIWREQALHGRFPKHLEGENVDKLASLSWLNAGQLYPETEGFLTAIQDRVIRTRNYEKHCLKLNVEDKCRKCGAVGESIEHIIAGCRVLADNAYLGRHNQVAKIVHQQLALRHGFLDTCPPYYKYQPAAVLETDTAVLYWDRPITTDRTVDFNRPDLVFIEKDQKYGIVIDVAVPLTHNIGRTESEKITKYENLAIELKNMWQLSKVTIIPLVISAEGVMSKSFKRNLQKIELSQRIAGYAQQAVALQTCHIVRKFLN

SEQ ID NO: 15069 - protein, 1190 aa, Adalia bipunctata
MKMVNESSLGKESLPGERQGMSGADARHDSMRSVGGRVLRKRAPVIRQNTAPPEHREVESQNMAEDPNATSPAGSTTVRRTARRGARNARIKWSREMNIEVMRAFYYVNNCDDRPLPGWRYSLYTEFTKRHPELQLTEGNIADRKNVIIRKGYLTRQELDEIKREMGYTINQDQIVGNHGEEPSEPLETPAETARVPVTRTAHQECPQYRQLYDTFFGNLAQYEATDPLNRPILPKLKFNSTAKNNIEWLNEILAEHLSTQWTLEQVHLSLYCAAITVIGQNGQKIYIPRTSEQKVKNETPAWKKRLMQDVDKLRGKVDVLDEFLRNNKSRKVLNKVRKIATSAGLDLESPRHRELVVDLKDRLRQQAKAKGARLRRYNELTKRKQQNAECARDRRKFFRSLEKPSEISSDQQADVNNDEFRQYWSSLWSESGQLRRNTSWLRDIEQHASEIVEMRTDIFTVEDISNIIKNTSNWKAPGPDRLQNFWVKQFPACFPSLAGCFSEALEDPSKIPAFLTQGNTYMLHKKGDLNNPENYRPITCLSVVYKLFTSLVNNAIYRHCEANNILEEEQKGCSRGSAGCKHQLTIDAVVLKQAQARRRNLSLCYIDYQRAFDTVPHDWLVKVLEIYKICPKIQAVLQHLMSTWRTNILINNINVGTVKISRGIFQGDALSPMWFCMALNPLSTLLKNTNIGYRPAMRNPRKLSHLLYIDDLKLFGENQKQLHSLIDIVRSFSTDIDMSFGLDKCAIVNIRKGKMENTQEQFQDIHSMLPEETYKYLGIPQNQRIDHTRLKAEFTAKYKNRVTKVLNTKLSAKNQIDALNSWATPALTYTFGVLKWSDADLNELDRLTRRLMTKFRCLHTNASVKRLYLPRRDGGRGLLNIYKLCRTQEKNLRQRLLESKDSLMKLVTTEDKGYTPLNLQHRELTFDITTRSEDISTWREQALHGRFPKHLEGENVDKLASLSWLNAGQLYPETEGFLMAIQDRVIRTRNYEKLNVEDKCRKCGAFGESIEHIIAGCRVLADNAYLGRHNQVAKIVHQQLALRHGFLDTCPPYYKYQPAAVLETDAAVLYWDRPITTDRSVDYNRPDLVFIEKDQKYGVIIDVAVPLTHNIGKTESEKITKYENLAMELKNMWQLSKVTIIPLVISAEGVMSKSFKKNLQEIEISQRIAGYAQQAVALQTCHIVRKFLN

SEQ ID NO: 15070 - protein, 1195 aa, Adalia bipunctata
MKMENISSLGKESLPGERQGMSGADAGHDSMRSVGGRVLRKRAPVIQQNTALPEHQEVESQNMAEDQNATPPAGSTTVRRTARRGARNTRIKWSREMNVEVMRAFYYVNNCDDKPLPGWRYSLYTEFTKRHPELQLTEGNIADRKNVIIRKGYLTRQELDEIKREMGYTINQEQIVGIQNEEPTEPLERPADTARDLSVTRTAHQDSPQYRQLYDTFYSNLAQYESTDPLNRPILPKLNFNSTAKNNIERLNEILAEHLSTQWTLEQVHLSLYCAAITVIGQNGQKIYTPRTSEQKVKNQTPAWKRRLMQDVDKLRGKVDVLDEFLKDNKSRKVLNKVRKIATSAGLDLESPRYKEFIVDLKDRLRQQAKAKGARLRRYNELTKRKQQNAEYVRDRKKFFRSLEKPSEIPSNQQADINNDEFRQYWSSLWSESGQLQRNTSWLMDIEHQASEIVEMKTDLFTVEEISNIVKNTSNWKAPGPDRLHNFWVKQFPACFPSLARCFSEALEDPFKIPTFLTQGNSHMLHKRGDRSKPENYRPITCLSVVYKLFTTLVNNAIYRHCEANNILEEEQKGCSRGSAGCKHQLTIDAVVLKQAQARRRNLSLCYIDYQKAFDTVPHDWLLKVLEIYKICPKIKAVLQHLMSTWKTNILINNINAGTVKISRGIFQGDALSPMWFCIALNPLSTLLKNTNIGYRPAMRNPRKITHLLYMDDLKLFGENQKQLNSLIDIVRSFSKDIDMSFGVDKCAIVNIRKGKMENTQEQFQDIHSMLPEETYKYLGIPQNQRIDHTRLKAEFTAKYKSRVTKVLNTKLSARNQIDALNSWATPALTYTFGVLKWSDADLNELDRLTRRLMTKFRCLHTNASVKRLYLPRRDGGRGLLNIYKLCRTQEKNLRQRLLESEDSLMKLVTTEDKGYTPLNLQHRELTFDITTRSEDMSIWREQALHGRFPKHLGGENVDKLASLAWLNAGQLYPETEGFLTAIQDRVIRTRNYEKHCLKLNVEDKCRKCGAVGESIEHIIAGCRVLADNAYLGRRNQVAKIVHQQLALRHGFLDTCPPYYKYQPAAVLETDAAVLYWDRPITTDRSVDYNRPDLVFIEKDQKYGVIIDVAVPLTHNIGRTESEKITKYENLAMELKNMWQLSKVTIIPLVISAEGVMSKSFKKNLQKIEISQRIAGYAQQAVALQTCHIVRKFLN

SEQ ID NO: 15071 - protein, 1235 aa, Adalia bipunctata
MMKNNNKTARVWCGLCHATWGVTSLRPELPVPPRVNGGKPMKMEPSLSLGNESLPGERQGMSGADAGHDSMRSVGGRVLRKRAPVIQQNTAPLQQREVEPDIMADYRNATPPAGSTTVRRTVRRGARNARIKWSREMNIEVMRAFYYVNNCDDKPLPGWRYSLYTEFTKRHPELQLTEGNIADRKNVIIRKGYLTRQELDGIKREMGYTLNQEQIVGNQNEEPDEPLERPAETARELSVTRTARQDCPQYRQLYETFHSNLTRYESTDPLNRPILPKLTFNSTAKNNIEWLNEILAEHLSTQWPLEQVHLSLYCAAITVIGQNGQKIYIPRTSEQKVKNETPAWKRRLMQDVDKLRGKVDVLNEFLKDNKSRKVLNKVRKIATSAGVDLESPRHKDLIVELKDRLRQKAKAKGARLRRYNELSKRKQQNAEYVRDRKKFFRSLEKPSEISSNMHADINNDAFRQYWSSLWSEGGQFQRNTSWLGDIEHQASEIVEMRTDLFTAEEISNIIKKTSNWKAPGPDRLHNFWIKQFPACFPSLARCFSEALEDPFKIPTFLTQGNTYMLHKRGDRSKPDNYRPITCLSVVYKLFTSLVNNAIYRHCEANNILEEEQKGCSRGSAGCKHQLTIDAVVLKQAQARRRNLSLCYIDYQKAFDTVPHDWLVKVLEIYKICPKIKAVLQHLMSTWRTNILINNVNAGTVKISRGIFQGDALSPMWFCMALNPLSTLLKNTNMGYRPAMRNLRKLSHLLYIDDLKLFGESQNQLHSLIDIVRSFSRDIDMSFGLDKCAIVNIRKGKMENTQEQFQDICSMLPEETYKYLGIPQNQRIDHTRLKTEFTEKYRNRVTKVLNTKLSAKNQTDALNSWATPALTYTFGVLRWSDADLNELDRLTRRLMTKFRCLHTNASVKRLYLPRRDGGRGLVNIYRLCRTQEKNLRQRLLESEDSLMKLVTTEDKGYTPLNLQHRELTFDITTRSEDRRLWREQALHGRFPKHLEGENVDKLASLSWLSAGHLYPETEGFLTAIQDRVIRTRNYEKHCLKLNVEDKCRKCGAAGESIEHVIAGCRVLADNAYLGRHNQVAKIVHQQLALRHGFLDTCPPYYKYQPAAVLETDAAVLYWDRPITTDRSVDYNRPDLVFIEKDQKYGVIIDVAVPLTHNIGKTESEKITKYENLAIELKNMWQLSKVTIIPLVISAEGVMSKSFKKNLQKIELSQRIAGYAQQAVALQTCHIVRKFLN

SEQ ID NO: 15072 - protein, 1195 aa, Adalia bipunctata
MKMENKSSLGKESLPGERQGMSGADAGHDSMRSVGGRVLRKRAPVIQQNTAPPEHQEVESQNMAEDQNATPPAGSTTVRRTARRGARNTRIKWSREMNVEVMRAFYYVNNCDDKPLPGWRYSLYTEFTKRHPELQLTEGNIADRKNVIIRKGYLTRQELDEIKREMGYTINQEQIVGIQNEEPTEPLERPADTARDLSVTRTAHQDSPQYRQLYDTFYSNLAQYESTDPLNRPILPKLNFNSTAKNNIERLNEILAEHLSTQWTLEQVHLSLYCAAITVLGQNGQKIYTPRTSEQKVKNQTPAWKRRLMQDVDKLRGKVDVLDEFLKDNKSRKVLNKVRKIATSAGLDLQSPRYKEFIVDLKDRLRQQAKAKGARLRRYNELTKRKQQNAEYVRDRKKFFRSLEKPSEISSNQQADINNDEFRQYWSSLWSESGQLQRNTSWLMDIEHQASEIVEMKTDLFTVEEISNIVKNTSNWKAPGPDRLHNFWVKQFPACFPSLARCFSEALEDPFKIPTFLTQGNSHMLHKRGDRSKPENYRPITCLSVVYKLFTTLVNNAIYRHCEANNILEEEQKGCSRGSAGCKHQLTIDAVVLKQAQARRRNLSLCYIDYQKAFDTVPHDWLLKVLEIYKICPKIKAVLQHLMSTWKTNILINNINAGTVEISRGIFQGDALSPMWFCIALNPLSTLLKNTNIGYRPAMRNPRKLTHLLYMDDLKLFGENQKQLHSLIDIVRSFSKDIDMSFGIDKCAIVNIRKGKMENTQEQFQDIHSMLPEETYKYLGIPQNQRIDHTRLKAEFTAKYKSRVTKVLNTKLSARNQIDALNSWATPALTYTFGVLKWSDADLNELDRLTRRLMTKFRCLHTNASVRRLYLPRRDGGRGLLNIYKLCRTQEKNLRQRLLESEDSLMKLVTTEDKGYTPLNLQHRELTFDITTRSEDISIWREQALHGRFPKHLEGENIDKLASLSWLNAGQLYPETEGFLTAIQDRVIRTRNYEKHCLKLNVEDKCRKCGAVGESIEHVIAGCRVLADNAYLGRHNQVAKIVHQQLALRHGFLDTCPPYYKYQPAAVLETDAAVLYWDRPITTDRSVDYNRPDLVFIEKDQKYGVIIDVAVPLTHNIGRTESEKITKYENLAMELKNMWQLSKVTIIPLVISAEGVMSKSFKKNLQKIEISQRIAGYAQQAVALQTCHIVRKFLN

SEQ ID NO: 15073 - protein, 1229 aa, Adalia bipunctata
MQTARVWSGLCHATWGVTSPRPELPGPPRVNGGKPMKMEPSLSLGNESLPGERQGMSGADAGHDSMRSVGGRVLRKRAPVIQQNTAPPEHREVESQNMAEDPNATPPDGSTTVRRTARRGARNARIKWSREMNIEVMRAFYYVNNCDDKPLPGWRYSLYTEFTKRHPELQLTEGNIADRKNVIIRKGYLTRQELDEIKREMGYTINQDQIVGNHNEEPSEPLETPAETARVPVTRTAHQECPQYRQLYDTFFGNLAQYETTDPLNRPILPKLKFNSTAKNNIEWLNEILAEHLSTQWTLEQVHLSLYCAAITVIGQNGQKIYIPRTSEQKVKNETPAWKKRLTQDVDKLRGKVDVLDEFLRNNKSRKVLNKVRKIATSAGLDLESIRHRELVVDLKDRLRQQAKAKGARLRRYNELTKRKQQNAEYARDRKKFFRSLEKPSEISSDQQADVNNEEFRQYWSSLWSESGQLRRNTSWLRDIEQHASEIVEMRTDIVTVEDISNIIKNTSNWKAPGPDRLQNFWVKQFPACFPSLARCFSEALEDPLKIPAFLTQGNTYMLHKKGDLNNPENYRPITCLSVVYKLFTSLVNNAIYRHCEANNILEEEQKGCSRGSAGCKHQLTIDAVVLKQAQARRRNLSLCYIDYQKAFDTVPHDWLVKVLEIYKICPKIQAVLQHLMSTWRTNILINNINAGTVKISRGIFQGDALSPMWFCMALNPLSTLLKNTNIGYRPAMRNPRKLSHLLYIDDLKLFGENQKQLHSLIDIVRSFSTDIDMSFGLDKCAIVNIRKGKMENTQEQFQDIHSMLPEETYKYLGIPQNQRIDHTRLKAEFTAKYKNRVTKVLNTKLSAKNQIDALNSWATPALTYTFGVLKWSDADLNELDRLTRRLMTKFRCLHTNASVKRLYLPRRDGGRGLLNIYKLCRTQEKNLRQRLLESEDSLMKLVTTEDKGYTPLNLQHRELTFDITTRSEDISTWREQALHGRFPKHLEGENVDKLASLAWLNAGQLYPETEGFLTAIQDRVIRTRNYEKHCLKLNVEDKCRKCGAVGESIEHIIAGCRVLADNAYLGRHNQVAKIVHQQLALRHGFLDTCPPYYKYQPAAVLETDTAVLYWDRPITTDRSVDYNRPDLVFIEKDQKYGVIIDVAVPLTHNIGRTESEKITKYENLAMELKNMWQLSKVTIIPLVISAEGVMSKSFKKNLQKIEISQRIAGYAQQAVVLQTCHIVRKFLN

SEQ ID NO: 15074 - protein, 1195 aa, Adalia bipunctata
MKMENISSLGKESLPGERQGMSGADAGHDSMRSVGGRVLRKRAPVIQQNTALPEHQEVESQNMAEDQNATPPAGSTTVRRTARRGARNTRIKWSREMNVEVMRAFYYVNNCDDKPLPGWRYSLYTEFTKRHPELQLTEGNIADRKNVIIRKGYLTRQELDEIKREMGYTINQEQIVGIQNEEPTEPLERPADTARDLSVTRTAHQDSPQYRQLYDTFYSNLTQYESTDPLNRPILPKLNFNSTAKNNIERLNEILAEHLSTQWTLEQVHLSLYCAAITVIGQNGQKIYTPRTSEQKVKNQTPAWKRRLMQDVDKLRGKVDVLDEFLKDNKSRKVLNKVRKIATSAGLDLESPRYKEFIVDLKDRLRQQAKAKGARLRRYNELTKRKQQNAEYVRDRKKFFRSLEKPSEIPSNQQADINNDEFRQYWSSLWSESGQLQRNTSWLMDIENQASEIVEMKTDLFTVEEISNIVKNTSNWKAPGPDRLHNFWVKQFPACFPSLARCFSEALEDPFKIPTFLTQGNSHMLHKRGDRSKPENYRPITCLSVVYKLFTTLVNNAIYRHCEANNILEEEQKGCSRGSAGCKHQLTIDAVVLKQAQARRRNLSLCYIDYQKAFDTVPHDWLLKVLEIYKICPKIKAVLQHLMSTWKTNILINNINAGTVKISRGIFQGDALSPMWFCIALNPLSTLLKNTNIGYRPAMRNPRKITHLLYMDDLKLFGENQKQLNSLIDIVRSFSKDIDMSFGVDKCAIVNIRKGKMENTQEQFQDIHSMLPEETYKYLGIPQNQRIDHTRLKAEFTAKYKSRVTKVLNTKLSARNQIDALNSWATPALTYTFGVLKWSDADLNELDRLTRRLMTKFRCLHTNASVKRLYLPRRDGGRGLLNIYKLCRTQEKNLRQRLLESEDSLMKLVTTEDKGYTPLNLQHRELTFDITTRNEDISIWREQALHGRFPKHLEGENVDKLASLAWLNAGQLYPETEGFLTAIQDRVIRTRNYEKHCLKLNVEDKCRKCGAVGESIEHIIAGCRVLADNAYLGRHNQVAKIVHQQLALRHGFLDTCPPYYKYQPAAVLETDAAVLYWDRPITTDRSVDYNRPDLVFIEKDQKYGVIIDVAVPLTHNIGRTESEKITKYENLAMELKNMWQLSKVTIIPLVISAEGVMSKSFKKNLQKIEISQRIAGYAQQAVALQTCHIVRKFLN

SEQ ID NO: 15075 - protein, 1195 aa, Adalia bipunctata
MKMVKLMSLGNESLPGERQGMSGADAGHDSMRSVGGRVLRKRAPVIQQNTAPPEHQEVESQNMAEDQNATPPAGSTTVRRTARRGARNTRIKWSREMNIEVMRAFYYVNNCDDKPLPGWRYSLYTEFTRRHPELQLTEGNIADRKNVIIRKSYLTRQELDEIKREMGYTINQEQIVGNQNEEPTEPLERPADTARDLSATRTAHQDSPQYRQLYDTFHSNLAQYESTDPLNRPILPKLNFNSTAKNNIERLNEILAEHLSTQWTLEQVHLSLYCAAITVIGQNGQKIYIPRPSEQKVKNETPAWKKRLMQDVDKLRGKVDVLDEFLKDNKSRKVLNKVRKIAASAGVDLRSPRHKELMVELKDRLRQQAKAKGARLRRYNELTKRKQQNAEYVRDRKKFFRSLEKPSEISSNLHAGISNGKFRQYWSSLWSETGRFQGNTSWLRDIEHQASEIVEMRTDLFTVEEISNIVKNTSNWKAPGPDRLHNFWVKQFTSCFPSLARCFSEALEDPIKIPTFLTQGNSYMLHKRGDRSKPDNYRPITCLSVLYKLFTSLVNNAIYRHCEANNILEEEQKGCSRGSAGCKHQLTIDAVVLKQAQARRRNLSICYIDYQKAFDTVPHDWLVKVLEIYKICPKIQAVLQHLMSTWRTNILINNINAGTVKISRGIFQGDALSPMWFCMALNPLSTLLKNTNIGYRPAMRNPRKLSHLLYIDDLKLFGENQNQLHSLIDIVRSFSRDIDMSFGLDKCAIINIKKGKMENTQEQFQDICSMLPEETYKYLGIPQNQRIDHTRLKAEFTAKYKNRVTKVLNTKLSAKNQIDALNSWATPALTYTFGVLKWSDADLNELDRLTRRLMTKFRCLHTNASVKRLYLPRRDGGRGLLNIYRLCRTQEKDLRRRLLESEDSLMKLVTTEDKGYTPLNLQHRELTFDITTRSEERSLWREQALHGRFPKHLEGENVDKLASLSWLNAGHLYPETEGFLTAIQDRVIRTRNYEKHCLKLNVEDKCRKCGAVGESIEHVIAGCRVLADNAYLGRHNQVAKIVHQQLALRHGFLDTCPPYYKYQPAAVLETDAAVLYWDRPITTDRTVDYNRPDLVFIEKDQKYGVIIDVAVPLTHNIGKTESEKITKYENLAIELKNMWQLSKVTIIPLVISAEGVISKSFRRNLQKIELSQRIAGYAQQAVALQTCHIVRKFLN

SEQ ID NO: 15076 - protein, 887 aa, Adalia bipunctata
MQDVDKLRGKVDVLDEFLKDNKSRKVLNKVRKIAASAGVDLRSPRHKELMVELKDRLRQQAKAKGARLRRYNELTKRKQQNAEYVRDRKKFFRSLEKPSEISSNLHAGISNGEFRQYWSSLWSETGRFQGNTSWLRDIEHQASEIVEMRTDLFTVEEISNIVKNTSNWKAPGPDRLHNFWVKQFTSCFPSLARCFSEALEDPIKIPTFLTQGNSYMLHKRGDRSKPDNYRPITCLSVLDKLFTSLVNNAIYLHCEANNILEEEQKGCSRGSAGCKHQLTIDAVVLKQAQARRRNLSICYIDYQKAFDTVPHDWLVKVLEIYKICPKIKAVLQHLMSTWRTNILINNINAGTVKISRGIFQGDALSPMWFCMALNPLSTLLKNTNIGYRPAMRNPRKLSHLLYIDDLKLFGENQNQLHSLIDIVRSFSRDIDMSFGLDKCAIINIKKGKMENTQEQFQDICSMLPEETYKYLGIPQNQRIDHTRLKAEFTAKYKNRVTKVLNTKLSAKNQINALNSWATPALTYTFGVLKWSDADLNELDRLTRRLMTKFRCLHTNASVKRLYLPRRDGGRGLLNIYRLCRTQEKNLRRRLLKSEDSLMKLVTTEDKGYTPLNLQHRELTFDITTRSEERSLWREQALHGRFPKHLEGENVDKLASLSWLNAGHLYPETEGFLTAIQDRVIRTRNYEKHCLKLNVEDKCRKCGAVGESIEHIIAGCRVLADNAYLGRHNQVAKIVHQQLALRHGFLDTCPPYYKYQPAAVLETDAAVLYWDRPITTDRTVDYNRPDLVFIEKDQKYGVIIDVAVPLTHNIGKTESEKITKYENLAIELKNMWQLSKVTIIPLVISAEGVMSKSFKRNLQKIELSQRIAGYAQQAVALQTCHIVRKFLN

SEQ ID NO: 15077 - protein, 1195 aa, Adalia bipunctata
MKMVKLMSLGNESLPGERQGMSGADAGHDSMRSVGGRVLRKRAPVIQQNTAPPAHQEVESQNMAEDQNATPPAGSTTVRRTARRGARNTRIKWSREMNIEVMRAFYYVNNCDDKPLPGWRYSLYTEFTRRHPELQLTEGNIADRKNVIIRKSYLTRQELDEIKREMGYTINQEQIVGNQNEEPTEPLERPADTARDLSVTRTAHQDSPQYRQLYDTFHSNLAQYESTDPLNRPILPKLNFNSTAKNNIERLNEILAEHLSTQWTLEQVHLSLYCAAITVIGQNGQKIYIPRPSEQKVKNETPAWKKRLMQDVDKLRGKVDVLDEFLKDNKSRKVLNKVRKIAASAGVDLRSPRHKELMVELKDRLRQQAKAKGARLRRYNELTKRKQQNAEYVRDRKKFFRSLEKPSEISSNLHAGISNGEFRQYWSSLWSETGRFQGNTSWLRDIEHQASEIVEMRTDLFTVEEISNIVKNTSNWKAPGPDRLHNFWVKQFTSCFPSLARCFSEALEDPIKIPTFLTQGNSYMLHKRGDRSKPDNYRPITCLSVLYKLFTSLVNNAIYRHCEANNILEEEQKGCSRGSAGCKHQLTIDAVVLKQAQARRRNLSICYIDYQKAFDTVPHDWLVKVLEIYKICPKIKAVLQHLMSTWRTNILINNINAGTVKISRGIFQGDALSPMWFCMALNPLSTLLKNTNIGYRPAMRNPRKLSHLLYIDDLKLFGENQNQLHSLIDIVRSFSRGVDMSFGLDKCAIINIKKGKMENTQEQFQDICSMLPEETYKYLGIPQNQRIDHTRLKAEFTAKYKNRVTKVLNTKLSAKNQIDALNSWATPALTYTFGVLKWSDADLNELDRITRRLMTKFRCLHTNASVKRLYLPRRDGGRGLLNIYRLCRTQEKNLRRRLLESEDSLMKLVTTEDKGYTPLNLQHRELTFDITTKSEERSLWREQALHGRFPKHLEGENVDKLASLSWLNAGHLYPETEGFLTAIQDRVIRTRNYEKHCLKLNVEDKCRKCGAVGESIEHVIAGCRVLADNAYLGRHNQVAKIVHQQLALRHGFLDTCPPYYKYQPAAVLETDAAVLYWDRPITTDRTVDYNRPDLVFIEKDQKYGVIIDVAVPLTHNIGKTESEKITKYENLAIELKNMWQLSKVTIIPLVISAEGVMSKSFKRNLQKIELSQRIAGYAQQAVALQTCHIVRKFLN

SEQ ID NO: 15078 - protein, 1195 aa, Adalia bipunctata
MKMEIISSLGKESLPGERQGMSGADAGHDSMRSVGGRVLRKRAPVIQQNTAPPEPREVESQNMADDQNATPPAGSTTVRRTARRGARNTRIKWSREMNVEVMRAFYYVNNCDDKPLPGWRYSLYTEFTKRHPELQLTEGNIADRKNVIIRKGYLTRQELDEIKREMGCTINQEQIVGIPNEESTEPLERPEDTARDLSVTRTAHQDSPQYRQLYDTFYSNLAQYESTDPLNRPILPKLKFNSTAKNNIERLNEILAEHLSTQWTLEQVHLSLYCAATTVIGQNGQKIYTPRTSEQKVKNQTPAWKRRLMQDVDKLRGKVDVLDEFLKDNKSRKVLNKVRKIATSAGLNLESPRYKEYIVDLKDRLRQQAKAKGARLRRYNELTKRKQQNAEYVRDRKKFFRSLEKPSEISSNQQADINNDEFRQYWSSLWSESGQLQRNTSWLRDIEHNASEIVEMRTDIFTVEDISNTVKNTSNWKAPGPDRLHNFWVKQFPACFPSLARCFSEALEDPFKIPTFLTQGNSHMLHKRGDRSKPENYRPITCLSVVYKLFTTLVNNAIYRHCEANNILEEEQKGCSRGSAGCKHQLTIDAVVLKQAQARRRNLSLCYIDYQKAFDTVPHDWLLKVLEIYKICPKIRAVLQHLMSTWKTNILINNINAGTVNISRGIFQGDALSPMWFCIALNPLSTLLKNTNIGYRPAMRNPRKLTHLLYMDDLKLFGENQKQLHSLIDIVRSFSKDIDMSFGVDKCAIVNIRKGKIENTQEQFQDIHSMLPEETYKYLGIPQNQRIDHTRLKAEFTAKYKSRVTKVLNTKLSARNQIDALNSWATPALTYTFGVLKWSDADLNELDRLTRRLMTKFRCLHTNASVKRLYLPRRDGGRGLLNIYRLCRTQEKNLRQRLLESEDSLMKLVTTEDKGYTPLNLQHRELTFDITTRSEDISTWREQALHGRFPKHLEGENVDKLASLSWLNAGQLYPETEGFLMAIQDRVIRTRNYEKHCLKLNVEDKCRKCGAFGESIEHIIAGCRVLADNAYLGRHNQVAKIVHQQLALRHGFLDTCPPYYKYQPAAVLETDAAVLYWDRPITTDRSVDYNRPDLVFIEKDQKYGVIIDVAVPLTHNIGKTESEKITKYENLAMELKNMWQLSKVTIIPLVISAEGVMSKSFKKNLQKIEISQRIAGYAQQAVALQTCHIVRKFLN

SEQ ID NO: 15079 - protein, 1195 aa, Adalia bipunctata
MKMVNLMSLGNESLPGERQGMSGADAGHDSMRSVGGRVLRKRAPVIQQNTAPPEHQEVESQNMAEDQNATPPAGSTTVRRTARRGARNARIKWSREMNIEVMRAFYYVNNCDDKPLPGWRYSLYTEFTKRHPELQLTEGNIADRKNVIIRKSYLTRQELDEIKREMGYTINQEQIVGRQNEEPTEPLERPADTARDLSVTRTTHQDSPQYRQLYDTFHSNLAQYEYTDPLNRPILPKLNFNSTAKNNIERLNEILAEHLSTQWTLEQVHLSLYCAAITVIGQNGQKIYIPRTSEQKVKNETPAWKRRLMQDVDKLRGKVDVLDEFQKDNKSRKVLNKVRKIATSAGVDLRSPRHKELIVELKDRLRQQAKAKGARLRRYNELSKRKQQNAEYVRDRRKFFRSLEKPSEISSNLHAGISNGEFRQYWSSLWSETGRFQGNTSWLRDIEHQASEIVEMRTDLFTVEEISNIVKNTSNWKAPGPDRLHNFWVKQFTSCFPSLARCFSEALEDPVKIPTFLTQGNSYMLHKRGDRSKPDNYRPITCLSVLYKLFTSLVNNAIYRHCEANNILEEEQKGCSRGSAGCKHQLTIDAVVLKQAQARRRNLSLCYIDYQKAFDTVPHDWLVKVLEIYKICPKIKAALQHLMSTWRTNILINNINAGTVKISRGIFQGDALSPMWFCMALNPLSTLLKNTNIGYRPAMRNPRKLSHLLYIDDLKLFSENQNQLHSLIDIVRSFSRDIDMSFGLDKCAIINIKKGKMENTQEQFQDICSLLPEETYKYLGITQNQRIDHTRLKAEFTAKYKNRVTKVLNTKLSAKNQIDALNSWATPALTYTFGVLKWSDADLNELDRLTRRLMTKFRCLHTNASVKRLYLPRRDGGRGLLNIYRLCRTQEKNLRRRMLESEDSLMKLVTTEDKGYTPLNLQHRELTFDISTRSEDRSLWREQALHGRFPKHLEGENVDKLASLSWLNAGHLYPETEGFLTAIQDRVIRTRNYEKHCLKLNVEDKCRKCGAVGESIEHVIAGCRVLADNAYLGRHNQVAKIVHQQLALRHGFLDTCPPYYKYQPAAVLETDAAVLYWDRPITTDRTVDYNRPDLVFIEKDQKYGVIIDVAVPLTHNIGKTESEKITKYENLAIELKNMWQLSKVTIIPLVISAEGVMSKSFKRNLQKIELSQRIVGYAQQAVALQTCHIVRKFLN

SEQ ID NO: 15080 - protein, 1030 aa, Adalia bipunctata
MGYTINEEQIVGNQNEEPTEPLERPADTARDLSATRTAHQDSPQYRQLYDTFHSNLAQYESTDPLNRPILPKLNFNSTAKNNIERLNEILAEHLSTQWTLEQVHLSLYCAAITVIGQNGQKIYIPRPSEQKVKNETPAWKKRLMQDVDKLRGKVDVLDEFLKDNKSRKVLNKVRKIAASAGVDLRSPRHKELMVELKDRLRQQAKAKGARLRRYNELTKRKQQNAEYVRDRKKFFRSLEKPSEISSNLHAGISNGKFRQYWSSLWSETGRFQGNTSWLRDIEHQASEIVEMRTDLFTVEEISNIVKNTSNWKAPGPDRLHNFWVKQFTSCFPSLARCFSEALEDPIKIPTFLTQGNSYMLHKRGNRSKPDNYRPITCLSVLYKLFTSLVNNAIYRHCEANNILEEEQKGCSRGSAGCKHQLTIDAVVLKQAQARRRNLSICYIDYQKAFDTVPHDWLVKVLEIYKICPKIQAVLQHLMSTWRTNILINNINAGTVKISRGIFQGDALSPMWFCMALNPLSTLLKNTNIGYRPAMRNPRKLSHLLYIDDLKLFGENQNQLHSLIDIVRSFSRDIDMSFGLDKCAIINIKKGKMENTQEQFQDICSMLPEETYKYLGIPQNQRIDHTRLKAEFTAKYKNRVTKVLNTKLSAKNQIDALNSWATPALTYTFGVLKWSDADLNELDRLTRRLMTKFRCLHTNASVKRLYLPRRDGGRGLLNIYRLCRTQEKDLRRRLLESEDSLMKLVTTEDKGYTPLNLQHRELTFDITTRSEERSLWREQALHGRFPKHLEGENVDKLASLSWLNAGHLYPETEGFLTAIQDRVIRTRNYEKHCLKLNVEDKCRKCGAVGESIEHVIAGCRVLADNAYLGRHNQVAKIVHQQLALRHGFLDTCPPYYKYQPAAVLETDAAVLYWDRPITTDRTVDYNRPDLVFIEKDQKYGVIIDVAVPLTHNIGKTESEKITKYENLAIELKNMWQLSKVTIIPLVISAEGVMSKSFRRNLQKIELSQRIAGYAQQAVALQTCHIVRKFLN

SEQ ID NO: 15081 - protein, 1165 aa, Adalia bipunctata
MKMVNLMSLGNESLPGERQGMSGADAGHDSMRSVGGRVLRKRAPVIQQNTAPPEHQEVESQNMAEDQNATPPAGSTTVRRTARRGARNARIKWSREMNIEVMRAFYYVNNCDDKPLPGWRYSLYTEFTKRHPELQLTEGNIADRKNVIIRKSYLTRQELDEIKREMGYTINQEQIVGSQNEEPTEPLERPADTARDLSVTRTTHQDSPQYRQLYDTFHSNLAQYEYTDPLNRPILPKLNFNSTAKNNIERLNEILAEHLSTQWTLEQVHLSLYCAAITVIGQNGQKIYIPRTSEQKVKNETPAWKRRLMQDVDKLRGKVDVLDEFLKDNKSRKVLNKVRKIATSAGVDLRSPRHKELMVELKDRLRQQAKAKGARLRRYNELSKRKQQNAEFRQYWSSLWSETGRFQENTSWLRDIEHQASEIVEMRTDLFTVEEISNIVKNTSNWKAPGPDRLHNFWVKQFTSCFPSLARCFSEALEDPIKIPSFLTQGNSYMLHKRGDRSKPDNYRPITCLSVLYKLFTSLVNNAIYRHCEANNILEEEQKGCSRGSAGCKHQLTIDAVVLKQAQARRRNLSLCYIDYQKAFDTVPHDWLVKALEIYKICPKIKAVLQHLMSTWRTNILINNINAGTVKISRGIFQGDALSPMWFCMALNPLSTLLKNTNIGYRPAMRNPRKLSHLLYIDDLKLFSENQNQLHSLIDIVRSFSRDIDMSFGLDKCAIINIKKGKMENTREQFQDICSLLPEETYKYLGIPQNQRIDHTRLKAEFTAKYKNRVTKVLNTKLSAKNQIDALNSWATPALTYTFGVLKWSDADLNELDRLTRRLMTKFRCLHTNASVKRLYLPRRDGGRGLLNIYRLCRTQEKNLRRRLLESEDSLMKLVTTEDKGYTPLNLQHRELTFDISTRSEDRSLWREQALHGRFPKHLEGENVDKLASLSWLNAGHLYPETEGFLTAIQDRVIRTRNYEKHCLKLNVEDKCRKCGAVGESIEHVIAGCRVLADNAYLGRHNQVAKIVHQQLALRHGFLDTCPPYYKYQPAAVLETDAAVLYWDRPITTDRTVDYNRPDLVFIEKDQKYGVIIDVAVPLTHNIGKTESEKITKYENLAIELKNMWQLSKVTIIPLVISAEGVMSKSFKRNLQKIELSQRIAGYAQQAVALQTCHIVRKFLN

SEQ ID NO: 15082 - protein, 1191 aa, Adalia bipunctata
MKVERILSLGRESLPGERQGMSGADAGHDSMRSVGGRVLRKRAPVIQQNTAPRQQREVETDIMAEDRNATPPAGSTTVRRTARRGARNARIKWSREMNIEVMRAFYYVNNCDDKPLPGWRYSLYTEFTKRHPELQLTEGNIADRKNVIIRKGYLTRQELDEIKREMGYTINQEQIVGSQNEEPTEQLERPADTARDLSVTRTAHQDSPQYRQLYDTFYSNLAQYESTDPLNRPILPRLNFNSTAKNNIERLNEILAEHLSTQWTLEQVHLSLYCAAITVIGQNGQKIYIPRTSEQKVKNETPAWKRRLMQDVDKLRGKVDVLDEFLRENKSRKVLNKVRKIAISAGLDLESPRHRELIVDLKDRLRQQAKAKGRYNELTKRKQQNAEYLRDRRRFFRSLEKPSEISSNQHADINNEEFQQYWSSLWSESGQLRRNTSWLTDIEHQASEIVEMKTDLFTVEEISNIVKNTSNWKAPGPDRLHNFWVKQFPACFPSLARCFSEALEDPFKIPTFLTQGNTYMLHKRGDRSKPENYRPITCLSVVYKLFTTLVNNAIYRHCEANNILEEEQKGCSRGSAGCKHQLTIDAVVLKQAQARRRNLSLCYIDYQKAFDTVPHDWLVRVLEIYKICPKIKAVLQHLMSTWKTNILINNINAGTVKISRGIFQGDALSPMWFCMALNPLSTLLKNTNIGYRPAMRNPRKLTHLLYMDDLKLFGENQKQLHSLIDIVRSFSTDIDMSFGLDKCAIVNIRKGKMENTQEQFQDIHSMLPEETYKYLGIPQNQRIDHTRLKAEFTAKYKNRVTKVLNTKLSAKNQIDALNSWATPALTYTFGVLKWSDADLNELDRLTRRLMTKFRCLHTNASVKRLYLPRRDGGRGLLNIYKLCRTQEKNLRQRLLESEDSLMKLVTTEDKGYTPLNLQHRELTFDITTRSEDISTWREQALHGRFPKHLDGENVDKLASLSWLNAGQLYPETEGFLMAIQDRVIRTRNYEKHCLKLNVEDKCRKCGAFGESIEHIIAGCRVLADNAYLGRHNQVAKIVHQQLALRHGFLDICPPYYKYQPAAVLETDAAVLYWDRPITTDRSVDYNRPDLVFIEKDQKYGVIIDVAVPLTHNIGKTESEKITKYENLAMELKNMWQLSKVTIIPLVISAEGVMSKSFKKNLQKIEISQRIAGYAQQAVALQTCHIVRKFLN

SEQ ID NO: 15083 - protein, 1195 aa, Adalia bipunctata
MKMEPILSLGRESLPGERQGMSGADAGHDSMRSVGGRVLRKRAPVIQQNTAPRQQREVETDIMAEDRNATPPAGSTTVRRTARRGARNARIKWSREMNIEVMRAFYYVNNCDDKPLPGWRYSLYTEFTKRHPELQLTEGNIADRKNVIIRKGYLTRQELDEIKREMGYTINQEQIVGNHNEEPSEPLETPAETARDLSVTRTAHQDSPQYRQLYDTFYSNLAQYESTDPLNRPILPKLNFNSTAKNNIERLNEILAEHLSTQWTLEQVHLSLYCAAITVIGQNGQKIYIPRTSEQKVKNETPAWKRRLMQDVDKLRGKVDVLDEFLRENKSRKVLNKVRKIAISAGLDLESPRHRELIVDLKDRLRQQAKAKGARLRRYNELTKRKQQNAEYLRDRKKFFRSLEKPSEISSNQHADINNEEFRQYWSSLWSESGQLQRNTSWLTDIEHQASEIVEMKTDLFTVEEISNIVKNTSNWKAPGPDRLHNFWVKQFPACFPSLARCFSEALEDPFKIPTFLTQGNTYMLHKRGDRSKPENYRPITCLSVVYKLFTTLVNNAIYRHCEANNILEEEQKGCSRGSAGCKHQLTIDAVVLKQAQARRRNLSLCYIDYQKAFDTVPHDWLVRVLEIYKICPKIKAVLQHLMSTWKTNILINNINAGTVKISRGIFQGDALSPMWFCIALNPLSTLLKNTNIGYRPAMRNPRKLTHLLYMDDLKLFGENQKQLHSLIDIVRSFSTDIDMSFGLDKCAKVNIRKGKMENTQEQFQDIHSMLPEETYKYLGIPQNQRIDHTRLKAEFTAKYKNRVTKVLNTKLSAKNQIDALNSWATPSLTYTFGVLKWSDADLNELDRLTRRLMTKFRCLHTNASVKRLYLPRRDGGRGLLNIYKLCRTQEKNLRQRLLESEDSLMKLVTTEDKGYTPLNLQHRELTFDITTRSEDISTWREQALHGRFPKHLEGENVDKLASLSWLNAGQLYPETEGFLMAIQDRVIRTRNYEKHCLKLNVEDKCRKCGAFGESIEHIIAGCRVLADNAYLGRHNQVAKIVHQQLALRHGFLDTCPPYYKYQPAAVLETDAAVLYWDRPITTDRSVDYNRPDLVFIEKDQKYGVIIDVAVPLTHNIGRTESEKITKYENLAMELKNMWQLSKVTIIPLVISAEGVMSKSFKKNLQKIEISQRIAGYAQQAVALQTCHIVRKFLN

SEQ ID NO: 15084 - protein, 1247 aa, Adalia bipunctata
MKNETGTRFSINNNNNNNKTARVWSGICHATWGVTSPRPELPGPPRVNGGKPMKMVNLMSLGNESLPGERQGMSGADAGHDSMRSVGGRVLRKRAPVIQQNTAPPEHQEVESQNMAEDQNATPPAGSTTVRRTARRGARNARIKWSREMNIEVMRAFYYVNNCDDKPLPGWRYSLYTEFTKRHPELQLTEGNIADRKNVIIRKSYLTRQELDEIKREMGYTINQEQIVGSQNEEPTEPLERPADTARDLSVTRTTHQDSPQYRQLYDTFHSNLAQYEYTDPLNRPILPKLNFNSTAKNNIERLNEILAEHLSTQWTLEQVHLSLYCAAITVIGQNGQKIYIPRPSEQKVKNETPAWKKRLMQDVDKLRGKVDVLDEFLKDNKSRKVLNKVRKIATSAGVDLRSPRHKELMVELKDRLRQQAKAKGARLRRYNELSKRKQQNAEYVRDRKKFFRSLEKPSEISSNLHAGISNAEFRQYWSSLWSETGRFQENTSWLRDIEHQASEIVEMRTDLFTVEEISNIVKNTSNWKAPGPDRLHNFWVKQFTSCFPSLARCFSEALEDPIKIPTFLTQGNSYMLHKRGDRSKPDNYRPITCLSVLYKLFTSLVNNAIYRHCEANNILEEEQKGCSRGSAGCKHQLTIDAVVLKQAQARRRNLSLCYIDYQKAFDTVPHDWLVKVLEIYKICPKIKAVLQHLMSTWGTNILINNINAGTVKISRGIFQGDALSPMWFCMALNPLSTLLKNTNIGYRPAMRNPRKLSHLLYIDDLKLFSENQNQLHSLIDIVRSFSRDIDMSFGLDKCAIINIKKGKMENTREQFQDICSLLPEETYKYLGIPQNQRIDHTRLKAEFTAKYKNRVTKVLNTKLSAKNQIDALNSWATPALTYTFGVLKWSDADLNELDRLTRRLMTKFRCLHTNASVKRLYLPRRDGGRGLLNIYRLCRTQEKNLRRRLLESEDSLMKLVTTEDKGYTPLNLQHRELTFDISTRSEDRSLWREQALHGRFPKHLEGESVDKLASLSWLNAGHLYPETEGFLTAIQDRVIRTRNYEKHCLKLNVEDKCRKCGAVGESIEHVIAGCRVLADNAYLGRHNQVAKIVHQQLALRHGFLDTCPPYYKYQPAAVLETDAAVLYWDRPITTDRTVDYNRPDLVFIEKDQKYGVIIDVAVPLTHNIGKTESEKITKYENLAIELKNMWQLSKVTIIPLVISAEGVMSKSFKRNLQKIELSQRIAGYAQQAVALQTCHIVRKFLN

SEQ ID NO: 15085 - protein, 1194 aa, Adalia bipunctata
MKMEPSLSLGNESLPGERQGMSGADAGHDSMRSVGGRVLRKRAPVIQQNTAPPEHREVESQNMAEDPNATPPDGSTTVRRTARRGARNARIKWSREMNIEVMRAFYYVNNCDDKPLPGWRYSLYTEFTKRHPELQLKEGNIADRKNVIIRKGYLTRQELDEIKREMGYTINQDQIVGNHNEEPSEPLETPAETARVPVTRTAHQECPQYRQLYDTFFGNLAQYETTDPLNRPILPKLKFNSTAKNNIEWLNEILAEHLSTQWTLEQVHLSLYCAAITVIGQNGQKIYIPRTSEQKVKNETPAWKKRLTQDVDKLRGKVDVLDEFLRNNKSRKVLNKVRKIATSAGLDLESIRHRELVVDLKDRLRQQAKAKGARLRRYNELTKRKQQNAEYARDRKKFFRSLEKPSEISSDQQADVNNEEFRQYWSSLWSESGQLRRNTSWLRDIEQHASEIVEMRTDIFTVEDISNIIKNTSNWKAPGPDRLQNFWVKQFPACFPSLARCFSEALEDPLKIPAFLTQGNTYMLHKKGDLNNPENYRPITCLSVVYKLFTSLVNNAIYRHCEANNILEEEQKGCSRGSAGCKHQLTIDAVVLKQAQARRRNLSLCYIDYQKAFDTVPHDWLVKVLEIYKICPKIQAVLQHLMSTWRTNILINNINAGTVKISRGIFQGDALSPMWFCMALNPLSTLLKNTNIGYRPAMRNPRKLSHLLYIDDLKLFGENQKQLHSLIDIVRSFSTDIDMSFGLDKCAIVNIRKGKMENTQEQFQDIHSMLPEETYKYLGIPQNQRIDHTRLKAEFTAKYKNRVTKVLNTKLSAKNQIDALNSWATPALTYTFGVLKWSDADLNELDRLTRRLMTKFRCLHTNASVKRLYLPRRDGGRGLLNIYKLCRTQEKNLRQRLLESEDSLMKLVTTEDKGYTPLNLQHRELTFDITTRSEDISTWREQALHGRFPKHLEGENVDKLASLLWLNAGQLYPETEGFLTAIQDRVIRTRNYEKHCLKLNVEDKCRKCGAVGESIEHIIAGCRVLADNAYLGRHNQVAKIVHQQLALRHGFLDTCPPYYKYQPAAVLETDTAVLYWDRPITTDRTVDYNRPDLVFIEKDQKYGIVIDVAVPLTHNIGRTESEKITKYENLAIELKNMWQLSKVTIIPLVISAEGVMSKSFKRNLQKIGLSQRIAGYAQQAVALQTCHIVRKFLN

SEQ ID NO: 15086 - protein, 1165 aa, Adalia bipunctata
MRSVGGRVLRKRAPVIQQNTAPPEHQEVESQNMAEDQNATPPAGSTTVRRTARRGARNTRIKWSREMNIEVMRAFYYVNNCDDKPLPGWRYSLYTEFTRRHPELQLTEGNIADRKNVIIRKSYLTRQELDEIKREMGYTINQEQIVGNQNEEPTEPLERPADTARDLSVTRTAHQDSPQYRQLYDTFHSNLAQYESTDPLNRPILPKLNFNSTAKNNIERLNEILAEHLSTQWTLEQVHLSLYCAAITVIGQNGQKIYIPRPSEQKVKNETPAWKKRLMQDVDKLRGKVDVLDEFLKDNKSRKVLNKVRKIAASAGVDLRSPRHKELMVELKDRLRQQAKAKGARLRRYNELTKRKQQNAEYVRDRKKFFRSLEKPSEISSNLHAGISNGEFRQYWSSLWSETGRFQGNTSWLRDIEHQASEIVEMRTDLFTVEEISNIVKNISNWKAPGPDRLHNFWVKQFTSCFPSLARCFSEALEDPIKIPTFLTQGNSYMLHKRGDRSKPDNYRPITCLSVLYKLFTSLVNNAIYRHCEANNILEEEQKGCSRGSAGCKHQLTIDAVVLKQAQARRRNLSICYIDYQKAFDTVPHDWLVKVLEIYKICPKIKAVLQHLMSTWRTNILINNINAGTVKISRGIFQGDALSPMWFCMALNPLSTLLKNTNIGYRPAMRNPRKLSHLLYIDDLKLFGENQNQLHSLIDIVRSFSRDIDMSFGLDKCAIINIKKGKMENTQEQFQDICSMLPEETYKYLGIPQNQRIDHTRLKAEFTAKYKNRVTKVLNTKLSAKNQIDALNSWATPALTYTFGVLKWSDADLNELDRLTRRLMTKFRCLHTNASVKRLYLPRRDGGRGLLNIYRLCRTQEKNLRRRLLESEDSLMKLVTTEDKGYTPLNLQHRELTFDITTRSEERSLWREQALHGRFPKHLEGENVDKLASLSWLNAGHLYPETEGFLTAIQDRVIRTRNYEKHCLKLNVEDKCRKCGAVGESIEHVIAGCRVLADNAYLGRHNQVAKIVHQQLALRHGFLDTCPPYYKYQPAAVLETDAAVLYWDRPITTDRTVDYNRPDLVFIEKDQKYGVIIDVAVPVTHNIGKTESEKITKYENLAIELKNMWQLSKVTIIPLVISAEGVMSKSFKRNLQKIELSQRIAGYAQQAVALQTCHIVRKFLN

SEQ ID NO: 15087 - protein, 1195 aa, Adalia bipunctata
MKMENISSLGKESLPGERQGMSGADAGHDSMRSVGGRVLRKRAPVIQQNTAPPEHQEVESQNMAEDRNATPPAGSTTVRRTARRGARNTRIKWSREMNVEVMRAFYYVNNCDDKPLPGWRYSLYTEFTKRHPELQLTEGNIADRKNVIIRKGYLTRQELDEIKREMGYTINQEQIVGIQNEEPTEPLERPADTARDLSVTRTAHQDSPQYRQLYDTFYSNLVQYESTDPLNRPILPKLNFNSTAKNNIERLNEILAEHLSTQWTLEQVHLSLYCAAITVIGQNGQKIYTPRTSEQKVKNQTPAWKRRLMQDVDKLRGKVDVLDEFLKDNKSRKVLNKVRKIATSAGLDLKSPRYKEYIVDLKDRLRQQAKAKGARLRRYNELTKRKQQNAEYVRDRKKFFRSLEKPSEISSNQQAVINNDEFRQYWSSLWSESSQLQTNTSWLMDIEHQASEIVEMKTDLFTIEEISNIVKNTSNWKAPGPDRLHNFWVKQFPACFPSLARCFSEALEDPFKIPTFLTQGNSHMLHKRGDRSKPENYRPITCLSVVYKLFTTLVNNAIYRHCEANNILEEEQKGCSRGSAGCKHQLTIDAVVLKQAQARRRNLSLCYIDYQKAFDTVPHDWLLKVLEIYKICPKIKAVLQHLMSTWKTNILINNINAGTVKISRGIFQGDALSPMWFCIALNPLSTLLKNTNIGYRPAMRNPRKLTHLLYMDDLKLFGENQKQLHSLIDIVRSFSKDIGMSFGVDKCAIVNIRKGKMENTQEQFQDIHSMLPEETYKYLGIPQNQRIDHTRLKAEFTAKYKSRVTKVLNTKLSARNQIDALNSWATPALTYTFGVLKWSDADLNELDRLTRRLMTKFRCLHTNASVKRLYLPRRDGGRGLLNIYKLCRTQEKNLRQRLLESEDSLMKLVTTEDKGYTPLNLQHRELTFDITTRSEDISIWREQALHGRFPKHLEGENVDKLASLAWLNAGQLYPETEGFLTAIQDRVIRTRNYEKHCLKLNVEDKCRKCGAVGESIEHIIAGCRVLADNAYLGRHNQVAKIVHQQLSLRHGFLDTCPPYYKYQPAAVLETDTAVLYWDRPITTDRSVDYNRPDLVFIEKDQKYGVIIDVAVPLTHNIGRTESEKITKYENLAMELKNMWQLSKVTIIPLVISAEGVMSKSFKKNLQKIEISQRIAGYAQQAVALQTCHIVRKFLN

SEQ ID NO: 15088 - protein, 1195 aa, Adalia bipunctata
MKMVNLMSLGNESLPGERQGMSGADAGHDSMRSVGGRVLRKRAPVIQQNTAPPEHQEVESQNMAEDQNATPPAGSTTVRRTARRGARNARIKWSREMNIEVMRAFYYVNNCDDKPLPGWRYSLYTEFTKRHPELQLTEGNIADRKNVIIRKSYLTRQELDEIKREMGYTINQDQIVGNQNEEPTEPLERPADTARDLSVTRTTHQDSPQYRQLYDTFHSNLAQYEYTDPLNRPILPKLNFNSTAKNNIERLNEILAEHLSTQWTLEQVHLSLYCAAITVIGQNGQKIYIPRTSEQKVKNETPAWKRRLMQDVDKLREKVDVLDEFLKDNKSRKVLNKVRKIATSAGVDLRSPRHKELIVELKDRLRQQGKAKGARLRRYNELSKRKQQNAEYVKDRKKFFRSLEKPSEIYSNLHAGISNGEFRQYWSSLWSETGRFQGNTSWLRDIEHQASEIVEMRTDLFTVEEISNIVKNTSNWKAPGPDRLHNFWVKQFTSCFPSLARCFSEALEDPVKIPTFLTQGNSYMLHKRGDRSKPDNYRPITCLSVLYKLFTSLVNNAIYRHCEANNILEEEQKGCSRGSAGCKHQLTIDAVVLKQAQARRRNLSLCYIDYQKAFDTVPHDWLVKVLEIYKICPKIKAVLQHLMSTWRTNILINNINAGTVKISRGIFQGDALSPMWFCMALNPLSTLLKNTNIGYRPAMRNPRKLSHLLYIDDLKLFSENQNQLHSLIDIVRSFSRDIDMSFGLDKCAIINIKKGKMENTQEQFQDICSLLPEETYKYLGIPQNQRIDHTRLKAEFTAKYKNRVTKVLNTKLSAKNQIDALNSWATPALTYTFGVLKWSDADLNELDRLTRRLMTKFRCLHTNASVKRLYLPRRDGGRGLLNIYRLCRTQEKNLRRRLLESEDSLMKLVTTEDKGYTPLNLQHRELTFDISTRSEDRSLWREQALHGRFPKHLEGENVDKLASLSWLNAGHLYPETEGFLTAIQDRVIRTRNYEKHCLKLNVEDKCRKCGAVGESIEHVIAGCRVLADNAYLGRHNQVAKIVHQQLALRHGFLDTCPPYYKYQPAAVLETDAAVLYWDRPITTDRTVDYNRPDLVFIEKDQKYGVIIDVAVPLTHNIGKTESEKITKYENLAIELKNMWQLSKVTIIPLVISAEGVMSKSFKRNLQKIELSQRIAGYAQQAVALQTCHIVRKFLN

SEQ ID NO: 15089 - protein, 1195 aa, Adalia bipunctata
MKMVKLMSLGNESLPGERQGMSGADAGHDSMRSVGGRVLRKRAPVIQQNTAPPEHQEVESQNMAEDQNATPPAGSTTVRRTARRGARNTRIKWSREMNIEVMRAFYYVNNCDDKPLPGWRYSLYTEFTRRHPELQLTEGNIADRKNVIIRKSYLTRQELDEIKREMGYTINQEQIVGNQNEEPTEPLERPADTARDLSVTRTAHQDSPQYRQLYDTFHSNLAQYESTDPLNRPILPKLNFNSTAKNNIERLNEILAEHLSTQWTLEQVHLSLYCAAITVIGQNGQKIYIPRPSEQKVKNETPAWKKRLMQDVDKLRGKVDVLDEFLKDNKSRKVLNKVRKIAASAGVDLRSPRHKELMVELKDRLRQQAKAKGARLRRYNELTKRKQQNAEYVRDRKKFFRSLEKPSEISSNLHAGISNGEFRQYWSSLWSETGRFQGNTSWLRNIEHQASEIVEMRTDLFTVEEISNIVKNTSNWKAPGPDRLHNFWVKQFTSCFPSLARCFSEALEDPIKIPTFLTQGNSYMLHKRGDRSKPDNYRPITCLSVLYKLFTSLVNNAIYRHCEANNILEEEQKGCSRGSAGCKHQLTIDAVVLKQAQARRRNLSICYIDYQKAFDTVPHDWLVKVLEIYKICPKIKAVLQHLMSTWRTNILINNINAGTVKISRGIFQGDALSPMWFCMALNPLSTLLKNTNIGYRPAMRNPRKLFHLLYIDDLKLFGENQNQLHSLIDIVRSFSRDIDMSFGLDKCAIINIKKGKMENTQEQFQDICSMLPEETYKYLGIPQNQRIDHTRLKAEFTAKYKNRVTKVLNTKLSAKNQIDALNSWATPALTYTFGVLKWSDADLNELDRLTRRLMTKFRCLHTNASVKRLYLPRRDGGRGLLNIYRLCRTQEKNLRRRLLESEDSLMKLVTTEDKGYTPLNLQHRELTFDITTRSEERSLWREQALHGRFPKHLEGENVDKLASLSWLNTGHLYPETEGFLTAIQDRVIRTRNYEKHCLKLNVEDKCRKCGAVGESIEHVIAGCRVLADNAYLGRHNQVAKIVHQQLALRHGFLDTCPPYYKYQPAAVLETDAAVLYWDRPITTDRTVDYNRPDLVFIEKDQKYGVIIDVTVPLTHNIGKTESEKITKYENLAIELKNMWQLSKVTIIPLVISAEGVMSKSFKRNLQKIELSQRIAGYAQQAVALQTCHIVRKFLN

SEQ ID NO: 15090 - protein, 913 aa, Adalia bipunctata
MGKRSTSPEPVNRKLKMKLRPGKKRLMQDVDKLRGKVDVLDEFLRNNKSRKVLNKVRKIATSAGLDLESPRHRELMIDLKDRLRQQAKAKGARLRRYNELSKRKQQNAEYVRDRKKFFRSLEKPSKITSNQHANISNDEFRQYWSSLWSESGQFQRNTSWLRDIEQHASEIVEMRTDIFTVEDISNIIKNTSNWKAPGPDRLQNFWVKQFPACFPSLARCFSEALEDPLKIPAFLTQGNTYMLHKKGDLNNPENYRPITCLSVVYKLFTSLVNNAIYRHCEANNILEEEQKGCSRGSAGCKHQLTIDAVVLKQAQARRRNLSLCYIDYQKAFDTVPHDWLVKVLEIYKICPKIQAVLQHLMSTWRTNILINNINAGTVKISRGIFQGDALSPMWFCMALNPLSTLLKNTNIGYRPAMRNPRKLSHLLYIDDLKLFGENQKQLHSLIDIVRSFSTDIDMSFGLDKCAIVNIRKGKMENTQEQFQDIHSMLPEETYKYLGIPQNQRIDHTRLKAEFNAKYKNRVTKVLNTKLSAKNQIDALNSWATPALTYTFGVLKWSDADLNELDRLTRRLMTKFRCLHTNASVKRLYLPRRDGGRGLLNIYKLCRTQEKNLRQRLLESEDSLMKLVTTEDKGYTPLNLQHRELTFDITTRSEDISIWREQALHGRFPKHLEGENVDKLASLSWLNAGQLYPETEGFLTAIQDRVIRTRNYEKHCLKLNVEDKCRKCGAVGESIEHIIAGCRVLADNAYLGRHNQVAKIVHQQLALRHVFLDTCPPYYKYQPAAVLETDTAVLYWDRPITTDRTVDFNRPDLVFIEKDQKYGIVIDVAVPLTHNIGRTESEKITKYENLAIELKNMWQLSKVTIIPLVISAEGVMSKSFKRNLQKIELSQRIAGYAQQAVALQTCHIVRKFLN

SEQ ID NO: 15091 - protein, 1328 aa, Adalia bipunctata
MIMIIMIMIIMIIIIIIIIIIIIIIIIIIIIIIIIIIIIIIIIIIIIIIIIIIIIIIIIIIIIIIIIIIIIIIIIIIIIIIIIIIIIIIIIIIIIIIIIIITARVWCGFCHATWGVTSPRPELPGPPRVNGGKPMKMVNELSLGKESLPGERQGMSGADARHDSMRSVGGRVLRKRAPVIQQNTAPPEHREVESQNMAEDPNATSPAGSTTVRRTARRGARNARIKWSREMNIEVMRAFYYVNNCDDRPLPGWRYSLYTEFTKRHPELQLTEGNIADRKNVIIRKGYLTRQELDEIKRDMGYTINQDQIVGNHNEEPSEPLETPAETARVPVTRTAHQECPRYRQLYDTFFGNLAQYETTDPLNRPILPKLKFNSTAKNNIEWLNEILEEHLSTQWTLEQVHLSLYCAAITVIGQNGQKIYIPRTSEQKVKNETPAWKKRLMQDVDKLRGKVDVLDEFLRNNKSRKVLNKVRKIATSAGLDLESPRHRELVVDLKDRLRQQAKAKGARLRRYNELTKRKQQNAEYARDRKKFFRSLEKPSEISSDQQADINNDEFRQYWSSLWSESGQLRRNTSWLRDIEQHASEIVEMRTDIFTVEDISNIIKNTSNWKAPGPDRLQNFWVKQFPACFPSLARCFSEALEDPLKIPAFLTQGNTYMLHKKGDLNNPENYRPITCLSVVYKLFTSLVNNAIYRHCEANNVLEEEQKGCSRGSAGCKHQLTIDAVVLKQAQARRRNLSLCYIDYQKAFDTVPHDWLVKVLEIYKICPKIQAVLQHLMSTWRTNILINNINAGTVKISRGIFQGDALSPMWFCMALNPLSTLLKNTNIGYRPAMRNPRKLSHLLYIDDLKLFGENQKQLHSLIDIVRSFSTDIDMSFGLDKCAIVNIRKGKMENTQEQFQDIHSMLPEETYKYLGIPQNQRIDHTRLKAEFTAKYKNRVTKVLNTKLSAKNQIDALNSWATPALTYTFGVLKWSDADLNELDRLTRRLMTKFRCLHTNASVKRLYLPRRDGGRGLLNIYKLCRTQEKNLRQRLLESEDSLMKLVTTEDKGYTPLNLQHRELTFDITTSREDISIWREQALHGRFPKHLEGENVDKLASLSWLNAGQLYPETEGFLTAIQDRVIRTRNYEKHCLKLNVEDKCRKCGAVGESIEHIIAGCRVLADNAYLGRHNQVAKIVHQQLALRHGFLDTCPPYYKYQPAAVLETDTAVLYWDRPITTDRTVDYNRPDLVFIEKDQKYGIVIDVAVPLTHNIGRTESEKITKYENLAIELKNMWQLSKVTIIPLVISAEGVMSKSFKRNLQKIELSQRIAGYAQQAVALQTCHIVRKFLN

SEQ ID NO: 15092 - protein, 1195 aa, Adalia bipunctata
MKMVKLMSLGNESLPGERQGMSAADAGHDSMRSVGGRVLRKRAPVIQQNTAPPEHQEVESQNMAEDQNATPPVGSTTVRRTARRGARNARIKWSREMNIEVMRAFYYVNNCDDKPLPGWRYSLYTEFTKRHPELQLTEGNIADRKNVIIRKSYLTRQELDEIKREMGYTINQEQIVGNQNEEPTELLERPADTARDLSVTRTAHQDSPQYRQLYDTFHSNLAQYESTDPLNRPILPKLNFNSTAKNNIERLNEILAEHLSTQWTLEQVHLSLYCAAITVIGQNGQKIYIPRPSEQKVKNETPAWKRRLMQDVDKLRGKVDVLDEFLKDNKSRKVLNKVRKIATSAGVDLRSPRHKELMVELKDRLRQQAKAKGARLRRYNELSKRKQQNAEYVRDRKKFFRSLEKPSEISSNLHAGINNGEFRQYWSSLWLETGRCQGNTSWLRDIEHQASEIVEMRTDLFTVEEISNIVKNTSNWKAPGPDRLHNFWVKQFTSCFPSLARCFSEALEDPIKIPTFLTQGNSYMLHKRGDRSKPDNYRPITCLSVLYKLFTSLVNNAIYRHCEANNILEEEQKGCSRGSAGCKHQLTIDAVVLKQAQARRRNLSICYIDYQKAFDTVPHDWLVKVLEIYKICPKIKAGLQHLMSTWRTNILINNINAGTVKISRGIFQGDALSPMWFCMALNPLSTLLKNTNIGYRPAMRNPRKLSHLLYIDDLKLFGENQNQLHSLIDIVRSFSRDIDMSFGLDKCAIINIKKGKMENTQEQFQDICSMLPEETYKYLGIPQNQRIDHTRLKAEFTAKYKNRVTKVLNTKLSAKNQIDALNSWATPALTYTFGVLKWSDADLNELDRLTRRLMTKFRCLHTNASVKRLYLPRRDGGRGLLNIYRLCRTQERNLRRRLLESEDSLMKLVTTEDKGYTPLNLQHRELAFDITTRSEERSLWREQALHGRFPKHLEGENVDKLASLSWLNAGHLYPETEGFLTAIQDRVIRTRNYEKHCLKLNVEDKCRKCGAVGESIEHVIAGCRVLADNAYLGRHNQVAKIVHQQLALRHGFLDTCPPYYKYQPAAVLETDAAVLYWDRPITTDRTVDYNRPDLVFIEKDQKYGVIIDVAVPLTHNIGKTESEKITKYENLAIELKNMWQLSKVTIIPLVISAEGIMSKSFKRNLQKIELSQRIAGYAQQAVALQTCHIVRKFLN

SEQ ID NO: 15093 - protein, 1195 aa, Adalia bipunctata
MKMVNSMSLGNESLPGERQGMSGADAGHDSMRSVGGRVLRKRAPVMQQNTAPPEHQEVESQNMAEDTNATPPAGSTTVRRTARRGARNARIKWSREMNIEVLRAFYYVNNCDDKPLPGWRYSLYTEFTKRHPELQLTEGNIADRKNVIIRKSYLTRQELDEIKREMGYTINQEQIVGSQNEEPTEPLEGPADTARDLSVTRTAHQDSPQYRQLYDTFYSNLAQYESTDPLNRPILPKLKFNSTAKNNIERLNEILAEHLSTQWTLEQVHLSLYCAAITVIGQNGQKIYIPRTSEQKVKNETPAWKRRLMQDVDKLRGKVDVLDEFLKDNKSRKVLNKVRKIATSAGLDLKSPRHRELIVDLKDRLRQQAKAKGARLRRYNELSKRKQQNAEYVRDRKKFFRNLGKPSEITSNQHADISNDEFRQYWSSLWSESGQFQRNTSWLRDIEHHASEIVEMRTDIFTVEDISNIIKNTSNWKAPGPDRLQNFWVKQFPACFPSLARCFSEALEDPFKIPAFLTQGNTYMLHKKGDPNNPDNYRPITCLSVVYKLFTSLVNNAIYRHCEANNILEEEQKGCSRGSAGCKHQLTIDAVVLKQAQARRRNLSLCYIDYQKAFDTVPHDWLVKVLEVYKICPKIRAVLQHLMSTWRTNILINNINAGTVKISRGIFQGDALSPMWFCMALNPLSTLLKNTNIGYRPAMRNPRKLSHLLYIDDLKLFGENQKQLHSLMDIVRSFSKDIDMSFGLDKCAIVNIRKSKMENTQEQFQDIHSMLPEETYKYLGIPQNQRIDHTRLKAEFTAKYKNRVTKVLNTKLSAKNQIDALNSWATPTLTYTFGVLKWSDTDLNELDRLTRRLMTKFRCLHTNASVKRLYLPRRDGGRGLLNIYKLCRTQEKNLRQRLLECEDSLMKLATTEDKGYTPLNLQHRELTFDITTRSEDISIWREQALHGRFPKHLEGENVDKLASLSWLNAGQLYPETEGFLTAIQDRVIRTRNYEKHCLKLNVEDKCRKCGAVGESIEHIIAGCRVLADNAYLGRHNQVAKIVHQQLALRHGFLDTCPPYYKYQPAAVLETDTAVLYWDRPITTDRTVDYNRPDLVFIEKDQKYGVIIDVAVPLTHNIGRTESEKITKYENLAIELKNMWQLSRVTIIPLVISAEGVMSKSFKRNLQKLELSQRIAVYAQQAVALQTCHIVRKFLN

SEQ ID NO: 15094 - protein, 1253 aa, Adalia bipunctata
MEQRVVIGIREVINNNNNNNNNNNNNYARVWCGFCHATWGVTSPRPELPGPPRVNGGKPMKMVNESSLGKESLPGERQGMSGADARHASMRSVGGRVLRKQAPVIQQNTAPPEHREVESQNMAEDPNATSPAGSTTVRRTARRGARNARIKWSREMNIEVMRAFYYVNNCDDRPLPGWRYSLFTEFTKRHPELQLTEGNIADRKNVIIRKGYLTRQELDEIKREMGYTINQDQIVGNHNEEPSEPLETPAETARVPVTRTAHQECPQYRQLYDTFFGNLAQYETTDPLNRPILPKLKFNSTAKNNIEWLNEILAEHLSTQWTLEQVHLSLYCAAITVIGQNGQKIYIPRTSEQKVKNETPAWKKRLMQDVDKLRGKVDVLDEFLRNNKSRKVLNKVRKIATSAGLDLESPRHRELVVDLKDRLRQQAKAKGARLRRYNELTKRKQQNAEYARDRKKFFRSLEKPSEISSDQQADINNDEFRQYWSSLWSESGQLRRNTSWLRDIEQHASEIVEMRTDIFTVEDISNIIKNTSNWKAPGPDRLQNFWVKQFPACFPSLARCFSEALEDPLKIPAFLTQGNTYMLHKKGDLNNPENYRPITCLSVVYKLFTSLVNNAIYRHCEANNILEEEQKGCSRGYAGCKHQLTIDAVVLKQAQARRRNLSLCYIDYQKAFDTVPHDWLVKVLEIYKICPKIQAVLQHLMSTWRTNILINNINAGTVKISRGIFQGDALSPMWFCMALNPLSTLLKNTNIGYRPAMRNPRKLSHLLYIDDLKLFGENQKQLHSLIDIVRSFSTDIDMSFGLDKCAIVNIRKGKMENTQEQFQDIHSLLPEKTYKYLGIPQNQRIDHTRLKAEFTAKYKNRVTKVLNTKLSAKNQIDALNSWATPALTYTFGVLKWSDADLNELDRLTRRLMTKFRCLHTNASVKRLYLPRRDGGRGLLNIYKLCRTQEKNLRQRLLESEYSLMKLVTTEDKGYTPLNLQHRELTFDITTRREDISIWREQALHGRFPKHLEGENVDKLASLSWLNAGQLNPETEGFLTAIQDRVIRTRNYEKHCLKLNVEDKCRKCGAVGESIEHIIAGCRVLADNAYLGRHNQVAKIVHQQLALRHGFLDTCPPYYKYQPAAVLETDTAVLYWDRPITTDRTVDYNRPDLVFIEKDQKYGIVIDVAVPLTHNIGRTESEKITKYENLAIELKNMWQLSKVTIIPLVISAEGVMSKSFKRNLQKIELSQRIAGYAQQAVALQTCHIVRKFLN

SEQ ID NO: 15095 - protein, 1131 aa, Adalia bipunctata
MMKILKPRINNNNNNNNNNNNNNNTRIKWSREMNVEVMRAFYYVNNCDDKPLPGWRYSLYTEFTKRHPELQLTEGNIADRKNVIIRKGYLTRQELDEIKREMGYTINQEQIVGIQNEEPTEPLERPADTARDLSVTRTAHQDSPQYRQLYDTFYSNLAQYESTDPLNRPILPKLNFNSTAKNNIERLNEILAEHLSTQWTLEQVHLSLYCAAITVLGQNGQKIYTPRTSEQKVKNQTPAWKRRLMQDVDKLRGKVDVLDEFLKDNKSRKVLNKVRKIATSAGLDLESPRYKEFIVDLKDRLRQQAKAKGARLRRYNELTKRKQQNAEYVRDRKKFFRSLEKPSEISSNQQADINNDEFRQYWSSLWSESGQLQRNTSWLMDIEHQASEIVEMKTDLFTVEEISNIVKNTSNWKAPGPDRLHNFWVKQFPACFPSLARCFSEALEDPFKIPTFLTQGNSHMLHKRGDRSKPENYRPITCLSVVYKLFTTLVNNAIYRHCEANNILEEEQKGCSRGSAGCKHQLTIDAVVLKQAQARRRNLSLCYIDYQKAFDTVPHDWLLKVLEIYKICPKIKAVLQHLMSTWKTNILINNINAGTVKISRGIFQGDALSPMWFCIALNPLSTLLKNTNIGYRPAMRNPRKLTHLLYMDDLKLFGENQKQLHSLIDIVRSFSKDIDMSFGIDKCAIVNIRKGKMENTQEQFQDIHSMLPEETYKYLGIPQNQRIDHTRLKAEFTAKYKSRVTKVLNTKLSARNQIDALNSWATPALTYTFGVLKWSDADLNELDRQTRRLMTKFRCLHTNASVKRLYLPRRDGGRGLLNIYKLCRTQEKNLRQRLLESEDSLMKLVTTEDKGYTPLNLQHRELTFDITTRSEDISIWREQALHGRFPKHLEGENIDKLASLSWLNAGQLYPETEGFLTAIQDRVIRTRNYEKHCLKLNVEDKCRKCGAVGESIEHVIAGCRVLADNAYLGRHNQVAKIVHQQLALRHGFLDTCPPYYKYQPAAVLETDAAVLYWDRPITTDRSVDYNRPDLVFIEKDQKYGVIIDVAVPLTHNIGRTESEKITKYENLAMELKNMWQLSKVTIIPLVISAEGVMSKSFKKNLQKIEISQRIAGYAQQAVALQTCHIVRKFLN

SEQ ID NO: 15096 - protein, 1195 aa, Adalia bipunctata
MKMEPILSLGRESLPGERQGMSGADAGHDSMRSVGGRVLRKRAPVIQQNTAPRQQREVETNIMAEDRNATPSAGSTTVRRTARRGARNARIKWSREMNIEVMRAFYYVNCCDDKPLPGWRYSLYTEFTRRHPELQLTEGNIADRKNVIIRKGYLTRQELDEIKREMGYTINQEQIVGSQNEEPTEQLERPADTARDLSVTRTAHQDSPQYRQLYDNFYSNLAQYESTDPLNRPILPKLNFNSTAKNNIERLNEILAEHLSTQWTLEQVHLSLYCAAITVIGQNGQKTYIPRTSEQKVKNETPAWKRRLMQDVDKLRGKVDVLDEFLRENKSRKVLNKVRKIAISAGLDLESPRHRELIVDLKDRLRQQAKAKGARLRRYNELTKRKQQNAEYLRDRKKFFRSLEKPSEISCNQHADINNEEFRQYWSSLWSESGQLQRNTSWLKDIEHQASEIVEMKTDLFTVEEISNIVKNTSNWKAPGPDRLHNFWVKQFPACFPSLARCFSEALEDPFKIPTFLTQGNTYMLHKRGDRIKPENYRPITCLSVVYKLFTTLVNNAIYRHCEANNILEEEQKGCSRGSAGCKHQLTIDAVVLKQAQARRRNLSLCYIDYQKAFDTVPHDWLVRVLEIYKICPKIKAVLQHLMSTWKTNILINNINAGTVKISRGIFQGDALSPMWFCIALNPLSTLLKNTNIGYRPAMRNPRKLTHLLYMDDLKLFSENQKQLHSLIDIVRSFSTDIDMSFGLDKCAIVNIRKGKMENTQEQFQDIHSMLPEETYKYLGIPQNQRIDHTRLKAEFTAKYKNRVTKVLNTKLSAKNQIDALNSWATPALTYTFGVLKWSDADLNELDRLTRRLMTKFRCLHTNASVKRLYLPRRDGGRGLLNICKLCRTQEKNLRQRLLESEDSLMKLVTTEDKGYTPLNLQHRELTFDITTRSEDISTWREQALHGRFPKHLEGENVDKLASLSWLNAGQLYPETEGFLMAIQDRVIRTRNYEKHCLKLNVEDKCRKCGAFGESIEHIIAGCRVLADNAYLGRHNQVAKIVHQQLALRHGFLDTCPPYYKYQPAAVLETDAAVLYWDRPITTDRSVDYNRPDLVFIEKDQKYGVIIDVAVPLTHNIGRTESEKITKYENLAMELKNMWQLSKVTIIPLVISAEGVMSKSFKENLQKIEISHRIAGYAQQAVALQTCHIVRKFLN

SEQ ID NO: 15097 - protein, 1194 aa, Adalia bipunctata
MKMEPSLSLGNESLPGERQGMSGADAGHDSMRSVGGRVLRKRAPVIQQNTAPPEHREVESQNMAEDPNATPPDGSTTVRRTARRGARNARIKWSREMNIELMRAFYYVNNCDDKPLPGWRYSLYTEFTKRHPELQLTEGNIADRKNVIIRKGYLTRQELDEIKREMGYTINQDQIVGNHNEEPSEPLETPAETARVPVTRTAHQECPQYRQLYDTFFGNLAQYETTDPLNRPILPKLKFNSTAKNNIEWLNEILAEHLSTQWTLEQVHLSLYCAAITVIGQNGQKIYIPRTSEQKVKNETPAWKKRLTQDVDKLRGKVDVLDEFLRNNKSRKVLNKVRKIATSAGLDLESIRHRELVVDLKDRLRQQAKAKGARLRRYNELTKRKQQNAEYARDRKKFFRSLEKPSEISSDQQADVNNEEFRQYWSSLWSESGQLRRNTSWLRDIEQHASEIVEMRTDIFTVEDISNIIKNTSNWKAPGPDRLQNFWVKQFPACFPSLARCFSEALEDPLKIPAFLTQGNTYMLHKKGDLNNPENYRPITCLSVVYKLFTSLVNNAIYRHCEANNILEEEQKGCSRGSAGCKHQLTIDAVVLKQAQARRRNLSLCYIDYQKAFDTVSHDWLVKVLEIYKICPKIQAVLQHLMSTWRTNILINNINAGTVKISRGIFQGDALSPMWFCMALNPLSTLLKNTNIGYRPAMRNPRKLSHLLYIDDLKLFGENQKQLHSLIDIVRSFSTDIDMSFGLDKCAIVNIRKGKMENTQEQFQDIHSMLPEETYKYLGIPQNQRIDHTRLKAEFTAKYKNRVTKVLNTKLSAKNQIDALNSWATPALTYTFGVLKWSDADLNELDRLTRRLMTKFRCLHTNASVKRLYLPRRDGGRGLLNIYKLCRTQEKNLRQRLLESEDSLMKLVTTEDKGYTPLNLQHRELTFDITTRSEDISTWREQALHGRFPKHLEGENVDKLASLLWLNAGQLYPETEGFLTAIQDRVIRTRNYEKHCLKLNVEDKCRKCGAVGESIEHIIAGCRVLADNAYLGRHNQVAKIVHQQLALRHGFLDTCPPYYKYQPAAVLETDTAVLYWDRPITTDRTVDYNRPDLVFIEKDQKYGIVIDVAVPLTHNIGRTESEKITKYENLAIELKNMWQLSKVTIIPLVISAEGVMSKSFKRNLQKIGLSQRIAGYAQQAVALQTCHIVRKFLN

SEQ ID NO: 15098 - protein, 1195 aa, Adalia bipunctata
MKMEPILSLGRESLPGERQGMSGADAGHDSMRSVGGRVLRKRAPVIQQNTAPRQQREVETDIMAEDRNATPPAGSTTVRRTARRGARNARIKWSREMNIEVMRAFYYVNNCDDKPLPGWRYSLYTEFTKRHSELQLTEGNIADRKNVIIRKGYLTRQELDEIKREMGYTINQEQIVGNHNEEPSEPLETPAETARDLSVTRTAHQDSPQYRQLYDTFYSNLAQYESTDPLNRPILPKLNFNSTAKNNIERLNEILAEHLSTQWTLEQVHLSLYCAAITVIGQNGQKIYIPRTSEQKVKNETPAWKRRLMQDVDKLRGKVDVLDEFLRENKSRKVLNKVRKMAISAGLDLESPRHRELIVDLKDRLRQQAKAKGARLRRYNELTKRKQQNAEYLRDRKKFFRSLEKPSEISSNQHADINNEEFRQYWSSLWSESGQLQRNTSWLTDIEHQASEIVEMKTDLFTVEEISNIVKNTSNWKAPGPDRLHNFWVKQFPACFPSLARCFSEALEDPFKIPTFLTQGNTYMLHKRGDRSKPENYRPITCLSVVYKLFTTLVNNAIYRHCEANNILEEEQKGCSRGSAGCKHQLTIDAVVLKQAQARRRNLSLCYIDYQKAFDTVPHDWLVRVLEIYKICPKIKAVLQHLMSTWKTNILINNINAGTVKISRGIFQGDALSPMWFCIALNPLSTLLKNTNIGYRPAMRNPRKLTHLLYMDDLKLFGENQKQLHSLIDIVRSFSTDIDMSFGLDKCAIVNIRKGKMENTQEQFQDIHSMLPEETYKYLGIPQNQRIDHTRLKAEFTAKYKNRVTKVLNTKLSAKNQIDALNSWATPALTYTFGVLKWSDADLNELDRLTRRLMTKFRCLHTNASVKRLYLPRRDGGRGLLNIYKLCRTQEKNLRQRLLESEDSLMKLVTTEDKGYTPLNLQHRELTFDITTRSEDISTWREQALHGRFPKHLEGENVDKLASLSWLNAGQLYPETEGFLMAIQDRVIRTRNYEKHCLKLNVEDKCRKCGAFGESIEHIIAGCRVLADNAYLGRHNQVAKIVHQQLALRHGFLDTCPPYYKYQPAAVLETDAAVLYWDRPITTDRSVDYNRPDLVFIEKDQKYGVIIDVAVPLTHNIGRTESEKITKYENLAMELKNMWQLSKVTIIPLVISAEGVMSKSFKKNLQKIEISQRIAGYAQQAVALQTCHIVRKFLN

SEQ ID NO: 15099 - protein, 1195 aa, Adalia bipunctata
MKMERILSLGRESLPGERQGMSGADAGHDSMRSVGGRVLRKRAPVIQQNTAPRQQREVETDIMAEDRNATPPAGSTTVRKTARRGARNARIEWSREMNIEVMRAFYYVNNCDDKSLPGWRYSLYTEFTKRHPELQLTEGNIADRKNVIIRKGYLTRQELDEIKREMGYTINQEQIVGSQNEEPTEQLERPADTARNLSVTRTAHQDSPQYRQLYDTFYSNLAQYESTDPLNRPILPKLNFNSTAKNNIERLNEILAEHLSTQWTLEQVHLSLYCAAITVIGQNGQKIYIPRTSEQKVKNETPAWKRRLMQDVDKLRGKVDVLDEFLRENKSRKVLNKVRKIAISAGLDLESPRHRELIVDLKDRLRQQAKAKGARLRRYNELTKRKQQNAEYLRDRKRFFRSLEKPSEISSNQHADINNEEFRQYWSSLWSESGQLRRNTSWLTDIEHQASEIVEMKTDLFAVEEISNIVKNTSNWKAPGPDRLHNFWVKQFPACFPSLARCFSEALEDPFKIPTFLTQGNTYMLHKRGDRSKPENYRPITCLSVVYKLFTTLVNNAIYRHCEANNILEEEQKGCSRGSAGCKHQLTIDAVVLKQAQARRRNLSLCYIDYQKAFDTVPHDWLVRVLEIYKICPKIKAVLQHLMSTWKTNIFINNINAGTVKISRGIFQGDALSPMWFCIALNPLSTLLKNTNIGYRPAMRNPRKLTHLLYMDDLKLFGENQKQLHSLIDIVRSFSTDIDMSFGLDKCAIVNIRKGKMENTQEQFQDIHSMLPEETYKYLGIPQNQRIDHTRLKAEFTAKYKNRVTKVLNTKLSAKNQIDALNSWATPALTYTFGVLKWSDADLNELDRLTRRLMTKFRCLHTNASVKRLYLPRRDGGRGLLNIYKLCRTQEKNLRQRLLESEDSLMKLVTTEDKGYTPLNLQHRELTFDITTRSEDISTWREQALHGRFPKHLEGENVDKLASLSWLNAGQLYPETEGFLMAIQDRVIRTRNYEKHCLKLNVEDKCRKCGAFGESIEHIIAGCRVLADNAYLGRHNQVAKIVHQQLALRHGFLDICPPYYKYQPAAVLETDAAVLYWDRPITTDRSVDYNRPDLVFIEKDQKYGVIIDVAVPLTHNIGKTESEKITKYENLAMELKNMWQLSKVTIIPLVISAEGVMSKSFKKNLQKIEISQRIAGYAQQAVALQTCHIVRKFLN

SEQ ID NO: 15100 - protein, 1237 aa, Adalia bipunctata
MRNNNNNNKTARVWSGFCHATWGVTSPRPELPEPPRLNGGKPMKMVKLMSLGNESLPGERQGMSGADAGHDSMRSVGGRVLRKRAPVIQQNTAPPEHQEVESQNMAEDQNATPPAGSTTVRRTARRGARNTRIKWSREMNIEVMRAFYYVNNCDDKPLPGWRYSLYTEFTRRHPELQLTEGNIADRKNVIIRKSYLTRQELDEIKREMGYTINQEQIVGNQNEEPTEPLERPADTARDLSVTRTAHQDSPQYRQLYDTFHSNLAQYESTDPLNRPILPKLNFNSTAKNNIERLNEILAEHLSTQWTLEQVHLSLYCAAITVIGQNGQKIYIPRPSEQKVNNETPAWKKRLMQDVDKLRGKVDVLDEFLKDNKSRKVLNKVRKIAASAGVDLRSPRHKELMVELKDRLRQQAKAKGARLRRYNELTKRKQQNAEYVRDRKKFFRSLEKPSEISSNLHAGISNGEFRQYWSSLWSETGRFQGNTSWLRDIEHQASEIVEMRTDLFTVEEISNIVKNTSNWKAPGPDRLHNFWVKQFTSCFPSLARCFSEALEDPIKIPTFLTQGNSYMLHKRGDRSKPDNYRPITCLSVLYKLFTSLVNNAIYRHCEANNILEEEQKGCSRGSAGCKHQLTIDAVVLKQAQARRRNLSICYIDYQKAFDTVPHDWLVKVLEIYKICPKIKAVLQHLMSTWRTNILINNINAGTVKISRGIFQGDALSPMWFCMALNPLSTLLKNTNIGYRPAMRNPRKLSHLLYIDDLKLFGENQNQLHSLIDIVRSFSRDIDMSFGLDKCAIINIKKGKMENTQEQFQDICSMLPEETYKYLGIPQNQRIDHTRLKAEFTAKYKNRVTKVLNTKLSAKNQIDALNSWATPALTYTFGVLKWSDADLNELDRLTRRLMTKFRCLHTNASVKRLYLPRRDGGRGLLNIYRLCRTQEKNLRRRLLESEDSLMKLVTTEDKGYTPLNLQHRELTFDITTRSEERSLWREQALHGRFPKHLEGENVDKSASLSWLNAGHLYPETEGFLTAIQDRVIRTRNYEKHCLKLNVEDKCRKCGAVGESIEHVIAGCRVLADNAYLGRHNQVAKIVHQQLALRHGFLDTCPPYYKYQPAAVLETDAAVLYWDRPITTDRTVDYNRPDLVFIEKDQKYGVIIDVAVPLTHNIGKTESEKITKYENLAIELKNMWQLSKVTIIPLVISAEGVMSKSFKRNLQKIELSQRIAGYAQQAVALQTCHIVRKFLN

SEQ ID NO: 15101 - protein, 1194 aa, Adalia bipunctata
MKMVNESSLGKESLPGERQGMSGADARHDSMRSVGGRVLRKRAPVIQQNTAPPEHREVEAQNMAADQNATSPAGSTTVRRTARREARNARIKWSREMNIEVMRAFYYVNNCDDRPLPGWRYSLYTEFTKRHPELQLTEGNIADRKNVIIRKGYLTRQELDEIKREMGYTINQDQIVENHNEEPSEPLETPAGTARVPVTRTAHQECPQYRQLYDTFFGNLAQYETTDPLNRPILPKLKFNSTAKNNIEWLNEILAEHLSTQWTLKQVHLSLYCAAITVIGQNGQKIYIPRTSEQKVKNETPAWKKRLMQDVDKLRGKVDVLDEFLRNNKSRKVLNKVRKIATSAGLDLESPRHRELMIDLKDRLRQQAKAKGARLRRYNELSKRKQQNAEYVRDRKKFFRSLEKPSEITSNQHANISNDEFRQYWSSLWSESGQFQRNTSWLRDIEQHASEIVEMRTDIFTVEDISNIIKNTSNWKAPGPDRLQNFWVKQFPACFPSLARCFSEALEDPLKIPAFLTQGNTYMLHKKGDLNNPENYRPITCLSVVYKLFTSLVNNAIYRHCEANNILEEEQKGCSRGSAGCKHQLTIDAVVLKQAQARGRNLSLCYIDYQKAFDTVPHDWLVKVLEIYKICPKIQAVLQHLMSTWRTNILINNTNAGTVKISRGIFQGDALSPMWFCMALNPLSTLLKNTNIGYRPAMRNPRKLSHLLYIDDLKLFGENQKQLHSLIDIVRSFSTDIDMSFGLDKCAIVNIRKGKMENTQEQFQDIHSMLPEETYKYLGIPQNQRIDHTRLKAEFTAKYKNRVTKVLNTKLSAKNQIDALNSWATPALTYTFGVLKWSDADLNELDRLTRRLMTKFRCLHTNASVKRLYLPRRDGGRGLLNIYKLCRTQEKNLRQRLLESEDSLMKLVTTEDKGYTPLNLQHRELTFDITTRSEDISIWREQALHGRFPKHLEGENVDKLASLAWLNAGQLYPETEGFLTAIQDRVIRTRNYEKHCLKLNVEDKCRKCGAVGESIEHIIAGCRVLADNAYLGRHNQVAKIVHQQLALRHGFLDTCPPYYKYQPAAVLETDTAVLYWDRPITTDRTVDYNRPDLVFIERDQKYGIVIDVAVPLTHNIGRTESEKITKYENLAIELKNMWQLSKVTIIPLVISAEGVMSKSFKRNLQKIELSQRIAGYAQQAVALQTCHIVRKFLN

SEQ ID NO: 15102 - protein, 1195 aa, Adalia bipunctata
MKMEPILSLGRESLPGERQGMSGADAGHDSMRSVGGRVLRKRAPVIQQNTAPRQQREVETDIMAEDRNATPPAGSTTVRRTARRGARNARIKWSREMNIEVMRAFYYVNNCDDKPLPGWRYSLYTEFTKRHPELQLTEGNIADRKNVIIRKGYLTRQELDEIKREMGYTINQEQIVGSQNEEPTEQLERPEDTARDLSVTRTAHQDSPQYRQLYDTFYSNLAQYESTDPLNRPILPKLNFNSTAKNNIERLNEILAEHLSTQWTLEHVHLSLYCAAITVIGQNGQKIYIPRTSEQKVKNETPAWKRRLLQDVDKLRGKVDVLDEFLRENKSRKVLNKVRKIAISAGLDLESPRHRELIVDLKDRLRQQAKAKGARLRRYNELTKRKQQNAEYLRDRKKFFRSLEKPSEISSNQHADINNEEFRQYWSSLWSESGQLQRNTSWLTDIEHQASEIVEMKTDLFTVEEISNIVKNTSNWKAPGPDRLHNFWVKQFPACFPSLARCFSEALEDPFKIPTFLTQGNTYMLHQRGDRSKPENYRPITCLSVVYKLFTTLVNNAIYRHCEANNILEEEQKGCSRGSAGCKHQLTIDAVVLKQAQARRRNLSLCYIDYQKAFDTVPHDWLVRVLEIYKICPKIKAVLQHLMSTWKTNILINNINAGTVKISRGIFQGDALSPMWFCIALNPLSTLLKNTNIGYRPAMRNPRKLTHLLYMDDLKLFGENQKQLHSLIDIVRSFSTDIGMSFGLDKCAIVNIRKGKMENTQEQFQDIHSMLPEETYKYLGIPQNQRIDHTRLKAEFTAKYKNRVTKVLNTKLSAKNQIDALNSWATPALTYTFGVLKWSDADLNELDRLTRRLMTKFRCLHTNASVKRLYLPRRDGGRGLLNIYKLCRTQEKNLRQRLLESEDSLMKLVTTEDKGYTPLNLQHRELTFDITTRSEDISTWREQALHGRFPKHLEGENVDKLASLSWLNAGQLYPETEGFLMAIQDRVIRTRNYEKHCLKLNVEDKCRKCGAFGESIEHIIAGCRVLADNAYLGRHNQVAKIVHQQLALRHGFLDTCPPYYKYQPAAVLETDAAVLYWDRPITTDRSVDYNRPDLVFIEKDQKYGVIIDVAVPLTHNIGRTESEKITKYENLAMELKNMWQLSKVTIIPLVISAEGVMSKSFKKNLQKIEISQRIAGYAQQAVALQTCHIVRKFLN

SEQ ID NO: 15103 - protein, 1195 aa, Adalia bipunctata
MKMEPSLSLRNESLPGERQGMSGADAGHDSMRSVGGRVLRKRAPVIQQNTAPLQQREVEPDIMAENRNATPPAGSTTVRRTVRRGARNARIKWSREMNIEVMRAFYYVNNCDDKPLPGWRYSLYTEFTKRHPELQLTEGNIADRKNVIIRKGYITRQELDGIKREMGYTLNQEQIVGNQNEEPDEPLERPAETARELSVTRTAREDCPQYRQLYETFHSNLTRYESTDPLNRPILPKLTFNSTAKNNIEWLNEILAEHLSTQWPLEQVHLSLYCAAITVIGQNGQKFYIPRTSEQKVKNETPAWKRRLMQDVDKLRGKVDVLNEFLKDNKSRKVLNKVRKIATSAGVDLESPRHKDLIVELKDRLRQKAKAKGARLRRYNELSKRKQQNAEYVRDRKKFFRGLEKPSEISSNMHADINNDEFRQYWSSLWSESVQFQRNTSWLGDIEHQASEIVDMRTDLFTAEEISNIIKKTSNWKAPGPDRLHNFWIKQFPACFPSLARCFSEALEDPFKIPTFLTQGNTNMLHKRGDRSKPDNYRPITCLSVVYKLFTSLVNNAIYRHCEANNILEEEQKGCSRGSAGCKHQLTIDAVVLKQAQARRRNLSLCYIDYQKAFDTVPHDWLVKVLEIYKICPKIKAVLQHLMSTWRTNILINNVNAGTVKISRGIFQGDALSPMWFCMALNPLSTLLKNTNMGYRPAMRNPRKLSHLLYIDDLKLFGESQNQLHSLIDIVRSFSRDIDMSFGLDKCAIVNIRKAKMENTQEQFQDICSMLPEETYKYLGIPQNQRIDHTRLKTEFTEKYRNRVTKVLNTKLSAKNQIDALNSWATPALTYTFGVLKLSDADLNELDRLTRRLMTKFRCLHTNASVKRLYLPRRDGGRGLVNIYRLCRTQEKNLRQRLLESEDSLMKLVTTEDKGYTPLNLQHRELTFDITTRSEDRRLWREQALHGRFPKHLEGENVDKLASLSWLSAGHLYPETEGFLTAIQDRVIRTRNYEKHCLKLNVEDKCRKCGAAGESIEHVIAGCRVLADNAYLGRHNQVAKIVHQQLALRHGFLDTCPPYYKYQPAAVLETDAAVLYWDRPITTDRSVDYNRPDLVFIEKDQKYGVIIDVAVPLTHNIGKTESEKITKYENLAIELKNMWQLSKVTIIPLVISAEGVMSKSFKRNLQKIELSQRIAGYAQQAVALQTCHIVRKFLN

SEQ ID NO: 15104 - protein, 1195 aa, Adalia bipunctata
MKMERILSLGRESLPGERQGMSGADAGHDSMRSVGGRVLRKRAPVIQQNTAPRQQREVETDIMAEDRNATPPAGSTTVRRTARRGARNARIKWSREMNIEVMRAFYYVNNCDDKPLPGWRYSLYTEFTKRHPELQLTEGNIADRKNVIVRKGYLTRQELDEIKREMGYTINQEQIVGSQNEEPTEQLERPADTARDLSVTRTAHQDSPQYRQLYDTFYSNLAQYESTDPLNRPILPKLNFNSTAKNNIERLNEILAEHLSTQWTLEQVHLSLYCAAITVIGQNGQKIYIPRTSEQKVKNETPAWKRRLMQDVDKLRGKVDVLDEFLRENKSRKVLNKVRKIAISAGLDLESPRHRELIVDLKDRLRQQAKAKGARLRRYNELTKRKQQNAEYLRDRKRFFRSLEKPSEISSNQHADINNEEFRQYWSSLWSESGQLRRNTSWLTDIEHQASEIVEMKTDLFTVEEISNIVKNTSNWKAPGPDRLHNFWVKQFPACFPSLARCFSEALEDPFKIPTFLTQGNTYMLHKRGDRSKPENYRPITCLSVVYKLFTTLVNNAIYRHCEANNILEEEQKGCSRGSAGCKHQLTIDAVVLKQAQARRRNLSLCYIDYQKAFDTVPHDWLVRVLEIYKICPKIKAVLQHLMSTWKTNILINNINAGTVKISRGIFQGDALSPMWFCIALNPLSTLLKNTNIGYRPAMRNPRKLTHLLYMDDLKLFGENQKQLHSLIDIVRSFSTDIDMSFGLDKCAIVNIRKGKMENTQEQFQDIHSMLPEETYKYLGIPQNQRIDHTRLKAEFTAKYKNRVTKVLNTKLSAKNQIDALNSWATPALTYTFGVLKWSDADLNELDRLTRRLMTKFRCLHTNASVKRLYLPRRDGGRGLLNIYKLCRTQEKNLRQRLLESEDSLMKLVTTEDKGYTPLNLQHRELTFDITTRSEDISTWREQALHGRFPKHLEGENVDKLASLSWLNAGQLYPETEGFLMAIQDRVIRTRNYEKHCLKLNVEDKCRKCSAFGESIEHIIAGCRVLADNAYLGRHNQVAKIVHQQLALRHGFLDICPPYYKYQPAAVLETDAAVLYWDRPITTDRSVDYNRPDLVFIEKDQKYGVIIDVAVPLTHNIGKTESEKITKYENLAMELKNMWQLSKVTIIPLVISAEGVMSKSFKKNLQKIEISQRIAGYAQQAVALQTCHIVRKFLN

SEQ ID NO: 15105 - protein, 887 aa, Adalia bipunctata
MQDVDKLRGKVDVLDEFLKDNKSRKVLNKVRKIATSAGLDLESPQYKEFIVDLKDRLRQQAKAKGARLRRYNELTKRKQQNAEYARDRKKFFRSLEKPSEISSNQQADINNDEFRQYWSSLWSETGQLRRNTSWLMNIEHQASEIVEMKTDLFTVEEISKIVKNTSNWKAPGPDRLHNFWVKQFSACFPSLARCFSEALEDPFKIPTFLTQGNSHMLHKRGDRSKPENYRPITCLSVVYKLFTTLVNNAIYRHCEANNILKEEQKGCSRGSAGCKHQLTIDAVVLKQAQARRRNLSLCYIDYQKAFDTVPQDWLLKVLEIYKICPKIRAVLQHLMSTWKTNILINNINAGTVKISRGIFQGDALSPMWFCIALNPLSTLLKNTNIGYRPAMRNPRKLTHLLYMDDLKLFGENQKQLHSLIDIVRSFSKDIDMSFGVDKCSIVNITKGKMENTQEQFQDIHSMLPKETYKYLGIPQNQRIDHTRLKAEFTAKYKSRVTKLLNTKLSARNQIDALNSWATPALTYTFGVLKWSDADLNELDRLTRRLMTKFRCLHTNASVKRLYLPRRDGGRGLLNIYKLCRTQEKNLRQRLLESEDSLMKLVTTEDKGYTPLNLQHRELTFDITTRSEDISTWREQALHGRFPKHLEGENVDKLASLLWLNAGQLYPETEGFLTAIQDRVIRTRNYEKHCLKLNVEDKCRKCGAVGESIEHIIAGCRVLADNAYLCRHNQVAKIVHQQLALRHGFLDTCPPYYKYQPAAVLETDAAVLYWDRPITTDRSVDYNRPDLVFIEKDKKYGVIIDVAVPLTHNIGRTESEKITKYENLAMELKNMWQLSKVTIIPLVISAEGIMSKSFKKNLQKIEISQRIAGYAQQAVALQTYHIVRKFLN

SEQ ID NO: 15106 - protein, 887 aa, Adalia bipunctata
MQDVDKLRGKVDVLDEFLRENKSRKVLNKVRKIAISAGLDLESPRHRELIVDLKDRLRQQAKAKGARLRRYNELTKRKQQNAEYLRDRRRFFRSLERPSEISSNQHADINNEEFRQYWSSLWSESGQLRGNTSWLTDIEHQASEIVEMKTDLFTVEEISNIVKTTSNWKAPGPDRLHNFWVKQFPACFPSLARCFSEALEDPFKIPTFLTQGNTYMLHKRGDRSKPENYRPITCLSVVYKLFTTLVNNAIYRHCEANNILEEEQKGCSRGSAGCKHQLTIDAVVLKQAQARRRNLSLCYIDYQKAFDTVPHDWLVRVLEIYKICPKIKAVLQHLMSTWKTNILINNINAGTVKISRGIFQGDALSPMWFCIALNPLSTLLKNTNIGYRPAMRNPRKLTHLLYMDDLKLFGENQKQLHSLIDIVRSFSTDIDMSFGLDKCAIVNIRKGKMENTQEQFQDIHSMLPEETYKYLGIPQNQRIDHTRLKAEFTAKYKNRVTKVLNTKLSAKNQIDALNSWATPALTYTFGVLKWSDADLNELDRLTRRLMTKFRCLHTNASVKRLYLPRRDGGRGLLNIYKLCRTQEKNLRQRLLESEDSLMKLVTTEDKGYTPLNLQHRELTFDITTRSEDISTWREQALHGRFPKHLEGENVDKLASLSWLNAGQLYPETEGFLMAIQDRVIRTRNYEKHCLKLNVEDKCRKCGAFGESIEHIIAGCRVLADNAYLGRHNQVAKIVHQQLALRHGFLDICPPYYKYQPAAVLETDAAVLYWDRPITTDRSVDYNRPDLVFIEKDQKYGVIIDVAVPLTHNIGKTESEKITKYENLAMELKNMWQLSKVTIIPLVISAEGVMSKSFKKNLQKIEISQRIAGYAQQAVALQTCHIVRKFLN

SEQ ID NO: 15107 - protein, 1196 aa, Adalia bipunctata
MKNLLFRVHNNNNNNNIMPGERQGMSGADARHDSMRSVGGRVLRKRAPVIQQNTAPPEHREVESQNMAEDPNATSPAGSTTVRRTARRGARNARIKWSREMNIEVMRAFYYVNNCDDRPLPGWRYSLYTEFTKRHPELQLTERNIADRKNVIIRKDYLTRQELDEIKREMGYTINQDQIVGNHNEEPSEPLETPAETARVPVTRTAHQECPQYRQLYDTFFGNLAQYETTDPLNRPILPKLKFNSTAKNNIEWLNEILAEHLSTQWTLEQVHLSLYCAAITVIGQNGQKIYIPRTSEQKVKNETPAWKKRLMQDVDKLRGKVDVLDEFLRNNKSRKVLNKVRKIATSAGLDLESPRHRELVVDLKDRLRQQAKAKGARLRRYNELTKRKQQNAEYARDRKKFFRSLEIPSEISSDQQADVNNDEFRQYWSSLWSESGQLRRNTSWLRDIEQHASEIVEMRTDVFTVEDISNIIKNTSNWKAPGPDRLQNFWVKQFPACFPSLARCFSEALEDPLKIPAFLTQGNTYMLHKKGDLNNPENYRPITCLSVVYKLFTSLVNNAIYRHCEANNILEEEQKGCSRGSAGCRHQLTIDAVVQAQARRRNLSLCYIDYQKAFDTVPHDWLVKVLEIYKICPKIQAVLQHLMSTWRTNILINNINAGTVKISRGIFQGDALSPMWFCMALNPLSTLLKNTNIGYRPAMRNPRKLSHLLYIDDLKLFGENQKQLHSLIDVVRSFSTDIDMSFGLDKCAIVNIRKGKMENTQEQFQDIHSLLPEKTYKYLGIPQNQRIDHTRLKAEFTAKYKNRVTKVLNTKLSAKNQIDALNSWATPALTYTFGVLKWSDADLNELDRLTRRLMTKFRCLHTNASVKRLYLPRRDGGRGLLNIYKLCRTQEKNLRQRLLESEDSLMKLVTTEDKGYTPLNLQHRELTFDITTRREDISIWREQALHGRFPKHLEGENVDKLASLSWLNAGQLYPETEGFLTAIQDRVIRTRNYEKHCLKLNVEDKCRKCGAVGESIEHIIAGCRVLADNAYLGRHNQVAKIVHQQLALRHGFLDTCPPYYKYQPAAVLETDTAVLYWDRPITTDRTVDYNRPDLVFIEKDQKYGIVIDVAVPLTHNIGRTESEKITKYENLAIELKNMWQLSKVTIIPLVISAEGVMSKSFKRNLQKIELSQRIAGYAQQAVALQTCHIVRKFLN

SEQ ID NO: 15108 - protein, 1194 aa, Adalia bipunctata
MKMVNESSLGKESLPGERQGMSGADARHDSMRSVGGRVLRKRAPVIQQNTAPPEHREVESQNMAEDRNATPPAGSTTVRRTARRGARNARIKWSREMNIEVMRAFYYVNNCDDRPLPGWRYSLYTEFTKRHPELQLTEGNIADRKNVIIRKGYLTRQELDEIKREMGYTINQDQIVGNHNDEPSEPLETPAETARVPVTRTAHQECPQYRQLYDTFFGNLAQYETTDPLNRPSLPKLKFNSTAKNNIEWLNEILAEHLSTQWTLEQVHLSLYCAAITVIGQNGQKIYIPRTSELKVKNETPAWKKRLMQDVDKLRGKVDVLDEFLRNNKSRKVLNKVRKIAKSAGLDLESPRHRELMVDLKDRLRQQAKAKGARLRRYNELSKRKQQNAEYVRDRKKFFRSLEKPSEITSNQHANISNDEFRQYWSSLWSESGQFQRNTSWLRDIEQHASEIVEMRTDIFTVEDISNIIKNTSNWKAPGPDRLQNFWVKQFPACFPSLARCFSEALEDPLKIPAFLTQGNTYMLHKKGDLNNPENYRPITCLSVVYKLFTSLVNNAIYRHCEANNILEEEQKGCSRGSAGCKHQLTIDAVVLKQAQARRRNLSLCYIDYQKAFDTVPHDWLVKVLEIYKICPKIQAVLQHLMSTWRTNILINNINAGTVKISRGIFQGDALSPMWFCMALNPLSTLLKNTNIGYRPAMRNPRKLSHLLYIDDLKLFGENQKQLHSLIDIVRSFSTDIDMSFGLDKCAIVNIRKGKMENTQEQFQDIHSMLPEETYKYLGIPQNQRIDHTRLKAEFTAKYKNRVTKVLNTKLSAKNQIDALNSWATPALTYTFGVLKWSDADLNELDRLTRRLMTKFRCLHTNASVKRLYLPRRDGGRGLLNIYKLCRTQEKNLRQRLLESEDSLMKLVTTEDKGYTPLNLQHRELSFDITTRSEDISMWREQALHGRFPKHLEGENVDKLASLSWLNAGQLYPETEGFLTAIQDRVIRTRNYEKHCLKLNVEDKCRKCGAVGESIEHIIAGCRVLADNAYLGRHNQVAKIVHQQLALRHGFLDTCPPYYKYQPAAVLETDTAVLYWDRPITTDRTVDYNRPDLVFIEKDQKYGIVIDVAVPLTHNIGRTESEKITKYENLAIELKNMWQLSKVTIIPLVISAEGVMSKSFKRNLQKIELSQRIAGYAQQAVALQTCHIVRKFLN

SEQ ID NO: 15109 - protein, 1195 aa, Adalia bipunctata
MKMEPILSLGRESLPGERQGMSGADAGHDSMRSVGGRVLRKRAPVIQQNTAPRQQREVETDIMAEDRNATPPAGSTTVRRTARRGARNARIKWSREMNIEVMRAFYYVNNCDDKPLPGWRYSLYTEFTKRHPELQLTEGNIADRKNVIIRKGYLTRQELDEIKREMGYTINQEQIVGSQNEEPTEQLERPEDTARDLSVTRTAHQDSPQYRQLYDTFYSNLAQYESTDPLNRPILPKLNFNSTAKNNIERLNEILAEHLSTQWTLEHVHLSLYCAAITVIGQNGQKIYIPRTSEQKVKNETPAWKRRLMQDVDKLRGKVDVLDEFLRENKSRKVLNKVRKIAISAGLDLESPRHRELIVDLKDRLRQQAKAKGARLRRYNELTKRKQQNAEYLRDRKKFFRSLEKPSEISSNQHADINNEEFRQYWSSLWSESGQLQRNTSWLTDIEHQASEIVEMKTDLFTVEEISNIVKNTSNWKAPGPDRLHNFWVKQFPACFPSLARCFSEALEDPFKIPTFLTQGNTYMLHKRGDRSKPENYRPITCLSVVYKLFTTLVNNAIYRHCEANNILEEEQKGCSRGSAGCKHQLTIDAVVLKQAQARRRNLSLCYIDYQKAFDTVPHDWLVRVLEIYKICPKIKAVLQHLMSTWKTNILINNINAGTVKISRGIFQGDALSPMWFCIALNPLSTLLKNTNIGYRPAMRNPRKLTHLLYMDDLKLFGENQKQLHSLIDIVRSFSTDIGMSFGLDKCAIVNIRKGKMENTQEQFQDIHSILPEETYKYLGIPQNQRIDHTRLKAEFTAKYKNRVTKVLNTKLSAKNQIDALNSWATPALTYTFGVLKWSDADLNELDRLTRRLMTKFRCLHTNASVKRLYLPRRDGGRGLLNIYKLCRTQEKNLRQRLLESEDSLMKLVTTEDKGYTPLNLQHRELTFDITTRSEDISTWREQALHGRFPKHLEGENVDKLASLSWLNAGQLYPETEGFLMAIQDRVIRTRNYEKHCLKLNVEDKCRKCGAFGESIEHIIAGCRVLADNAYLGRHNQVAKIVHQQLALRHGFLDTCPPYYKYQPAAVLETDAAVLYWDRPITTDRSVDYNRPDLVFIEKDQKYGVIIDVAVPLTHNIGRTESEKITKYENLAMELKNMWQLSKVTIIPLVISAEGVMSKSFKKNLQKIEISQRIAGYAQQAVALQTCHIVRKFLN

SEQ ID NO: 15110 - protein, 1030 aa, Adalia bipunctata
MGYTINQEQIVGSQNEEPTETLERPADTARDLSVTRTTHQDSPQYRQLYDTFHSNLAQYEYTDPLNRPILPKLNFNSTAKNNIERLNEILAEHLSTQWTLEQVHLSLYCAAITVIGQNGQKIYIPRTSEQKVKNETPAWKRRLMQDVDKLRGKVDVLDEFLKDNKSRKVLNKVRKIATSAGVDLRSPRHKELMVELKDRLRQQAKAKGARLRRYNELSKRKQQNAEYVRDRKKFFRSLEKPSEISSNLHAGISNGEFRQYWSSLWSETGRFQENTSWLRDIEHQASEIVEMRTDLFTVEEISNIVKNTSNWKAPGPDRLHSFWVKQFTSCFPSLARCFSEALEDPIKIPSFLTQGNSYMLHKRGDRSKPDNYRPITCLSVLYKLFTSLVNNAIYRHCEANNILEEEQKGCSRGSAGCKHQLTIDAVVLKQAQARRRNLSLCYIDYQKAFDTVPHDWLVKVLEIYKICPKIKAVLQHLMSTWRTNILINNINAGTVKISRGIFQGDALSPMWFCMALNPLSTLLKNTNIGYRPAMRNPRKLSHLLYIDDLKLFSENQNQLHSLIDIVRSFSRDIDMSFGLDKCAIINIKKGKMENTREQFQDICSLLPEETYKYLGIPQNQRIDHTRLKAEFTAKYRNRVTKVLNTKLSAKNQIDALNSWATPALTYTFGVLKWSDADLNELDRLTRRLMTKFRCLHTNASVKRLYLPRRDGGRGLLNIYRLCRTQEKNLRRRLLESEDSLMKLVTTEDKGYTPLNLQHRELTFDISTRSEDRSLWREQALHGRFPKHLEGENVDKLASLSWLNAGHLYPETEGFLTAIQDRVIRTRNYEKHCLKLNVEDKCRKCGAVGESIEHVIAGCRVLADNAYLGRHNQVAKIVHQQLALRHGFLDTCPPYYKYQPAAVLETDAAVLYWDRPITTDRTVDYNRPDLVFIEKDQKYGVIIDVAVPLTHNIGKTESEKITKYENLAIELKNMWQLSKVTIIPLVISAEGVMSKSFKRNLQKIELSQRIAGYAQQAVALQTCHIVRKFLN

SEQ ID NO: 15111 - protein, 1195 aa, Adalia bipunctata
MKMEPILSLGRESLPGERQGMSGADAGHDSMRSVGGRVLRKRAPVIQQNTAPRQQREVETDIMAEDRNATPPAGSTTVRRTARRGARNARIKWSREMNIEVMRAFYYVNNCDDKPLPGWRYSLYTEFTKRHPELQLTEGNIADRKNVIIRKGYLTRQELDEIKREMGYTINQEQIVGSRNEEPTEQLERPVDTARDLSVTRTAHQDSPQYRQLYDTFYSNLAQYESTDPLNRPILPKLNFNSTAKNNIERLNEILAEHLSTQWTLEQVHLSLYCAAITVIGQNGQKIYIPRTSEQKVKNETPAWKRRLMQDVDKLRGKVDVLDEFLRENKSRKVVNKVRKIAISAGLNLESPRHRELIVDLKDRLRQQAKAKGARLRRYNELTKRKQQNAEYLRDRKKFFRSLEKPSEISSNQHADINNEEFRQYWSSLWSESGQLQRNTSWLTDIEHQASEIVEMKTDLFTVEEISNIVKNTSNWKAPGPDRLHNFWVKQFPACFPSLARCFSGALEDPFKIPTFLTQGNTYMLHKRGDRSKPENYRPITCLSVVYKLFTTLVNNAIYRHCEANNILEEEQKGCSRGSAGCKHQLTIDAVVLKQAQARRRNLSLCYIDYQKAFDTVPHDWLVRVLEIYKICPKIKAVLQHLMSTWKTNILINNINAGTVKISRGIFQGDALSPMWFCIALNPLSTLLKNTNIGYRPAMRNPRKLTHLLYMDDLKLFGENQKQLHSLIDIVRSFSTDIDMSFGLDKCAIVNIRKGKMENTQEQFQDIHSMLPEETYKYLGIPQNQRIDHTRLKAEFTAKYKNRVTKVLNTKLSAKNQIDALNSWATPALTYTFGVLKWSDADLNELDRLTRRLMTKFRCLHTNASVKRLYLPRRDGGRGLLNIYKLCRTQEKNLRQRLLESKDSLMKLVTTEDKGYTPLNLQHRELTFDITTRSEDISAWREQALHGRFPKHLEGENVDKLASLSWLNAGQLYPETEGFLMAIQDRVIRTRNYEKHCLKLNVEDKCRKCGAFGESIEHIIAGCRVLADNAYLGRHNQVAKIVHQQLALRHGFLDTCPPYYKYQPAAVLETDAAVLYWDRPITTDRSVDYNRPDLVFIEKDQKYGVIIDVAVPLTHNIGKTESEKITKYENLAMELKNMWQLSKVTIIPLVISAEGVMSKSFKKNLQKIEISQRIAGYAQRAVALQTCHIVRKFLN

SEQ ID NO: 15112 - protein, 1235 aa, Adalia bipunctata
MRNNNNNNARVWCGLCHATWGVTSPRPELPGPPRVNGGKPMKMEPILSLGRESLPGERQGMSGADAGHDSMRSVGGRVLRKRAPVIQQNTAPRQQREVETDIMAEDRNATPPAGSTTVRRTARRGARNARIKWSREMNIEVMRAFYYVNNCDDKPLPGWRYSLYTEFTKRHPELQLTEGNIADRKNVIIRKGYLTRQELDEIKREMGYTINQEQIVGSQNEEPTEQLERPEDTARDLSVTRTAHQDSPQYRQLYDTFYSNLAQYESTDPLNRPILPKLNFNSTAKNNIERLNEILAEHLSTQWTLEHVHLSLYCAAITVIGQNGQKIYIPRTSEQKVKNETPAWKRRLMQDVDKLRGKVDVLDEFLRENKSRKVLNKVRKIAISAGLDLESPRHRELIVDLKDRLRQQAKAKGARLRRYNELTKRKQQNAEYLRDRKKFFRSLEKPSEISSNQHADINNEEFRQYWSSLWSESGQLQRNTSWLTDIEHQASEIVEMKTDLFTVEEISNIVKNTSNWKAPGPDRLHNFWVKQFPACFPSLARCFSEALEDPFKIPTFLTQGNTYMLHKRGDRSKPENYRPITCLSVVYKLFTTLVNNAIYRHCEANNILEEEQKGCSRGSAGCKHQLTIDAVVLRQAQARRRNLSLCYIDYQKAFDTVPHDWLVRVLEIYKICPKIKAVLQHLMSTWKTNILINNINAGTVKISRGIFQGDALSPMWFCIALNPLSTLLKNTNIGYRPAMRNPRKLTHLLYMDDLKLFGENQKQLHSLIDIVRSFSTDIGTSFGLDKCAIVNIRKGKMENTQEQFQDIHSMLPEETYKYLGIPQNQRIDHTRLKAEFTAKYKNRVTKVLNTKLSAKNQIDALNSWATPALTYTFGVLKWSDADLNALDRLTRRLMTKFRCLHTNASVKRLYQPRRDGGRGLLNIYKLCRTQEKNLRQRLLESEDSLMKLVTTEDKGYTPLNLQHRELTFDITTRSEDISTWREQALHGRFPKHLEGENVDKLASLSWLNAGQLYPETEGFLMAIQDRVIRTRNYEKHCLKLNVEDKCRKCGAFGESIEHIIAGCRVLADNAYLGRHNQVAKIVHQQLALRHGFLDTCPPYYKYQPAAVLETDAAVLYWDRPITTDRSVDYNRPDLVFIEKDQKYGVIIDVAVPLTHNIGRTESEKITKYENLAMELKNMWQLSKVTIIPLVISAEGVMSKSFKKNLQKIEISQRIAGYAQQAVALQTCHIVRKFLN

SEQ ID NO: 15113 - protein, 1195 aa, Adalia bipunctata
MKMVNLMSLGNESLPGERQGMSGADAGHDSMRSVGGRVLRKRAPVIQQNTAPPEHQEVESQNMAEDQNATPPAGSTTVRRTARRGARNARIKWSREMNIEVMRAFYYVNNCDDKPLPGWRYSLYTEFTKRHPELQLTEGNIADRKNVIIRKSYLTRQELDEIKREMGYTINQEQIVGSQNEEPTEPLERPADTARDLSVTRTTHQDSPQYRQLYDTFHSNLAQYEYTDPLNRPILPKLNFNSTAKNNIERLNEILAEHLSTQWTLEQVHLSLYCAAITVIGQNGQKIYIPRTSEQKVKIETPAWKRRLMQDVDKLRGKVDVLDEFLKDNKSRKVLNKVRKIATSAGVDLRSPRHKELMVELKDRLRQQAKAKGARLRRYNELSKRKQQNAEYVRDRKKFFRSLEKPSEISSNLHAGISNGEFRQYWSSLWSETGRFQGNTSWLRDIEHQASEIVEMRTDLFTVEEISNIVKNTSNWKAPGPDRLHNFWVKQFTSCFPSLARCFSEALEDPVKIPTFLTQGNSYMLHKRGDRSKPDNYRPITCLSVLYKLFTSLVNNAIYRHCEANNILEEEQKGCSRGSAGCKHQLTIDAVVLKQAQARRRNLSLCYIDYQKAFDTVPHDWLVKVLEIYKICPKIKAVLQHLMSTWRTNILINNINAGTVKISRGIFQGDALSPMWFCMALNPLSTFLKNTNIGYRPAMRNPRKLSHLLYIDDLKLFSENQNQLHSLIDIVRSFSRDIDMSFGLDKCAIINIKKGKMENTQEQFQDICSLLPEETYKYLGIPQNQRIDHTRLKAEFTAKYKNRVTKVLNTKLSAKNQIDALNSWATPALTYTFGVLKWSDADLNELDRLTRRLMTKFRCLHTNASVKRLYLPRRDGGRGLLNIYRLCRTQEKNLRRRLLESEDSLMKLVTTEDKGYTPLNLQHRELTFDISTRSEDRSLWREQALHGRFPKHLEGENVDKLASLSWLNAGHLYPETEGFLTAIQDRVIRTRNYEKHCLKLNVEDKCRKCGAVGESIEHVIAGCRVLADNAYLGRHNQVAKIVHQQLALRHGFLDTCPPYYKYQPAAVLETDAAVLYWDRPITTDRTVDYNRPDLVFIEKDQKYGVIIDVAVPLTHNVGKTESEKITKYENLAIELKNMWQLSKVTIIPLVISAEGVMSKSFKRNLQKIELSQRIAGYAQQAVALQTCHIVRKFLN

SEQ ID NO: 15114 - protein, 1276 aa, Adalia bipunctata
MRYSNFNYSDIISCVFTSLISESMRNLWKFTSIILSSILCNNNNNNNIAARVWCGLCHATWGVTSPRPELPGPPRLNGGKPMKMEPILSLGRESLPGERQGMSGADAGHDSMRSVGGRVLRKRAPVIQQNTAPRQQREVETDIMAEDRNATPPAGSTTVRRTARRGARNARIKWSREMNIEVMRTFYYVNNCDDKPLPGWRYSLYTEFTKRHPELQLTEGNIADRKNVIIRKGYLTRQELDEIKREMGYTINQEQIVGNHNEEPSEPLETPAETARDLSVTRTAHQDSPQYRQLYDTFYSNLAQYESTDPLNRPILPKLNFNSTAKNNIERLNEILAEHLSTQWTLEQVHLSLYCAAITVIGQNGQKIYIPRTSEQKVKNETPAWKRRLMQDVDKLRGKVDVLDEFLRENKSRKVLNKVRKIAISAGLDLESPRHRELIVDLKDRLRQQAKAKGARLRRYNELTKRKQQNAEYLRDRKKFFRSLEKPSEISSNQHADINNEEFRQYWSSLWSESGQLQRNTSWLTDIEHQASEIVEMKTDLFTVEEISNIVKNTSNWKAPGPDRLHNFWVKQFPACFPSLARCFSEALEDPFKIPTFLTQGNTYMLHKRGDRSKPENYRPITCLSVVYKLFTTLVNNAIYRHCEANNILEEEQKGCSRGSAGCKHQLTIDAVVLKQAQARRRNLSLCYIDYQKAFDTVPHDWLVRVLEIYKICPKIKDVLQHLMSTWKTNILINNINAGTVKISRGIFQGDALSPMWFCIALNPLSTLLKNTNIGYRPAMRNPRKLTHLLYMDDLKLFGENQKQLHSLIDIVRSFSTDIDMSFGLDKCAIVNIRKGKMENTQEQFQDIHSMLPEETYKYLGIPQNQRIDHTRLKAEFTAKYKNRVTKVLNTKLSAKNQIDALNSWATPALTYTFGVLKWSDADLNELDRLTRRLMTKFRCLHTNASVKRLYLPRRDGGRGLLNIYKLCRTQEKNLRQRLLESEDSLMKLVTTEDKGYTPLNLQHRELTFDITTRSEDISTWREQALHGRFPKHLEGENVDKLASLSWLNAGQLYPETEGFLMAIQDRVIRTRNYEKHCLKLNVEDKCRKCGAFGESIEHIIAGCRVLADNAYLGRHNQVAKIVHQQLALRHGFLDTCPPYYKYQPAAVLETDAAVLYWDRPITTDRSVDYNRPDLVFIEKDQKYGVIIDVAVPLTHNIGRTESEKITKYENLAMELKNMWQLSKVTIIPLVISAEGVMSKSFKKNLQKIEISQRIAGYAQQAVALQTCHIVRKFLN

SEQ ID NO: 15115 - protein, 1195 aa, Adalia bipunctata
MKMENISSLGKESLPGERQGMSGADAGHDSMRSVGGRVLRKRAPVIQQNTALPEHQEVESQNMAEDQNATPPAGSTTVRRTARRGARNTRIKWSREMNVEVMRAFYYVNNCDDKPLPGWRYSLYTEFTKRHPELQLTEGNIADRKNVIIRKGYLTRQELDEIKREMGYTINQEQIVGIQNEEPTEPLERPADTARDLSVTRTAHQDSPQYRQLYDTFYSNLAQYESTDPLNRPILPKLNFNSTAKNNIERLNEILAEHLSTQWTLEQVHLSLYCAAITVIGQNGQKIYTPRTSEQKVKNQTPAWKRRLMQDVDKLRGKVDVLDEFLKDNKSRKVLNKVRKIATSAGLDLESPRYKEFIVDLKDRLRQQAKAKGARLRRYNELTKRKQQNAEYARDRKKFFRSLEKPSEIPSNQQADINNDEFRQYWSSLWSESGQLQRNTSWLMDIEHQASEIVEMKTDLFTVEEISNIVKNTSNWKAPGPDRLHNFWVKQFPACFPSLARCFSEALEDPFKIPTFLTQGNSHMLHKRGDRSKPENYRPITCLSVVYKLFTTLVNNAIYRHCEANNILEEEQKGCSRGSAGCKHQLTIDAVVLKQAQARRRNLSLCYIDYQKAFDTVPHDWLLKVLEIYKICPKIKAVLQHLMSTWKTNILINNINAGTVKISRGIFQGDALSPMWFCIALNPLSTLLKNTNIGYRPAMRNPRKITHLLYMDDLKLFGENQKQLNSLIDIVRSFSKDIDMSFGVDKCAIVNIRKGKMENTQEQFQDIHSMMPEETYKYLGIPQNQRIDHTRLKAEFTAKYKSRVTKVLNTKLSAKNQIDALNSWATPALTYTFGVLKWSDADLNELDRLTRRLMTKFRCLHTNASVKRLYLPRRDGGRGLLNIYKLCRTQEKNLRQRLLESEDSLMKLVTTEDKGYTPLNLQHRELTFDITTRSEDISIWREQALHGRFPKHLEGENVDKLASLAWLNAGQLYPETEGFLTAIQDRVIRTRNYEKHCLKLNVEDKCRKCGAVGESIEHIIAGCRVLADNAYLGRHNQVAKIVHQQLALRHGFLDTCPPYYKYQPAAVLETDAAVLYWDRPITTDRSVDYNRPDLVFIEKDQKYGVIIDVAVPLTHNIGRTESEKITKYENLAMELKNMWQLSKVTIIPLVISAEGVMSKSFKKNLQKIEISQRIAGYAQQAVALQTCHIVRKFLN

SEQ ID NO: 15116 - protein, 1195 aa, Adalia bipunctata
MKMERILSLGRESLPGERQGMSGADAGHDSMRSVGGRVLRKRAPVIQQNTAPRQQREVETDIMAEDRNATPPAGSTTVRRTARRGARNARIEWSREMNIEVMRAFYYVNNCDDKPLPRWRYSLYTEFTKRHPELQLTEGNIADRKNVIIRKGYLTRQELDEIKREMGYTINQEQIVGSQNEEPTEQLERPADTARNLSVTRTAHQDSPQYRQLYDTFYSNLAQYESTDPLNRPILPKLNFNSTAKNNIERLNEILAEHLSTQWTLEQVHLSLYCAAITVIGQNGQKIYIPRTSEQKVKNETPAWKRRLMQDVDKLRGKVDVLDEFLRENKSRKVLNKVRKIAISAGLDLESPRHRELIVDLKDRLRQQAKAKGARLRRYNELTKRKQQNAEYLRDRKRFFRSLEKPSEISSNQHADINNEEFRQYWSSLWSESGQLRRNTSWLTDIEHQASEIVEMKTDLFAVEEISNIVKNTSNWKAPGPDRLHNFWVKQFPACFPSLARCFSEALEDPFKIPTFLTQGNTYMLHKRGDRSKPENYRPITCLSVVYKLFTTLVNNAIYRHCEANNILEEEQKGCSRGSAGCKHQLTIDAVVLKQAQARRRNLSLCYIDYQKAFDTVPHDWLVRVLEIYKICPKIKAVLQHLMSTWKTNIFINNINAGTVKISRGIFQGDALSPMWFCIALNPLSTLLKNTNIGYRPAMRNPRKLTHLLYMDDLKLFGENQKQLHSLIDIVRSFSTDIDMSFGLDKCAIVNIRKGKMENTQEQFQDIHSMLPEETYKYLGIPQNQRIDHTRLKAEFTAKYKNRVTKVLNTKLSAKNQIDALNSWATPALTYTFGVLKWSDADLNELDRLTRRLMTKFRCLHTNASVKRLYLPRRDGGRGLLNIYKLCRTQEKNLRQRLLESEDSLMKLVTTEDKGYTPLNLQHRELTFDITTRSEDISTWREQALHGRFPKHLEGENVDKLASLSWLNAGQLYPETEGFLMAIQDRVIRTRNYEKHCLKLNVEDKCRKCGAFGESIEHIIAGCRVLADNAYLGRHNQVAKIVHQQLALRHGFLDICPPYYKYQPAAVLETDAAVLYWDRPITTDRSVDYNRPDLVFIEKDQKYGVIIDVAVPLTHNIGKTESEKITKYENLAMELKNMWQLSKVTIIPLVISAEGVMSKSFKKNLQKIEISQRIAGYAQQAVALQTCHIVRKFLN

SEQ ID NO: 15117 - protein, 887 aa, Adalia bipunctata
MQDVDKLRGKVDVLDEFLKDNKSRKVLNKVRKIATSAGVDLRSPRHKELIVELKDRLRQQAKAKGARLRRYNELSKRKQQNAEYVKDRKKFFRSLEKPSEIYSNLHAGISNGEFRQYWSSLWSETGRFQGNTSWLRDIEHQASEIVEMRTDLFTVEEISNIVKNTSNWKAPGPDRLHNFWVKQFTSCFPSLARCFSEALEDPVKIPTFLTQGNSYMLHKRGDRSKPDNYRPITCLSVLYKLFTSLVNNAIYRHCEANNILEEEQKGCSRGSAGCKHQLTIDAVVLKQAQARRRNLSLCYIDYQKAFDTVPHDWLVKVLEIYKICPKIKAVLQHLMSTWRTNILINNINAGTVKISRGIFQGDALSPMWFCMALNPLSTLLKNTNIGYRPAMRNPRKLSHLLYIDDLKLFSENQNQLHSLIDIVRSFSRDIDMSFGLDKCAIINIKKGKMENTQEQFQDISSLLPEETYKYLGIPQNQRIDHTRLKAEFTAKYKNRVTKVLNTKLSAKNQIDALNSWATPALTYTFGVLKWSDADLNELDRLTRRLMTKFRCLHTNASVKRLYLPRRDGGRGLLNIYRLCRTQEKNLRRRLLESEDSLMKLVTTEDKGYTPLNLQHRELTFDISTRSEDRSLWREQALHGRFPKHLEGENVDKLASFSWLNAGHLYPETEGFLTAIQDRVIRTRNYEKHCLKLNVEDKCRKCGAVGESIEHVIAGCRVLADNAYLGRHNQVAKIVHQQLALRHGFLDTCPPYYKYQPAAVLETDAAVLYWDRPITTDRTVDYNRPDLVFIEKDQKYGVIIDVAVPLTHNIGKTESEKITKYENLAIELKNMWQLSKVTIIPLVISAEGVMSKSFKRNLQKIELSQRIAGYAQQAVALQTCHIVRKFLN

SEQ ID NO: 15118 - protein, 1252 aa, Adalia bipunctata
MFIRITEYSAHYENYNHNMIFAMHLFLLLLLRKLFLTQKIVDAATKNIQLSAKLFYEDQLSNIIIIIIIIIIIIIIIMSGADAGHDSMRSVGGRVLRKRAPVIQQNTAPPAHQEVESQNMAEDQNATPPAGSTTVRRTARRGARNTRIKWSREMNIEVMRAFYYVNNCDDKPLPGWRYSLYTEFTRRHPELQLTEGNIADRKNVIIRKSYLTRQELDEIKREMGYTINQEQIVGNQNEEPTEPLERPADTARDLSVTRTAHQDSPQYRQLYDTFHSNLAQYESTDPLNRPILPKLNFNSTAKNNIERLNEILAEHLSTQWTLEQVHLSLYCAAITVIGQNGQKIYIPRPSEQKVKNETPAWKKRLMQDVDKLRGKVDVLDEFLKDNKSRKVLNKVRKIAASAGVDLRSPRHKELMVELKDRLRQQAKAKGARLRRYNELTKRKQQNAEYVRDRKKFFRSLEKPSEISSNLHAGISNGEFRQYWSSLWSETGRFQGNTSWLRDIEHQASEIVEMRTDLFTVEEISNIVKNTSNWKAPGPDRLHNFWVKQFTSCFPSLARCFSEALEDPIKIPTFLTQGNSYMLHKRGDRSKPDNYRPITCLSVLYKLFTSLVNNAIYRHCEANNILEEEQKGCSRGSAGCKHQLTIDAVVLKQAQARRRNLSIGYIDYQKAFDTVPHDWLVKVLEIYKICPKIKAVLQHLMSTWRTNILINNINAGTVKISRGIFQGDALSPMWFCMALNPLSTLLKNTNIGYRPAMRNPRKLSHLLYIDDLKLFGENQNQLHSLIDIVRSFSRGVDMSFGLDKCAIINIKKGKMENTQEQFQDICSMLPEETYKYLGIPQNQRIDHTRLKAEFTAKYKNRVTKVLNTKLSAKNQIDALNSWATPALTYTFGVLKWSDADLNELDRLTRRLMTKFRCLHTNASVKRLYLPRRDGGRGLLNIYRLCRTQEKNLRRRLLESEDSLMKLVTTEDKGYTPLNLQHRELTFDITTKSEERSLWREQALHGRFPKHLEGENVDKLASLSWLNAGHLYPETEGFLTAIQDRVIRTRNYEKHCLKLNVEDKCRKCGAVGESIEHVIAGCRVLADNAYLGRHNQVAKIVHQQLALRHGFLDTCPPYYKYQPAAVLETDAAVLYWDRPITTDRTVDYNRPDLVFIEKDQKYGVIIDVAVPLTHNIGKTESEKITKYENLAIELKNMWQLSKVTIIPLVISAEGVMSKSFKRNLQKIELSQRIAGYAQQAVALQTCHIVRKFLN

SEQ ID NO: 15119 - protein, 1194 aa, Adalia bipunctata
MKMVNESSLGKESLPGERQGMSGADARHDSMRSVGGRVLRKRAPVIQQNTAPPEHREVEAQNMAADQNATSPAGSTTVRRTTRREARNARIKWSREMNIEVMRAFYYVNNCDDRPLPGWRYSLYTEFTKRHPELQLTEGNIADRKNVIIRKGYLTRQELDEIKREMGYTINQDQIVENHNEEPSEPLETPAGTARVPVTRTAHQECPQYRQLYDTFFGNLAQYETTDPLNRPILPKLKFNSTAKNNIEWLNEILAEHLSTQWTLKQVHLSLYCAAITVIGQNGQKIYIPRTSEQKVKNETPAWKKRLMQDVDKLRGKVDVLDEFLRNNKSRKVLNKVRKIATSAGLDLESPRHRELMIDLKDRLRQQAKAKGARLRRYNELSKRKQKKAEYVRDRKKFFRSLEKPSEITSNQHANISNDEFRQYWSSLWSESGQFQRNTSWLRDIEQHASEIVEMRTDIFTVEDISNIIKNTSNWKAPGPDRLQNFWVKQFPACFPSLARCFSEALEDPLKIPAFLTQGNTYMLHKKGDLNNPENYRPITCLSVVYKLFTSLVNNAIYRHCEANNILEEEQKGCSRGSAGCKHQLTIDAVVLKQAQARRRNLSLCYIDYQKAFDTVPHDWLVKVLEIYKICPKIQAVLQHLMSTWRTNILINNTNAGTVKISRGIFQGDALSPMWFCMALNPLSTLLKNTNIGYRPAMRNPRKLSHLLYIDDLKLFGENQKQLHSLIDIVRSFSTDIDMSFGLDKCAIVNIRKGKMENTQEQFQDIHSMLPEETYKYLGIPQNQRIDHTRLKAEFTAKYKNRVTKVLNTKLSAKNQIDALNSWATPALTYTFGVLKWSDADLNELDRLTRRLMTKFRCLHTNASVKRLYLPRRDGGRGLLNIYKLCRTQEKNLRQRLLESEDSLMKLVTTEDKGYTPLNLQHRELTFDITTRSEDISIWREQALHGRFPKHLEGENVDKLASLAWLNAGQLYPETEGFLTAIQDRVIRTRNYEKHCLKLNVEDKCRKCGAVGESIEHIIAGCRVLADNAYLGRHNQVAKIVHQQLALRHGFLDTCPPYYKYQPAAVLETDTAVLYWDRPITTDRTVDYNRPDLVFIERDQKYGIVIDVAVPLTHNIGRTESEKITKYENLAIELKNMWQLSKVTIIPLVISAEGVMSKSFKRNLQKIELSQRIAGYAQQAVALQTCHIVRKFLN

SEQ ID NO: 15120 - protein, 1133 aa, Adalia bipunctata
MAEDQNATPPAGSTTVRRTARRGARNTRIKWSREMNVEVMRAFYYVNNCDDKPLPGWRYSLYTEFTKRHPELQLTEGNIADRKNVIIRKGYLTRQELDEIKREMGYTINQEQIVGIQNEEPTEPLERPADTARDLSVTRTAHQDSPQYRQLYDTFYSNLAQYESTDPLNRPILPKLNFNSTAKNNIERLNEILAEHLSTQWTLEQVHLSLYCAAITVIGQNGQKIYTPRTSEQKVKNQTPAWKRRLMQDVDKLRGKVDVLDEFLKDNKSRKVLNKVRKIATSAGLDLESPRYKEFIVDLKDRLRQQAKAKGARLRRYNELTKRKQQNAEYVRDRKKFFRSLEKPSEIPSNQHADINNDEFRQYWSSLWSESGQLQRNTSWLMDIEHQASEIVEMKTDLFTVEEISNIVKNTSNWKAPGPDRLHNFWVKQFPACFPSLARCFSEALEDPFKIPTFLTQGNSHMLHKRGDRSKPENYRPITCLSVVYKLFTTLVNNAIYRHCEANNILEEEQKGCSRGSAGCKHQLTIDAVVLKQAQARRRNLSLCYIDYQKAFDTVPHDWLLKVLEIYKICPKIKAVLQHLMSTWKTNILINNINAGTVKISRGIFRGDALSPMWFCIALNPLSTLLKNTNIGYRPAMRNPRKITHLLYMDDLKLFGENQKQLNSLIYIVRSFSKDIDMSFGVDKCAIVNIRKGKMENTQEQFQDIHSMLPEETYKYLGIPQNQRIDHTRLKAEFTAKYKSRVTKVLNTKLSARNQIDALNSWATPALTYTFGVLKWSDADLNELDRLTRRLMTKFRCLHTNASVKRLYLPRRDGGRGLLNIYKLCRTQEKNLRQRLLESEDSLMKLVTTEDKGYTPLNLQHRELTFDITTRSEDISIWREQALHGRFPKHLEGENVDKLASLAWLNAGQLYPETEGFLTAIQDRVIRTRNYEKHCLKLNVEDKCRKCGAVGESIEHIIAGCRVLADNAYLGRHNQVAKIVHQQLALRHGFLDTCPPYYKYQPAAVLETDAAVLYWDRPITTDRSVDYNRPDLVFIEKDQKYGVIIDVAVPLTHNIGRTESEKITKYENLAMELKNMWQLSKVTIIPLVISAEGVMSKSFKKNLQKIEISQRIAGYAQQAVALQTCHIVRKFLN

SEQ ID NO: 15121 - protein, 1195 aa, Adalia bipunctata
MKMEPSLSLGNESLPGERQGMSGADAGHDSMRSVGGRVLRKRAPVIQQNTAPLQQREVEPDIMAENRNATPPAGSTTVRRTVRRGARNARIKWSREMNIEVMRAFYYVNNCDDKPLPGWRYSLYTEFTKRHPELQLTEGNIADRKNVIIRKGYITRQELDGIKREMGYTLNQEQIVGNQNEEPDEPLERPAETARELSVTRTAREDCPQYRQLYETFHSNLTRYESTDPLNRPILPKLTFNSTAKNNIEWLNEILAEHLSTQWPLEQVHLSLYCAAITVIGQNGQKIYIPRTSEQKVKNETPAWKRRLMQDVDKLRGKVDVLNEFLKDNKSRKVLNKVRKIATSAGVDLESPRHKDLIVELKDRLRQKAKAKGARLRRYNELSKRKQQNAEYVRDRKKFFRGLEKPSEISSNMHADINNDEFRQYWSSLWSESVQFQRNTSWLGDIEHQASEIVDMRTDLFTAEEISNIIKKTSNWKAPGPDRLHNFWIKQFPACFPSLARCFSEALEDPFKIPTFLTQGNTYMLHKRGDRSKPDNYRPITCLSVVYKLFTSLVNNAIYRHCEANNILEEEQKGCSRGSAGCKHQLTIDAVVLKQAQARRRNLSLCYIDYQKAFDTVPHDWLVKVLEIYKICPKIKAVLQHLMSTWRTNILINNVNAGTVKISRGIFQGDALSPMWFCMALNPLSTLLKNTNMGYRPAMRNPRKLSHLLYIDDLKLFGESQNQLHSLIDIVRSFSRDIDMSFGLDKCAIVNIRKGKMENTQEQFQDICSMLPEETYKYLGIPQNQRIDHTRLKTEFTEKYRNRVTKVLNTKLSAKNQIDALNSWATPALTYTFGVLKWSDADLNELDRLTRRLMTKFRCLHTNASVKRLYLPRRDGGRGLVNIYRLCRTQEKNLRQRLLESEDSLMKLVTTEDKGYTPLNLQHRELTFDITTRSEDRRLWREQALHGRFPKHLEGENVDKLASLSWLSAGHLYPETEGFLTAIQDRVIRTRNYEKHCLKLNVEDKCRKCGAAGESIEHVIAGCRVLADNAYLGRHNQVAKIVHQQLALRHGFLDTCPPYYKYQPAAVLETDAAVLYWDRPITTDRSVDYNRPDLVFMEKDQKYGVIIDVAVPLTHNIGKTESEKITKYENLAIELKNMWQLSKVTIIPLVISAEGVMSKSFKRNLQKIELSQRIAGYAQQAVALQTCHIVRKFLN

SEQ ID NO: 15122 - protein, 1195 aa, Adalia bipunctata
MKMVKLMSLGNESLPGERQGMSGADAGHDSMRSVGGRVLRKRAPVIQQNTAPPEHQEVESQNMAEDQNATPPAGSTTVRRTARRGARNTRIKWSREMNIEVMRAFYYVNNCDDKPLPGWRYSLYTEFTRRHPELQLTEGNIADRKNVNIRKSYLTRQELDEIKREMGYTINQEQIVGNQNEEPTEPLERPADTARDLSVTRTAHQDSPQYRQLYDTFHSNLAQYESTDPLNRPILPKLNFNSTAKNNIERLNEILAEHLSTQWTLEQVHLSLYCAAITVIGQNGQKIYIPRPSEQKVKNETPAWKRRLMQDVDKLRGKVDVLDEFLKDNKSRKVLNKVRKIAASAGVDLRSPRHKELMVELKDRLRQQAKAKGARLRRYNELTKRKQQNAEYVRDRKKFFRSLEKPSEISSNLHAGISNGEFRQYWSSLWSETGRFQGNTSWLRDIEHQASEIVEMRTDLFTVEEISNIVKNTSNWKAPGPDRLHNFWVKQFTSCFPSLARCFSEALEDPIKIPTFLTQGNSYMLHKRGDRSKPDNYRPITCLSVLYKLFTSLVNNAIYRHCEANNILEEEQKGCSRGSAGCKHQLTIDAVVLKQAQARRRNLSICYIDYQKAFDTVPHDWLVKVLEIYKICPKIKAVLQHLMSTWRTNILINNINAGTVKISRGIFQGDALSPMWFCMALNPLSTLLKNTNIGYRPAMRNPRKLSHLLYIDDLKLFGENQNQLHSLIDIVRSFSRDIDMSFGLDKCAIINIKKGKMENTQEQFQDICSMLPEETYKYLGIPQNQRIDHTRLKAEFTAKYKNRVTKVLNTKLSAKNQIDALNSWATPALTYTFGVLKWSDADLNELDRLTRRLMTKFRCLHTNASVKRLYLPRRDGGRGLLNIYRLCRTQEKNLRRRLLESEDSLMKLVTTEDKGYTPLNLQHRELTFDITTRSEERSLWRVQALHGRFPKHLEGENVDKLASLSWLNAGHLYPETEGFLTAIQDRVIRTRNYEKHCLKLNVEDKCRKCGAVGESIEHVIAGCRVLADNAYLGRHNQVAKIVHQQLALRHGFLDTCPPYYKYQPAAVLETDAAVLYWDRPITTDRTVDYNRPDLVFIEKDQKYGVIIDVAVPLTHNIGKTESEKITKYENLAIELKNMWQLSKVTIIPLVISAEGVMSKSFKRNLQKIELSQRIAGYAQQAVALQTCHIVRKFLN

SEQ ID NO: 15123 - protein, 1195 aa, Adalia bipunctata
MKMEKKSSLGKESLPGERQGMSGADAGHDSMRSVGGRVLRKRAPVIQQNTAPPEHQEVESQNMAEDQNATPPAGSTTVRRTARRGARNTRIKWSREMNVEVMRAFYYVNNCDDKPLPGWRYSLYTEFTKRHPELQLTEGNIADRKNVIIRKGYLTRQELDEIKREMGYTINQEQIVGIQNEEPTEPLERPADTARDLSVTRTAHQDSPQYRQLYDTFYSNLAQYESTDPLNRPILPKLNFNSTAKNNIERLNEILAEHLSTQWTLEQVHLSLYCAAITVLGQNGQKIYTPRTSEQKVKNQTPAWKRRLMQDVDKLRGKVDVLDEFLKDNKSRKVLNKVRKIATSAGLDLQSPRYKEFIVDLKDRLRQQAKAKGARLRRYNELTKRKQQNAEYVRDRKKFFRSLEKPSEISSNQQADINNDEFRQYWSSLWSESGQLQRNTSWLMDIEHQASEIVEMKTDLFTVEEISNIVKNTSNWKAPGPDRLHNFWVKQFPACFPSLARCFSEALEDPFKIPTFLTQGNSHMLHKRGDRSKPENYRPITCLSVVYKLFTTLVNNAIYRHCEANNILEEEQKGCSRGSAGCKHQLTIDAVVLKQAQARRRNLSLCYIDYQKAFDTVPHDWLLKVLEIYKICPKIKAVLQHLMSTWKTNILINNINAGTVKISRGIFQGDALSPMWFCIALNPLSTLLKNTNIGYRPAMRNPRKLTHLLYMDDLKLFGENQKQLHSLIDIVRSFSKDIDMSFGIDKCAIVNIRKGKMENTQEQFQDIHSMLPEETYKYLGIPQNQRIDHTRLKAEFTAKYKSRVTKVLNTKLSARNQIDALNSWATPALTYTFGVLKWSDADLNELDRLTRRLMTKFRCLHTNASVKRLYLPRKDGGRGLLNIYKLCRTQEKNLRQRLLESEDSLMKLVTTEDKGYTPLNLQHRELTFDITTRSEDISIWREQALHGRFPKHLEGENVDKLASLAWLNAGQLYPETEGFLTAIQDRVIRTRNYEKHCLKLNVEDKCRKCGAVGESIEHIIAGCRVLADNAYLGRHNQVAKIVHQQLALRHGFLDTCPPYYKYQPAAVLETDTAVLYWDRPITTDRSVDYNRPDLVFIEKDQKYGVIIDVAVPLTHNIGRTESEKITKYENLAMELKNMWQLSKVTIIPLVISAEGVMSKSFKKNLQKIEISQRIAGYAQQAVVLQTCHIVRKFLN

SEQ ID NO: 15124 - protein, 999 aa, Adalia bipunctata
MLLIDNNNNNNNNNNQLYDTFFGNLAQYETTDPLNRPILPKLKFNSTAKNNIEWLNEILAEHLSTQWTLEQVHLSLYCAAITVIGQNGQNIYIPRTSEPKVKNETPAWKKRLMQDVDKLRGKVDVLDEFLRNNKSRKVLNKVRKIATSAGLDLESPRHRELVVDLKDRLRQQAKAKGARLRRYNELTKRKQQNAEYARDRKKFFRSLEKPSEISSDQQADVNNDEFRQYWSSLWSESGQLRRNTSWLRDIEQHASEIVEMRTDIFTVEDISNIIKNTSNWKAPGPDRLQNFWVKQFPACFPSLARCFSEALEDPLKIPAFLTQGNTYMLHKKGDLNNPENYRPITCLSVVYRLFTSLVNNAIYRHCEANNILEEEQKGCSRGSAGCKHQLTIDAVVLKQAQARRRNLSLCYIDYQKAFDTVPHDWLVKVLEIYKICPKIQAVLQHLMSTWRTNILINNINVGTVKISRGIFQGDALSPMWFCMALNPLSTLLKNTNIGYRPAMRNPRKLSHLLYIDDLKLFGENQKQLHSLIDIVRSFSTDIDMSFGLDKCAIVNIRKGKMENTQEQFQDIHSMLPEETYKYLGIPQNQRIDHTRLKAEFTAKYKNRVTKVLNTKLSAKNQIDALNSWATPALTYTFGVLKWSDADLNELDRLTRRLMTKFRCLHTNASVKRLYLPRRDGGRGLLNIYKLCRTQEKNLRQRLLESKDSLMKLVTTEDKGYTPLNLQHRELTFDITTRSEDISTWREQALHGRFPKHLEGENVDKLASLSWLNAGQLYPETEGFLMAIQDRVIRTRNYEKHCLKLNVEDKCRKCGAFGESIEHIIAGCRVLADNAYLGRHNQVAKIVHQQLALRHGFLDTCPPYYKYQPAAVLETDAAVLYWDRPITTDRSVDYNRPDLVFIEKDQKYGVIIDVAVPLTHNIGKTESEKITKYENLAMELKNMWQLSKVTIIPLVISAEGVMSKSFKKNLQKIEISQRIAGYAQQAVALQTCHIVRKFLN

SEQ ID NO: 15125 - protein, 1030 aa, Adalia bipunctata
MGYIINQEQIVGSQNEEPTEPLERPADTARDLSVTRTTHQDSPQYRQLYDTFHSNLAQYEYTDPLNRPILPKLNFNSTAKNNIERLNEILAEHLSTQWTLEQVHLSLYCAAITVIGQNGQKIYIPRTSEQKVKNETPAWKRRLMQDVDKLRGKVDVLDEFLKDNKSRKVLNKVRKIATSAGVDLRSPRHKELMVELKDRLRQQAKAKGARLRRYNELSKRKQQNAEYVRDRKKFFRSLEKPSEISSNLHAGISNGEFRQYWSSLWSETGRFQENTSWLRDIEHQASEIVEMRTDLFTVEEISNIVKNTSNWKAPGPDRLHNFWVKQFTSCFPSLARCFSEALEDPIKIPSFLTQGNSYMLHKRGDRSKPDNYRPITCLSVLYKLFTSLVNNAIYRHCEANNILEEEQKGCSRGSAGCKHQLTIDAVVLKQAQARRRNLSLCYIDYQKAFDTVPHDWLVKVLEIYKICPKIKAVLQHLMSTWRTNILINNINAGTVKISRGIFQGDALSPMWFCMALNPLSTLLKNTNIGYRPAMRNPRKLSHLLYIDDLKLFSENQNQLHSLIDIVRSFSRDIDMSCGLDKCAIINIKKGKMENTREQFQDICSLLPEETYKYLGIPQNQRIDHTRLKAEFTAKYKNRVTKVLNTKLSAKNQIDALNSWATPALTYTFGVLKWSDADLNELDRLTRRLMTKFRCLHTNASVKRLYLPRRDGGRGLLNIYRLCRTQEKNLRRRLLESEDSLMKLVTTEDKGYTPLNLQHRELTFDISTRSEDRSLWREQALHGRFPKHLEGENVDKLASLSWLNAGHLYPETEGFLTAIQDRVIRTRNYEKHCLKLNVEDKCRKCGAVGESIEHVIAGCRVLADNAYLGRHNQVAKIVHQQLALRHGFLDTCPPYYKYQPAAVLETDAAVLYWDRPITTDRTVDYNRPDLVFIEKDQKYGVIIDVAVPLTHNIGKTESEKITKYENLAIELKNMWQLSKVTIIPLVISAEGVMSKSFKRNLQKIELSQRIAGYAQQAVALQTCHIVRKFLN

SEQ ID NO: 15126 - protein, 887 aa, Adalia bipunctata
MQDVDKLRGKVDVLDEFLKDNKSRKVLNKVRKIATSAELDLESPRYKEFIVDLKDRLRQQAKAKGARLRRYNELTKRKQQNAEYARDRKKFFRSLEKPSEISSNQQADINNDEFRQYWSSLWSETGQLRRNTSWLMNIEHQASEIVEMKTDLFTVEEISKIVKNTSNWKAPGPDRLHNFWVKQFSACFPSLARCFSEALEDPFKIPTFLTQGNSHMLHKRGDRSKPENYRPITCLSVVYKLFTTLVNNAIYRHCEANNILEEEQKGCSRGSAGCKHQLTIDAVVLKQAQARRRNLSLCYIDYQKAFDTVPHDWLLKVLEIYKICPKIRAVLQHLMSTWKTNILINNINAGTVKISRGIFQGDALSPMWFCIALNPLSTLLKNTNIGYIPAMRNPRKLTHLLYMDDLKLFGENQKQLHSLIDIVRSFSKDIDMSFGVDKCAIVNITKGKMENTQEQFQDIHSMLPEETYKYLGIPQNQRIDHTRLKAEFTAKYKSRVTKLLNTKLSARNQIDALNSWATPALTYTFGVLKWSDADLNELDRLTRRLMTKFRCLHTNSSVKRLYLPRRDGGRGLLNIYKLCRTQEKNLRQRLLESEDSLMKLVTTEDKGYTPLNLQHRELTFDITTRSEDISTWREQALHGRFPKHLEGENVDKLASLLWLNAGQLYPETEGFLTAIQDRVIRTRNYEKHCLKLNVEDKCRKCGAVGESIEHIIAGCRVLADNAYLGRHNQVAKIVHQQLALRHGFLDTCPPYYKYQPAAVLETDAAVLYWDRPITTDRSVDYNRPDLVVIEKDQKYGVIIDVAVPLTHNIGKTESEKITKYENLAMELKNMWQLSKVTIIPLVISAEGVMSKSFKKNLQKIEISQRIAGYAQQAVALQTCHIVRKFLN

SEQ ID NO: 15127 - protein, 1195 aa, Adalia bipunctata
MKMVKLMSLGNESLPGERQGMSGADAGHDSMRSVGGRVLRKRAPVIQQNTAPPEHQEVESQNMAEDQNATPPAGSTTVRRTARRGARNTRIKWSREMNIEVMRAFYYVNNCDDKPLPGWRYSLYTEFTRRHPELQLTEGNIADRKNVIIRKSYLTRQELDEIRREMGYTINQEQIVGNQNEEPTEPLERPADTARDLSVTRTAHQDSPQYRQLYDTFHSNLAQYESTDPLNRPILPKLNFNSTAKNNIERLNEILAEHLSTQWTLEQVHLSLYCAAITVIGQNGQKIYIPRPSEQKVKNETPAWKKRLMQDVDKLRGKVDVLDEFLKDNKSRKVLNKVRKIAASAGVDLRSPRHKELVVELKDRLRQQAKAKGARLRRYNELTKRKQQNAEYVRDRKKFFRSLEKPSEISSNLHAGISNGEFRQYWSSLWSETGRFQGNTSWLRDIEHQASEIVEMRTDLFTVEEISNIVKNTSNWKAPGPDRLHNFWVKQFTSCFPSLAKCFSEALEDPIKIPTFLTQGNSYMLHKRGDRSKPDNYRPITCLSVLYKLFTSLVNNAIYRHCEANNILEEEQKGCSRGSAGCKHQLTIDAVVLKQAQARRRNLSICYIDYQKAFDTVPHDWLVKVLEIYKICPKIKAVLQHLMSTWRTNILINNINAGTVKISRGIFQGDALSPMWFCMALNPLSTLLKNTNIGYRPAMRNPRKLSHLLYIDDLKLFGENQNQLHSLIDIVRSFSRDIDMSFGLDKCAIINIKKGKMENTQEQFQDICSMLPEETYKYLGIPQNQRIDHTRLKAEFTAKYKNRVTKVLNTKLSAKNQIDALNSWATPALTYTFGVLKWSDADLNELDRLTRRLMTKFRCLHTNASVKRLYLPRRDGGRGLLNIYRLCRTQEKNLRRRLLESEDSLMKLVTTEDKGYTPLNLQHRELTFDITTRSEERSLWREQALHGRFPKHLEGENVDKLASLSWLNAGHLYPETEGFLTAIQDRVIRTRNYEKHCLKLNVEDKCRKCGAVGESIEHVIAGCRVLADNAYLGRHNQVAKIVHQQLALRHGFLDTCPPYYKYQPAAVLETDAAVLYWDRPITTDRTVDYNRPDLVFIEKDQKYGVIIDVAVPLTHNIGKTESEKITKYENLAIELKNMWQLSKVTIIPLVISAEGVMSKSFKRNLQKIELSQRIAGYAQQAVALQTCHIVRKFLN

SEQ ID NO: 15128 - protein, 1457 aa, Adalia bipunctata
MFFHWFIEVIPARAETGRPMMKNNNNNNNNTHPHGCGSCHATWGVTSPRPELPGPPRVNGGKPMKMENKSSLGKESLPGERQGMSGADAGHDSMRSVGGRVLRKRAPVIQQNTAPPEHQEVESQNMAEDQNATPPAGSTTVRRTARRGARNTRIKWSREMNVEVMRAFYYVNNCDDKPLPGWRYSLYTEFTKRHPELQLTEGNIADRKNVIIRKGYLTRQELDEIKREMGYTINQEQIVGIQNEEPTEPLERPADTARDLSVTRTAHQDSPQYRQLYDTFYSNLAQYESTDPLNRPILPKLNSNSTAKNNIERLNEILAEHLSTQWTLEQVHLSLYCAAITVLGQNGQKIYTPRTSEQKVKNQTPAWKRRLMQDVDKLRGKVDVLDEFLKDNKSRKVLNKVRKIATSAGLDLESPRYKEFIVDLKDRLRQQAKAKGARLRRYNELTKRKQQNAEYVRDRKKFFRSLEKPSEISSNQQADINNDEFRQYWSSLWSESGQLQRNTSWLMDIEHQASEIVEMKTDLFTVEEISNIVKNTGNWKAPGPDRLHNFWFKQFPACFPSLARCFSEALEDPYKIPTFLTQGNSHMLHKRGDRSKPENYRPITCLSVVYKLFTTLVNNAIYRHCEANNILEEEQNGCSRGSAGCKHQLTIDAVVLKQAQARRRNLSLCYIDYQKAFDTVPHDWLLKVLEIYKICPKIKAVLQHLMSTWKTNILINNINAGTVKISRGIFQGDALSPMWFCIALNPLSTLLKNTIIGYRPAMRNPRKLTHLLYMDDLKLFGENQKQLHSLIDIVRSFSKDIDMSFGIDKCAIVNIRKGKMENTQEQFQDIHSMLPEETYKFLGIPQNKRIDHTRLKAEFTAKYKSKVTKVLNTKLSARNQIDALNSWATPALTYTFGFLKWSDADLNELDRLTRRLMTKFRCLHTNASVKRLYLPRRDGGRGLLNIYKLCSTQEKNLRQRLLESEDSLMKLVTTEDKGYTPLNLQHRELTFDITTRSEDISIWREQALHGRFPKHLEGENIDKLASLSWLNAGQLYPETEGFLTAIQDRVIRTRNYEKHCLKLNVEDKCRKCGAVGESIEHVIAGCRVLADNAYLGRHNQVAKIVHQQLALRHGFLDTCPPYYKYQPAAVLETDAAVLYWDRPITTDRSVDYNRPDLVFIEKDQKYGVIIDVAVPLTHNIGRTESEKITKYENLAMELKNMWQLSKVTIIPLVISAEGVMSKSFKKNLQKIEISQRIAGYAQQAVALQTCHIDRAEIPELVGGTEMFFHWFIEVIPARAETGRPMMKNNNKTARVWLGFCHATWGVTSSRPELPGPPRVNDGKSMKMEKISGQQREVKADIMAEDEIATPPAGSTTVRRTARRGARNARIKWSREMNIEVMRAFNYVNHCEDKPLPGWRYSLYNDFTWRNRSREIPEDRGICTTGCSIANLSHRAEIPEPVGGTELFFHWFIEIIPA

SEQ ID NO: 15129 - protein, 1195 aa, Adalia bipunctata
MKMEPILSLGRESLPGERQGMSGADAGHDSMRSVGGRVLRKRAPVIQQNTAPRQQREVETDIMAEDRNATPPAGSTTVRRTARRRARNARIKWSREMNIEVMRAFYYVNNCDDKPLPGWRYSLYTEFTKRHPELQLTEGNIADRKNVIIRKGYLTRQELDEIKREMGYTINQEQIVGSQNEEPTEQLERPADTARDLSVTRTAHQYSPQYRQLYDTFYSNLAQYESTDPLNRPILPKLNFNSTAKNNIERLNEILAEHLSTQWTLEQVHLSLYCAAITVIGQNGQKIYTPRTSEQKVKNKTPAWKRRLMQDVDKLRGKVDVLDEFLKENKSRKVVNKVRKIAISAGLNLESPRHRELIVDLKDRLRQQAKAKGARLRRYNELTKRKQQNAEYLRDRKKFFRSLEKPSEISSNQHADINNEEFRQYWSSLWSESGQLQRNTSWLTDIEHQASEIVEMKTDLFTVEEISNIVKNTSNWKAPGPDRLHNFWVKQFPACFPSLARCFSEALDDPFKIPTFLTQGNTYMLHKRGDRSKPENYRPITCLSVVYKLFTTLVNSAIYRHCEANNILEEEQKGCSRGSAGCKHQLTIDAVVLKQAQARRRNLSLCYIDYQKAFDTVPHDWLVRVLEIYKICPKIKAVLQHLMSTWKTNILINNINAGTVKISRGIFQGDALSPMWFCIALNPLSTLLKNTNIGYRPAMRNPRKLTHLLYMDDLKLFGENQKQLHSLIDIVRSFSTDIDMSFGLDKCAIVNIRKGKMENTQEQFQDIHSMLPEETYKYLGIPQNQRIDHTRLKAEFTAKYKNRVTKVLNTKLSAKNQIDALNSWATPALTYTFGVLKWSDADLNELDRLTRRLMTKFRCLHTNASVKRLYLPRRDGGRGLLNIYKLCRTQEKNLRQRLLESKDSLMKLVTTEDKGYTPLNLQHRELTFDITTRSEDISTWREQALHGRFPKHLEGENVDKLASLSWLNAGKLYPETEGFLMAIQDRVIRTRNYEKHCLKLNVEDKCRKCGAFGESIEHIIAGCRVLADNAYLGRHNQVAKIVHQQLALRHGFLDTCPPYYKYQPAAVLETDAAVLYWDRPITTDRSVDYNRPDLVFIEKDQKYGVIIDVAVPLTHNIGKTESEKITKYENLAMELKNMWKLSKVTIIPLVISAEGVMSKSFKKNLQKIEISQRIAGYAQQAVALQTCHIVRKFLN

SEQ ID NO: 15130 - protein, 887 aa, Adalia bipunctata
MQDVDKLRGKVDVLDEFLRENKSRKVLNKVRKIAISAGLNLESPRHRELIVDLKDRLRQQAKAKGARLRRYNELTKRKQQNAEYLRDRKKFFRSLEKPSEISSNQHADINNEEFRQYWSSLWSEGGQLQRNTSWLTDIEHQASEIVEMKTDLFTVEEISNIFKNTSNWKAPGPDRLHNFWVKQFPACFPSLARCFSEALEDPFKIPTFLTQGNTYMLHKRGDRSKPENYRPITCLSVVYKLFTTLVNNAIYRHCEANNILEEEQKGCSRGSAGCKHQLTIDAVVLKQAQARRRNLSLCYIDYQKAFDTVPHDWLVRVLEIYKICPKIKAVLQHLMSTWKTNILINNINAGTVKISRGIFQGDALSPMWFCIALNPLSTLLKNTNIGYRPAMTNPRKLTHLLYMDDLKLFGENQKQLHSLIDIVRSFSTDIDMSFGLDKCAIVNIRKGKVENAQEQFKDIHSMLPEETYKYLGIPQNQRIDHTRLKAEFTAKYKNRVTKVLNTKLSAKNQIDALNSWATPALTYTFGVLKWSDADLSELDRLTRRLMTKFRCLHTNASVKRLYLPRRDGGRGLLNIYKLCRTQEKNLRQRLLESKDSLMKLVTTEDKGYTPLNLQHRELTFDITTRSEDISTWREQALHGRFPKHLEGENVDKLASLSWLNAGQLYPETEGFLMAIQDRVIRTRNYEKHCLRLNVEDKCRKCGAFGESIEHIIAGCRVLADNAYLGRHNQVAKIVHQQLALRHGFLDTCPPYYKYQPAAVLETDAAVLYWDRPITTDRSVDYNRPDLVFIEKDQKYGVIIDVAVPLTHNIGKTESEKITKYENLAMELKNMWQLSKVTIIPLVISAEGVMSKSFKKNLQKIEISQRIAGYAQQAVALQTCHIVRKFLN

SEQ ID NO: 15131 - protein, 1236 aa, Adalia bipunctata
MIIIIIITTARVWSGFCHATWGVTSPRPELPEPPRLNGGKPMKMVKLMSLGNESLPGERQGMSGADAGHDSMRSVGGRVLRKRAPVIQQNTAPPEHQEVESQNMAEDQNATPPAGSTTVRRTARRGARNTRIKWSREMNIEVMRAFYYVNNCDDKPLPGWRYSLYTEFTRRHPELQLTEGNIADRKNVIIRKSYLTRQELDEIRREMGYTINQEQIVGNQNEEPTEPLERPADTARDLSVTRTAHQDSPQYRQLYDTFHSNLAQYESTDPLNRPILPKLNFNSTAKNNIERLNEILAEHLSTQWTLEQVHLSLYCAAITVIGQNGQKIYIPRPSEQKVKNETPAWKKRLMQDVDKLRGKVDVLDEFLKDNKSRKVLNKVRKIAASAGVDLRSPRHKELVVELKDRLRQQAKAKGARLRRYNELTKRKQQNAEYVRDRKKFFRSLEKPSEISSNLHAGISNGEFRQYWSSLWSETGRFQGNTSWLRDIEHQASEIVEMRTDLFTVEEISNIVKNTSNWKAPGPDRLHNFWVKQFTSCFPSLAKCFSEALEDPIKIPTFLTQGNSYMLHKRGDRSKPDNYRPITCLSVLYKLFTSLVNNAIYRHCEANNILEEEQKGCSRGSAGCKHQLTIDAVVLKQAQARRRNLSICYIDYQKAFDTVPHDWLVKVLEIYKICPKIKAVLQHLMSTWRTNILINNINAGTVKISRGIFQGDALSPMWFCMALNPLSTLLKNTNIGYRPAMRNPRKLSHLLYIDDLKLFGENQNQLHSLIDIVRSFSRDIDMSFGLDKCAIINIKKGKMENTQEQFQDICSMLPEETYKYLGIPQNQRIDHTRLKAEFTAKYKNRVTKVLNTKLSAKNQIDALNSWATPALTYTFGVLKWSDADLNELDRLTRRLMTKFRCLHTNASVKRLYLPRRDGGRGLLNIYRLCRTQEKNLRRRLLESEDSLMKLVTTEDKGYTPLNLQHRELTFDITTRSEERSLWREQALHGRFPKHLEGENVDKLASLSWLNAGHLYPETEGFLTAIQDRVIRTRNYEKHCLKLNVEDKCRKCGAVGESIEHVIAGCRVLADNAYLGRHNQVAKIVHQQLALRHGFLDTCPPYYKYQPAAVLETDAAVLYWDRPITTDRTVDYNRPDLVFIEKDQKYGVIIDVAVPLTHNIGKTESEKITKYENLAIELKNMWQLSKVTIIPLVISAEGVMSKSFKRNLQKIELSQRIAGYAQQAVALQTCHIVRKFLN

SEQ ID NO: 15132 - protein, 1195 aa, Adalia bipunctata
MKMVNSMSLGNESLPGERQGMSGADAGHDSMRSVGGRVLRKRAPVMQQNTAPPEHQEVESQNMAEDTNATPPAGSTTVRRTARRGARNARIKWSREMNIEILRAFYYVNNCDDKPLPGWRYSLYTEFTKRHPELQLTEGNIADRKNVIIRKSYLTRQELDEIKREMGYTINQEQIVGSQNEEPTEPLEGPADTARDLSVTRTAHQDSPQYRQLYDTFFSNLAQYESTDPLNRPILPKLKFNSTAKNNIERLNEILAEHLSTQWTLEQVHLSLYCAAITVIGQNGQKIYIPRTSEQKVKNETPAWKRRLMQDVDKLRGKVDVLDEFLKDNKSRKVLNKVRKIATSAGLDLKSPRHRELIVDLKDRLRQQAKAKGARLRRYNELSKRKQQNAEYVRDRKKFFRNLGKPSEITSNQHADISNDEFRQYWSSLWSESGQFQRNTSWLRNIEHHASEIVEMRTDIFTVEDISNIIKNTSNWKAPGPDRLQNFWVKQFPACFPSLARCFSEALEDPFKIPAFLTQGNTYMLHKKGDPNNPENYRPITCLSVVYKLFTSLVNNAIYRHCEANNILEEEQKGCSRGSAGCKHQLTIDAVVLKQAQARRRNLSLCYIDYQKAFDTVPHDWLVKVLEIYKICPKIRAVLQHLMSTWRTNILINNINAGTVKISRGIFQGDALSPMWFCMALNPLSTLLKNTNIGYRPAMRNPRKLSHLLYIDDLKLFGENQKQLHSLMDVVRSFSKDIDMSFGLDKCAIVNIRKGKMENTQEQFQDIHSMLPEETYKYLGIPQNQRIDHTRLKAEFTAKYKNRVTKVLNTKLSAKNQIDALNSWATPTLTYTFGVLKWSDADLNELDRLTRRLMTKFRCLHTNASVKRLYLPRRGGGRGLLNIYKLCRTQEKNLRQRLLECEDSLMKLVTTEYKGYTPLNLQHRELTFDITTRSEDISIWREQALHGRFPKHLEGENVDKLASLSWLNAGQLYPETEGFLTAIQDRVIRTRNYEKHCLKLNVEDKCRKCGAVGESIEHIIAGCRVLADNAYLGRHNQVAKIVHQQLAFRHGFLDTCPPYYKYQPAAVLETDTAVLYWDRPITTDRTVDYNRPDLVFIEKDQKYGVIIDVAVPLTHNIGRTESEKITKYENLAIELKNMWQLSRVTIIPLVISAEGVMSKSFKRNLQKLELSQRIAGYAQQAVALQTCHIVRKFLN

SEQ ID NO: 15133 - protein, 912 aa, Adalia bipunctata
MGKRYTPRTSEQKVKNQTPAWKRRLMQDVDKLRGKVDVLDEFLKDNKSRKVLNKVRKIATSAGLDLESPRYKEFIVDLKDRLRQQAKAKGARLRRYNELTKRKQQNAEYVRDRKKFFRSLEKPSEISSDQQADINNDEFRQYWSSLWSESGQLQRNTSWLMDIEHQASEIVEMKTDLFTVEEISNIVKNTSNWKAPGPDRLHNFWVKQFPACFPSLARCFSEALEDPFKIPTFLTQGNSHMLHKRGDRSKPENYRPITCLSVVYKLFTTLVNNAIYRHCEANNILEEEQKGCSRGSAGCKHQLTIDAVVLKQAQARRRNLSLCYIDYQKAFDTVPHDWLLKVLEIYKICPKIKAVLQHLMSTWKTNILINNINAGTVKISRGIFQGDALSPMWFCIALNPLSTLLKNTNIGYRPAMRNPRKLTHLLYMDDLKLFGENQKQLHSLIDIVRSFSKDIDMSFGIDKCAIVNIRKGKMENTQEKFQDIHSMLPEETYKYLGIPQNQRIDHTRLKAEFTAKYKSRVTKVLNTKLSARNQIDALNSWATPALTYTFGVLKWSDADLNELDRLTRRLMTKFRCLHTNASVKRLYLPRRDGGRGLLNIYKLCRTQEKNLRQRLLESEDSLMKLVTTEDKGYTPLNLQHRELTFDITTRSEDISIWREQALHGRFPKHLEGENVDKLASLSWLNAGQLYPETEGFLTAIQDRVIRTRNYEKHCLKLNVEDKCRKCGAVGESIEHVIAGCRVLADNAYLGRHNQVAKIVHQQLALRHGFLDTCPPYYKYQPAAVLETDTAVLYWDRPITTDRSVDYNRPDLVFIEKDQKYGVIIDVAVPLTHNIGRTESEKITKYENLAMELKNMWQLSKVTIIPLVISAEGVMSKSFKKNLQKIEISQRIAGYAQQAVALQTCHIVRKFLN

SEQ ID NO: 15134 - protein, 1195 aa, Adalia bipunctata
MKMVNLMSLGNESLPGERQGMSGADAGHDSMRSVGGRVLRKRAPVIQQNTAPPEHQEVESQNMAEDQNATPPAGSTTVRRTARRGARNARIKWSREMNIEVMRAFYYVNNCDDKPLPGWRYSLYTEFTKRHPELQLTEGNIADRKNVIIRKSYLTRQELDEIKREMGYTINQEQIVGSQNEEPTEPLERPADTARDLSATRTTHQDSPQYRQLYDTFHSNLAQYEYTDPLNRPILPKLNFNSTAKNNIERLNEILAEHLSTQWTLEQVHLSLYCAAITVIGQNGQKIYIPRTSEQKVKNETPAWKRRLMQDVDKLRGKVDVLDEFLKDNKSRKVLNKVRKIATSAGVDLRSPRHKELMVELKDRLRQQAKAKGARLRRYNELSKRKQQNAEYVRDRKKFFRSLEKPSEISSNLHAGISNGEFRQYWSSLWSETGRFQENTSWLRDIEHQASEIVEMRTDLFTVEEISNIVKNTSNWKAPGPDRLHNFWVKQFTSCFPSLARCFSEALEDPIKIPTFLTQGNSYMLHKRGDRSKPDNYRPITCLSVLYKLFTSLVNNAIYRHCEANNILEEEQKGCSRGSAGCKHQLTIDAVVLKQAQARRRNLSVCYIDYQKAFDTVPHDWLVKVLEIYKICPKIKAVLQHLMSTWRTNILINNINAGTVKISRGIFQGDALSPRWFCMALNPLSTLLKNTNIGYRPAMRNPRKLSHLLYIDDLKLFSENQNQLHSLIDIVRSFSRDIDMSFGLDKCAIINIKKGKMENTREQFQDICSLLPEETYKYLGIPQNQRIDHTRLKAEFTAKYKNRVTKVLNTKLSAKNQIDALNSWATPALTYTFGVLKWSDADLNELDRLTRRLMTKFRCLHTNASVKRLYLPRRDGGRGLLNIYRLCRTQEKNLRRRLLESEDSLMKLVTTEDKGYTPLNLQHRELTFDISTRSEDRSLWREQALHGRFPKHLEGENVDKLASLSWLNAGHLYPETEGFLTAIQDRVIRTRNYEKHCLKLNVEDKCRKCGAVGEYIEHVIAGCRVLADNAYLGRHNQVAKIVHQQLALRHGFLDTCPPYYKYQPAAVLETDAAVLYWDRPITTDRTVDYNRPDLVFIEKDQKYGVIIDVAVPLTHNIGKTESEKITKYENLAIELKNMWQLSKVTIIPLVISAEGVMSKSFKRNLQKIELSQRIAGYAQQAVALQTCHIVRKFLN

SEQ ID NO: 15135 - protein, 1192 aa, Adalia bipunctata
MKMVNESSLGKESLPGERQGMSGADARHDSMRSVGGRVLRKRAPVIQQNTAPPEHREVESQNMAEDPNATSPAGSTTVRRTARRGARNARIKWSREMNIEVMRAFYYVNNCDDRPLPGWRYSLYTEFTKRHPELQLTEGNIADRKNVIIRKGYLTRQELDEIKREMGYTINQDQIVGNHNGEPSEPLETPAETARVPVTRTAHQECPQYRQLYDTFFGNLAQYETTDPLNRPILPKLKFNSTAKNNIEWLNEILAEHLSTQWTLEQVHLSLYCAAITVIGQNGQKIYIPRTSEQKVKKETPAWKKRLMQDVDKLRGKVDVLDEFLRNNKSRKVLNKVRKIATSAGLDLESPRHRELVVDLKDRLRQQAKAKGARLRRYNELTKRKQQNAEYARDRKKFFRSLEKPSEISSDQQADINNDEFRQYWSSLWSESGQLRRNTSWLRDIEQHASEIVEMRTDIFTVEDISNIIKNTSNWKAPGPDRLQNFWVKQFPACFPSLARCFSEALEDPLKIPAFLTQGNTYMLHKKGDLNNPENYRPITCLSVVYRLFTSLVNNAIYRHCEANNILEEEQKGCSRGSAGCKHQLTIDAVVLKQAQARRRNLSLCYIDYQKAFDTVPHDWLLKVLEIYKICPKIKAVLQHLMSTWKTNILINNINAGTVKISRGIFQGDALSPMWFCMALNPLSTLLKNANIGYRPAMRNPRKLSHLLYIDDLKLFGENQKQLHSLIDIVRSFSTDIDMSFGLDKCAIVNIRKGKMENTQEQFQDIHSLLPEETYKYLGIPQNQRIDHTRLKAEFTAKYKNRVTKVLNTKLSAKNQIDALNSWATPALTYTFGVLKWSDADLNELDRLTRRLMTKFRCLHTNASVKRLYLPRRDGGRGLLNIYKLCRTQEKNLRQRLLESEDSLMKLVTTEDKGYTPLNLQHRELTFDITTRREDISIWREQALHGRFPKHLEGENVDKLASLSWLNAGQLYPETEGFLTAIQDRVIRTRNYEKHCLKLNVEDKCRKCGAVGESIEHIIAGCRVLADNAYLGRHNQVAKIVHQQLALRHGFLDTCPPYYKYQPAAVLETDTAVLYWDRPITTDRTVDYNRPDLVFIEKDQKYGIVIDVAVPLTHNIGRTESEKITKNLAIELKNMWQLSKVTIIPLVISAEGVMSKSFKRNLQKIELSQRIAGYAQQAVALQTCHIVRKFLN

SEQ ID NO: 15136 - protein, 1194 aa, Adalia bipunctata
MKMVIESSLGKESLPGERQGMSGADARHDSMRSVGGRVLRKRAPVIQQNTAPPEQREVEAQNMAADQNATSPAGSTTVRRTARREARNARIKWSREMNIEVMRAFYYVNNCDDRPLPGWRYSLYTEFTKRHPELQLKEGNIADRKNVIIRKGYLTRQELDEIKREMGYTINQDQIVENHNEEPSEPLETPAETARVPVTRTAHQECPQYRQLYDTFFGNLAQYETTDPLNRPILPKLKFNSTAKNNIEWLNEILAEHLSTQWTLEQVHLSLYCAAITVIGQNGQKIYIPRTSEQKVKNETPAWKKRLMQDVDKLRGKVDVLDEFLRNNKSRKVLNKVRKIATSAGLDLESPRHRELMIDLKDRLRQRAKAKGARLRRYNELSKRKQQNAEYVRDRKKFFRSLEKPSEIPSNQHANISNDEFRQYWSSLWSESGQFQRNTSWLRDIEQHASEIVEMRTDIFTVEDISNIIKNTSNWKAPGPDRLQNFWVKQFPACFPSLARCFSEALEDPLKIPAFLTQGNTYMLHKKGDLNNPENYRPITCLSVVYKLFTSLVNNAIYRHCEANNILEEEQKGCSRGSAGCKHQLTIDAVVLKQAQARRRNLSLCYIDYQKAFDTVPHDWLVKVLEIYKICPKIQAVLQHLMSTWRTNILINNINAGTVKISRGIFQGDALSPMWFCMALNPLSTLLKNTNIGYRPSMRNPRKLSHLLYIDDLKLFGENQKQLHSLIDIVRSFSTDIDMSFGLDKCAIVNIRKGKMENTQEQFQDIHSMLPEETYKYLGIPQNQRIDHTRLKAEFTAKYKNRVTKVLNTKLSAKNQIDALNSWATPALTYTFGVLKWSDADLNELDRLTRRLMTKFRCLHTNASVKRLYLPRRDGGRGLLNIYKLCRTQEKNLRQRLLESEDSLMKLVTTEDKGYTPLNLQHRELTFDITTRSEDISIWREQALHGRFPKHLEGENVDKLASLSWLNAGQLYPETEGFLTAIQDRVIRTRNYEKHCLKLNVEDKCRKCGAVGESIEHIIAGCRVLADNAYLGRHNQVAKIVHQQLALRHGFLDTCPPYYKYQPAAVLETDTAVLYWDRPITTDRTVDYNRPDLVFIEKDQKYGIVIDVAVPLTHNIGRTESEKITKYENLAIELKNMWQLSKVTIIPLVISAEGVMSKSFKRNLQKIELSQRIAGYAQQAVALQTCHIVRKFLN

SEQ ID NO: 15137 - protein, 1195 aa, Adalia bipunctata
MKMVNLMSLGNESLPGERQGMSGADAGHDSMRSVGGRVLRKRAPVIQQNTAPPEHQEVESQNMTEDQNATPPAGSTTVRRTARRGARNARIKWSREMNIEVMRAFYYVNNCDDKPLPGWRYSLYTEFTKRHPELQLTEGNIADRKNVIIRKSYLTRQELDEIKREMGYTINQEQIVGSQNEEPTEPLERPADTARDLSATRTTHQDSPQYRQLYDTFHSNLAQYEYTDPLNRPILPKLNFNSTAKNNIERLNEILAEHLSTQWTLEQVHLSLYCAAITVIGQNGQKIYIPRTSEQKVKNETPAWKRRLMQDVDKLRGKVDVLDEFLKDNKSRKVLNKVRKIATSAGADLRSPRYKELMVELKDRLRQQAKAKGARLRRYNELSKRKQQNAEYVRDRKKFFRSLEKPSEISSNLHAGISNGEFRQYWSSLWSETGRFQENTSWLRDIEHQASEIVEMRTDLFTVEEISNIVKNTSNWKAPGPDRLHNFWVKQFTSCFPSLARCFSEALEDPIKIPSFLTQGNSYMLHKRGDRSKPDNYRPITCLSVLYKLFTSLVNNAIYRHCEANNILEEEQKGCSRGSAGCKHQLTIDAVVLKQAQARRRNLSLCYIDYQKAFDPVPHDWLVKVLEIYKICPKIKAVLQHLMSTWRTNILINNINAGTVKISRGIFQGDALSPMWFCMALNPLSTLLKNTNIGYRPAMRNPRKLSHLLYIDDLKLFSENQNQLHSLIDIVRSFSRDIDMSFGLDKCAIINIKKGKMENTREQFQDICSLLPEETYKYLGIPQNQRIDHTRLKAEFTAKYKNRVTKVLNTKLSAKNQIDALNSWATPALTYTFGVLKWSDADLNEMDRLTRRLMTKFRCLHTNASVKRLYLPRRDGGRGLLNIYRLCRTQEKNLRRRLLESEDSLMKLVTTEDKGYTPLNLQHRELTFDISTRSEDRSLWREQALHGRFPKHLEGENVDKLASLSWLNAGHLYPETEGFLTAIQDRVIRTRNYEKHCLKLNVEDKCRKCGAVGESIEHVIAGCRVLADNAYLGRHNQVAKIVHQQLALRHGFLDTCPPYYKYQPAAVLETDAAVLYWDRPITTDRTVDYNRPDLVFIEKDQKYGVIIDVAVPLTHNIGKTESEKITKYENLAIELKNMWQLSKVTIIPLVISAEGVMSKSFKRNLQKIELSQRIAGYAQQAVALQTCHIVRKFLN

SEQ ID NO: 15138 - protein, 1195 aa, Adalia bipunctata
MKMEKSLSLGKESLPGERQGMSGADAGHDSMRSVGGRVLRKRAPVIQQNTAPPEHREVESQNMAEDQNATPPAGSTTVRRTARRGARNARIKWSREMNVEVMRAFYYVNNCDDKPLPGWRYSLYTEFTKRHPEPQLTEGNIADRKNVIVRKGYLTRQELDEIKREMGYTINQEQIVGSQNEEPTEPLERPADTPRDLSVTRTAHQDSPQYRQLYDTFHSNLAQYESTDPLNRPILPKLNFNSTAKNNIERLNEILAEHMGTQWTLEQVHLSLYCAAITVIGQNGQKIYIPSTSQQKVKNQTPAWKRRLMQDVDKLRGKVDVLDEFLKDNKSRKVLNKVRKIATSAGLDLESPRRRELIVDLKDRLRQQAKAKGARLRRYNELTKRKQQNAEYARDRKKFFRSLEKPSEVSSNQQADINNDEFRQYWSSLWSKSGQLQRNTSWLTDIEQQASEIVEMKTDLFTVEEISNIVKNTSNWKAPGPDRLHNFWVKQFPAYFSSLARCFSEALEDPFKIPAFLTQGNTYMLHKKGDRNNPENYRPITCLSVVYKLFTSLVNNAIYRHCEANNILEEEQKGCSRGSAGCKHQLTIDAVVLKQAQARRRNLSLCYIDYQKAFDTVPHDWLLKVLEIYKICPKIKAVLQHLMSTWKTNILINNINAGTVKISRGIFQGDALSPMWFCMALNPLSTLLKNTNIGYRPAMRNPQKLTHLLYTDDLKLFAENQKQLHSLIDIVRSFSKDIDMSFGVDKCAIVNIRKGKMEDTQEQFQDIHSMLPEETYKYLGIPQNQRIDHTRLKAEFTAKYKCRVTKVLNTKLSARNQIDALNSWATPALTYTFGVLKWSDADLNELDRLTRRLMTKFRCLHTNASVKRLYLPRRDGGRGLLNIYKLCRTQEKNLRQRLLESEDSLMKLVTTEDKGYTPLNLQHRELTFDITTRSGDISIWREQALHGRFPKHLEMENVDKLASLSWLNAGNLYPETEGFLTAIQDRVIRTRNYEKHCLKLNVEDKCRKCGAVGESIEHVIAGCRVLADNAYLGRHNQVAKIVHQQLALRHGFLDTCPPYYKYQPAAVLETDAAVLYWDRPITTDRTVDYNRPDLVFIEKDQKYGVIIDVAVPLTHNIGKTESEKITKYENLAIELKNMWQLSKVTIIPLVISAEGVMSKSFKRNLQKIELSQRIAGYAQQAVALQTCHIVRKFLN

SEQ ID NO: 15139 - protein, 1133 aa, Adalia bipunctata
MKMETILSLGRESLPGERQGMSGADAGHDSMRSVGGRVLRKRAPVIQQNTAPRQQREVETDIMAEDRNATPPAGSTTVRRTARRGARNARIKWSREMNIEVMRAFYYVNNCDDKPLPGWRYSLYTEFTKRHPELQLTEGNIADRKNVIIRKGYLTREGLDEIKREMGYTINQEQIVGSQNEEPTEQLERPADMARDLSVTRTAHQDSPQYRQLYDTFYSNLAQYESTDPLNRPILPKLNFNSTAKNNIERLNEILAEHLSTQWTLEQVHLSLYCAAITVIGQNGQKIYIPRTSEQKVKNETPAWKRRLMQDVDKLRGKVDVLDEFLRENKSRKVLNKVRKLAISAGLDLESPRHRELIVDLKDRLRQQAKAKGARLRRYNELTKRKQQNAEYLRDRKKFFRGLEKPSEISSNQHADINNEEFRQYWSSLWSESGQLQRNTSWLTDIEHQASEIVEMKTDLFTVEEISNIVKNTSNWKAPGPDRLHNFWVKQFPACFPSLARCFSEALEDPFKIPTFLTQGNTYMLHKRGDRSKPENYRPITCLSVVYKLFTTLVNNAIYRHCEANNILEEEQKGCSRGSAGCKHQLTIDAVVLKQAQARRRNLSLCYIDYQKAFDTVPHDWLVRVLEIYKICPKIKAVLQHLMSTWKTNILINNINAGTVKISRGIFQGDALSPMWFCIALNPLSTLLKNTNIGYRPAMRNPRKLTHLLYMDDLKLFGENQKQLHSLIDIVRSFSTDIDMSFGLDKCAIVNIRKGKMENTQEQFQDIHSMLPEETYKYLGIPQNQRIDHTRLKAEFTAKYKNRVTKVLNTKLSARNQIDALNSWATPALTYTFGVLKWSDADLNELDRLTRRLMTKFRCLHTNASVKRLYLPRRDGGRGLLNIYKLCRTQEKNLRQRLLESEDSLMKLVTTEDKGYTPLNLQHRELTFDITTRSEDISAWREQALHGRFPKHLEGENVDKLASLSWLNAGQLYPETEGFLMAIQDRVIRTHNYEKHCLKLNVEDKCRKCGAFGESIEHIIAGCRVLADNAYLGRHNQVAKIVHQQLALRHGFLDTCPPYYKYQPAAVLETEAAVLYWDRPITTDRSLDYNRPDLVFIEKDQKYGVIIDVAVPLTHNIGKTESEKITKYENLAM

SEQ ID NO: 15140 - protein, 1030 aa, Adalia bipunctata
MGYTINQEQIVGIQNDEPTEPLERPSNTARDLSVTPTAHQDSPQYRQLYDTFYSNLSQYESTDPLNRPILPKLNFNSTAKNNLERLNEILAEHLSTRWTLEQVHLSLYCAAITVIGHNGQKIYTPRTSEQKVKNQTPAWKRRLMQDVDKLRGKVDVLDEFLKDNKSRKVLNKVRKIATSAGLDLESPRYKEFIDDLKDRLRQQAKAKGARLRRYNELTMRKQQNAEYARDRKKFFRSLEKPSEISSNQQADINNDEFRQYWSSLWSETGQLQRNTSWLMNIEHQASEIFEMKTDLFTVEEISKIVKNTSNWKAPGPDRLHNFWVKQFSACFPSLARCFSEALEDPFKIPTFLTQGNSHMLHKRGGRSKPENYRPITCLSVVYKLFITLVNNAIYRHCEANNILEEEQKGCSRGSAGCKHQLTIDAVVLKQAQARRRNLSLCYIDYQKAFDTVPHDWLLKVLEIYKICPKIRAVLQHLMSTLETNILINNINAGTVKLSRGIFQGDALSPMWFCIALNPLSTLLKNTNIGYRPAMRNPRKLTHLLYMDDLKLFGENQKQLHSLIDIVRSFSKDIDMSFGVDKCAIVNITKGKMENTQEQFQDIHSMLPEETYKYLGIPQNQRIDHTRLKAEFTAKYKSRVTKLLNTKLSARNQIDALNSWATPALTYTFGVLKWSDADLNELDRLTRRLMTKFRCLHTNASVKRLYLPRRDGGRGLLNIYKLCRTQEKNLRQRLLESEDSLMKLVTTEDKGYTPLNLQHRELTFDITTRSEDISTWREQALHGRFPKHLEGENVDKLASLLWLDAGQLYPETEGFLTAIQDRVIRTRNYEKHCLKLNVEDKCRKCGAVGESIEHIIAGCRVLADNAYLGRHNQVAKIVHQQLALRHGFLDTCPPYYKYQPAAVLETDAAVLYWDRPITTDRSVDYNRPDLVFIEKDQKYGVIIDVAVPLTHNIGRTESEKITKNENLAMELKNMWQLSKVTIIPLVISADGVMSKSFKKNLQKIEISQRIAGYAQQAVALQTCHIVRKFLN

SEQ ID NO: 15141 - protein, 1278 aa, Adalia bipunctata
MDSHTTESADPLGAHKGFSPHTDVKKKKKKKKKKKKKKKKKKKKKIIIIITARVWCGFYHATWGVTSPRPELPVPPRVNGGKPMKMEPSLSLGNESLPGERQGMSGADAGHDSMRSVGGRVLRKRAPVIQQNTAPLQQREVEPDIMAENRNATPPAGSTTVRRTVRRGDRNARIKWSREMNIEVMRAFYYVNNCDDKPLPGWRYSLYTEFTKRHPELQLTEGNIADRKNVIIRKGYLTRQELDGIKREMGYTLNQEQIVGNQNEEPDEPLERPAETARELSVTRTARQDCPQYRQLYETFHSNLTRYESTDPLNRPILPKLTFNSTAKNNIEWLNEILAELLSTQWPLEQVHLSLYCAAITVIGQNGQKIYIPRTSEQKVKNETPAWKRRLMQDVDKLRGKVDVLNEFLKDNKSRKVLNKVRKIATSAGVDLESPRHKDLIVELKDRLRQKAKAKGARLRRYNELSKRKQQNAEYVRDRKKFFRSLEKPSEISSNMHADINNDEFRQYWSSLWSESGQFQRNTSWLGDIEHQASEIVEMRTDLFTAEEISNIIKKTGNWKAPGTDRLHNFWIKQFPACFPSLARCFSEALEDPFKIPTFLTQGNTYMLHKRGDRSKPDNYRPITCLSVVYKLFTSLVNNAIYRHCEANNILEEEQKGCSRGSAGCKHQLTMDAVVLKQAQARRRNLSLCYIDYQKAFDTVPHDWLVKVLEIYKICPKIKAMLQHLMSTWRTNILINNVNAGTVKISRGIFQGDALSPMWFCMALNPLSTLLKNTNMGYRPAMRNPRKLSHLLYIDDLKLFGESQNQLHSLIDIVRSFSRDIDMSFGLDNCAIVNIRKGKMENTQEQFQDICSILPEETYKYLGIPQNQRIDHTRLKTEFTEKYRNRVTKVLNTKLSAKNQIDALNSWATPALTYTFGVLKWSDADLNELDRLTRRLMTKFRCLHTNASVKRLYLPRRDGGRGLVNIYRLCRTQEKNLRQRLLESEDSLMKLVTTEDKGYTPLNLQHRELTFDITTRSEDKRLWREQALHGRFPKHLEGENVDKLASLSWLSAGHLYPETEGFLTAIQDRVIRTRNYEKHCLKLNVEDKCRKCGAAGESIEHVIAGCRFLADNAYLGRHNQVAKIVHQQLALRHGFLDTCPPYYKYQPAAVLETDAAVLYWDRPITTDRSVDYNRPDLVSIEKDQKYGVIIDVAVPLTHNIGKTESEKITKYENLAIELKNMWQLSKVTIIPLVISAEGVMSKSFKRNLQKIELSQRIAGYAQQAVALQTCHIVRKFLN

SEQ ID NO: 15142 - protein, 1195 aa, Adalia bipunctata
MKMENKSSLGKESLPGERQGMSGADAGHDSMRSVGGRVLRKRAPVIQQNTAPPEHQEVESQNMAEDQNATPPAGSTTVRRTARRGARNTRIKWSREMNVEVMRAFYYVNNCDDKPLPGWRYSLYTEFTKRHPELQLTEGNIADRKNVIIRKGYLTRQELDEIKREMGYTINQEQIVGIQNEEPTEPLERPADTARDLSVTRTAHQDSPQYRQLYDTFYSNLAQYESTDPLNRPILPKLNFNSTAKNNIERLNEILAEHLSTQWTLGQVHLSLYCAAITVLGQNGQKIYTPRTSEQRVKNQTPAWKRRLMQDVDKLRGKVDVLDEFLKDNKSRKVLNKVRKIATSAGLDLESPRYKEFIVDLKDRLRQQAKAKGARLRRYNELTKRKQQNAEYARDRKKFFRSLEKPSEISSNHQADINNDEFRQYWSSLWSESGQLQRNTSWLMDIEHQASEIVEMKTDLFTVEEISNIVKNTSNWKAPGPDRLHNFWVKQFPACFPSLARCFSEALEDPFKIPTFLTQGNTHMLHKRGDRSKPENYRPITCLSVVYKLFTTLVNNAIYRHCEANNILEEEQKGCSRGSAGCKHQLTIDAVVLKQAQARRRNLSLCYIDYQKAFDTVPHDWLLKVLEIYKICPKIKAVLQHLMSTWKTNILINNINAGTVKISRGIFQGDALSPMWFCIALNPLSTLLKNTNIGYRPAMRNPRKLSHLLYMDDLKLFGENQKQLHSLIDIVRSFSKDIDMSFGIDKCAIVNIRKGKMENTQEQFQDIHSMLPEETYKYLGIPQNQRIDHTRLKAEFTAKYKSRVTKVLNTKLSARNQIDALNSWATPALTYTFGVLKWSDADLNELDRLTRRLMTKFRCLHTNASVKRLYLPRRDGGRGLLNIYKLCRTQEKNLRQRLLESEDSLMKLVTTEDKGYTPLNLQHRELTFDITTRSEDISIWRDQALHGRFPKHLEGENVDKLASLSWLNAGQLYPETEGFLTAIQDRVIRTRNYEKHCLKLNVEDKCRKCGAVGESIEHVIAGCRVLADNAYLGRHNQVAKIVHQQLALRHGFLDTCPPYYKYQPAAVLETDAAVLYWDRPITTDRSVDYNRPDLVFIEKDQKYGVIIDVAVPLTHNIGRTESEKITKYENLAMELKNMWQLSKVTIIPLVISAEGVMSKSFKKNLQKIEISQRIAGYAQQAVALQTCHIVRKFLN

SEQ ID NO: 15143 - protein, 1254 aa, Adalia bipunctata
MFFHWFIEVIPARAETGRPMMKNNNNNARVWCGLCHATWGVTSPRPELPGPPRVNGGKPMKMERILSLGRESLPGERQGMSGADAGHDSMRSVGGRVLRKRAPVIQQNTAPRQQREVETDIMAEDRNATPPAGSTTVRRTARRGARNARIKWSREMNIEVMRAFYYVNNCDDKPLPGWRYSLYTEFTKRHPELQLTEGNIADRKNVIVRKGYLTRQELDEIKREMGYTINQEQIVGSQNEEPTEQLERPADTARDLSVTRTTHQDSPQYRQLYDTFYSNLAQYESTDPLNRPILPKLNFNSTAKNNMERLNEILAEHLSTQWTLEQVHLSLYCAAITVIGQNGQKIYIPRTSEQKVKNETPAWKRRLMQDVDKLRGKVDVLDEFLRENKSRKVLNKVRKIAISAGLDLESPRHRELIVDLKDRLRQQAKAKGARLRRYNELTKRKQQNAEYLRDRKRFFRSLEKPSEISSNQHADINNEEFRQYWSSLWSESGQLRRNTSWLTDIEHQASEIVEMKTDLFTVEEISNIVKNTSNWKATGPDRLHNFWVKQFPACFPSLARCFSEALEDPFKIPTFLTQGNTYMLHKRGDRSKPENYRPITCLSVVYKLFTTLVNNAIYRHCEANNILEEEQKGCSRGSAGCKHQLTIDAVVLKQAQARRRNLSLCYIDYQKAFDTVPHDWLVRVLEIYKICPKIKAVLQHLMSTWKTNILINNINAGTVKISRGIFQGDALSPMWFCIALNPLSTLLKNTNIGYRPAMRNPRKLTHLLYMDDLKLFGENQKQLHSLIDIVRSFSTDIDMSFGLDKCAIVNIRKGKMENTQEQFQDIHSMLPEETYKYLGIPQNQRIDHTRLKAEFTAKYKNRVTKVLNTKLSARNQIDALNSWATPALTYTFGVLKWSDADLNELDRLTRRLMTKFRCLHTNASVKRLYLPRRDGGRGLLNIYKLCRTQEKNLRQRLLESEDSLMKLVTTEDKGYTPLNLQHRELTFDITTRSEDISTWREQALHGRFPKHLEGENVDKLASLSWLNAGQLYPETEGFLMAIQDRVIRTRNYEKHCLKLNVEDKCRKCGAFGESIEHIIAGCRVLADNAYLGRHNQVAKIVHQQLALRHGFLDICPPYYKYQPAAVLETDTAVLYWDRPITTDRSVDYNRPDLVFIEKDQKYGVIIDVAVPLTHNIGKTESEKITKYENLAMELKNMWQLSKVTIIPLVISAEGVMSKSFKRNLQKIELSQRIAGYAQQAVALQTCHIVRKFLN

SEQ ID NO: 15144 - protein, 1133 aa, Adalia bipunctata
MAEDQNATPPAGSTTVRRTAHRGARNTRIKWSREMNVEVMRAFYYVNNCDDKPLPGWRYSLYTEFTKRHPELQLTEGNIADRKNVIIRKGYLTRQELDEIKREMGYTINQEQIVGIQNEEPTEPLERPADTARDLSVTRTAHQDSPQYRQLYDTFYSNLAQYESTDPLNRPILPKLNFNSTAKNNIERLNEILAEHLSTQRTLEQVHLFLYCAAITVLGQNGQKIYTPRTSEQKVKNQTPAWKRRLMQDVDKLRGKVDVLDEFLKDNKSRKVLNKVRKIATSAGLDLESPRYKEFIVDLKDRLRQQAKAKGARLRRYNELTKQKQQNAEYVRDRKKFFRSLEKPSEISSNQQADINNDEFRQYWSSLWSESGQLQRNTSWLMDIEHQASEIVEMKTDLFTVEEISNIVKNTSNWKAPGPDRLHNFWVKQFPACFPSLARCFSEALEDPFKIPTFLTQGNSHMLHKRGDRSKPENYRPITCLSVVYKLFTTLVNNAIYRHCEANNILEEEQKGCSRGSAGCKHQLTIDAVVLKQAQARRRNLSLCYIDYQKAFDTVPHDWLLKVLEIYKICPKIKAVLQHLMSTWKTNILINNINAGTVKISRGIFQGDALSPMWFCIALNPLSTLLKNTNIGYRPAMRNPRKLTHLLYMDDLKLFGENQKQLHSLIDIVRSFSKDIDMSFGIDKCAIVNIRKGKMENTQEQFQDIHSMLPEETYKYLGIPQNQRIDHTRLKAEFTAKYKSRVTKVLNTKLSARNQIDALNSWATPALTYTFGVLKWSDADLNELDRLTRRLMTKFRCLHTNASVKRLYLPRRDGGRGLLNIYKLCRTQEKNLRQRLLESEDSLMKLVTTEDKGYTPLNLQHKELTFDITTRSEDISIWREQALHGRFPKHLEGENVDKLASLSWLNAGQLYPETEGFLTAIQDRVIRTRNYEKHCLKLNVEDKCRKCGAVGESIEHVIAGCRVLADNAYLGRHNQVAKIVHQQLALRHGFLDTCPPYYKYQPAAVLETDAAVLYWDRPITTDRSVDYNRPDLVFIEKDQKYGVIIDVAVPLTHNIGRTESERITKYENLAMELKNMWQLSKVTIIPLVISAEGVMSKSFKKNLQKIEISQRIAGYAQQAVALQTCHIVRKFLN

SEQ ID NO: 15145 - protein, 740 aa, Adalia bipunctata
MKTDLFTVEEISNIVKNTSNWKAPGPDRLHNFWVKQFPACFPSLARCFSEALEDPFKIPTFLTHGNTYMLHKRGDRSKPENYRPITYLSVVYKLFTTLVNNAIYRHCEANNILEEEQKGCSRGSAGCKHQLTIDAVVLKQAQARRRNLSLCYIDYQKAFDTVPHDWLVGVLEIYKICPKIKAVLQHLMSTWKTNILINNINAETVKISRGIFQEDALSPMWFCIALNPLSTLLKNTNIGYRPAMRNPRKLTHLLYMDDLKLFGENQKQLHSLIDIVRSFSTDIDMSFGLDKCAIVNIRKGKMENTQEQFQDIHSMLSEETYKYLGIPQNQRIDHTRLKAEFTAKYKNRVTKVHNTKLSAKNQIYALNSWATPALTYTFGVLKWSDADLNELDRLTRRLMTKFRCLHTNASVKRLNLPRRYGGRGLLNIYKLCRTQEKNLRQRLLESEDSLMKLVTTEDKGYTPLNLQHRELTFDITTRSEDISTWREQALHGRFPKHLEGENVDKLASLSWLNAGQLYPETEGFLMAIQDRVIKTRNYEKHCLKLNVEDKCRKCGAFGESIEHIIAGCRVLADNAYLGRHNQVAKIVHQQLALRHGFLDTCPPYYKYQPAAVLETDAAVLYWDRPITTDRSVDYNRPDLVFIEKDQKYGVIIDVAVPLTQNIGRTESEKITKYENLAMELKNMWQLSKVTIIPLVISAEGVMSKSFKKNLQKIEISERIAGYAQQAVALQTCHIVRKFLN

SEQ ID NO: 15146 - protein, 1194 aa, Adalia bipunctata
MKMVNESSLGKESLPGERQGMSGADARHDSMRSVGGRVLRKRAPVIQQNTAPPEHREVESQNMAEDPNATSPAGSTTVRRTARRGARNARIKWSREMNIEVMRAFYYVNNCDDRPLPGWRYSLYTEFTKRHPELQLTEGNIADRKNVIIRKGYLTRQELDEIKREMGYTINQDQIVGNHNEEPSEPLETPAETARVPVTRTAHQECPQYRQLYDTFFGNLAQYETTDPLNRPILPKLKFNSTAKNNIEWLNEILAEHLSTQWTLEQVHLSLYCAAITVIGQNGQKIYIPRTSEQKVKNETPAWKKRLMQDVDKLRGKVDVLDEFLRNNKSRKVLNKVRKIATSAGLDLESPRHRELVVDLKDRLRQQAKAKGARLRRYNELTKRKQQNAEYARDRKKFFRSLEKPSEISSDQQADVNNDEFRQYWSSLWSESGQLRRNTSCLRDIEQHASEIVEMRTDIFTVEDISNIIKNTSNWKAPGPDRLQNFWVKQFPACFPSLARCFSEALEDPLKLPAFLTQGNTYMLHKKGDLNNPENYRPITCLSVVYKLFTSLVNNAIYRHCEANNILEEEQKGCSRGSAGCKHQLTIDAVVLKQAQARRRNLSLCYIDYQKAFDTVPHDWLVKVLEIYKICPKIQAVLQHLMSTWRTNILINNINAGTVKISRGIFQGDALSPMWFCMALNPLSTLLKNTNIGYRPAMRNPRKLSHLLYIDDLKLFGENQKQLHSLIDIVRSFSTDIDMSFGLDKCAIVNIRKGKMENTQEQFQDIHSLLPEETYKYLGIPQNQRIDHTRLKAEFTAKYKNRVTKVLNTKLSAKNQIDALNSWATPALTYTFGVLKWSDADLNELDRLTRRLMTKFRCLHTNASVKRLYLPRRDGGRGLLNIYKLCRTQEKNLRQRLLESEDSLMKLVTTEDKGYTPLNLQHRELTFDITTRREDISIWREQALHGRFPKHLEGENVDKLASLAWLNAGQLYPETEGFLTAIQDRVIRTRNYEKHCLKLNVEDKCRKCGAVGESIEHIIAGCRVLADNAYLGRHNQVAKIVHQQLALRHGFLDTCPPYYKYQPAAVLETDTAVLYWDRPITTDRSVDYNRPDLVFIEKDQKYGVIIDVAVPLTHNIGRTESEKITKYENLAMELKNMWQLSKVTIIPLVISAEGVMSKSFKKNLQKIEISQRIAGYAQQAVVLQTCHIVRKFLN

SEQ ID NO: 15147 - protein, 1195 aa, Adalia bipunctata
MKMVNLMSLGNESLPGERQGMSGADAGHDSMRSVGGRVLRKRAPVIQQNTAPPEHQEVESQNMAEDQNATPPADSTTVRRTARRGARNARIKWSREMNIEVMRAFYYVNNCDDKPLPGWRYSLYTEFTKRHPELQLTEGNIADRKNVIIRKSYLTRQELDEIKREMGYTINQDQIVGNQNEEPTEPLERPADTARDLSVTRTTHQDSPQYRQLYDTFHSNLAQYEYTDPLNRPILPKLNFNSTAKNNIERLNEILAEHLSTQWTLEQVHLSLYCAAITVIGQNGQKIYIPRTSEQKVKNETPAWKRRLMQDVDKLRGKVDVLDEFLKDNKSRKVLNKVRKIATSAGVDLRSPRHKELIVELKDRLRQQAKAKGARLRRYNELSKRKQQNAEYVKDRKKFFRSLEKPSEIYSNLHAGISNGEFRQYWSSLWSETGRFQGNTSWLRDIEHQASEIVEMRTDLFTVEEISNIVKNTSNWKAPGPDRLHNFWVKQFTSCFPSLARCFSEALEDPVKIPTFLTQGNSYMLHKRGDRSKPDNYRPITCLSVLYKLFTSLVNNAIYRHCEANNILEEEQKGCSRGSAGCKHQLTIDAVVLKQAQARRRNLSLCYIDYQKAFDTVPHDWLVKVLEIYKICPKIKAVLQHLMSTWRTNILINNINAGTVKISRGIFQGDALSPMWFCMALNPLSTLLKNTNIGYRPAMRNPRKLSHLLYIDDLKLFSENQNQLHSLIDIVRSFSRDIDMSFGLDKCAIINIKKGKMENTQEQFQDICSLLPEETYKYLGIPQNQRIDHTRLKAEFTAKYKNRVTKVLNTKLSAKNQIDALNSWATPALTYTFGVLKWSDADLNELDRLTRRLMTKFRCLHTNASVKRLYLPRRDGGRGLLNIYRLCRTQEKNLRWRLLESEDSLMKLVTTEDKGYTPLNLQHRELTFDISTRSEDRSLWREQALHGRFPKHLEGENVDKLASLSWLNAGHLYPETEGFLTAIQDRVIRTRNYEKHCLKLNVEDKCRKCGAVGESIEHVIAGCRVLADNAYLGRHNQVAKIVHQQLALRHGFLDTCPPYYKYQPAAVLETDAAVLYWDRPITTDRTVDYNRPDLVFIEKDQKYGVIIDVAVPLTHNIGKTESEKITKFENLAIELKNMWQLSKVTIIPLVISAEGVMSKSFKRNLQKIELSQRIAGYAQQAVALQTCHIVRKFLN

SEQ ID NO: 15148 - protein, 1195 aa, Adalia bipunctata
MKMVKLMSLGNESLPGERQGMSGADAGHDSMRSVGGRVLRKRAPVIQQNTAPPEHQEVESQNMAEDQNATPPAGSTTVRRTARRGARNTRIKWSREMNIEVMRAFYYVNNCDDKPLPGWRYSLYTEFTRRHPELQLTEGNIADRKNVIIRKSYLTRQEPDEIKREMGYTINQEQIVGNQNEEPTEPLERPADTARDLSVTRTAHQDSPQYRQLYDTFHSNLAQYESTDPLNRPILPKLNFNSTAKNNIERLNEILAEHLSTQWTLEQVHLSLYCAAITVIGQNGQKIYIPRPSEQKVKNETPAWKKRLMQDVDKLRGKFDVLDEFLKDNKSRKVLNKVRKIAASAGVDLRSPRHKELMVELKDRLRQQAKAKGARLRRYNELTKRKQQNAEYVRDRKKFFRSLEKPSEISSNLHAGISNGEFRQYWSSLWSETGRFQGNTSWLRDIEHQASEIVEMRTDLFTVEEISNIVKNTSNWKAPGPDRLHNFWVKQFTSCFPSLARCFSEALEDPIKIPTFLTQGNSYMLHKRGDRSKPDNYRPITCLSVLYKLFTSLVNNAIYRHCEANNILEEEQKGCSRGSAGCKHQLTIDAVVLKQAQARRRNLSICYIDYQKAFDTVPHDWLVKVLEIYKICPKIKAVLQHLMSTWRTNILINNINAGTVKISRGIFQGDALSPMWFCMALNPLSTLLKNTNIGYRPAMRNPRKLSHLLYIDDLKLFGENQNQLHSLIDIVRSFSRDIDMSFGLDKCAIINIKKGKMENTQEQFQDICSMLPEETYKYLGIPQNQRIDHTRLKAEFTAKYKNRVTKVLNTKLSAKNQIDALNSWATPALTYTFGVLKWSDADLNELDRLTRRLMTKFRCLHTNASVKRLYLPRRDGGRGLLNIYRLCRTQEKNLRRRLLESEDSLMKLVTTEDKGYTPLNLQHRELTFDITTRSEERSLWREQALHGRFPKHLEGENVDKLASLSWLNAGHLYPETEGFLTAIQDRVIRTRNYEKHCLKLNVEDKCRKCGAVGESIEHVIAGCRVLADNAYLGRHNQVAKIVHQQLALRHGFLDTCPPYYKYQPAAVLETDAAVLYWDRPITTDRTVDYNRPDLVFIEKDQKYGVIIDVAVPLTHNIGKMESEKITKYENLAIELKNMWQLSKVTIIPLVISAEGVMSKSFKRNLQKIELSQRIAGYAQQAVALQTCHIVRKFLN

SEQ ID NO: 15149 - protein, 1195 aa, Adalia bipunctata
MKMVKLMSLGNESLPGERQGMSGADAGHDSMRSVGGRVLRKRAPVIQQNTAPPEHQEVESQNMAEDQNATPPAGSTTVRRTARRGARNTRIKWSREMNIEVMRAFYYVNNCDDKPLPGWRYSLYTEFTRRHPELQLTEGNIADRKNVIIRKSYLTRQELDEIKREMGYTINQEQIVGNQNEEPTEPLERPADTARDLSVTRTAHQDSPQYRQLYDTFHSNLAQYESTDPLNRPILPKLNFNSTAKNNIERLNEILAEHLSTQWTLEQVHSSLYCAAITVIGQNGQKIYIPRPSEQKVKNETPAWKKRLMQDVDKLRGNVDVLDEFLKDNKSRKVLNKVRKIAASAGVDLRSPRHKELVVELKDRLRQQAKAKGARLRRYNELTKRKQQNAEYVRDRKKFFRSLEKPSEISSNLHAGISNGEFRQYWSSLWSETGRFQGNTSWLRDIEHQASEIVEMRTDLFTVEEISNIVKNTSNWKAPGPDRLHNFWVKQFTSCFPSLARCFSEALEDPIKIPTFLTQGNSYMLHKRGDRSKPDNYRPITCLSVLYKLFTSLVNNAIYRHCEANNILEEEQKGCSRGSAGCKHQLTIDAVVLKQAQARRRNSSICYIDYQKAFDTVPHDWLVKVLEIYKICPKIKAVLQHLMSTWRTNILINNINAGTVKISRGIFQGDALSPMWFCMALNPLSTLLKNTNIGYRPAMRNPRKLSHLLYIDDLKLFGENQNQLHSLIDIVRSFSRDIDMSFGLDKCAIINIKKGKMENTQEQFQDICSMLPEETYKYLGIPQNQRIDHTRLKAEFTAKYKNRVTKVLNTKLSAKNQIDALNSWATPALTYTFGVLKWSDADLNELDRLTRRLMTKFRCLHTNASRKKLYLPRRDGGRGLLNIYRLCRTQEKNLRRRLLESEDSLMKLVTTEDKGYTPLNLQHRELTFDITTRSEERSLWREQALHGRFPKHLEGENVDELASLSWLNAGHLYPETEGFLTAIQDRVIRTRNYEKHCLKLNVEDKCRKCGAVGESIEHVIAGCRVLADNAYLGRHNQVAKTVHQQLALRHGFLDTCPPYYKYQPAAVLETDAAVLYWDRPITTDRTVDYNRPDLVFIEKDQKYGIVIDVAVPLTHNIGRTESEKITKYENLAIELKNMWQLSKVTTIPLVISTEGVMSKSFKRNLQKIELSQRIAGYAQQAVALQTCHIVRKFLN

SEQ ID NO: 15150 - protein, 1195 aa, Adalia bipunctata
MKMENKSSLGKESLPGERQGMSGADAGHDSMRSVGGRVLRKRAPVIQQNTAPPEHQEVESQNMAEDQNATPPAGSTTVRRTACRGARNTRIKWSREMNVEVMRAFYYVNNCDDKPLPGWRYSLYTEFTKRHPELQLTEGNIADRKNVIIRKGYLTRQELDEIKREMGYTINQEQIVGIQNEEPTEPLERPADTARDLSVTRTAHQDSPQYRQLYDTFYSNLAQYESTDPLNRPILPKLNFNSTAKNNIERLNEILAEHLSTQWTLEQVHLSLYCAAITVLGKNGQKIYTPRTSEQKVKNQTPAWKRRLMQDVDKLRGKVDVLDEFLKDNKSRKVLNKVRKIATSAGLDLESSRYKEFIVYLKDRLRQQAKAKGARLRRYNELTKRKQQNAEYVRDRKKFFRSLEKPSEISSDQQADINNDEFRQYWSSLWSESGQLQRNTSWLMDIEHQASEIVEMKTDLFTVEEISNIVKNTSNWKAPGPDRLHNFWVKQFPACFPSLARCFSEALEDPFKIPTFLTQGNSHMLHKRGDRSKPENYRPITCLSVVYKLFTTLVNNAIYRHCEANNILEEEQKGCSRGSAGCKHQLTIDAVVLKQAQARRRNLSLCYIDYQKAFDTVPHDWLLKVLEIYKICPKIKAVLQHLMSTWKTNILINNINAGTVKISRGIFQGDALSPMWFCIALNPLSTLLKNTNIGYRPAMRNPRKLTHLLYMDDLKLFGENQKQLHSLIDIVRSFSKDIDMSFGIDKCAIVNIRKGKMENTQEQFQDIHSMLPEETYKYLGIPQNQRIDHTRLKAEFTAKYKSRVTKVLNTKLSARNQIDALNSWATPALTYTFGVLKWSDADLNELDRLTRRLMTKFRCLHTNASVKRLYLPRRDGGRGLLNIYKLCRTQEKNLRQRLLESEDSLMKLVTTEDKGYTPLNLQHRELTFDITTRSEDISIWREQALHGRFPKHLEGENVDKLASLSWLNAGQLHPETEGFLTAIQDRVIRTRNYEKHCLKLNVEDKCRKCGAVGESIEHVIAGCRVLADNAYLGRHNQVAKIVHQQLALRHGFLDTCPPYYKYQPAAVLETDTAVLYWDRPITTDRSVDYNRPDLVFIEKDQKYGVIIDVAVPLTHNIGRTESEKITKYENLAMELKNMWQLSKVTIIPLVISAEGVMSKSFKKNLQKIEISQRIAGYAQQAVALQTCHIVRKFLN

SEQ ID NO: 15151 - protein, 1195 aa, Adalia bipunctata
MKMVKLMSLGNESLPGERQGMSGADAGHDSMRSVGGRVLRKRAPVIQQNTAPPEHQEVESQNMAEDQNATPPAGSTTVRRTARRGARNTRIKWSREMNIEVMRAFYYVNNCDDKPLPGWRYSLYTEFTRRHPELQLTEGNIADRKNVIIRKSYLTRQELDEIKREMGYTINQEQIVGNQNEEPTEPLERPADTARDLSVTRTAHQDSPQYRQLYDTFHSNLAQYESTDPLNRPILPKLNFNSTAKNNIERLNEILAEHLSTQWTLEQVHLSLYCAAITVIGQNGQKIYIPRPSEQKVKNETPAWKKRLMQDVDKLRGKVDVLDEFLKDNKSRKVLNKVRKIAASAGVDLRSPRHKELMVELKDRLRQQAKAKGARLRRYNELTKRKQQNAEYVRDRKKFFRSLEKPSEISSNLHAGISNGEFRQYWSSLWSETGRFQGNTSWLRDIEHQASEIVEMRTDLFTVEEISNIVKNTSNWKAPGPDRLQNFWVKQFPACFPSLARCFSEALEDPIKIPTFLTQGNSYMLHKRGDRSKPDNYRPITCLSVLYKLFTSLVNNAIYRHCEANNILEEEQKGCSRGSAGCKHQLTIDAVVLKQAQARRRNLSICYIDYQKAFDTVPHDWLVKVLEIYKICPKIKAVLQHLMSTWRTNILINNINAGTVKISRGIFQGDALSPMWFCMALNPLSTLLKNTNIGYRPAMRNPRKLSHLLYIDDLKLFGENQNQLHSLIDIVRSFSRDIDMSFGLDKCAIINIKKGKMENTQEQFQDICSMLPEETYTYLGIPQNQRIDHTRLKAEFTAKYKNRVTKVLNTKLSAKNQIDALNSWATPALTYTFGVLKWSDADLNELDRLTRRLMTKFRCLHTNASVKRLYLPRRDGGRGLLNIYRLCRTQEKNLRRRLLESEDSLMKLVTTEDKGYTALNLQHRELTFDITTRSEERSLWREQALHGRFPKHLEGENVDKLASLSWLNAGHLYPETEGFLTAIQDRVIRTRNYEKHCLKLNVEDKCRKCGAVGESIEHVIAGCRVLADNAYLGRHNQVAKIVHQQLALRHGFLDTCPPYYKYQPAAVLETDAAVLYWDRPITTDRTVDYNRPDLVFIEKDQKYGVIIDVAVPLTHNIGKTESEKITKYENLAIELKNMWQLSKVTIIPLVISAEGVMSKSFKRNLQKIELSQRIAGYAQQAVALQTCHIVRKFLN

SEQ ID NO: 15152 - protein, 1195 aa, Adalia bipunctata
MKMEPSLSLGNESLPGERQGMSGADAGHDSMRSVGGRVLRKRAPVIQQNTAPLQQREVEPDIMAENRNATPPAGSTTVRRTVRRGARNARIKWSREMNIEVMRAFYYVNNCDDKPLPGWRYSLYTEFTKRHPELQLTEGNIADRKNVIIRKGYLTRQELDGIKREMGYTLNQEQIVGNQNEEPDEPLERPAETARELSVTRTARQDCPQYRQLYETFHSNLTRYESTDPLNRPILPKLTFNSTAKNNIEWLNEILAEHLSTQWPLEQVHLSLYCAAITVIGQNGQKIYIPRTSEQKVKNETPAWKRRLMQDVDKLRGKVDVLNEFLKDNKSRKVLNKVRKIATSAGVDLESPRHKDLIVELKDRLRQKAKAKGARLRRYNELSKRKQQNAEYVRDRKKFFRSLEKPSEISSNMHADINNDEFRQYWSSLWSESGQFQRNTSWLGDIEHQASEIVEMRTDLFTAEEISNIIKKTSNWKAPGPDRLHNFWIKQFPACFPSLARCFSEALEDPFKIPTFLTQGNTYMLHKRGDRSKPDNYRPITCLSVVYKLFTSLVNNAIYHHCEANNILEEEQKGCSRGSAGCKHQLTIDAVVLKQAQARRRNLSLCYIDYQKAFDTVPHDWLVKVLEIYKICPKIKAVLQHLMSTWRTNILINNVNAGTVKISRGIFQGDALSPMWFCMALNPLSTLLKNTNMGYRPAMRNPRKLSHLLYIDDLKLFGESQNQLHSLIDIVRSFSRDIDMSFGLDKCAIVNIRKGKMENTQEQFQDICSMLPEETYKYLGIPQNQRIDHTRLKTEFTEKYRNRVTKVLNTKLSAKNQIDALNSWATPALTYTFGVLKWSDADLNELDRLTRRLMTKFRCLHTNASVKRLYLPRRDGGRGLVNIYRLCRTQEKNLRQRLLESEDSLMKLVTTEDKGYTPLNLQHRELTFDITTRSEDRRLWREQALHGRFPKHLEGENVDKLASLSWLSAGHLYPETEGFLTAIQDRVIRTRNYEKHCLKLNVEDKCRKCGAAGESIEHVIAGCRVLADNAYLGRHNQVAKIVHQQLALRHGFLDTCPPYYKYQPAAVLETDAAVLYWDRPITTDRSVDYNRPDLVFIEKDQKYGVIIDVAVPLTHNIGKTESEKITKYENLAIELKNMWQLSKVTIIPLVISAEGVMSKSFKRNLQKIELSQRIAGYAQQAVALQTCHIVRKFLN

SEQ ID NO: 15153 - protein, 1233 aa, Adalia bipunctata
MIIIIITARVWCGFCHATWGVTSPRPELPGPPRVNGGKPMKMVNESSLGKESLPGERQGMSGADARHDSMRSVGGRVLRKRAPVIQQNTAPPEHREVESQNMAEDPNATSPAGSTTVRRTARRGARNARIKWSREMNIEVMRAFYYVNNCDDRPLPGWRYSLYTEFTKRHPELQLTEGNIADRKNVIIRKGYLTRQELDEIKREMGYTINQDQIVGNHNEEPSEPLETPAETARVPVTRTAHQEYPQYRQLYDTFFGNLAQYETTDPLNRPILPKLKFNSTAKNNIEWLNEILAEHLSTQWTLEQVHLSLYCAAITVIGQNGQKIYIPRTSEQKVKNETPAWKKRLMQDVDKLRGKVDVLDEFLRNNKSRKVLNKVRKIATSAGLDLESPRHRELVVDLKDRLRQQAKAKGARLRRYNELTKRKQQNAEYARDRKKFFRSLEKPSEIFSNQHADINNEEFRQYWSSLWSESGQLQRNTSWLTDIEHQASEIVEMKTDLFTVEEISNIVKNTSNWKAPGPDRLHNFWVKQFPACFPSLARCFSEALEDPFKIPTFLTQGNTYMLHKRGDRSKPENYSPITCLSVVYKLFTTLVNNAIYRHCEANNILEEEQKGCSRGSAGCKHQLTIDAVVLKQAQARRRNLSLCYIDYQKAFDTVPHDWLVRVLEIYKICPKIKAVLQHLMSTWKTNILINNINAGTVKISRGIFQGDALSPMWFCIALNPLSTLLKNTNIGYRPAMRNPRKLTHLLYMDDLKLFGENQKQLHSLIDIVRSFSTDIDMSFGLDKCAIVNIRKGKMENTQEQFQDIHSMLPEETYKYLGIPQNQRIDHTRLKAEFTAKYKNRVTKVLNTKLSARNQIDALNFWATPALTYTFGVLKWSDADLNELDRLTRRLMTKFRCLHTNASVKRLYLPRRDGGRGLLNIYKLCRTQEKNLRQRLLESEDSLMKLVTTEDKGYTPLNLQHRELTFDITTRSEDISTWREQALHGRFPKHLEGENVDKLASLSWLNAGQLYPETEGFLMAIQDRVIRTHNYEKHCLKLNVEDKCRKCGAFGESIEHIIAGCRVLADNAYLGRHNQVAKIVHQQLALRHGFLDTCPPYYKYQPAAVLETDAAVLYWDRPITTDRSVDYNRPDLVFIEKDQKYGVIIDVAVPLTHNIGKTESEKITKYENLAMELKNMWQLSKVTIIPLVISAEGVMSKSFKKNLQKIEISQRIAGYAQQAVALQTCHIVRKFLS

SEQ ID NO: 15154 - protein, 1030 aa, Adalia bipunctata
MGYTINQEQIVGNQNEEPTEPLERPADTARDLSATRTAHQDSPQYRQLYDTFHSNLAQYESTDPLNRPILPKLNFNSTAKNNIERLNEILAEHLSTQWTLEQVHLSLYCAAITVIGQNGQKIYIPRPSEQKVKNETPAWKKRLMQDVDKLRGKVHVLDEFLKDNKSRKVLNKVRKIAASAGVDLRSPRHKELMVELKDRLRQQAKAKGARLRRYNELTKRKQQNAEYVRDRKKFFRSLEKPSEISSNLHAGISNGKFRQYWSSLWSETGRFQGNTSWLRDIEHQASEIVEMRTDLFTVEEISNIVKNTSNWKAPGPDRLHNFWVKQFTSCFPSLARCFSEALEDPIKIPTFLTQGNSYMLHKRGDRSKPDNYRPITCLSVLYKLFTSLVNNAIYRHCEANNILEEEQKGCSRGSAGCKHQLTIDAVVLKQAQARRRNLSICYIDYQKAFDTVPHDWLVKVLEIYKICPKIQAVLQHLMSTWRTNILINNINAGTVKISRGIFQGDALSPMWFCMALNPLSTLLKNTNIGYRPAMRNPRKLSHLLYIDDLKLFGENQNQLHSLIDIVRSFSRDIDMSFGLDKCAIINIKKGKMENTQEQFQDICSMLPEETYKYLGIPQNQRIDHTRLKAEFTAKYKNRVTKVLNTKLSAKNQIDALNSWATPALTYTFGVLKWSDADLNELDRLTRRLMTKFRCLHTNASVKRLYLPRRDGGRGLLNIYRLCRTQEKDLRRRLLESEDSLMKLVTTEDKGYTPLNLQHRELTFDITTRSEERSLWREQALHGRFPKHLEGENVDKLASLSWLNAGHLYPETEGFLTAIQDRVIRTRNYEKHCLKLNVEDKCRKCGAVGESIEHVIAGCRVLADNAYLGRHNQVAKIVHQQLALRHGFLDTCPPYYKYQPAAVLETDAAVLYWDRPITTDRTVDYNRPDLVFIEKDQKYGVIIDVAVPLTHNIGKTESEKITKYENLAIELKNMWQLSKVTIIPLVISAEGVMSKSFKRNLQKIELSQRIAGYAQQAVALQTCHIVRKFLN

SEQ ID NO: 15155 - protein, 1195 aa, Adalia bipunctata
MKMENKSSLGKESLPGERQGMSGADAGHDSMRSVGGRVLRKRAPVIQQNTAPPEHQEVESQNMAEDQNATPPAGSTTVRRTARRGARNTRIKWSREMNVEVMRAFYYVNNCDDKPLPGWRYSLYTEFTKRHPELQLTEGNIADRKNVIIRKGYLTRQELDEIKREMGYTINQEQIVGIQNEEPTEPLERPADTARDLSVTRTAHQDSPQYRQLYDTFYSNLAQYESTDPLNRPILPKLNFNSTAKNNIERLNEILAEHLSTQWTLEQVHLSLYCAAITVLGQNGQKIYTPRTSEQKVENQTPAWKRRLMQDVDKLRGKVDVLDEFLKDNKSRKVLNKVRKIATSAGLDLESPRYKEFIVDLKDRLRQQAKAKGARLRRYNELTKRKQQNAEYVRDRKKFFRRLEKPSEISSNQQTDINNDEFRQYWSSLWSESGQLQRNTSWLMDIEHQASEIVEMKTDLFTVEEISNIVKNTSNWKAPGPDRLHNFWVKQFPACFPSLARCFSEALEDPFKIPTFLTQGNSHMLHKRGDRSKPENYRPITCLSVVYKLFTTLVNNAIYRHCEANNILEEEQKGCSRGSAGCKHQLTIDAVVLKQAQARRRNLSLCYIDYQKAFDTVPHDWLLKVLEIYKICPKIKAVLQHLMSTWKTNILINNINAGTVKISRGIFQGDALSPMWFCIALNPLSTLLKNTNIGYRPAMRNPRKLTHLLYMDDLKLFSENQKQLHSLIDIVRSFSKDIDMSFGIDKCAIVNIRKGKMENTQEQFQDIHSMLPEETYKYLGIPQNQRIDHTRLKAEFTAKYKSRVTKVLNTKLSARNQIDALNSWATPALTYTFGVLKWSDADLNELDRLTRRLMTKFRCLHTNASVKRLYLPRRDGGRGLLNIYKLCRTQEKNLRQRLLESEDSLMKLVTTEDKGYTPLNLQHRELTFDITTRSEDISIWREQALHGRFPKHLEGENVDKLASLSWLNAGQLYPETEGFLTAIQDRVIRTRNYEKHCLKLNVEDKCRKCGAVGESIEHVIAGCRVLADNAYLGRHNQVAKIVHQQLALRHGFLDTCPPYYKYQPAAVLETDAAVLYWDRPITTDRSVDYNRPDLVFIEKDQKYGVIIDVAVPLTHNIGRTESEKITKYENLAMELKNMWQLSKVTIIPLVISAEGVMSKSFKKNLQKIEISQRIAGYAQQAVALQTCHIVRKFLN

SEQ ID NO: 15156 - protein, 1132 aa, Adalia bipunctata
MAADQNATSPAGSTTVRRTARREARNARIKWSREMNIEVMRAFYYVNNCDDRPLPGWRYSLYTEFTKRHPELQLTEGNIADRKNVIIRKGYLTRQELDEIKREMGYTINQDQIVENHNEEPSEPLETPAETARVPVTRTAHQECPQYRQLYDTFFGNLAQYETTDPLNRPILPKLKFNSTAKNNIEWLNEILAEHLSTQWTLEQVHLSLYCAAITVIGQNGQKIYIPRTSEQKVKNETPAWKKRLMQDVDKLRGKVDVLDEFLRNNKSRKVLNKVRKIAKSAGLDLESPRHRELMVDLKDRLRQQAKAKGARLRRYNELSKRKQHNAEYVRDRKKFFRSLEKPSEITSNQHANISNDEFRQYWSSLWSESGQFQRNTSWLRDIEQHASEIVEMRTDIFTVEDISNIIKNTSNWKAPGPDRLQNFWVKQFPACFPSLARCFSEALEDPLKIPAFLTQGNTYMLHKKGDLNNPENYRPITCLSVVYKLFTSLVNNAIYRHCEANNILEEEQKGCSRGSAGCKHQLTIDAVVLKQAQARRRNLSLCYIDYQKAFDTVPHDWLVKVLEIYKICPKIQAVLQHLMSTWRTYILINNINAGAVKISRGIFQGDALSPMWFCMALNPLSTLLKNTNIGYRPAMRNPRKLSHLLYIDDLKLFGENQKQLHSLIDIVRSFSTDIDMSFGLDKCAIVNIRKGKMENSQEQFQDIHSMLPEETYKYLGIPQNQRIDHTRLKAEFTAKYRTRVTKVLNTKLSAKNQIDALNSWATPALTYTFGVLKWSDADLNELDRLTRRLMTKFRCLHTKASVKRLYLPRRDGGRGLLNIYKLCRTQEKNLRQRLLESEDSLMKLVTTEDKGYTPLNLQHRELTFDITTRSEDISIWREQPLHGRFPKHLEGENVDKLASLSWLNAGQLYPETEGFLTAIQDRVIRTRNYEKHCLKLNVKDKCRKCGAVGESIEHIIAGCRVLADNAYLGRHNQVAKIVHQQLALRHGFLDTCPPYYKYQPAAVLETDTAVLYWDRPITTDRTVDFNRPDLVFIEKDQKYGIVIDVAVPLTHNIGRTESEKITKYENLAIELKNMWQLSKVTIIPLVISAEGVMSKSFKRNLQKIELSQRIAGYAQQAVALQTCHIVRKFLN

SEQ ID NO: 15157 - protein, 1098 aa, Adalia bipunctata
MNIEVMRAFYYVNNCDDRPLPGWRYSLYTEFTKRHPELQLTEGNIADRKNVIIRKGYLTRQELDEIKREMGYTINQDQIVGNHNEEPSEPLETPAETARVPVTRTAHQECPQYRQLYDTFFGNLAQYETTDPLNRPILPKLKFNSTAKNNIEWLNEILAEHLSTQWTLEQVHLSLYCAAITVIGQNGQKIYIPRTSEQKVKNETPAWKKRLMQDVDKLRGKVDVLDEFLRNNKSRKVLNKVRKIATSAGLDLESPRHRELVVDLKDRLRQQAKAKGARLRRYNELTKRKQQNAEYARDRKKFFRSLEKPSEISSDQQADVNNDEFRQYWSSLWSESGQLRRNTSWLRDIEQHASEIVEMRTDIFTVEDISNIIKNTSNWKAPGPDRLQNFWVKQFPACFPSLARCFSEALEDPLKIPAFLTQGNTYMLHKKGDLNNPENYRPITCLSVVYKLFTSLVNNAIYRHCEANNILEEEQKGCSRGSAGCKHQLTIDAVVLKQAQARRRNLSLCYIDYQKAFDTVPHDWLVKVLEIYKICPKIQAVLQHLMNTWRTNILINNINVGTVKISRGIFQGDALSPMCFCMALNPLSTLLKNANIGYRPAMRNPRKLSHLLYIDDLKLFGENQKQLHSLIDIVRSFSTDIDMSFGLDKCAIVNIRKGKMENTQEQFQDIHSMLPEETYKYLGIPQNQRIDHTRLKAEFTAKYKNRVTKVLNTKLSAKNQIDALNSWATPALTYTFGVLKWSDVDLNELDRLTRRLMTKFRCLHTNASVKRLYLPRRDGGRGLLNIYKLCRTQEKNLRQRLLESKDSLMKLVTTEDKGYTPLNLQHRELTFDITTRSEDISTWREQALHGRFPKHLEGENVDKLASLSWLNAGQLYPETEGFLMAIQDRVIRTRNYEKHCLKLNVEDKCRKCGAFGESIEHIIAGCRVLADNAYLGRHNQVAKIVHQQLALRHGFLDTCPPYYKYQPAAVLETDAAVLYWDRPITTDRSVDYNRPDLVFIEKDQKYGVIIDVAVPLTHNIGKTESEKITKYENLAMELKNMWQLSKVTIIPLVISAEGVMSKSFKKNLQKIEISQRIAGYAQQAVALQTCHIVRKFLN

SEQ ID NO: 15158 - protein, 913 aa, Adalia bipunctata
MGKRSTPPEPVNRKLKNQTPAWKRRLMQDVDKLRGKVDVLDEFLKDNKSRKVLNKVRKIATSAGLDLESPRYKEFIVDLKDRLRQQAKAKGARLRRYNELTKRKQQNAEYVRDRKKFFRSLEKPSEIPSNQQADINNDEFRQYWSSLWSESGQLQRNTSWLMDIEHQASEIVEMKTDLFTVEEISNIVKNTSNWKAPGPDRLHNFWVKQFPACFPSLARCFSEALEDPFKIPTFLTQGNSHMLHKRRDRSKPENYRPITCLSVVYKLFTTLVNNAIYRHCEANNILEEEQKGCSRGSAGCKHQLTIDAVVLKQAQARRRNLSLCYIDYQKAFDMVPHDWLLKVLEIYKICPKIKAVLQHLMSTWKTNILINNINAGTVKISRGIFQGDALSPMWFCIALNPLSTLLKNTNIGYRPAMRNPRKITHLLYMDDLKLFGENQKQLNSLIDIVRSFSKDIDMSFGVDKCAIVNIRKGKMENTQEQFQDIHSMLPEETYKYLGIPQNQRIDHTRLKAEFTAKYKSRVTKVLNTKLSARNQIDALNSWATPALTYTFGVLKWSDADLNELDRLTRRLMTKFRCLHTNASVKRLYLPRRDGGRGLLNIYKLCRTQEKNLRQRLLESEDSLMKLVTTEDKGYTPLNLQHRELTFDITTRSEDISIWREQALHGRFPKHLEGDNVDKLASLAWLNAGQLYPETEGFLTAIQDRVIRTRNYEKHCLKLNVEDKCRKCGAVGESIEHIIAGCRVLADNAYLGRHNQVAKIVHQQLALRHGFLDTCPPYYKYQPAAVLETDAAVLYWDRPITTDRSVDYNRPDLVFIEKDQKYGVIIDVAVPLTHNIGRTESEKITKYENLAMELKNMWQLSKVTIIPLVISAEGVMSKSFKKNLQKIEISQRIAGYAQQAVALQTCHIVRKFLN

SEQ ID NO: 15159 - protein, 1151 aa, Adalia bipunctata
MKMENKSSLGKESLPGERQGMSGADAGHDSMRSVGGRVLRKRAPVIQQNTAPPEHQEVESQNMAEDQNATPPAGSTTVRRTARRGARNTRIKWSREMNVEVMRAFYYVNNCDDKPLPGWRYSLYTEFTKRHPELQLTEGNIADRKNVIIRKGYLTRQELDEIKREMGYTINQEQIVGIQNEEPTEPLERPADTARDLSVTRTAHQDSPQYRQLYDTFYSNLAQYESTDPLNRPILPKLNFNSTAKNNIERLNEILAEHLSTQWTLEQVHLSLYCAAITVLGQNGQKIYTPRTSEQKVKNQTPAWKRRLMQDVDKIRGKVDVLDEFLKDNKSRKVLNKVRKIATSAGLDLESPRYKEFIVDLKDRLRQQAKAKGARLRRYNELTKRKQQNAEYVRDRKKFFRSLEKPSEISSNQQADINNDGFRQYWSSLWSESGQLQRNTSWLMDIEHQASEIVEMKTDLFTVEEISNIVKNTSNWKAPGPDRLHNFWVKQFPACFPSLARCFSEALEDPFKIPTFLTQGNSHMLHKRGDRSKPENYRPITCLSVVYKLFTTLVNNAIYRHCEANNILEEEQKGCSRGSAGCKHQITIDAVVLKQAQARRRNLSLCYIDYQKAFDTVPHDWLLKVLEIYKICPKIKAVLQHLMSTWKTIILINNINAGTVKISRGIFQGDALSPMWFCIALNPLSTLLKNTNIGYRPAMRNTRKLTHLLYMDDLKLFGENQKQLHSLIDIVRSFSKDIDMSFGIDKCAIVNIRKGKMENTQEQFQDIHSMLPEETYKYLGIPQNQRIDHTRLKAEFTAKYKSRVTKVLNTKLSARNQIDALNSWATPALTYTFGVLKWSDADLNELDRLTRRLMTKFRCLHTNASVKRLYLPRRDGGRGLLNIYKLCRTQEKNLRQRLLESEDSLMKLVTTEDKGYTPLNLQHRELTFDITTRSEDISIWREQALHGRFPKHLEGENIDKLASLSWLNAGQLYPETEGFLTAIQDRVIRTRNYEKHCLKLNVEDKCRKCGAVGESIEHVIAGCRVLADNAYLGRHNQVAKIVHQQLALRHGFLDTCPPYYKYQPAAVLETDAAVLYWDRPITTDRSVDYNRPDLVFIEKDQKYGVIIDVAVPLTHNIGRTESEKKVRELGNGTEEYVAIVESHYYTIGDFG

SEQ ID NO: 15160 - protein, 886 aa, Adalia bipunctata
MQDVDKLRGKVDVLNEFLKDNKSRKVLNKVRKIATSAGVDLESPRHKDLIVELKDRLRQKAKAKGARLRRYNELSKRKQQNAEYVRDRKKFFRRLEKPSEISSNMHADINNDEFRQYWSSLWSESGQFQRNTSWLGDIEHQASEIVEMRTVLFTAEEISNIIKKTSNWKAPGPDRLHNFWIKQFPACFPSLARCFSEALEDPFKIPTFLTQGNTYMLHKRRDRSKPDNYRPITCLSVVYKLFTSLVNNAIYRHCESNNILEEEQKGCSRGSAGCKHQLTIDAVVLKQAQARRRNLSLCYIDYQKAFDTVPHDWLVKVLEIYKICPKIKAVLQHLMSTWRTNILINNINAGTVKISRGIFQGDALSPMWFCMALNPLSTLLKNTNMGYRPAMRNPRKLSHLLYIDDFKLFGESQNQLHSLIDIVRSFSRDIDMSFGLDKCAIVNIRKGKMENTQEQFQDICSMLPEETYKYLGIPQNQRIDHTRLKTEFTEKYRNRVTKVLNTKLSAKNQIDALNSWATPALTYTFGVLKWSDADLNELDRLTRRLMTKFRCLHTNASVKRLYLPRRDGGRGLVNIYRLCRTQEKNLRQRLLESEDSLMKLVTTEDKGYTPLNLQHRELTFDITTRSEDRRLWREQALHGRFPKHLEGENVDKLASLSWLSAGHLYPETEGFLTAIQDRVIRTRNYEKHCLKLNVEDKCRKCAAGESIEHVIAGCRVLADNAYLGRHNQVAKIVHQQLALRHGFLDTCPPYYKYQPAAVLETDAAVLYWDRPITTDRSVDYNRPDLVFIEKDQKYGVIIDVAVPLTHNIGKTESEKITKYENLAIELKNMWQLSKVTIIPLVISAEGVMSKSFKRNLQKIELSQRIAGYAQQAVALQTCHIVRKFLN

SEQ ID NO: 15161 - protein, 1195 aa, Adalia bipunctata
MKMENISSLGKESLPGERQGMSGADAGHDSMRSVGGRVLRKRAPVIQQNTALPEHQEVESQNMAEDQNATPPAGSTTVRRTARRGARNTRIKWSREMNVEVMRAFYFVNNCDDKPLPGWRYSLYTEFTKRHPELQLTEGNIADRKNVIIRKGYLTRQELDEIKREMGYTINQEQIVGIQNEEPTEPLERPADTARDLSVTRTAHQDSPQYRQLYDTFYSNLAQYESTDPLNRPILPKLNFNSTAKNNIERLNEILAEHLSTQWTLEQVHLSLYCAAITVIGQNGQKIYTPRTSEQKVKNQTPAWKRRLMQDVDKLRGKVDVLDEFLKDNKSRKVLNKVRKIATSAGLDLESPRYKEFIVDLKDRLRQQAKAKGARLRRYNELTKRKQQNAEYARDRKKFFRSLEKPSEIPSNQQADINNDEFRQYWSSLWSESGQLQRNTSWLMDIEHQASEIVEMKTDLFTVEEISNIVKNTSNWKAPGPDRLHNFWVKQFPACFPSLARCFSEALEDPFKIPTFLTQGNSHMLHKRGDRSKPENYRPITCLSVVYKLFSTLVNNAIYRHCEANNILEEEQKGCSRGSAGCKHQLTIDAVVLKQAQARRRNLSLCYIDYQKAFDTVPHDWLLKVLEIYKICPKIKAVLQHLMSTWKTNILINNINAGTVKISRGIFQGDALSPMWFCIALNPLSTLLKNTNIGYRPAMRNPRKITPLLYMDDLKLFGENQKQLNSLIDIVRSFSKDIDMSFGVDKCAIVNIRKGKMENTQEQFQDIHSMMPEETYKYLGIPQNQRIDHTRLKAEFTAKYKSRVTKVLNTKLSAKNQIDALNSWATPALTYTFGVLKWSDADLNELDRLTRRLMTKFRCLHTNASVKRLYLPRRDGGRGLLNIYKLCRTQEKNLRQRLLESEDSLMKLVTTEDKGYTPLNLQHRELTFDITTRSEDISIWREQALHGRFPKHLEGENVDKLASLAWLNAGQLYPETEGFLTAIQDRVIRTRNYEKHCLKLNVEDKCRKCGAVGESIEHIIAGCRVLADNAYLGRHNQVAKIVHQQLALGHGFLDTCPPYYKYQPAAVLETDAAVLYWDRPITTDRSVDYNRPDLVFIEKDQKYGVIIDVAVPLTHNIGRTESEKITKYENLAMELKNMWQLSKVTIIPLVISAEGVMSKSFKKNLQKIEISQRIAGYAQQAVALQTCHIVRKFLN

SEQ ID NO: 15162 - protein, 887 aa, Adalia bipunctata
MQDVDKLRGKVDVLDEFLRNNKSRKVLNKVRKIATSAGLDLESPRHRELVVDLKDRLRQQAKAKGARLRRYNELTKRKQQNAEYARDRKKFFRSLEKPSEISSDQQADVNNDEFRPYWSSIWSESGQLRRNTSWLRDIEQHASEIVEMRTDIFTVEDISNIIKNTSNWKAPGPDRLQNFWVKQFPACFPSLARCFSEALEDPLKIPAFLTQGNTYMLHKKGDLNNPENYRPITCLSVVYKLFTSLVNNAIYRHCEANNILEEEQKGCSRGSAGCKHQLTIDAVVLKQAQARRRNLSLCYIDYQKAFDTVPHDWLVKVLEIYKICPKIQAVLQHLMCTWRTNILINNINAGTVKISRGIFQGDALSPMWFCMALNPLSTLLKNTNIGYRPAMRNPRKLSHLLYIDDLKLFGENQKQLHSLIGIVRSFSTDIDMSFGLDKCAIVNIRKGKMENTQEQFQDIHSMLPEETYKYLGIPQNQRIDHTRLKAEFTAKYKNRVTKVLNTKLSAKNQIDALNSWATPALTYTFGVLKWSDADLNELDRLTRRLMTKFRCLHTNASVKRLYLPRRDGGRGLLNIYKLCRTQEKNLRQRLLESEDSLMKLVTTEDKGYTPLNLQHRELTFDITTRREDISIWREQALHGRFPKHLEGENVDKLASLSWLNAGQLYPETEGFLTAIQDRVIRTRNYEKHCLKLNVEDKCRKCGAVGESIEHIIAGCRVLADNAYLGRHNQVAKIVHQQLALRHGFLDTCPPYYKYQPAAVLETDTAVLYWDRPITTDRTVDYNRPDLVFIEKDQKYGIVIDVAVPLTHNIGRTESEKITKYENLAIELKNMWQLSKVTIIPLVISAEGVMSKSFKRNLQKIELSQRIAGCAQQAVALQTCHIVRKFLN

SEQ ID NO: 15163 - protein, 1197 aa, Adalia bipunctata
MKMENKSSLGKESLPGERQSMSGADSGHDSMRSVGGRVLRKRAPVIQQNTAPPEHQEVESQNMAEDQNATPPAGSTTVRRTARRGARNTRIKWSREMNVEVMRAFYYVNNCDDKPLPGWRYSLYTEFTKRHPELQLTEGNIADRKNVIIRKGYLTRQELDEIKREMGYTINQEQIVGIQNEEPTEPLERPADTARDLSVTRTAHQDSPQYRQLYDTFYSNLAQYESTDPLNRPILPKLNFNSTAKNNIERLNEILAEHLSTQWTLEQVHLSLYCAAITVLGQNGQKIYTPRTSEQKVENQTPAWKRRLMQDVDKLRGKVDVLDEFLKDNKSRKVLNKVRKIATSAGLDLESPRYKEFIVDLKDRLRQQAKAKGARLRRYNELTKRKQQNAEYVRDRKKFFRSLEKPSEISSNQQADINNDEFRQYWSSLWSESGQLQRNTSWLMDIEHQASEIVEMKTDLFTVEEISNIVKNTSNWKAPGPDRLHNFWVKQFPACFPSLARCFSEALEDPFKIPTFLTQGNSHMLHKRGDRSKPENYRPITCLSVVYKLFTTLVNNAIYRHCEANNILEEEQKGCSRGSAGCKHQLTIDAVVLKQAQARRRNLSLCYIDYQKAFDTVPHDWLLKVLEIYKICPKIKAVLQHLMSTWKTNILINNINAGTVKISRGIFQGDALSPMWFCIALNPLSTLLKNTNIGYRPAMRNPRKLTHLQYMDDLKLFSENQKQLHSLIDIVRSFSKDIDMSFGIDKCAIVNIRKGKMENTQDQEQFQDIHSMLPEETYKYLGIPQNQRIDHTRLKAEFTAKYKSRVTKVLNTKLSARNQIDALNSWATPALTYTFGVLKWSDADLNELDRLTRRLMTKFRCLHTNASVKRLYLPRRDGGRGLLNIYKLCRTQEKNLRQRLLESEDSLMKLVTTEDKGYTPLNLQHRELTFDITTRSEDISIWREQALHGRFPKHLEGENVDKLASLSWLNAGQLYPETEGFLTAIQDRVIRTRNYEKHCLKLNVEDKCRKCGAVGESIEHVIAGCRVLADNAYLGRHNQVAKIVHQQLALRHGFLDTCPPYYKYQPAAVLETDAAVLYWDSPITTDRSVDYNRPDLVFIEKDQKYGVIIDVAVPLTHNIGRTESEKITMYENLAMELKNMWQLSKVTIIPLVISAEGVMSKSFKKNLQKIEISQRIAGYAQQAVALQTCHIVRKFLN

SEQ ID NO: 15164 - protein, 909 aa, Ophraella communa
MPRSKRQTTKGEIPAWKRRLEQDIDKFRGKADVIGSYLQSTRSRKIIRKISEMANTAGIHLEDPQHHQQLLELKDRFRQQAKAKGARLRRYNELSKRKRQNADFLSNRKKFFRNLETPHDNREHVQALTNTHEFRNYWSSIWSEAVHYNRGSEWIADVEQSASMINEMSVVNITVENISQATRKLSNWKAPGPDGLHNFWIKNLPACFPSLARCFTGILEDPSKFPKFLTEGNTYMLLKKGDPAVPSNHRPITCLSVLYKLFTSLLNNRIYEHCAVNNILEEEQKGCIRGSAGCKHQLSIDAVVIKQVQTRKRNLNVCYIDYRKAFDSVPHDWLMKVLEIYKICPKIRAVLQHLMSTWRTNILINNNKVGQVNISRGIFQGDSLSPVWFCLALNPLSTLLNSTNIGYRLNISKGRRISHLLYMDDLKLLAESPTGLQSLINTVRTFSGDIGMSFGLEKCAIINIKRGAVEIQKDLSEDIGSLKPEDTYKYLGMPQNQHIDHTHLKNKFSEKYKNRVLKVLNTKLSSKNQITALNTWAVPVLTYTFGVLKWSDADLNGLDRLTRRLMTKFRCLHTGTSVTRLYLPRRSGGRGMMNIYKLCRTQEKNLRENLLTSQDSLMRMAAQEDRGYTPLNLQHRNLEFDIRSRQEDQVTWMEQALHGKFPRSLEIENVDKTTSLAWISAGYLYPETEGFFMAIQDRVIRTRNYEKYCLSLDVEDKCRKCGVVGESIEHIIAGCRSLADNAYLGRHNQVAKIIHQQLALKNGLIQTAEAYYKYRPLAVLETDSAVLYWDRPITTDRTVDFNRPDIVFIEKEKKTGIIIDIAVPLSHNVSRTEVEKVTKYENLAVELKNIWQLSKISIVPLVISAEGTTSKNLPKNLQDIGLSKNITGYMQKAVILQTCHIVRKFLNGA

SEQ ID NO: 15165 - protein, 1024 aa, Adalia bipunctata
MGLSQHERTAHPQIRNEARAGTSGVVRQRAPREGGFTVEEVNLMLDLERRFYGDPRVAKRMEGFMNRTAKQLRDKRALSSYKALRDAYLRENPPENAPSSHPSSESEADATDREGIVERSEPVTLQVQVPEIRVTPAPEGLPSPESSEWRKGIIEHALAHQIPPNATPGKSAEAVHLLRGALQLALEPDYEFSQAQVDFLYQEATSHFRLAEGGEGGTKRPRVRGKGRSRKRFLYARTQDLYKKNPGEVAKLDWIEGYQQPSKADVKELYSKLWGEAPQDAKMPEGTCEETITPSQALPPFTVTEIRKRITTIKQSTAPGKDGIRRSVALKKGNIEVLHMLYNLLLLIGKLPTEWSMNRTTLLPKEGKNLTKAENYRPITISSLLSRIFWGCIDQKIRSVVGFTPRQKGFVSETGCFNNVHILVELLRHSKANSKNLVVTIMDITKAFDTVPHNILGESLRRKGLPLEVVHLVEEAYKDVNTEISTRDGIVEIHIQRGVRQGDPSSPFIFNAVLEPLLHKLESQPGYNISNTQIATLAFADDLVIVSEDVQQANNQLRTVEEYLGGLGMGITPSKCTTFHIKPLHKTWSVVDPGLTLMSGERIPHCGAGGRFVYLGAEISPWAGINYESIESSLVSTLSRVKKLALKPHQKVDIISTYLVPHYLYQLGMAAPTITQLRKLDQAVRVVIKDILHLPQSVTDSLLYCGKRDGGLGFPRLETQVVGATLKAGLKFISNSADPVMQALATGAGLVQRLAKLARGARLQWPITLVDLKAFKQRARKQELAHWASLGSQGKSVAALTDDRIGNAWLYSPSLLKPCRYITALKMRTNTCPNRVALNRAVPQPDLNCRRCGTKLETLGHILGECTGTKARRIRRHNEISDLVMERLSKQGQQVAIMDEPRLNHPTSGNLKPDMVVKCQERVFVVDVTVRHVGVTAGEVLPIVVGTRGAMPKETISSLASLGIRDKSTLKTISMIALRCSIEIFHEFMDYDASLRRQGFRRRGQEDPLYLPGSQMPHSNIERH

SEQ ID NO: 15166 - protein, 1171 aa, Harmonia axyridis
MSQPQGVTVNDPAVLDSLTDHQLDLYGKIEGGNFIIEVPFSDASCSVCLTTARGNFMALSINDAIKHVKDTHDPHTPKFVCKACHKEYVSKHAALCHVPKCTGPEVPPPNAVRCNHCNRYFRTQMGVSQHEIKAHPQVRNEARAGTSGAERQRAPREGGFTVEEVDLMLDLERRFYGDSRIAKRMEGFLNRTAKQLRDKRALSSYRTLRDQYLRDHPPQDTPSSHLDSDSAGYASSQEGIEERSEPDTLQVQVPVIQVTPAPEDLSSPELAEWRSGILEHALAHQLPQGVTPDKSAEAIHLLQGALRLASEPDFEFSQAQIDFLYQEATSHFRPSGCEAGGNKSPRVRGKGRSKRRFLYARTQELYKKNPGQVAKHVRQGVDWIGGYQQPPMSEVKELYTKLWGVAPQAQMPEGINEDPIAPSEALPPFTVDEIRKRISATKQSTAPGPDGIRRADVMQRGKVEVLHLLFNLLLLSGKLPTDWSMNRTTLIPKEGKDVTKTENFRPVTITSLVSRIFWGCIDQKIRSVVGFTPRQKGFISSEAGCFNNVHILVELLRHSKATGKNLVVTILDISKAFDTVPHSILGPSLRRKGLPPVVAQLVEESYKNVCTKISTAGGSVEINLQRGVRQGDPLSPFVFNAVLEPLLLELERQSGYRISNNTHIASLAFADDLVLVSEDVQQATHQLHTVEAYLERLSMRLSPKKCVTFHIKPLHKTWSVVDPGLTLMCGERIPHCGAGGRVAYLGVEISPWAGISIESIESDLASALSRVKRLALKPHQKVELISTYLVPHYLYQLGMAAPAISEIRKLDQAVRVVIKDILHLPQSTTDCLIYCGKRDGGLGFPRLETQVVGATLRAGSKFLGNSADPVMQALATGAGLVQRLAKLAQGARLRWPVTQEDLKAYKLRAKKAELARWASLGSQGKSVASLTDDTIGNSWLFSPSLLKPCRYITALQMRTNTCPNRVALNRAVPQPDLFCRQCRTKLETLGHILGDCTATKRRRIRRHDEISDLIVDRLRKQGNQVAIINEPRLQHPLAGNLKPDLVVKYQERVVVVDVTVRHEDGDSLARGRTDKVQKYSSLLPGLQQRLKVTAGEVLPVVVGTRGAMPKETISSLARIGIKDKSTLKTISMIALRCSIEIFHEFMDYDAPLRRHRHRRRGQEDPRNLPGP

SEQ ID NO: 15167 - protein, 1171 aa, Harmonia axyridis
MSQPQGVTVNDPAVLDSLTDHQLDLYGKIEGGNFIIEVPFSDASCSVCLTTARGNFMALSINDAIKHVKDTHDPHTPKFVCKACHKEYVSKHAALCHVPKCTGPEVPPPNAVRCNHCNRYFRTQMGVSQHEIKAHPQVRNEARAGTSGAERQRAPREGGFTVEEVDLMLDLERRFYGDSRIAKRMEGFLNRTAKQLRDKRALSSYRTLRDQYLRDHPPQDTPSSHLDSDSAGYASSQEGIEERSEPDTLQVQVPVIQVTPAPEDLSSPELAEWRSGILEHALAHQLPQGVTPDKSAEAIHLLQGALRLASEPDFEFSQAQIDFLYQEATSHFRPSGCEAGGNKSPRVRGKGRSKRRFLYARTQELYKKNPGQVAKHVRQGVDWIGGYQQPPMSEVKELYTKLWGVAPLAQMPEGINEDPIAPSEALPPFTVDEIRKRISATKQSTAPGPDGIRRADVMQRGKVEVLHLLFNLLLLSGKLPTDWSMNRTTLIPKEGKDVTKTENFRPVTITSLVSRIFWGCIDQKIRSVVGFTPRQKGFISSEAGCFNNVHILVELLRHSKATGKNLVVTILDISKAFDTVPHSILGPSLRRKGLPPVVAQLVEESYKNVCTKISTAGGSVEINLQRGVRQGDPLSPFAFNAVLEPLLLELERQSGYRISNNTHIASLAFADDLVLVSEDVQQATHQLHTVEAYLERLSMRLSPKKCVTFHIKPLHKTWSVVDPGLTLMCGERIPHCGAGGRVAYLGVEISPWAGISIESIESDLASALSRVKRLALKPHQKVELISTYLVPHYLYQLGMAAPAISEIRKLDQAVRVVIKDILHLPQSTTDCLIYCGKRDGGLGFPRLETQVVGATLRAGSKFLGNSADPVMQALATGAGLVQRLAKLAQGARLRWPVTQEDLKAYKLRAKKAELARWASLGSQGKSVASLTDDTIGNSWLFSPSLLKPCRYITALQMRTNTCPNRVALNRAVPQPDLFCRQCRTKLETLGHILGDCTATKRRRIRRHDEISDLIVERLRKQGNQVAIINEPRLQHPLAGNLKPDLVVKYQERVVVVDVTVRHEDGDSLARGRTDKVQKYSSLLPGLQQRLKVTAGEVLPVVVGTRGAMPKETISSLARIGIKDKSTLKTISMIALRCSIEIFHEFMDYDAPLRRHRHRRRGQEDPRNLPGP

SEQ ID NO: 15168 - protein, 1171 aa, Harmonia axyridis
MSQPQGVTVNDPAVLDSLTDHQLDLYGKIEGGNFIIEVPFSDASCSVCLTTARGNFMALSINDAIKHVKDTHDPHTPKFVCKACHKEYVSKHAALCHVPKCTGPEVPPPNAVRCNHCNRYFRTQMGVSQHEIKAHPQVRNEARAGTSGAERQRAPREGGFTVEEVDLMLDLERRFYGDSRIAKRMEGFLNRTAKQLRDKRALSSYRTLRDQYLRDHPPQDTPSSHLDSDSAGYASSQEGIEERSEPDTLQVQVPVIQVTPAPDDLSSPELAEWRSGILEHALAHQLPQGVTPDKSAEAIHLLQGALRLASEPDFEFSQAQIDFLYQEATSHFRPSGCEAGGNKSPRVRGKGRSKRRFLYARTQELYKKNPGQVAKHVRQGVDWIGGYQQPPMSEVKELYTKLWGVAPLAQMPEGINEDPIAPSEALPPFTVDEIRKRISATKQSTAPGPDGIRRADVMQRGKVEVLHLLFNLLLLSGKLPTDWSMNRTTLIPKEGKDVTKTENFRPVTITSLVSRIFWGCIDQKIRSVVGFTPRQKGFISSEAGCFNNVHILVELLRHSKATGKNLVVTILDISKAFDTVPHSILGPSLRRKGLPPVVAQLVEESYKNVSTKISTAGGSVEINLQRGVRQGDPLSPFAFNAVLEPLLLELERQSGYRISNNTHIASLAFADDLVLVSEDVQQATHQLHTVEAYLERLSMRLSPKKCVTFHIKPLHKTWSVVDPGLTLMCGERIPHCGAGGRVAYLGVEISPWAGISIESIESDLASALSRVKRLALKPHQKVELISTYLVPHYLYQLGMAAPAISEIRKLDQAVRVVIKDILHLPQSTTDCLIYCGKRDGGLGFPRLETQVVGATLRAGSKFLGNSADPVMQALATGAGLVQRLAKLAQGARLRWPVTQEDLKAYKLRAKKAELARWASLGSQGKSVASLTDDTIGNSWLFSPSLLKPCRYITALQMRTNTCPNRVALNRAVPQPDLFCRQCRTKLETLGHILGDCTATKRRRIRRHDEISDLIVDRLRKQGNQVAIINEPRLQHPLAGNLKPDLVVKYQERVVVVDVTVRHEDGDSLARGRTDKVQKYSSLLPGLQQRLKVTAGEVLPVVVGTRGAMPKETISSLARIGIKDKSTLKTISMIALRCSIEIFHEFMDYDAPLRRHRHRRRGQEDPRNLPGP

SEQ ID NO: 15169 - protein, 1171 aa, Harmonia axyridis
MSQPQGVTVNDPAVLDSLTDHQLDLYGKIEGGNFIIEVPFSDASCSVCLTTARGNFMALSINDAIKHVKDTHDPHTPKFVCKACHKEYVSKHAALCHVPKCTGPEVPPPNAVRCNHCNRYFRTQMGVSQHEIKAHPQVRNEARAGTSGAERQRAPREGGFTVEEVDLMLDLERRFYGDSRIAKRMEGFLNRTAKQLRDKRALSSYRTLRDQYLRDHPPQDTPSSHLDSDSAGYASSQEGIEERSEPDTLQVQVPVIQVTPAPDDLSSPELAEWRSGILEHALAHQLPQGVTPDKSAEAIHLLQGALRLASEPDFEFSQAQIDFLYQEATSHFRPSGCEAGGNKSPRVRGKGRSKRRFLYARTQELYKKNPGQVAKHVRQGVDWIGGYQQPPMSEVKELYTKLWGVAPLAQMPEGINEDPIAPSEALPPFTVDEIRKRISATKQSTAPGPDGIRRADVMQRGKVEVLHLLFNLLLLSGKLPTDWSMNRTTLIPKEGKDVTKTENFRPVTITSLVSRIFWGCIDQKIRSVVGFTPRQKGFISSEAGCFNNVHILVELLRHSKATGKNLVVTILDISKAFDTVPHSILGPSLRRKGLPPVVAQLVEESYKNVSTKISTAGGSVEINLQRGVRQGDPLSPFAFNAVLEPLLLELERQSGYRISNNTHIASLAFADDLVLVSEDVQQATHQLHTVEAYLERLSMRLSPKKCVTFHIKPLHKTWSVVDPGLTLMCGERIPHCGAGGRVAYLGVEISPWAGISIESIESDLASALSRVKRLALKPHQKVELISTYLVPHYLYQLGMAAPAISEIRKLDQAVRVVIKDILHLPQSTTDCLIYCGKRDGGLGFPRLETQVVGATLRAGSKFLGNSADPVMQALATGAGLVQRLAKLAQGARLRWPVTQEDLKAYKLRAKKAELARWASLGSQGKSVASLTDDTIGNSWLFSPSLLKPCRYITALQMRTNTCPNRVALNRAVPQPDLFCRQCRTKLETLGHILGDCTATKRRRIRRHDEISDLIVNRLRKQGNQVAIINEPRLQHPLAGNLKPDLVVKYQERVVVVDVTVRHEDGDSLARGRTDKVQKYSSLLPGLQQRLKVTAGEVLPVVVGTRGAMPKETISSLARIGIKDKSTLKTISMIALRCSIEIFHEFMDYDAPLRRHRHRRRGQEDPRNLPGP

SEQ ID NO: 15170 - protein, 1171 aa, Harmonia axyridis
MSQPQGVTVNDPAVLDSLTDHQLDLYGKIEGGNFIIEVPFSDASCSVCLTTARGNFMALSINDAIKHVKDTHDPHTPKFVCKACHKEYVSKHAALCHVPKCTGPEVPPPNAVRCNHCNRYFRTQMGVSQHEIKAHPQVRNEARAGTSGAERQRAPREGGFTVEEVDLMLDLERRFYGDSRIAKRMEGFLNRTAKQLRDKRALSSYRTLRDQYLRDHPPQDTPSSHLDSDSAGYASSQEGIEERSEPDTLQVQVPVIQVTPAPDDLSSPELAEWRSGILEHALAHQLPQGVTPDKSAEAIHLLQGALRLASEPDFEFSQAQIDFLYQEATSHFRPSGCEAGGNKSPRVRGKGRSKRRFLYARTQELYKKNPGQVAKHVRQGVDWIGGYQQPPMSEVKELYTKLWGVAPLAQMPEGINEDPIAPSEALPPFTVDEIRKRISATKQSTAPGPDGIRRADVMQRGKVEVLHLLFNLLLLSGKLPTDWSMNRTTLIPKEGKDVTKTENFRPVTITSLVSRIFWGCIDQKIRSVVGFTPRQKGFISSEAGCFNNVHILVELLRHSKATGKNLVVTILDISKAFDTVPHSILGPSLRRKGLPPVVAQLVEESYKNVCTKISTAGGSVEINLQRGVRQGDPLSPFAFNAVLEPLLLELERQSGYRISNNTHIASLAFADDLVLVSEDVQQATHQLHTVEAYLERLSMRLSPKKCVTFHIKPLHKTWSVVDPGLTLMCGERIPHCGAGGRVAYLGVEISPWAGISIESIESDLASALSRVKRLALKPHQKVELISTYLVPHYLYQLGMAAPAISEIRKLDQAVRVVIKDILHLPQSTTDCLIYCGKRDGGLGFPRLETQVVGATLRAGSKFLGNSADPVMQALATGAGLVQRLAKLAQGARLRWPVTQEDLKAYKLRAKKAELARWASLGSQGKSVASLTDDTIGNSWLFSPSLLKPCRYITALQMRTNTCPNRVALNRAVPQPDLFCRQCRTKLETLGHILGDCTATKRRRIRRHDEISDLIVDRLRKQGNQVAIINEPRLQHPLAGNLKPDLVVKYQERVVVVDVTVRHEDGDSLARGRTDKVQKYSSLLPGLQQRLKVTAGEVLPVVVGTRGAMPKETISSLARIGIKDKSTLKTISMIALRCSIEIFHEFMDYDAPLRRHRHRRRGQEDPRNLPGP

SEQ ID NO: 15171 - protein, 1171 aa, Harmonia axyridis
MSQPQGVTVNDPAVLDSLTDHQLDLYGKIEGGNFIIEVPFSDASCSVCLTTARGNFMALSINDAIKHVKDTHDPHTPKFVCKACHKEYVSKHAALCHVPKCTGPEVPPPNAVRCNHCNRYFRTQMGVSQHEIKAHPQVRNEARAGTSGAERQRAPREGGFTVEEVDLMLDLERRFYGDSRIAKRMEGFLNRTAKQLRDKRALSSYRTLRDQYLRDHPPQDTPSSHLDSDSAGYASSQEGIEERSEPDTLQVQVPVIQVTPAPDDLSSPELAEWRSGILEHALAHQLPQGVTPDKSAEAIHLLQGALRLASEPDFEFSQAQIDFLYQGATSHFRPSGCEAGGNKSPRVRGKGRSKRRFLYARTQELYKKNPGQVAKHVRQGVDWIGGYQQPPMSEVKELYTKLWGVAPLAQMPEGINEDPIAPSEALPPFTVDEIRKRISATKQSTAPGPDGIRRADVMQRGKVEVLHLLFNLLLLSGKLPTDWSMNRTTLIPKEGKDVTKTENFRPVTITSLVSRIFWGCIDQKIRSVVGFTPRQKGFISSEAGCFNNVHILVELLRHSKATGKNLVVTILDISKAFDTVPHSILGPSLRRKGLPPVVAQLVEESYKNVCTKISTAGGSVEINLQRGVRQGDPLSPFAFNAVLEPLLLELERQSGYRISNNTHIASLAFADDLVLVSEDVQQATHQLHTVEAYLERLSMRLSPKKCVTFHIKPLHKTWSVVDPGLTLMCGERIPHCGAGGRVAYLGVEISPWAGISIESIESDLASALSRVKRLALKPHQKVELISTYLVPHYLYQLGMAAPAISEIRKLDQAVRVVIKDILHLPQSTTDCLIYCGKRDGGLGFPRLETQVVGATLRAGSKFLGNSADPVMQALATGAGLVQRLAKLAQGARLRWPVTQEDLKAYKLRAKKAELARWASLGSQGKSVASLTDDTIGNSWLFSPSLLKPCRYITALQMRTNTCPNRVALNRAVPQPDLFCRQCRTKLETLGHILGDCTATKRRRIRRHDEISDLIVDRLRKQGNQVAIINEPRLQHPLAGNLKPDLVVKYQERVVVVDVTVRHEDGDSLARGRTDKVQKYSSLLPGLQQRLKVTAGEVLPVVVGTRGAMPKETISSLARIGIKDKSTLKTISMIALRCSIEIFHEFMDYDAPLRRHRHRRRGQEDPRNLPGP

SEQ ID NO: 15172 - protein, 1066 aa, Harmonia axyridis
MTPPNAVRCNHCNRYFRTQMGVSQHEIKAHPQVRNEARAGTSGAERQRAPREGGFTVEEVDLMLDLERRFYGDSRIAKRMEGFLNRTAKQLRDKRALSSYRTLRDQYLRDHPPQDTPSSHLDSDSAGYASSQEGIEERSEPDTLQVQVPVIQVTPAPDDLSSPELAEWRSGILEHALAHQLPQGVTPDKSAEAIHLLQGALRLASEPDFEFSQAQIDFLYQEATSHFRPSGCEAGGNKSPRVRGKGRSKRRFLYARTQELYKKNPGQVAKHVRQGVDWIGGYQQPPMSEVKELYTKLWGVAPLAQMPEGINEDPIAPSEALPPFTVDEIRKRISATKQSTAPGPDGIRRADVMQRGKVEVLHLLFNLLLLSGKLPTDWSMNRTTLIPKEGKDVTKTENFRPVTITSLVSRIFWGCIDQKIRSVVGFTPRQKGFISSEAGCFNNVHILVELLRHSKATGKNLVVTILDISKAFDTVPHSILGPSLRRKGLPPVVAQLVEESYKNVCTKISTAGGSVEINLQRGVRQGDPLSPFAFNAVLEPLLLELERQSGYRISNNTHIASLAFADDLVLVSEDVQQATHQLHTVEAYLERLSMRLSPKKCVTFHIKPLHKTWSVVDPGLTLMCGERIPHCGAGGRVAYLGVEISPWAGISIESIESDLASALSRVKRLALKPHQKVELISTYLVPHYLYQLGMAAPAISEIRKLDQAVRVVIKDILHLPQSTTDCLIYCGKRDGGLGFPRLETQVVGATLRAGSKFLGNSADPVMQALATGAGLVQRLAKLAQGARLRWPVTQEDLKAYKLRAKKAELARWASLGSQGKSVASLTDDTIGNSWLFSPSLLKPCRYITALQMRTNTCPNRVALNRAVPQPDLFCRQCGTKLETLGHILGDCTATKRRRIRRHDEISDLIVDRLRKQGNQVAIINEPRLQHPLAGNLKPDLVVKYQERVVVVDVTVRHEDGDSLARGRTDKVQKYSSLLPGLQQRLKVTAGEVLPVVVGTRGAMPKETISSLARIGIKDKSTLKTISMIALRCSIEIFHEFMDYDAPLRRHRHRRRGQEDPRNLPGP

SEQ ID NO: 15173 - protein, 1168 aa, Harmonia axyridis
MSQPQGVTVNDLAVLDSLTDHQLDLYGKINNFIIEVPLSDASCSVCLTTARGNFMALSMNDAIKHVEDTHDPHTPKFVCKACHKEYVSKHAALCHVPKCTGPEVPPPNAVRCNHYNRYFRTQMGVSQHEIKAHPQVRNEARAGTSGAERQRAPREGGFTVEEVDLMLDLERRFYGESRIAKRMEGFLNRTAKQLRDKRALSSYRTLRDQYLRDHPPQDTPSSHLDSDSAGYASSQEGIEERSEPDTLQVQVPVIQVTQAPEDLSSPELAEWRSGILEHALAHQLPQGFIPDKSAEAIHLLQGALRLASESDFEFSQAQIDFLYQEATSHFRPSGCEAGGNKSPRVRGKGRSKRRFLNARTQELYKKNPGQVAKHVRQGVDWIGGYQQPPMSEVKELYVKLWGVAPLAQMPEGIDEDSIAPSEALTPFTVEEIRKRISATKQSTAPGPDGIRRADVMQRGKIEVLHLLFNLLLLSGKLPTDWSMNRTTLIPKEGKDVTKTENFRPVTITSLASRIFLGCIDQKIRSVVGFTPRQKGFIASEVGCFNNVHILVELLRHSNATGKNLVVTILDISKASDTVPHSILGPSLRRKGLPPVVAQLVEESYKNVCTKISTAGGSVEINLQRGVRQGDPLSPFAFNAVLEPLLLELERQSGYRISNNTHIASLAFADDLVLVSEDVQQATHQLHTVQAYLERLSMRLSPKKCVTFHIKPLHKTWSVVDPGLTLMCGERIPYCGAGGRVAYLGVEISPWAGINIESIESNLASALSRVKRLALKPHQEVEIISTYLVPHYLYQLGMAAPTISEIRKLDQAVRVVIKDILHLPQSTTDCLIYCGKRDGGLGFPRLETQVVGATLRAGSKFLGNSADPVIQALATGAGLVQRLAKLAQGARLRWPVTKEDLKAYKLRAKKAELARWASLGSQGKSVASLTDDTIGNSWLFSPSLLKACRYITALQMRTNTCPNRVALNRAVPQPDLFCRQCRTKLETLGYILGDCTATKRRRIRRHDEISDLIVDRLRKQGNQVAIINEPRLQHPLAGNLKPDLVVKYQERVVVVDVTVRHEDEDSLARGRTEKVQKYSSLLPGLQQRLKVTAGEVLPVVVGTRGAMPKETISSLACIGIKDKSTLKTISMIALRCSIEIEDNRYWKPQIHAPNSKKDFKKKDCPARRN

SEQ ID NO: 15174 - protein, 1171 aa, Harmonia axyridis
MSQPQGVTVNDPAVLDSLTDHQLDLYGKIEGGNFIIEVPFSDASCSVCLTTARGNFMALSINDAIKHVKDTHDPHTPKFVCKACHKEYVSKHAALCHVPKCTGPEVPPPNAVRCNHCNRYFRTQMGVSQHEIKAHPQVRNEARAGTSGAERQRAPREGGFTVEEVDLMLDLERRFYGDSRIAKRMEGFLNRTAKQLRDKRALSSYRTLRDQYLRDHPPQDTPSSHLDSDSAGYASSQEGIEERSEPDTLQVQVPVIQVTPAPDDLSSPELAEWRSGILEHALAHQLPQGVTPDKSAEAIHLLQGALRLASEPDFEFSQAQIDFLYQGATSHFRPSGCEAGGNKSPRVRGKGRSKRRFLYARTQELYKKNPGQVAKHVRQGVDWIGGYQQPPMSEVKELYTKLWGVAPLAQMPEGINEDPIAPSEALPPFTVDEIRKRISATKQSTAPGPDGIRRADVMQRGKVEVLHLLFNLLLLSGKLPTDWSMNRTTLIPKEGKDVTKTENFRPVTITSLVSRIFWGCIDQKIRSVVGFTPRQKGFISSEAGCFNNVHILVELLRHSKATGKNLVVTILDISKAFDTVPHSILGPSLRRKGLPPVVAQLVEESYKNVCTKISTAGGSVEINLQRGVRQGDPLSPFAFNAVLEPLLLELERQSGYRISNNTHIASLAFADDLVLVSEDVQQATHQLHTVEAYLERLSMRLSPKKCVTFHIKPLHKTWSVVDPGLTLMCGERIPHCGAGGRVAYLGVEISPWAGISIESIESDLASALSRVKRLALKPHQKVELISTYLVPHYLYQLGMAAPAISEIRKLDQAVRVVIKDILHLPQSTTDCLIYCGKRDGGLGFPRLETQVVGATLRAGSKFLGSSADPVMQALATGAGLVQRLAKLAQGARLRWPVTQEDLKAYKLRAKKAELARWASLGSQGKSVASLTDDTIGNSWLFSPSLLKPCRYITALQMRTNTCPNRVALNRAVPQPDLFCRQCRTKLETLGHILGDCTATKRRRIRRHDEISDLIVDRLRKQGNQVAIINEPRLQHPLAGNLKPDLVVKYQERVVVVDVTVRHEDGDSLARGRTDKVQKYSSLLPGLQQRLKVTAGEVLPVVVGTRGAMPKETISSLARIGIKDKSTLKTISMIALRCSIEIFHEFMDYDAPLRRHRHRRRGQEDPRNLPGP

SEQ ID NO: 15175 - protein, 1171 aa, Harmonia axyridis
MSQPQGVTVNDPAVLDSLTDHQLDLYGKIEGGNFIIEVPFSDASCSACLTTARGNFMALSINDAIKHVKDTHDPHTPKFVCKACHKEYVSKHAALCHVPKCTGPEVPPPNAVRCNHCNRYFRTQMGVSQHEIKAHPQVRNEARAGTSGAERQRAPREGGFTVEEVDLMLDLERRFYGDSRIAKRMEGFLNRTAKQLRDKRALSSYRTLREQYLRDHPPQDTPSSHLDSDSAGYASSQEGIEERSEPDTLQVQVPVIQVTPAPDDLSSPELAEWRSGILEHALAHQLPQGVTPDKSAEAIHLLQGALRLASEPDFEFSQAQIDFLYQEATSHFRPSGCEAGGNKSPRVRGKGRSKRRFLYARTQELYKKNPGQVAKHVRQGVDWIGGYQQPPMSEVKELYTKLWGVAPLAQMPEGINEDPIAPSEALPPFTVDEIRKRISATKQSTAPGPDGIRRADVMQRGKVEVLHLLFNLLLLSGKLPTDWSMNRTTLIPKEGKDVTKTENFRPVTITSLVSRIFWGCIDQKIRSVVGFTPRQKGFISSEAGCFNNVHILVELLRHSKATGKNLVVTILDISKAFDTVPHSILGPSLRRKGLPPVVAQLVEESYKNVCTKISTAGGSVEINLQRGVRQGDPLSPFAFNAVLEPLLLELERQSGYRISNNTHIASLAFADDLVLVSEDVQQATHQLHTVEAYLERLSMRLSPKKCVTFHIKPLHKTWSVVDPGLTLMCGERIPHCGAGGRVAYLGVEISPWAGISIESIESDLASALSRVKRLALKPHQKVELISTYLVPHYLYQLGMAAPAISEIRKLDQAVRVVIKDILHLPQSTTDCLIYCGKRDGGLGFPRLETQVVGATLRAGSKFLGNSADPVMQALATGAGLVQRLAKLAQGARLRWPVTQEDLKAYKLRAKKAELARWASLGSQGKSVASLTDDTIGNSWLFSPSLLKPCRYITALQMRTNTCPNRVALNRAVPQPDLFCRQCRTKLETLGHILGDCTATKRRRIRRHDEISDLIVDRLRKQGNQVAIINEPRLQHPLAGNLKPDLVVKYQERVVVVDVTVRHEDGDSLARGRTDKVQKYSSLLPGLQQRLKVTAGEVLPVVVGTRGAMPKETISSLARIGIKDKSTLKTISMIALRCSIEIFHEFMDYDAPLRRHRHRRRGQEDPRNLPGP

SEQ ID NO: 15176 - protein, 1078 aa, Ectemnius lituratus
MVLQPLQASRTPPPIGSCRKLWRARRPRADSLPEANAVKTITGTLGLPPPPSLIPLGTTRQRKKNLDGASTDDSGPSHTGLCRENVPPPDPVSVKYPCEFPDCGRDFTSKSGRSLHHRRAHSDWYDTRTLKAAVKSRWTDEEISLLAREEARLARGGVRFINMELAALFSDRTLEAIKGQRKRPAYRALVEGYMESSQHVHLADASATEHEMASEIEREDPKETLRVFLTSLPAPTTSTHRLHELHDLCASVDLRPSDDLNEELTLYLQRVFPKPTKGGRPSNPPKPLQRTKRQERRAEYARTQQLWKADPSKCLRQILKDVSAEEPPPKDEMVGFWEHTFTRGIRTAPQLPNPHSARNELLLPIQANEIKKAMPARSTAPGPDGISARLVRALPEEMLVRLLNLFLWNGKVPTYLLESRTTLIPKKDKARTPAEYRPITVSSVLIRMYHKVLATRMASLVPPDKRRRAFTNVDGCSESTFLLDSMLRYHHKVHRQLFLASLDVAKAFDSVSHEAIYSALRTAGIPEGIVEYVRYVYTDSTTRLSCERWHSDHIRPTCGVKQGDPLSPFIFNLIMDGLLRKLPTEVGADLDGYRINALAFADDLILAASTTKGLQILIDETTNYLAQCGLSVNAGKCLTIALRNVPQQKKTLVDATTVFTCAGVPVPPLKRTDEWVYLGIPFTPEGKVRVNQTDKMTALLTKLSKAPLKPQQRLFGLRSMVIPSLYHLLTLGTTTISLLRRLDKLVRAAVRKWVNLPHDTLNAYFHAPGTEGGLGIPSFRWAVPLIRYNRLKALKLDNCAQRFLNEKVLRQERRLNDHGTSMSNKTLIARRWSSMLHRAPDGAGLKESSKVPQQHSWVRDGTKFLSGRDYNNMLRLRVNALPTRSRTTRGRPQERLCRAGCGHQETLNHVLQVCHRTHGVRIKRHNAVSTYVSRGLRQQGYNVEEEPRFATQEGVRKPDIVATLGRTAFVIDAQVVGEQANLSEAHKKKVSYYSENQHMAQEITARYNVREVRFTSITLSSRGIWSKDSAGELISHGLIRTRDLKILSTRVLLGGLHAFSMFNKTTWIRRVWSRAGVG

SEQ ID NO: 15177 - protein, 946 aa, Melanostoma mellinum
MDEARLRVDVKARWSLEETKLMAKKEAELRKLGVKFLNKELHVHFPDRTVEAIKKERQKSDYKDLVLNYSNAQIPSTNASVRTSSAPQRKIMESLLRSSIRENAKYKSEKLNDIIHQASQFGTEETILNLSEYLREIFPVRNRQIGRQRHQQTNDQRLSRRKLRRLEYKQTQTNWTKHQQRCVHTILNGSDNGKEPPQEILEPFWRTIFEQECSTSPDNIRQEVISGTLWDPITSEEIVSQKPSLKTSPGPDGLTPRELRNVPNDILSGIMNLILWCERLPSHLYESRTTFIPKKSDSTQPGDFRPITVSSIIVRMLHGILAKRLSKIITLDPRQQAFIEADGCATNITLLDMLLRSHHNSFSSCYLASLDVAKAFDSVSHPTILTTLRSWGVPSNFIEYVDDLYSKSFTRIKGNGWSSSPIYPKSGVKQGDPLSPIFFNLVLDKLLKSLPAEIHCKIGNSSTNAIAFADDLVLCATTPAGLQQLLDQSDSFLKSCGLRLNPAKCITISIKGLPKQKISVIEPRVFKIDGNAVPYLKRSDEFRYLGVDFSPEGRVKVEPKKDIVPKLNIITKAPLKPQQRLHILRNYLIPQTYHKLTLGNVNIGCLNKVDRVIRNEVRKWLNLPNDVSNAYFHAPVNQGGLGISALRWTAPLIRLKRLTNIRMPNLEASVQADVFMAEEISKTERRLRVDDRQLQTTSDINDYWTKRLGLSVDGNGLREAGDHGQAHRWVMEPTRLLTGKDFIHCLKTRINALPTRSRTSRGRSQIDRQCRAGCPRPETLNHVVQTCQRSHSSRIDRHNSITKFITRSSRTKGLQTIIEPIIRTSQGVRKPDLVIVKDRSAVIIDAQVVTDGCVLNTAHLRKKEKYDRHEIREEIKSRLQVEEVCVTTATLNWRGVWSKDSVEDLIRLGILRKSDSALLSTRVLVGTYRCFRQFSEVTWRTDLDPG

SEQ ID NO: 15178 - protein, 1275 aa, Rotaria sp.
MSYCGGPGNAGDSFSVKRPNLGIASTHQRYATRSARAVPPTETVGAPSQEGQHMTVGVHAVAQLTHRFDSIPTKEKGPGVVNPARLVKSVLWTDNEAEELTRLVGLNTDPKGKISWVKVEEAWKLLVTSKNLAVRSKAGLSGKWNDLKIKSSSLHLSDSAGVQDGPTANSDNTVTELALNKRSNKDKIKIQGVNQAVVTPKEQPRGNDQAVAIITEAIRASFKKNLRRARKIGCQPNKRKAPLRVSGKHIKPIICAVNELMANSRRKGGLSWDQLSILVYAGAMTVSEIGNQEMAEKKFRSQEWFRNSYREMDSLRITIGRATAELLRRRERSEVAPTRKQLKNIKLLMKKYDTETSADITSLVEKLKNRLQLLQSRVALRKADEKRIRVRQMPAKAVLRSMEAKEEDETSDIHQIRRFWKGIVGVKKTFNPKSAQLLAWKHSTPEIPDDDNLRESLSLELWQKVVRKAKPWKAHGPDGIQSYWWKVFPYANNTLRRLVLRHVTSGEPLPKGWITDGRIVLLHKNGPRSDPNNFRPIACLNTCYKLLTGYIAAYLDKQIRGNNILPIEQIALRPSIWGCIHAHTLDHTLTSDAQSRQQRSLSVAWIDYSKAFDSVPHNYIMWLLGVVNVHNSLMMFIKSLFSMWRVKYEIRGPGGKIERSNYLKIRSGCLQGDTLSPLLFCLAMASISHAINSVGSGYVTTSGKLKGLQASWSHLFYMDDLKLYASSSESLAKQKRVVKSISRDISMKLNVNKCAETHFIPKRLLQKTQINADTDTPVDRDISFPMLDGEAVYKYLGIEQKLGLKECDALDRVKDKCYNTVRQLWGSDLTFRQKVNTHNTTVIPAFSYVMNCIIKGGGKYSSALKEGDNIDKGFRKILVELKARYKASCVARLYLTTELGGYGLKSVKDSFQESTIYSWAYLCTKADMRNSLNLFVSMANRGKRCVVSDAASVLKSYNIKFDLDEAHSTVILDGARFVDARTLARHVVSLMRTHNNNIRYEEWQGLVLAGRVLRPTSNVDPKASFAWLSAGKLSSTAVRNVLAAQEGCLLTKTHPAYAANSTDKNCRACRATSETIEHVVSNCSKWLPNLYVDRHDSVARNIYYKLCLIYGLTPPHYTQRIDSVQENDRIKLYWNQPVQTKTIIRHNKPDLTIFDKIGKTALIIEVAVSWFTGIQKQIEIKRNRYCVNGNWDDELNVPYPRGDNLLRELQTKGWEVTFLPVVIGTNGEVLSELHEQVKVALDLSREETERCIERLQRSAVLGTSRIIKNHLAEKP

SEQ ID NO: 15179 - protein, 938 aa, Notocelia uddmanniana
MPANSQPAEGFIECPHCSTTKVFKGQRGLNIHISRSHKSHLNSSFPQQSFAQHSTLPQHSSLSTILSSLKRSTPILKRIPRGARHTVANNLIKTIDDCTAENSESSWLRLLSFSYNTLHISKAHPEVSLTQKLKDNCSRPASFQQYSSVATPPRPSQPIFKKVETKFNDGDLRGAARLLFSNDSCASNSAATLAALSSKHPLAPPSSQLLTSPNKTLPCLHATEDGVFAAVMSFKNGSAGGLDGISPQHLKDLLTVPGGRNSALLTSLTNLINLMLAGKVNPLVTDTLYGANLCALLKKDGGIRPIAVGSTFRRIASKICCRHILPVLQPKFQPVQLGFGCKGGCEAAVHACRSFLKKSSSKVLLKLDVKNAFNSISRDTMLSEIQKVVPDIYHYLRQCYGTPSNLVFENNTLLSSVGCQQGDPLGPAIFSLAIHSIISGLTSKFNVWYLDDGSLGGDADSVLKDLSLIKNKFDTIGLHLNFDKCEVFLDGIFDSSSVKQAFESACPGIKFLTKETLQLLGVPIFDEGIPIFVENKISKFEESADRLLEIHAHMAIFILRSCLFVPKFTYAMRCCPIWKFKIICENIDSIIHTHLEKVINVKFDDRQFLQATLPVRLGGLGVRQISGVALPAFLSSTHSSLPLIGKILSPLLSDFEVACLSEAKDAWKQACPGTDVPTSAENQKLWDIPISSRVYTHLIDTCPTPRDKARLLAVSASESGYWLHALPSVNFGTLLDDNSFRVAVGLRLGLDIVVPHQCRCGAQVDSLGHHGLSCPKSAGRLSRHACLNDIIRRALVSVQVPAVLEPNGLVRDDGKRPDGMTLVPWRLGRPLVWDSTCVDTLASSHIAVTCQKPGGAATNAEAAKRRKYMLLGDNYIFVPFAVETLGPWGPEAHQLFNLIKKNLLDLPVIQELGRFSDKGSVLLCNGETPPASWVLLRQ

SEQ ID NO: 15180 - protein, 943 aa, Notocelia uddmanniana
MPANSQPPEGFIECPHCSTTKVFKGQRGLNIHISRSHKSHLNSSFPQQSFAQHSTLPQHSSLSTILSSLKRSTPILKRIPRGARHTVANNLIKTIDDCTAENSESSWLRLLSFSYNTLHISKAHPEVSLTQKLKDNCSRPASFQQYSSVATPPRPSQPIFKKVETKFNDGDLRGAARLLFSNDSCASNSAATLAALSSNHPLAPPSSQLLTSPNTTLPCLHATEDGVFAAVMSFKNGSAGGFDGISPQHLKDLLTVPGGRNSALLTSLTNLINLMLAGKVNPLVTDTLYGANLCALLKKDGGIRPIAVGSTFRRIASKICCRHILPVLQPKFQPVQLGFGCKGGCEAAVHACRSFLKKSSSKVLLKLDVKNAFNSISRDTILSEIQKVVPDIYHYLRQCYGTPSNLVFENNTLLSSVGCQQGDPLGPAIFSLAIHPIISGLTSKFNVWYLDDGSLGGDADSVLNDLSLIKNKFDTIGLHLNFDKCEVFLDGIFDSSSVKQAFESACPGIKFLTKETLQLLGVPIFDEGIPIFVENKISKFEESADRLLEIHAHMAIFILRSCLFVPKFTYAMRCCPIWKFKIICENIDSIIHTHLEKVINVKFDDRQFLQATLPVRLGGLGVRQISGVALPAFLSSTHSSLPLLGKILSPLLSDFEVACLSEAKDAWKQACPGTDVPTSAENQKLWDMPISSRVYTHLIDTCPTPRDKARLLAVSASESGYWLHALPSVNFGTLLDDNSFRVAVGLRLGLDIIVPHQCRCGAQVDSLEHHGLSCPKSAGRLSRHACLNDIIRRALVSVQVPAVLEPNGLARDDGKRPDGMTLVPWRLGRPLVWDSTCVDILASSHIAVTCQKPGGAATNAEAAKRRKYMLLGDNYIFVPFAVETLGPWGPEAHQLFNLIKKKLIRFTCDPRAGAFLGQRLSIAVQRGNAASILGSFPPMSDLG

SEQ ID NO: 15181 - protein, 946 aa, Apotomis turbidana
MPANSQPAEGFVECPHCSTTKVFRGQRGLNIHISKTHKAHLNLSIPQQSSAQLSSPPQHCSLSTLLSSLKRSTPILKRIPRGARHTVANRLIKTIDDCTAENSESSWLRLLSFSYNTLHVSKGHPEVSLTQKLKDNCSRAVSFQQFSSVTSHQRSSQPLFKKVETKFNDGDLRGAARLLFSNDSCAPNSATTLAALSSKHPPASPSSQLPTPPDPTLPCLLASEDRVFAAVMSFKNGSAGGLDGISPQHLKDLLTVPGGRNNALLTALTNLINLMLAGKVHPLVTDTLYGANLCALLKKDGGIRPIAVGSTFRRIASKICCRHILPLLQPKFQPVQLGFGCKGGCEAAVHACRTFLNTSSSKALLKLDVKNAFNSINRYTMLSEIQKVVPDIYHYLWQCYGSASNLVFENNTLLSSVGCQQGDPLGPAIFSLAIHPIISDLTSKFNVWYLDDGTLGPPSCHADSVLNDLSLIKNKFDSIGLQLNFDKCEVFLDGNFDTLSVKQAFESASPGIKFLSKDTLHLLGVPIFAEGIPSFVENKISKFEESADRLLEIHAHMAVFILRSCLFVPKFTYALRCCPFWKFKLLCENIDNIIHAHLEKIINAKFDDRQFLQATLPVRFGGLGVRQISGVALPAFLSSTHSSLPLIGKILSPLLSDSEVACLSEAKDAWKEACPGTDFPTSTEIQKLWDMPINLRVHNHLTDTSPTPRDKARLLAVSARESGYWLHALPSVNFGTLLDDNSFRVAVGLRLGLDIVVPHQCRCGYQVDRLGHHGLSCPKSAGRLSRHACLNDIIRRALVSVNVPAVLEPNGLARDDGKRPDGMTLVPWRLGRPLVWDSTCVDTLAPSHIATTCQNPGGAATNAEAAKRRKYMCLGDNYIFVPFAVETLGPWGPAAHNLFDSLKKKLIRTTCDPRAGAFLGQRLSIAVQRGNAASILGSFPPMSDLG

SEQ ID NO: 15182 - protein, 715 aa, Apotomis turbidana
MSFKNGSAGGLDGISPQHLKDLLTVPGGRNNALLTALTNLINLMLAGKVHPLVTDTLYGANLCALLKKDGGIRPIAVGSTFRRIASKICCRHILPLLQPKFQPVQLGFGCKGGCEAAVHACRTFLNTSSSKALLKLDVKNAFNSVNRYTMLSEIQKVVPDIYHYLWQCYGSASNLVFENNTLLSSVGCQQGDPLGPAIFSLAIHPIISDLTSKFNVWYLDDGTLGGDADSVLNDLSLIKNKFDSIGLQLNFDKCEVFLDGNFDTLSVKQAFESASPGIKFLSKETLHLLGVPIFAEGIPSFVENKISKFEESADRLLEIHAHMAVFILRSCLFVPKFTYALRCCPFWKFKLLCENIDNIIHAHLEKIINAKFDARQFLQATLPVRFGGLGVRQISGVALPAFLSSTHSSLPLIGKILSPLLSDSEVACLSEAKDAWKEACPGTDFPTSTEIQKLWDMPINLRVHNHLTDTSPTPRDKARLLAVSARESGYWLHALPSVNFGTLLDDNSFRLAVGLRLGLDIVVPHQCRCGYQVDRLGHHGLSCPKSAGRLSRHACLNDIIRRALVSVNVPAVLEPNGLARDDGKRPDGMTLVPWRLGRPLVWDSTCVDTLAPSHIATTCQNPGGATNAEAAKRRKYMCLGDNYIFVPFAVETLGPWGPAAHSLFDSIKKKLIRTTCDPRAGAFLGQRLSIAVQRGKRRQHLGIISANDRPWIELG

SEQ ID NO: 15183 - protein, 943 aa, Apotomis turbidana
MPANSQPAEGFVECPHCSTTKVFRGQRGLNIHISKTHKAHLNLSIPQQSSAQLSSPPQHCSLSTLLSSLKRSTPILKRIPRGARHTVANRLIKTIDDCTAENSESSWLRLLSFSYNTLHVSKGHPEVSLTQKLKDNCSRAVSFQQFSSVTSHQRPSQPLFKKVETKFNDGDLRGAARLLFSNDSCAPNSATTLAALSSKHPPASPSSQLPTPPDPTLPCLLASEDRVFAAVMSFKNGSAGGLDGISPQHLKDLLTVPGGRNNALLTALTNLINLMLAGKVHPLVTDTLYGANLCALLKKDGGIRPIAVGSTFRRIASKICCRHILPLLQPKFQPVQLGFGCKGGCEAAVHACRTFLNTSSSKALLKLDVKNAFNSINRYTMLSEIQKVVPDIYHYLWQCYGSASNLVFENNTLLSSVGCQQGDPLGPAIFSLAIHPIISDLTSKFNVWYLDDGTLGGDADSVLNDLSLIKNKFDSIGLQLNFDKCEVFLDGNFDTLSVKQAFESASPGIKFLSKDTLHLLGVPIFAEGIPSFVENKISKFEESADRLLEIHAHMAVFILRSCLFVPKFTYALRCCPFWKFKLLCENIDNIIHAHLEKIINAKFDDRQFLQATLPVRFGGLGVRQISGVALPAFLSSTHSSLPLIGKILSPLLSDSEVACLSEAKDAWKEACPGTDFPTSTEIQKLWDMPINLRVHNHLTDTSPTPRDKARLLAVSARESGYWLHALPSVNFGTLLDDNSFRVAVGLRLGLDIVVPHQCRCGYQVDRLGHHGLSCPKSAGRLSRHACLNDIIRRALVSVNVPAVLEPNGLARDDGKRPDGMTLVPWRLGRPLVWDSTCVDTLAPSHIATTCQNPGGAATNAEAAKRRKYMCLGDNYIFVPFAVETLGPWGPAAHNLFDSLKKKLIRTTCDPRAGAFLGQRLSIAVQRGNAASILGSFPPMSDLG

SEQ ID NO: 15184 - protein, 943 aa, Apotomis turbidana
MPANSQPAEGFVECPHCSTTKVFRGQRGLNIHISKTHKAHLNLSIPQQSSAQLSSPPQHCSLSTLLSSLKRSTPILKRIPRGARHTVANKLIKTIDDCTAENSESSWLRLLSFSYNTLHVSKGHPEVSLTQKLKDNCSRAVSFQQFSSVTSHQRPSQPLFKKVETKFNDGDLRGAARLLFSNDSCAPNSATTLAALSSKHPPASPSSQLPTPPDPTLPCLLASEDRVFAAVMSFKNGSAGGLDGISPQHLKDLLTVPGGRNNTLLTALTNLINLMLAGKVHPLVTDTLYGANLCALLKKDGGIRPIAVGSTFRRIASKICCRHILPLLQPKFQPVQLGFGCKGGCEAAVHACRTFLNTSSSKALLKLDVKNAFNSINRYTMLSEIQKVVPDIYHYLWQCYGSASNLVFENNTLLSSVGCQQGDPLGPAIFSLAIHPIISDLTSKFNVWYLDDGTLGGDADSVLNDLSLIKNKFDSIGLQLNFDKCEVFLDGNFDTLSVKQAFESASPGIKFLSKDTLHLLGVPIFAEGIPSFVENKISKFEESADRLLEIHAHMAVFILRSCLFVPKFTYALRCCPFWKFKLLCENIDNIIHAHLEKIINAKFDDRQFLQATLPVRFGGLGVRQISGVALPAFLSSTHSSLPLIGKILSPLLSDSEVACLSEAKDAWKEACPGTDFPTSTEIQKLWDMPINLRVHNHLTDTSPTPRDKARLLAVSARESGYWLHALPSVNFGTLLDDNSFRVAVGLRLGLDIVVPHQCRCGYQVDRLGHHGLSCPKSAGRVSRHACLNDIIRRALVSVNVPAVLEPNGLARDDGKRPDGMTLVPWRLGRPLVWDSTCVDTLAPSHIATTCQNPGGAATNAEAAKRRKYMCLGDNYIFVPFAVETLGPWGPAAHNLFDSLKKKLIRTTCDPRAGAFLGQRLSIAVQRGNAASILGSFPPMSDLG

SEQ ID NO: 15185 - protein, 943 aa, Apotomis turbidana
MPANSQPAEGFVECPHCSTTKVFRGQRGLNIHISKTHKAHLNLSIPQQSSAQLSSPPQHCSLSTLLSSLKRSTPILKRIPRGARHTVANRLIKTIDDCTAENSESSWLRLLSFSYNTLHVSKGHPEVSLTQKLKDNCSRAVSFQQFSSVTSHQRPSQPLFKKVETKFNDGDLRGAARLLFSNDSCAPNSATTLAALSSKHPPASPSSQLPTPPDPTLPCLLASEDRVFTAVMSFKNGSAGGLDGISPQHLKDLLTVPGGRNNALLTALTNLINLMLAGKVHPLVTDTLYGANLCALLKKDGGIRPIAVGSTFRRIASKICCRHILPLLQPKFQPVQLGFGCKGGCEAAVHACRTFLNTSSSKALLKLDVKNAFNSINRYTMLSEIQKVVPDIYHYLWQCYGSASNLVFENNTLLSSVGCQQGDPLGPAIFSLAIHPIISDLTSKFNVWYLDDGTLGGDADSVLNDLSLIKNKFDSIGLQLNFDKCEVFLDGNFDTLSVKQAFESASPGIKFLSKDTLHLLGVPIFAEGIPSFVENKISKFEESADRLLEIHAHMAVFILRSCLFVPKFTYALRCCSFWKFKLLCENIDNIIHAHLEKIINAKFDDRQFLQATLPVRFGGLGVRQISGVALPAFLSSTHSSLPLIGKILSPLLSDSEVACLSEAKDAWKEACPGTDFPTSTEIQKLWDMPINLRVHNHLTDTSPTPRDKARLLAVSARESGYWLHALPSVNFGTLLDDNSFRVAVGLRLGLDIVVPHQCRCGYQVDRLGHHGLSCPKSAGRLSRHACLNDIIRRALVSVNVPAVLEPNGLARDDGKRPDGMTLVPWRLGRPLVWDSTCVDTLAPSHIATTCQNPGGAATNAEAAKRRKYMCLGDNYIFVPFAVETLGPWGPAAHNLFDSLKKKLIRTTCDPRAGAFLGQRLSIAVQRGNAASILGSFPPMSDLG

SEQ ID NO: 15186 - protein, 922 aa, Apotomis turbidana
MPANSQPAGGFVECPHCSTTKVFRGQRGLNIHISKTHKAHLNLSIPQQSSAQLSSTPQHCSLSTLLSSLKRSTPILKRIPRGARHTVANSLIKTIDDCTAENSESSWLRLLSFSYNTLHVSKGHPEVSLTQKLKDNCSRAVSFQQFSSVISHQRPSQPIFKKVETKFNDGDLRGAARLLFSNDSCAPNSATTLAALSSKHPPAPPSSQLPTPPDPTLPCLLASEYRVFAAVMSFKNGSAGGLDGISPQHLKDLLTVPGGRNNALLTALTNLINLMLAGKVNPLVTDTLYGANLCALLKKDGGIRPIAVGSTFRRIASKICCRHIVPLLQPKFQPVQLGFGCKGGCEAAVHACRTFLNTSSSKALLKLDVKNAFNSINRYTMLSEIQKVVPDIYHYLWQCYGTASNLVFENNTLLSSVGCQQGDPLGPAIFSLAIHPIISDLTSKFNVWYLDDGTLGGDADSVLNDLSLIKDKFDSIGLQLNFDKCEVFLDGNFDTLSVKQAFESASPGIKILSKETLHLLGVPIFDEGVPSFVENKISKFEESADRLLEIHAHMAVFILRSCLFVPKFTYALRCCPFWKFKLLCENIDNIIHAHLERIINAKFDARQFLQATLPVRFGGLGVRQISGVALPAFLSSTHSSLPLIGKILYPLLSDSEVACLSEAKDAWKEACPGTDFPTSTEIQKLWDMPINLRVHNHLTDTSPTPRDKARLLAVSARESGYWRHALPSVNFGTLLDDNSFRVAVGLRLGLDIVVPHQCRCGYQVDRLGHHGLSCPKSAGRLSRHACLNDIIRRALVSVNVPAVLEPNGLARDDGKRPDGMTLVPWRLGRALVWDSTCVDTLAPSHIATTCQNPGGAATNAEAAKRRKYMCLGDNYIFVPFAVETLGPWGPAAHNLFDSLKKKTGQVRVGLAHRGFRTNTFHP

SEQ ID NO: 15187 - protein, 943 aa, Apotomis turbidana
MPANSQPAEGFVECPHCSTTKVFRGQRGLNIHISKTHKAHLNLSIPQQSSAQLSSPPQHCSLSTLLSSLKRSTPILKRIPRGARHTVANRLIKTIDDCTAENSESSWLRLLSFSYNTLHVSKGHPEVSLTQKLKDNCSRAVSFQQFSSVTSHQRPSQPLFKKVETKFNDGDLRGAARLLFSNDSCAPNSATTLAALSSKHPPASPSSQLPTTPDPTLPCLLASEDRVFAAVMSFKNGSAGGLDGISPQHLKDLLTVPGGRNNALLTALTNLINLMLAGKVHPLVTDTLYGANLCALLKKDGGIRPIAVGSTFRRIASKICCRHILPLLQPKFQPVQLGFGCKGGCEAAVHACRTFLNTSSSKALLKLDVKNAFNSINRYTMLSEIQKVVPDIYHYLWQCYGSASNLVFENNTLLSSVGCQQGDPLGPAIFSLAIHPIISDLTSKFNVWYLDDGTLGGDADSVLNDLSLIKNKFDSIGLQLNFDKCEVFLDGNFDTLSVKQAFESASPGIKFLSKDTLHLLGVPIFAEGIPSFVENKISKFEESADRLLEIHAHMAVFILRSCLFVPKFTYALRCCPFWKFKLLCENIDNIIHAHLEKIINAKFDDRQFLQATLPVRFGGLGVRQISGVALPAFLSSTHSSLPLIGKILSPLLSDSEVACLSEAKDAWKEACPGTDFPTSTEIQKLWDMPINLRVHNHLTDTSPTPRDKARLLAVSARESGYWLHALPSVNFGTLLDDNSFRVAVGLRLGLDIVVPHQCRCGYQVDRLGHHGLSCPKSAGRLSRHACLNDIIRRALVSVNVPAVLEPNGLARDDGKRPDGMTLVPWRLGRPLVWDSTCVDTLAPSHIATTCQNPGGAATNAEAAKRRKYMCLGDNYIFVPFAVETLGPWGPAAHNLFDSLKKKLIRTTCDPRAGAFLGQRLSIAVQRGNAASILGSFPPMSDLG

SEQ ID NO: 15188 - protein, 943 aa, Apotomis turbidana
MPANSQPAEGFVECPHCSTTKVFRGQRGLNIHISKTHKAHLNLSIPQQSSAQLSSPPQHCSLSTLLSSLKRSTPILKRIPRGARHTVANRLIKTIDDCTAENSESSWLRLLSFSYNTLHVSKGHPEVSLTQKLKDNCSRAVSFQQFSSVTSHQRPSQPLFKKVETKFNDGDLRGAARLLFSNDSCAPNSATTLAALSSKHPPASPSSQLPTPPDPTLPCLLASEDRVFAAVMSFKNGSAGGLDGISPQHLKDLLTVPGGRNNALLTALTNLINLMLAGKVHPLVTDTLYGANLCALLKKDGGIRPIAVGSTFRRIASKICCRHILPLLQPKFQPVQLGFGCKGGCEAAVHACRTFLNTSSSKALLKLDVKNAFNSINRYTMLSEIQKVVPDIYHYLWQCYGSASNLVFENNTLLSSVGCQQGDPLGPAIFSLAIHPIISDLTSKFNVWYLDDGTLGGDADSVLNDLSLIKNKFDSIGLQLNFDKCEVFLDGNFDTLSVKQAFESASPGIKFLSKDTLHLLGVPIFAEGIPSFVENKISKFEESADRLLEIHAHMAVFILRSCLFVPKFTYALRCCPFWKFKLLCENIDNIIHAHLEKIINAKFDDRQFLQATLPVRFGGLGVRQISGVALPAFLSSTHSSLPLIGKILSPLLSDSEVACLSEAKDAWKEACPGTDFPTSTEIQKLWDMPINLRVHNHLTDTSPTPRDKARLLAVSARESGYWLHALPSVNFGTLLDDNSFRVAVGLRLGLDIVVPHQCRCGYQVDRLGHHGLSCPKSAGRLSRHACLNDIIRRALVSVNVPAVLEPNGLARDDGKRPDGMTLVPWRLGRPLVWDSTCVDTLAPSHIATTCQNPGGAATNAEAPKRRKYMCLGDNYIFVPFAVETLGPWGPAAHNLFDSLKKKLIRTTCDPRAGAFLGQRLSIAVQRGNAASILGSFPPMSDLG

SEQ ID NO: 15189 - protein, 943 aa, Apotomis turbidana
MPANSQPAEGFVECPHCSTTKVFRGQRGLNIHISKTHKAHLNLSIPQQSSAQLSSPPQHCSLSTLLSSLKRSTPILKRIPRGARHTVANRLIKTIDDCTAENSESSWLRLLSFSYNTLHVSKGHPEVSLTQKLKDNCSRAVSFQQFSSVTSHQRPSQPLFKKVETKFNDGDLRGAARLLFSNDSCAPNSATTLAALSSKHPPASPSSQLPTPPDPTLPCLLASEDRVFAAVMSFKNGSAGGLDGISPQHLKDLLTVPGGRNNALLTALTNLINLMLAGKVHPLVTDTLYGANLCALLKKDGGIRPIAVGSTFRRIASKICCRHILPLLQPKFQPVQLGFGCKGGCEAAVHACRTFLNTSSSKALLKLDVKNAFNSINRYTMLSEIQKVVPDIYHYLWQCYGSASNLVFENNTLLSSVGCQQGDPLGPAIFSLAIHPIISDLTSKFNVWYLDDGTLGGDADSVLNDLSLIKNKFDSIGLKLNFDKCEVFLDGNFDTLSVKQAFESASPGIKFLSKDTLHLLGVPIFAEGIPSFVENKISKFEESADRLLEIHAHMAVFILRSCLFVPKFTYALRCCPFWKFKLLCENIDNIIHAHLEKIINAKFDDRQFLQATLPVRFGGLGVRQISGVALPAFLSSTHSSLPLIGKILSPLLSDSEVACLSEAKDAWKEACPGTDFPTSTEIQKLWDMPINLRVHNHLTDTSPTPTDKARLLAVSARESGYWLHALPSVNFGTLLDDNSFRVAVGLRLGLDIVVPHQCRCGYQVDRLGHHGLSCPKSAGRLSRHACLNDIIRRALVSVNVPAVLEPNGLARDDGKRPDGMTLVPWRLGRPLVWDSTCVDTLAPSHIATTCQNPGGAATNAEAAKRRKYMCLGDNYIFVPFAVETLGPWGPAAHNLFDSLKKKLIRTTCDPRAGAFLGQRLSIAVQRGNAASILGSFPPMSDLG

SEQ ID NO: 15190 - protein, 943 aa, Apotomis turbidana
MHANSQPAEGFVECPHCSTTKVFRGQRGLNIHISKTHKAHLNLSIPQQSSAQLSSPPQHCSLSTLLSSLKRSTPILKRIPRGARHTVANRLIKTIDDCTAENSESSWLRLLSFSYNTLHVSKGHPEVSLTQKLKDNCSRAVSFQQFSSVTSHQRPSQPLFKKVETKFNDGDLRGAARLLFSNDSCAPNSATTLAALSSKHPPASPSSQLPTPPDPTLPCLLASEDRVFAAVMSFKNGSAGGLDGISPQHLKDLLTVPGGRNNALLTALTNLINLMLAGKVHPLVTDTLYGANLCALLKKDGGIRPIAVGSTFRRIASKICCRHILPLLQPKFQPVQLGFGCKGGCEAAVHACRTFLNTSSSKALLKLDVKNAFNSINRYTMLSEIQKVVPDIYHYLWQCYGSASNLVFENNTLLSSVGCQQGDPLGPAIFSLAIHPIISDLTSKFNVWYLDDGTLGGDADSVLNDLSLIKNKFDSIGLQLNFDKCEVFLDGNFDTLSVKQAFESASPGIKFLSKDTLYLLGVPIFAEGIPSFVENKISKFEESADRLLEIHAHMAVFILRSCLFVPKFTYALRCCPFWKFKLLCENIDNIIHAHLEKIINAKFDDRQFLQATLPVRFGGLGVRQISGVALPAFLSSTHSSLPLIGKILSPLLSDSEVACLSEAKDAWKEACPGTDFPTSTEIQKLWDMPINLRVHNHLTDTSPTPRDKARLLAVSARESGYWLHALPSVNFGTLLDDNSFRVAVGLRLGLDIVVPHQCRCGYQVDRLGHHGLSCPKSAGRLSRHACLNDIIRRALVSVNVPAVLEPNGLARDDGKRPDGMTLVPWRLGRPLVWDSTCVDTLAPSHIATTCQNPGGAATNAEAAKRRKYMCLGDNYIFVPFAVETLGPWGPAAHNLFDSLKKKLIRTTCDPRAGAFLGQRLSIAVQRGNAASILGSFPPMSDLG

SEQ ID NO: 15191 - protein, 943 aa, Apotomis turbidana
MPANSQPAEGFVECPHCSTTKVFRGQRGLNIHISKTHKAHLNLSIPQQSSAQLSSPPQHCSLSTLLSSLKRSTPILKRIPRGARHTVANRLIKTIDDCTAENSESSWLRLLSFSYNTLHVSKGHPEVSLTQKLKDNCSRVVSFQQFSSVTSHQRPSQPLFKKVETKFNDGDLRGAARLLFSNDSCAPNSATTLAALSSKHPPASPSSQLPTPPDPTLPCLLASEDRVFAAVMSFKNGSAGGLDGISPQHLKDLLTVPGGRNNALLTALTNLINLMLAGKVHPLVTDTLYGANLCALLKKDGGIRPIAVGSTFRRIASKICCRHILPLLQPKFQPVQLGFGCKGGCEAAVHACRTFLNTSSSKALLKLDVKNAFNSINRYTMLSEIQKVVPDIYHYLWQCYGSASNLVFENNTLLSSVGCQQGDPLGPVIFSLAIHPIISDLTSKFNVWYLDDGTLGGDADSVLNDLSLIRNKFDSIGLQLNFDKCEVFLDGNFDTLSVKQAFESASPGIKFLSKDTLHLLGVPIFAEGIPSFVENKISKFEESADRLLEIHAHMAVFILRSCLFVPKFTYALRCCPFWKFKLLCENIDNIIHAHLEKIINAKFDDRQFLQATLPVRFGGLGVRQISGVALPAFLSSTHSSLPLIGKILSPLLSDSEVACLSEAKDAWKEACPGTDFPTSTEIQKLWDMPINLRVHNHLTDTSPTPRDKARLLAVSARESGYWLHALPSVNFGTLLDDNSFRVAVGLRLGLDIVVPHQCRCGYQVDRLGHHGLSCPKSAGRLSRHACLNDIIRRALVSVNVPAVLEPNGLARDDGKRPDGMTLVPWRLGRPLVWDSTCVDTLAPSHIATTCQNPGGAATNAEAAKRRKYMCLGDNYIFVPFAVETLGPWGPAAHNLFDSLKKKLILTTCDPRAGAFLGQRLSIAVQRGNAASILGSFPPMSDLG

SEQ ID NO: 15192 - protein, 712 aa, Apotomis turbidana
MSFKNGSAGGLDGISPQHLKDLLTVPGGRNNALLTALTNLINLMLAGKVHPLVTDTLYGANLCALLKKDGGIRPIAVGSTFRRIASKICCRHILPLLQPKFQPVQLGFGCKGGCEAAVHACRTFLNTSSSKALLKLDVKNAFNSINRYTMLSEIQKVVPDIYHYLWQCYGSASNLVFENNTLLSSVGCQQGDPLGPAIFSLAIHPIISDLTSKFNVWYLDDGTLGGDADSVLNDLSLIKNKFDSIGLQLNFDKCEVFLDGNFDTLSVKQAFESASPGIKFLSKDTLHLLGVPIFAEGIPSFVENKISKFEESADRLLEIHAHMAVFILRSCLFVPKFTYALRCCPFWKFKLLCENIDNIIHAHLEKIINAKFDDRQFLQATLPVRFGGLGVRQISGVALPAFLSSTHSSLPLIGKILSPLLSDSEVACLSEAKDAWKEACPGTDFPTSTEIQKLWDMPINLRVHNHLTDTSPTPRDKARLLAVSARESGYWLHALPSVNFGTLLDDNSFRVAVGLRLGLDIVVPHQCRCGYQVDRLGHHGLSCPKSAGRLSRHACLNDIIRRALVSVNVPAVLEPNGLARDDGKRPDGMTLVPWRLGRPLVWDSTCVDTLAPSHIATTCQNPGGAATNAEAAKRRKYMCLGDNYIFVPFAVETLGPWGPAAHNLFDSLKKKLIRTTCDPRAGAFLGQRLSIAVQRGNAASILGSFPPMSDLG

SEQ ID NO: 15193 - protein, 943 aa, Apotomis turbidana
MPANSQPAEGFVKCPHCSTTKVFRGQRGLNIHISKTHKAHLNVSIPQQSSAQLSSPPQHCSLSTLLSSLKRSTPILKRIPRGARHTVANSLIKTIDDCTAENSERSWLRLLSFSYNTLHVSKGHPEVSLTQKLKDNCSRAVSFQQFSSVTSHQRPSQPIFKKVETKFNDGDLRGAARLLFSNDSCAPNSATTLAALSSKHPPAPPSSQLPTPPDPTLPCLLASEDRVFAAVMSFKNGSAGGLDGISPQHLKDLLTVPGGRNNALLTALTNLINLMLAGKVNPLVTDTLYGANLCALLKKDGGIRPIAVGSTFRRIASKICCRHILPLLQPKFQPVQLGFGCKGGCEAAVHACRTFLNTSSSKALLKLDVNNAFNSINRYTMLSEIQKVVPDIYHYLWQCYGTASNLVFENNTLLSSDGCQQGDPLGPAIFSLAIHPIISDLTSKFNVWYLDDGTLGGDADSVLSDLSLIKKKFDSIGLQLNFDKCEVFLDGNFDTLSVKQAFESASPGIKILSKETLHLLGVPIFDEGIPSFVENKISKFEESADRLLEIHAHMAVFILRSCLFVPKFTYALRCCPFWKFKLLCENIDNIIHAHLEKIINAKFDARQFLQATLPVRFGGLGVRQISGVALPAFLSSTHSSLPLIGKILYPLLSDSEVACSSEAKDAWKEACPGTDFPTSTEIQKLWDMPINLRVHNHLTDTSPTPRDKARLLAVSARESGYWLHALPSVNFGTLLDDYYFRVAVGLRLGLDIVVPHQCRCGYQVDRLGHHGLSCPKNAGRLSRHACLNDIIRRALVSVNVPAVLEPNGLARDDGKRPDGMTLVRWWLGRPLVWDSTCVDTLAPSHIATTCQNTGGAATNAEAAKRRKYMCLGDNYIFVPFAVETLGPWGPAAHNLFDSLKKKLIRTTCDPRAGAFLGQRLSIAVQRGNAASILGSFPPMTDLG

SEQ ID NO: 15194 - protein, 943 aa, Apotomis turbidana
MPANSQPAEGFVECPHCSTTKVFRGQRGLNIHISKTHKAHLNLSIPQQSSAQLSSPPQHCSLSTLLSSLKRSTPILKRIPRGARHTVANRLIKTIDDCTAENSESSWLRLLSFSYNTLHVSKGHPEVSLTQKLKDNCSRAVSFQQFSSVTSHQRPSQPLFKKVETKFNDGDLRGAARLLFSNDSCAPNSATTLAALSSKHPPASPSSQLPTPPDPTLPCLLASEDRVFAAVMSFKNGSAGGLDGISPQHLKDLLTVPGGRNNALLTALTNLINLMLAGKVHSLVTDTLYGANLCALLKKDGGIRPIAVGSTFRRIASKICCRHILPLLQPKFQPVQLGFGCKGGCEAAVHACRTFLNTSSSKALLKLDVKNAFNSINRYTMLSEIQKVVPDIYHYLWQCYGSASNLVFENNTLLSSVGCQQGDPLGPAIFSLAIHPIISDLTSKFNVWYLDDGTLGGDADSVLNDLSLIKNKFDSIGLQLNFDKCEVFLDGNFDTLSVKQAFESASPGIKFLSKDTLHLLGVPIFAEGIPSFVENKISKFEESADRLLEIHAHMAVFILRSCLFVPKFTYALRCCPFWKFKLLCENIDNIIHAHLEKIINAKFDDRQFLQATLPVRFGGLGVRQISGVALPAFLSSTHSSLPLIGKILSPLLSDSEVACLSEAKDAWKEACPGTDFPTSTEIQKLWDMPINLRVHNHLTDTSPTPRDKARLLAVSARESGYWLHALPSVNFGTLLDDNSFRVAVGLRLGLDIVVPHQCRCGYQVDRLGHHGLSCPKSAGRLSRHACLNDIIRRALVSVNVPAVLEPNGLARDDGKRPDGMTLVPWRLGRPLVWDSTCVDTLAPSHIATTCQNPGGAATNAEAAKRRKYMCLGDNYIFVPFAVETLGPWGPAAHNLFDSLKKKLIRTTCDPRAGAFLGQRLSIAVQRGNAASILGSFPPMSDLG

SEQ ID NO: 15195 - protein, 943 aa, Apotomis turbidana
MHANSQPAEGFVECPHCSTTKVFRGQRGLNIHISKTHKAHLNLSIPQQSSAQLSSPPQHCSLSTLLSSLKRSTPILKRIPRGARHTVANRLIKTIDDCTAENSESSWLRLLSFSYNTLHVSKGHPEVSLTQKLKDNCSRAVSFQQFSSVTSHQRPSQPLFKKVETKFNDGDLRGAARLLFSNDSCAPNSATTLAALSSKHPPASPSSQLPTPPDPTLPCLLASEDRVFAAVMSFKNGSAGGLDGISPQHLKDLLTVPGGRNNALLTALTNLINLMLAGKVHPLVTDTLYGANLCALLKKDGGIRPIAVGSTFRRIASKICCRHILPLLQPKFQPVQLGFGCKGGCEAAVHACRTFLNTSSSKALLKLDVKNAFNSINRYTMLSEIQKVVPDIYHYLWQCYGSASNLVFENNTLLSSVGCQQGDPLGPAIFSLAIHPIISDLTSKFNVWYLDDGTLGGDADSVLNDLSLIKNKFDSIGLQLNFDKCEVFLDGNFDTLSVKQAFESASPGIKFLSKDTLYLLGVPIFAEGIPSFVENKISKFEESADRLLEIHAHMAVFILRSCLFVPKFTYALRCCPFWKFKLLCENIDNIIHAHLEKIINAKFDDRQFLQATLPVRFGGLGVRQISGVALPAFLSSTHSSLPLIGKILSPLLSDSEVACLSEAKDAWKEACPGTDFPTSTEIQKLWDMPINLRVHNHLTDTSPTPRDKARLLAVSARESGYWLHALPSVNFGTLLDDNSFRVAVGLRLGLDIVVPHQCRCGYQVDRLGHHGLSCPKSAGRLSRHACLNDIIRRALVSVNVPAVLEPNGLARDDGKRPDGMTLVPWRLGRPLVWDSTCVDTLAPSHIATTCQNPGGAATNAEAAKRRKYMCLGDNYIFVPFAVETLGPWGPAAHNLFVSLKKKLIRTTSDPRAGAFLGQRLSIAVQRGNAASILGSFPPMSDLG

SEQ ID NO: 15196 - protein, 712 aa, Apotomis turbidana
MSFKNGSAGGLDGISPQHLKDLLTVPGGRNNALLTALTNLINLMLAGKVHPLVTDTLYGANLCALLKKDGGIRPIAVGSTFRRIASKICCRHILPLLQPKFQPVQLGFGCKGGCEAAVHACRTFLNTSSSKALLKLDVKNAFNSINRYTMLSEIQKVVPDIYHYLWQCYGSASNLVFENNTLLSSVGCQQGDPLGPAIFSLAIHPIISDLTSKFNVWYLDDGTLGGDADSVPNDLSLIKNKFDSIGLQLNFDKCEVFLDGNFDTLSVKQAFESASPGIKFLSKDTLHLLGVPIFAEGIPSFVENKISKFEESADRLLEIHAHMAVFILRSCLFVPKFTYALRCCPFWKFKLLCENIDNIIHAHLEKIINAKFDDRQFLQATLPVRFGGLGVRQISGVALPAFLSSTHSSLPLIGKILSPLLSDSEVACLSEAKDAWKEACPGTDFPTSTEIQKLWDMPINLRVHNHLTDTSPTPRDKARLLAVSARESGYWLHALPSVNFGTLLDDNSFRVAVGLRLGLDIVVPHQCRCGYQVDRLGHHGLSCPKSAGRLSRHACLNDIIRRALVSVNVPAVLEPNGLARDDGKRPDGMTLVPWRLGRPLVWDSTCVDTLAPSHIATTCQNPGGAATNAEAAKRRKYMCLGDNYIFVPFAVETLGPWGPAAHNLFDSLKKKLIRTTCDPRAGAFLGQRLSIAVQRGNAASILGSFPPMSDLG

SEQ ID NO: 15197 - protein, 942 aa, Apotomis turbidana
MFILLVKRHACQQSTCRRFCRVSCVSGLNIHISKTHKAHLNLSIPQQSSAQLSSPPQHCSLSTLLSSLKRSTPILKRIPRGARHTVANRLIKTIDDCTAENSESSWLRLLSFSYNTLHVSKGHPEVSLTQKLKDNCSRAVSFQQFSSVTSHQRPSQPLFKKVETKFNDGDLRGAARLLFSNDSCAPNSATTLAALSSKHPPASPSSQLPTPPDPTLPCLLASEDRVFAAVMSFKNGSAGGLDGISPQHLKDLLTVPGGRNNALLTALTNLINLMLAGKVHPLVTDTLYGANLCALLKKDGGIRPIAVGSTFRRIASKICCRHILPLLQPKFQPVQLGFGCKGGCEAAVHACRTFLNTSSSKALLKLDVKNAFNSINRYTMLSEIQKVVPDIYHYLWQCYGSASNLVFENNTLLSSVGCQQGDPLGPAIFSLAIHPIISDLTSKFNVWYLDDGTLGGDADSVLNDLSLIKNKFDSIGLQLNFDKCEVFLDGNFDTLSVKQAFESASPGIKFLSKDTLHLLGVPIFAEGIPSFVENKISKFEESADRLLEIHAHMAVFILRSCLFVPKFTYALRCCPFWKFKLLCENIDNIIHAHLEKIINAKFDDRQFLQATLPVRFGGLGVRQISGVALPAFLSSTHSSLPLIGKILSPLLSDSEVACLSEAKDAWKEACPGTDFPTSTEIQKLWDMPINLRVHNHLTDTSPTPRDKARLLAVSARESGYWLHALPSVNFGTLLDDNSFRVAVGLRLGLDIVVPHQCRCGYQVDRLGHHGLSCPKSAGRLSRHACLNDIIRRALVSVNVPAVLEPNGLARDDGKRPDGMTLVPWRLGRPLVWDSTCVDTLAPSHIATTCQNPGGAATNAEAAKRRKYMCLGDNYIFVPFAVETLGPWGPAAHNLFDSLKKKLIRTTCDPRAGAFLGQRLSIAVQRGNAASILGSFPPMSDLG

SEQ ID NO: 15198 - protein, 942 aa, Apotomis turbidana
MPANSQPAEGFVECPHCSTTKVFRGQRGLNIHISKTHKAHLNLSIPQQSSAQLSSPPQHCSLSTLLSSLKRSTPILKRIPRGARHTVANRLIKTIDDCTAENSESSWLRLLSFSYNTLHVSKGHPEVSLTQKLKDNCSRAVSFQQFSSVTSHQRPSQPLFKKVETKFNDGDLRGAARLLFSNDSCAPNSATTLAALSSKHPPASPSSQLPTPPDPTLPCLLASEDRVFAAVMSFKNGSAGGLDGISPQHLKDLLTVPGGRNNALLTALTNLINLMLAGKVHPLVTDTLYGANLCALLKKDGGIRPIAVGSTFRRIASKICCRHILPLLQPKFQPVQLGFGCKGGCEAAVHACRTFLNTSSSKALLKLDVKNAFNSINRYTMLSEIQKVVPDIYHYLWQCYGSASNLVFENNTLLSSVGCQQGDPLGPAIFSLAIHPIISDLTSKFNVWYLDDGTLGGDADSVLNDLSLIKNKFDSIGLQLNFDKCEVFLDGNFDTLSVKQAFESASPGIKFLSKDTLHLLGVSIFAEGIPSFVENKISKFEESADRLLEIHAHMAVFILRSCLFVPKFTYALRCCPFWKFKLLCENIDNIIHAHLEKIINAKFDDRQFLQATLPVRFGGLGVRQISGVALPAFLSSTHSSLPLIGKILSPLLSDSEVACLSEAKDAWKEACPGTDFPTSTEIQKLWDMPINLRVHNLTDTSPTPRDKARLLAVSARESGYWLHALPSVNFGTLLDDNSFRVAVGLRLGLDIVVPHQCRCGYQVDRLGHHGLSCPKSAGRLSRHACLNDIIRRALVSVNVPAVLEPNGLARDDGKRPDGMTLVPWRLGRPLVWDSTCVDTLAPSHIATTCQNPGGAATNAEEAKRRKYMCLGDNYIFVPFAVETLGPWGPAAHNLFDSLKKKLIRTTCDPRAGAFLGQRLSIAVQRGNAASILGSFPPMSDLG

SEQ ID NO: 15199 - protein, 2168 aa, Trachurus trachurus
MSKFADFTIDSMSRVLVVYYTAYLQASGGRKKPPLCLLANKYVRCMERCRMYRNLLDTLSSNAADSSLVDTSTSKKGQCRRLTKALASNITSRDITLNRFIEGIQSEIDSGEFPKILLEEDGSVCIEPELTMWPKLTPRYLTYLKQFKSTTTSTSTLNSNDLNLNSNNKNNTIKDVNLITSKSNIITSNIITSNSNNNNLHDNKNDDINSLNNDPLWHITPNVLNNNITKLIQNPTDNSNSNSNNTLTNCQRKFYETMANDPKLNPTLSTKTKIKIQVPTVTPLPSPKPLNLNNLTPIPIPINTTGKNNSLNRDENPFININENDHIDCNSNSNEILNPSLNDFNDLNDAKLSSDSESDLVSDNKTKYGDWDANENEILFELNNSLIKKSKQLKSNKDSSIKSVKRIKGTNLDSTSKAKYVVIEECPDSFVDNFNSNSINNDNNSDNDHPVNDDMSSETDWPLPKPVTTTISNSNIDLRLNHIYNYNDCLDVNKPSILDLSSAVSARNSPNINISLSPNSKFLENMRNKLMNNYNQYIESNSPKPSSINDNNATNDKNSTNDKNSTNDKNSTNDNHSTNEINDNHSTNEINDDSIQGNFVLKTNSTLINKSHNNSKSNANGSPQNSPSFTHILPTEEDFNFTLLNNNTFNTFTTLNKPTSRNNTTTFNLNTINNNSSNTTTNNNNENLCKLNTNLNLKSNNNSIDSINLNNEKCEPPRFDSKPHEEPPVSKKRPKVSSISSDDDENPTTIAKSDTKSTTPILRNKPKSPLKDLSTNLLYHPMAKKIKFSKDDDDDENSEEIDVDSQLKSQPNNSPIILNTQVINDFIAVEKENNPTEIITISDSVNCNSDNDADSNIFANFDFVSDIEPNDSPTENNKEPQNLNSNPITNPTDNGLQKVILSPGNNADAMFKLKSAFAPQSTQENDSTDDLVMVNSKKPIPTPSSQPLSKDQLIVASILNRHTTKHKLPPVPKLKFNKSNFKSTSNPPSSSKKSQKRSAPSVNTQDPETIEECDIDLSKSQQQQNHNDNNQETNDKDKNNDNSKEFPDYYTDKEMKSDKIKACVNELEALMIKYDNPNSNNPMEDFYNDFIRLATIQAQSLKLFYIPKFKPKDTNPNPIIDEPSIQLIKSIDENGNVTLEDHVDSPTPPPLTITLENEDENENEDKDKEEHGNGIKNETAWNSEEAIRLRALYKFNTKKCVRQIVDNKPVWCQVSAQEMVDSLSSPPPIVPEGFEKYINHINSSQSNTNNPTILSQNSPRQDEPQEQIQVDTQKSISESNSRPNSIEQGFHTESDGEFNNISDNHLNSNSNSQSNQIPNKDPIPTTSFNPTPTVNSNSNSLKDQNQKSQSSLYPNELESAFKFTYSDVSNAIIKAKSDTSSGTDGIQMKFWKSMTNIETVIMSLFNRILDAKRVPQQWLEARMVMIPKSDDPNPMATSDYRPICITQTIYRIFMSALNSKIHPLIDLSANQKGFHSGEGCVEHAFTLQEVINDHRNHRSPLFITWIDLRKAFDTVPHWSILHQLHNMDVPNDVIMLINHLYQNSYNIVKDQQQQTANHHMNERGVRQGCPLSPTLFNIAIDPFLRKMDEENIGYTMKNGVKINSLAYADDLVLVSNNKDNAQKAINFLSEFLDMYGMQTNISKCTSIQSTYAKTHQHVVNDKNYHSPLKIQDDEIPMMKPFQFYKYLGTNKNLETFQHLTFQIDKFKKALTKISESALFPYMKLNILKIYLLPILDFRLKTTQLRIEELKSLNTFINNHVSNWYRLPAPTNKAFFYTPTKLGGLGLRNVVDDYKALRTASAMSLLNSKDQRIQKIAIDSLHNTIKNRTLPDQQQQHQLPTPAEFFNMDSIPQEVKTRDVKTIFSSVRMYRKGLNIKFTDNSINHQNNDSLNIPTIDIQPESLKKPPCTFTQPFTPTRIKRLRWHLQATNYEKWLSLPDQGKTAKVFSEDKTSNTWIHNGHIKVTTAQFAIHARLNLLPTMINLNKINRSDSTACRHCPQQHESLCHILNGCPFNHNQIRERHNKILNLIFDKIKLRNQQIIFKDQTFIEGFDRRPDLVLINNINMTAQIIDLTIPYESSAERLSEVYQAKIQKYRDETIFLEQSGFRVTNSCLLYGSLGSHLPSNAAIYKSLGITKKRAKRLKKTITTQILESSHSTFKHHVAAQSMS

SEQ ID NO: 15200 - protein, 1271 aa, Rotaria socialis
MSNSNEAVARQTRVASRARAVFSTISAGLTSSVIGEHQIVGIHAVPLPIRQSRQSPNQVLGLDGGASASRGRAALWTDEEINILRRLVSSNTNPKGIVSWEKVDAEWQNLNLKERSKASLSNKWRDIKIRSVTIVICEDQNGSRDRTESNSEELVQGEIKESTTEERITNSSDVFDVNQTVANNQCKPVDCAEDVIKAVFSKKLKKAQLIGCQMTLRKPPRRVSGNHIKPIICQVNSLISDELERIRKGKRKKVDTITWNQLSNLVYAGATTVSEIGNQRFKEKEEKAKEWFKSSYRECESLRKTIGKATSELNRRRGDAEVAPTIKQAGNIRMLKKKYNVESFADIQSLVEKLKGRLQLLQSRITLRKTDEGRIRIRNMPTNMVLRSIGKEKEKEKEKEKETEMTDVNQIRNFWKKIVGVKKGFNSKSKELVEWEQSVSGIQQEDDLLGRLNLDLWQKVVKKAKPWKAHVPDGLQSFWWKVFSSANAVLYQLILHHITSGEALPQKCITEGRIVLLYKSGPMSVPANYRPIACRNTCYKLLTGFIAAYLDQYVKERQIMPSEQIALQKDVWGCQHAHILDQIMIADAQYQRKRPISVAWIDYTKAFDSVPHSYIKWLLVVMQVPNLIRKLVINIMNMWRVRYEVKGPSGKIERSSYLKIKSGVLQGDSFSPLLFCLAIAPISYAINKTGGGYVMATRKPKGKKIMQTSLSHIFYMDDLKLYANSKQSLDKQKEAVASISRDMNMQLNAKKCAVAHFIPKKLQHEVLVGTHSTKDRNLGFPLLEGAELYKYLGMEQKIGIKESEAWDRVEELCYKKAHQLWNFDLNFRQKVNSFNSAVLPALTYVMSCVAKGSGKYSSVLKRGTRIDVKFRKILTKHEARYKSCCAGRIYLPVDKGGYGLRSVRDSFEESTIYSWAYLCTKAALRSSLNLFVTMVSRGKRCLVSDALGILKSYKIKVVVDKTHSTVILDEVEYTDAKSLARQVVSLMRTANINRRYECWQELTRAGRVLRSTSGIDLTDSFLWFKEGKLSAIAVRNVLAAQEGCLLTIVHPAFKNNNGDKSCRACKKTTETIEHVISSCTKWLSNLYIDRDDSVPRNVHYKLCQLHGLPNGHYTQKVDPVLENDSTKLYWNEPVQTKAIIRHNKPDIIVFDKIKRTALIIEIAVSWFTGISRQKAIKENRYCVNGNWEDDLALPYPWGDNLQREMQTAGWKVSFLPIIIGATGEVLSELKPSMMTMLGLTREQTEYCIERMQRSAVLGTSRIIKNHLASQG

SEQ ID NO: 15201 - protein, 967 aa, Poecilobdella manillensis
MRKEPSIKVFTDCIYQTSLEKFGPKSNKTPKEPKPSRRQRELATLRKEKKALKRRWREANTDERDGLAALWSDVKKRTSDLRRAEKLRLKKYERRRARQNFFRDPYGFGKALLEPPKSGVLQVERSELEEHLSKTYSDILRNVPLAAREDIPTIPLPTSSFDLAAPSYEEIKGVTKKARNKSAPGPNGIPYLVYKRCPRILKILHGLIETAWKSGGVDEEWKRAEGVYIPKEKDSQNLSQFRPISLLNVEGKVFFTIMASRLTQYVMTNQYIDTTVQKGGVPGIPGCIEHTTMIWESIQQAKRNHLSLYVVWLDLANAYGSVPHQLLWKTLEDHHVPRAIISTIQDYFRGFFMRFSTAVYTTRWIPLQVGIAMGCAISPCLFVLAMQILLNAAGAQISRVHIGRSFCTSSIKAFMDDTTLVMNRRRTVQESLDKLNNLLNWCRMAFKPTKSRSLALTKGKVRSDIFFQVAGQRIPTVEEEPVKSLGRVFDKTLRDGKQVAAVGEMLKENMAVIDGVLLPGKFKVWLVQFVILPRLLWPLTIYEFSLTSVEALERCINRFTRKWLGLPPGLSSIALYSKTAKLRLPFRSVTEEFRVSKIRTQLMINSSMDDTISGTRPALRSGRKFNAQEEIERSLEVLAFEETRGPIQNDRHGVGWNHFARLSQVSAAQRQTLIIQERRKEIENSRITKAVQQAQQGQWTTWDQALQRSLSWNDIWRMPPLKLAFVIRSLYDQLPSRDNLRKWGLVEESGCKLCGETQTLRHVLSGCKYALAKGRYTWRHNQVLKVVVEAMKSASTKANAREAVPQKRTYFLREGRAQYAKNRCQTPRKNILENANDWRIAADIEGMKEYPQAVRESGRRPDAVMSSVMTDTIVMVELTVPWEDRMEQSNVLKEDRYSELSMDLTDQGYKVYLFAIEVGARGLVGRSSYNFLREIGLPSKDRSATMEKLSEAAEAASQWLWQRRDSQ

SEQ ID NO: 15202 - protein, 1063 aa, Poecilobdella manillensis
MPGFKCTCGRSFKAEKGLKIHRSKKGCGLKQRAVSDLQTGETSNSTGPEDNHSPECISVPVPQWSPPKQRIKFPSSREKKAWQELDNSLGQELRKKMRKEPSIKVFTDCIYQTGLEKFGPKSNKTPKEPKPSRRRRELATLRKEKKALKRRWREANTDERDGLAALWNDVKKRTSDLRRAEKLRLKKYERRRARQNFFRDPYGFGKALLEPPKSGVLQVEQSELEEHLSKTYSDILRNVPLATREDIPTIPLPTSSFDLAAPSYEEIKGVIKKARNKSAPGPNGIPYLVYKKCPRILKILHGLIEAAWKSGGVDEEWKRAEGVYIPKEKDSQNLSQFRPISLLNVEGKVFFTIMASRLTQYVMTNQYIDTTVQKGGVPGIPGCIEHTTMIWESIQQAKRNHLNLYVVWLDLANAYGSVPHQLLWKTLEDHHVPRAIISTIQDYFKGFFMRFSTAVYTTRWIPLQVGIAMGCAISPCLFVLAMQILLNAAGAQISRVHIGRSFCTSSIKAFMDDTTLVMNRKRTVQESLDKLNNLLNWCRMAFKPTKSISLALTKGKVRSDIFFQVAGQRIPTVEEEPVKSLGRVFDQTLRDGKQVAAVGEMLKENMAVIDGVLLPGKFKVWLVQFVILPRLLWPLTIYEFSLTSVEALERCINRFTRKWLGLPPGLSSIALYSKSAKLRLPFRSVAEEFRVSKIRTQLMINSSMDDTISGTRPALRSGRKFNAQEEIERSLEVLAFEEIRGPIQNDRHGVGWSHFARLSQVSAAQRQTLIIQERRKEIENSRITKAVQQAQQGQWTTWDQALQRSLSWNDIWRMPPLKLAFVIRSLYDQLPSRDNLRKWGLVEESGCKLCGETQTLRHVLSGCKYALAKGRYTWRHNQVLKVVVEAMKSASAKANARESVPQKRTYFLREGRAQYAKNRCQTPRKNILESANDWRIAADIEGMKEYPQAERESGRRPDAVMSSVRTDTIVMVELTVPWEDRMEQSNVLKEDKYSELSMDLTDRGYKVYLFAIEVGARGLVGRSSYNFLREIGLPSKDRSATMEKLSEAAETASQWLWQKRDSQ

SEQ ID NO: 15203 - protein, 1132 aa, Hirudo verbana
MTLGETRVPNTTSNPGALFTATTTTNVICPRDSCRKEGENDESSNDIMVIDTALTRTLNLESALDNGMPECECACGRLFRTEKGLKIHCSKKGCSYVPKNRAAPDMRTGKTLNSTRPEDNHSPECDSASVPHWSPPKQRIKFPSSKEKEKWQELDKVLGQGLRKMMKKNSSITSVTEFIYQTSLVKFGPRQTKLPSEPKPSRRQRELTILRKEKKVLRRRWKEADESEKDGLAELWSDVKRRARDLRRAENARIKKYERRRARQNFFKDPYRFGKSLLDPPKSGLLKVDQSELEEHLSRTYSDDLRSVPLGERQDIPMVPLPTNSFNLAVPSYEEVKSVVRKARNRSAPGPNGIPYLLYRRCPRVLKILHMLVESAWETGRVDNEWKRAEGVYIPKEKDSRSLTQFRPISLLNVEGKVFFTIMASRLTQYVMSNRYIDTAIQKGGVPGVPGCIEHTTMIWESIQQARRNRLSLYVVWLDLANAYGSVPHQLLWKTLENHHAPTPVIKILQEYFRGFEMRFSTMAYTTKWIPLQVGIAMGCAISPCLFVLAMQVLLNASGSHNDRVHIGRKFHTSSIKAFMDDTTLVMNRKQAVQRSLDKMNDLLEWCRMSFKPAKSRSLALTRGKIRSDVSFLVAGQRIPTVQEEPVKSLGRVFDETLKDRNQETATWKMLKESLDAIGGVFLPGRFKVWLVQFVLIPRLMWPLTMYEIGLPTVEAMERCINRLTRKWLGLPPGLSSVTLYSRSAKLKMPFRSVAEEFRISKIRTQLMINNSTDSTICGSKPLLRSGRKFNAQEEIEKSIEVLTFEEIRGPIQVGRHGIGWSHSIGWTQANAAQRSALIIQERKRDIENARITKAVQQGQQGQWTTWDEALQRPISWSDIWSMPPLRLSFVIRSLYDQLPSRDNLRKWGMVEDSRCVLCGEVQTFRHVLSSCKYALAQGRYTWRHNQVLQILVEAMESACSKANARESVPQRRMYFLREGASQYARSKCKTPRRDLLENAIDWMTAADIGGMKHYPQVIQESGQRPDAVMAFKKTDTIIVAELTVPWEDRMEQSNVLKEDRYSELTMDLIDKGYRVHFFAIEVGARGLVGRSSYTFLREIGLPGRERNKVMERMSKAAETASHWLWTKRDSQ

SEQ ID NO: 15204 - protein, 1132 aa, Hirudo verbana
MTLGETRVPNRTSNPGALFTATTTTNVKCPRDSCRKEGENDKSSNDIMVIDTALTRTLNLESALDNGMPECECACGRLFRTEKGLKIHCSKKGCSYVPKNRAAPDMRTGKTLNSTRPEDNHSPECDSASVPHWSPPKQRIKFPSSKEKEKWQELDKVLGQGLRKMMKKNSSITSVTEFIYQTSLVKFGPRQTKLPSEPKPSRRQRELTILRKEKKVLRRRWKEADESEKDGLAELWSDVKRRARDLRRAENARIKKYERRRARQNFFKDPYRFGKSLLDPPKSGLLKVDQSELEEHLSRTYSDDLRSVPLYERQDIPMVPLPTNSFNLAVPSYEEVKSVVRKARNRSAPGPNGIPYLLYKRCPRVLKILHMLVESAWETGRVDNEWKRAEGVYIPKEKDSRSLTQFRPISLLNVEGKVFFTIMASRLTQYVMSNRYIDTAIQKGGVPGVPGCIEHTTMIWESIQQARRNRLSLYVVWLDLANAYGSVPHQLLWKTLENHHAPTPVIKILQEYFRGFEMRFSTMAYTTKWIPLQVGIAMGCAISPCLFVLAMQVLLNASGSHNDRVHIGRKFHTSSIKAFMDDTTLVMNRKQAVQRSLDKMNDLLEWCRMSFKPAKSRSLALTRGKIRSDVSFLVAGQRIPTVQEEPVKSLGRVFDETLKDRNQETATWKMLKESLDAIGGVFLPGRFKVWLVQFVLIPRLMWPLTMYEIGLPTVEAMERCINRLTRKWLGLPPGLSSVTLYSRSAKLKMPFRSVAEEFRISKIRTQLMINNSTDSTICGSKPLLRSGRKFNAQEEIEKSIEVLTFEEIRGPIQVGRHGIGWSHSIGWTQANAAQRSALIIQERKRDIENARITKAVQQGQQGQWTTWDEALQRPISWSDIWSMPPLRLSFVIRSLYDQLPSRDNLRKWRMVEDSRCVLCGEVQTLRHVLSSCKYALAQGRYTWRHNQVLQILVEAMESACSKANARESLPQRRTYFLREGSSQYARSKCKTPRRDLLENANDWTTAADIGGMNHYPQVIQESGQRPDAVMASKKTDTIIVAELTVPWEDRMEQSNVLKEDRFSELTMDLIDKGYRVHFFAIEVGARGLVGRSSYTFLREIGLPGRERNKVMERMSKAAETASHWLWTKRDSQ

SEQ ID NO: 15205 - protein, 1094 aa, Crassostrea hongkongensis
MNTINGSICSCGKTLKNARGLKIHMAKMGCRPNQRLAQRTGQPDETEEEVVQDSDQSDHSVQVPDSEEVDQQVPEDHSQAMPEPSIDTKSGEWKQKIRWPPNNNKADWDQFDFDVDSILNTSLAGGIDKKVEAMATIMYNVGKERFGLEEVRQKQQKSTGHRNRRQQERASIRRDLRQLSKRYRVAPEEERAALAELRQGMRERLKILNRAERSRKRRKERARARARFTANPFQFTSKLLGKKSSGKLLAEKAEVENHLKEVHSDEKRDEELPEQPKLIQVCEPEHIFDESEPTAKEVRDVIQKARAASAPGPNGIPYKVYKNCPRLTRRLWKHIRVIWRRGRLADSWNQAEGCYIPKEENSKNLSQFRTISLLNVEGKILLSVMANRMTRYMLDNNYVDIAVQKGGVPGVSGCIEHTSVLTQIIREAREGKGELAVIWLDLANAYGSMPLKLVQLTLEKYHVPAKTRHLLEEYFNRLELRFSIGDYTTSWQRLEVGIVTGCTISVILFAAAMNLLVKSTEKMSRGPWMRAGIRQPPVRAFMDDMTISTKTAIEARWTLKEIEELISWARMKIKPSKSRSLVLKKGRVTNYDFQLGQEIIPSVSEKPVKCLGKYFDDTLRDTKNTTNTVEQLQQWMEAIDKSGLPGKYKTWIYQHGVLPRILWPLQVYDVPMSRVEAMERLTTKFLRRWLAIPQCFSSVGLYSVGTKLQLPLSSLVEEYKVTKVRQHLTLRDSKDEKVRGARVNLEAGRKWSVQDTVREAELRLKQADIVGNVAVGRLDLGTITSTRWRTAGKGVQRKLVQKEVRVMEEDSRMVKAVGMKKQGSWMNWEAVRQRKVTWNDIWSMEPNRLQFLLRSVYDVLPSPTNLAVWGLTEDPNCKLCGKPANLEHILSSCSVALSEGRYTWRHDQILSVLADSLEKARKRPPPKDKRLKFINFVRAGEREKTGSTGEGRGLLGTAGDWQMRADLKTRMQFPTEVASTNKRPDIVIWSPSSRQVIIVELTVPWEERMEDAYERKMGKYQELVADCQERGWRVWCFPVEVGTRGFVGQSLWRALRVIGVIGLERRQLIGRLSREAEIASLWLWRRREGQWGRQ

SEQ ID NO: 15206 - protein, 1144 aa, Crassostrea hongkongensis
MDILCEEEPTISAIDRYILRYPRGRTRVGEDERPNQEDYTDTTTNRQRTEMNTINGSICSCGKTLKNARGLKIHMAKMGCRPNQRLAQRTGQPDETEEEVVQDSDQSDHSVQVPDSEEVDQQVPEDHSQAMPEPSIDTKSGERKQKIRWPPNNNKADWDQFDFDVDSILNTSLAGGIDKKVETMATIMYNVGKERFGLEEVRQKQQKSTGHRNRRQQERASIRRDLRQLSKRYRVAPEEERAALAELRQGMRERLKILNRAERSRKRRKERARARARFTANPFQFTSKLLGKKSSGKLLAEKAEVENHLKEVHSDEKRDEELSEQPKLIQVCEPEHIFDESEPTAKEMRDVIQKARAASAPGPNGIPYKVYKNCPRLTRRLWKHIRVIWRRGRLADSWNQAEGCYIPKEENSKNLLQFRTISLLNVEGKILLSVMANRMTRYMLDNNYVDIAVQKGGVPGVSGCIEHTSVLTQIIREAREGKGELAVIWLDLANAYGSMPHKLVQLTLEKYHVPAKTRHLLEEYFNRLELRFSIGDYTTSWQRLEVGIVTGCTISVILFAAAMNLLVKSTEKMSRGPWMRAGIRQPPVRAFMDDMTISTKTAIEARWTLKEIEELISWARMKIKPSKSRSLVLKKGRVTNYDFQLGQEIIPSVSEKPVKCLGKYFDDTLRDTKNTTNTVEQLQQWMEAIDKSGLPGKYKTWIYQHGVLPRILWPLQVYDVPMSRVEAMERLTTKFLRRWLAIPQCFSSVGLYSVGTKLQLPLSSLVEEYKVTKVRQHLTLRDSKDEKVRGARVNLEAGRKWSVQDTVREAELRLKQADIVGNVAVGRLGLGTITSTRWRTAGKGVQRKLVQKEVRVMEEDSRMVKAVGMKKQGSWMNWEAVRQRKVTWNDIWSMEPNRLQFLLRSVYDVLPSPTNLAVWGLTEDPNCKLCGKPANLEHILSSCSVALSEGRYTWRHDQILSVLADSLEKARKRPPPKDKRLKFINFVRAGEREKTGSTGEGRGLLGTAGDWQMRADLKTRMQFPTEVASTNKRPDIVIWSPSSRQVIIVELTVPWEERMEDAFERKMGKYQELVADCQERGWRVWCFPVEVGTRGFVGQSLWRALRVIGVIGLERRQLIGRLSREAEIASLWLWRRREGQWGRQ

SEQ ID NO: 15207 - protein, 950 aa, Crassostrea gigas
MWERREVRQKQQKSTGHRNRRQQERASIRRDLRQLSKRYRVAPEEERAALAELRQGMRERLKILNRAERSRKRRKERARARARFTANPFQFTSKLLGKKSSGKLLAEKAEVENHLKEVHSDEKRDEELPEQPKLIQVCEPEHIFDESEPTAKEVRDVIQKARAASAPGPNGIPYKVYKNCPRLTRRLWKHIRVIWRRGRLADSWNQAEGCYIPKEENSKNLSQFRTISLLNVEGKILLSVMANRMTRYMLDNNYVDIAVQKGGVPGVSGCIEHTSVLTQIIREAREGKGELAVIWLDLANAYGSMPHKLVQLTLEKYHVPAKTRHLLEEYFNRLELRFSIGDYTTAWQRLEVGIVTGCTISVILFAAAMNLLVKSTEKMSRGPWMRAGIRQPPVRAFMDDMTISTKTAIEARWTLKEIEELISWARMKIKPSKSRSLVLKKGRVTNYDFQLGQEIIPSVSEKPVKCLGKYFDDTLRDTKNTTNTVEQLQQWMEAIDKSGLPGKYKTWIYQHGVLPRILWPLQVYDVPMSRVEAMERLTTKFLRRWLAIPQCFSSVGLYSVGTKLQLPLSSLVEEYKVTKVRQHLTLRDSKDEKVRGARVNLEAGRKWSVQDTVREAELRLKQADIVGNVAVGRLGLGTITSTRWRTAGKGVQRKLVQKEVRVMEEDSRMVKAVGMKKQGSWVNWEAVRQRKVTWNDIWSMEPNRLQFLLRSVYDVLPSPTNLAVWGLTDDPNCKLCGKPANLEHILSSCSVALSEGRYTWRHDQILSVLADSLEKARKRPPPKDKRLKFINFVRAGEREKTGSTGEGRGLLGTAGDWQMRADLKTRMQFPTEVASTNKRPDIVIWSPSSRQVIIVELTVPWEERMEDAYERKMGKYQELVADCQERGWRVWCFPVEVGTRGFVGQSLWRALRVIGVIGLERRQLIGRLSREAEIASLWLWRRREGQWGRQ

SEQ ID NO: 15208 - protein, 1144 aa, Crassostrea hongkongensis
MDILCEEEPTISAIDRYILRYPRGRTRVGEDERPNQEDYTDTTTNRQRTEMNTINGSICSCGKTLKNARGLKIHMAKMGCRPNQRLAQRTGQPDETEEEVVQDSDQSDHSVQVPDSEEVDQQVPEDHSQAMPEPSIDTKSGERKQKIRWPPNNNKADWDQFDFDVDSILNTSLAGGIDKKVEAMATIMYNVGKERFGLEEVRQKQQKSTGHRNRRQQERASIRRDLRQLSKRYRVAPEEERAALAELRQGMRERLKILNRAERSRKRRKERARARARFTANPFQFTSKLLGKKSSGKLLAEKAEVENHLKEVHSDEKRDEELPEQPKLIQVCEPEHIFDESEPTAKEVRDVIQKARAASAPGPNGIPYKVYKNCPRLTRRLWKHIRVIWRRGRLADSWNQAEGCYIPKEENSKNLSQFRTISLLNVEGKILLSVMANCMTRYMLDNNYVDIAVQKGGVPGVSGCIEHTSVLTQIIREAREGKGELAVIWLDLANAYGSMPHKLVQLTLEKYHVPAKTRHLLEEYFNRLELRFSIGDYTTSWQRLEVGIVTGCTISVILFAAAMNLLVKSTEKMSRGPWMRAGIRQPPVRAFMDDMTISTKTAIEARWTLKEIEELISWARMKIKPSKSRSLVLKKGRVTNYDFQLGQEIIPSVSEKPVKCLGKYFDDTLRDTKNTTNTVEQLQQWMEAIDKSGLPGKYKTWIYQHGVLPRILWPLQVYDVPMSRVEAMERLTTKFLRRWLAIPQCFSSVGLYSVGTKLQLPLSSLVEEYKVTKVRQHLTLRDSKDEKVRGARVNLEAGRKWSVQDTVREAELRLKQADIVGNVAVGRLGLGTITSTRWRTAGKGVQRKLVQKEVRVMEEDSRMVKAVGMKKQGSWMNWEAVRQRKVTWNDIWSMEPNRLQFLLRSVYDVLPSPTNLAVWGLTEDPNCKLCGKPANLEHILLSCSVALSEGRYTWRHDQILSVLADSLEKARKRPPPKDKRLKFINFVRAGEREKTGSTGEGRGLLGTAGDWQMRADLKTRMQFPTEVASTNKRPDIVIWSPSSRQVIIVELTVPWEERMEDAYERKMGKYQELVADCQERGWRVWCFPVEVGTRGFVGQSLWRALRVIGVIGLERRQLIGRLSREAEIASLWLWRRREGQWGRQ

SEQ ID NO: 15209 - protein, 1144 aa, Crassostrea hongkongensis
MDILCEEEPTISAIDRYILRYPRGRTRVGEDERPNQEDYTDTTTNRQRTEMNTINGSICSCGKTLKNARGLKIHMAKMGCRPNQRLAQRTGQPDETEEEVVQDSDQSDHSVQVPDSEEVDQQVPDDHSQAMPEPSIDTKSGERKQKIRWPPNNNKADWDQFDFDVDSILNTSLAGGIDKKVEAMATIIYNVGKERFGLEEVRQKQQKSTGHRNRRQQERASIRRDLRQLSKRYRVAPEEERAALAELRQGMRERLKILNRAERSRKRRKERARARARFTANPFQFTSKLLGKKSSGKLLAEKAEVENHLKEVHSDEKRDEELSEQPKLIQVCEPEHIFDESEPTAKEVRDVIQKARAASAPGPNGIPYKVYKNCPRLTRRLWKHIRVIWRRGRLADSWNQAEGCYIPKEENSKNLSQFRTISLLNVEGKILLSVMANRMTRYMLDNNYVDIAVQKGGVPGVSGCIEHTSVLTQIIREAREGKGELAVIWLDLANAYGSMPHKLVQLTLEKYHVPAKTRHLLEEYFNRLELRFSIGDYTTSWQRLEVGIVTGCTISVILFAAAMNLLVKSTEKMSRGPWMRAGIRQPPVRAFMDDMTISTKTAIEARWTLKEIEELISWARMKIKPSKSRSLVLKKGRVTNYDFQLGQEIIPSVSEKPVKCLGKYFDDTLRDTKNTTNTVEQLQQWMEAIDKSGLPGKYKTWIYQHGVLPRILWPLQVYDVPMSRVEAMERLTTKFLRRWLAIPQCFSSVGLYSVGTKLQLPLSSLVEEYKVTKVRQHLTLRDSKDEKVRGARVNLEAGRKWSVQDTVREAELRLKQADIVGNVAVGRLGLGTITSTRWRTAGKGVQRKLVQNEVRVMEEDSRMVKAVGMKKQGSWMNWEAVRQRKVTWNDIWSMEPNRLQFLLRSVYDVLPSPTNLAVWGLTEDPNCKLCGKPANLEHILSSCSVALSEGRYTWRHDQILSVLADSLEKARKRPPPKDKRLKFINFVRAGEREKTGSTGEGRGLLGTAGDWQMRADLKTRMQFPTEVASTNKRPDIVIWSPSSRQVIIVELTVPWEERMEDAFERKMGKYQELVADCQERGWRVWCFPVEVGTRGFVGQSLWRALRVIGVIGLERRQLIGRLSREAEIASLWLWRRREGQWGRQ

SEQ ID NO: 15210 - protein, 1144 aa, Crassostrea hongkongensis
MDILCEEEPTISAIDRYILRYPRGRTRVGEDERPNQEDYTDTTTNRQRTEMNTINGSICSCGKTLKNARGLKIHMAKMGCRPNQRLAQRTGQPDETEEEVVQDSDQSDHSVQVPDSEEDDQQVPEDHSQAMPEPSIDTKSGERKQKIRWPPNNNKADWDQFDFDVDSILNTSLAGGIDKKVEAMATIMYNVGKERFGLEEVRQKQQKSTGHRNRRQQERASIRRDLRQLSKRYRVAPEEERAALAELRQGMRERLKILNRAERSRKRRKERARARARFTANPFQFTSKLLGKKSSGKLLAEKAEVENHLKEVHSDEKRDEELPEQPKLIQVCEPEHIFDESEPTAKEVRDVIQKARAASAPGPNGIPYKVYKNCPRLTRRLWKHIRVIWRRGRLADSWNQAEGCYIPKEENSKNLSQFRTISLLNVEGKILLSVMANRMTRYMLDNNYVDIAVQKGGVPGVSGCIEHTSVLTQIIREAREGKGELAVIWLDLANAYGSMPHKLVQLTLEKYHVPAKTRHLLEEYFNRLELRFSIGDYTTSWQRLEVGIVTGCTISVILFAAAMNLLVKSTEKMSRGPWMRAGIRQPPVRAFMDDMTISTKTAIEARWTLKEIEELISWARMKIKPSKSRSLVLKKGRVTNYDFQLGQEIIPSVSEKPVKCLGKYFDDTLRDTKNTTNTVEQLQQWMEAIDKSGLPGKYKTWIYQHGVLPRILWPLQVYDVPMSRVEAMERLTTKFLRRWLAIPQCFSSVGLYSVGTKLQLPLSSLVEEYKVTKVRQHLTLRDSKDEKVRGARVNLEAGRKWSVQDTVREAELRLKQADIVGNVAVGRLGLGTITSTRWRTAGKGVQRKLVQKEVRVMEEDSRMVKAVGMKKQGSWMNWEAVRQRKVTWNDIWSMEPNRLQFLLRSVYDVLPSPTNLAVWGLTEDPNCKLCGKPANLEHILSSCSVALSEGRYTWRHDQILSVLADSLEKARKRPPPKDKRLKFINFVRAGEREKTGSTGEGRGLLGTAGDWQMRADLKTRMQFPTEVASTNKRPDIVIWSPSSRQVIIVELTVPWEERMEDAYERKMGKYQELVADCQERGWRVWCFPVEVGTRGFVGQSLWRALRVIGVIGLERRQLIGRLSREAEIASLWLWRRREGQWGRQ

SEQ ID NO: 15211 - protein, 1144 aa, Crassostrea hongkongensis
MDILCEEEPTISAIDRYILRYPRGRTRVGEDERPNQEDYTDTTTNRQRTEMNTINGSICSCGKTLKNARGLKIHMAKMGCRPNQRLAQRTGQPDETEEEVVQDSDQSDHSVQVPDSEEVDQQVPEDHSQAMPEPSIDTKSGERKQKIRWPPNNNKADWDQFDFDVDSILNTSLAGGIDKKVEAMATIMYNVGKERFGLEEVRQKQQKSTGHRNRRQQERASIRRDLRQLSKRYRVAPEEERAALAELRQGMRERLKILNRAERSRKRRKERARARARFTANPFQFTSKLLGKKSSGKLLAEKAEVENHLKEVHSDEKRDEELSEQPKLIQVCEPEHIFDESEPTAKEVRDVIQKARAASAPGPNGIPYKVYKNCPRLTRRLWKHIRVIWRRGRLADSWNQAEGCYIPKEENSKNLSQFRTISLLNVEGKILLSVMANRMTRYMLDNNYVDIAVQKGGVPGVSGCIEHTSVLTQIIREAREGKGELAVIWLDLANAYGSMPHKLVQLTLEKYHVPAKTRHLLEEYFNRLELRFSIGDYTTSWQRLEVGIVTGCTISVILFAAAMNLLVKSTEKMSRGPWMRAGIRQPPVRAFMDDMTISTKTAIEARWTLKEIEELISWARMKIKPSKSRSLVLKKGRVTNYDFQLGQEIIPSVSEKPVKCLGKYFDDTLRDTKNTTNTVEQLQQWMEAIDKSGLPGKYKTWIYQHGVLPRILWPLQVYDVPMSRVEDMERLTTKFLRRWLAIPQCFSRVGLYSVGTKLQLPLSSLVEEYKVTKVRQHLTLRDSKDEKVRGARVNLEAGRKWSVQDTVREAELRLKQADIVGNVAVGRLGLGTITSTRWRTAGKGVQRKLVQKEVRVMEEDSRMVKAVGMKKQGSWMNWEAVRQRKVTWNDIWSMEPNRLQFLLRSVYDVLPSPTNLAVWGLTEDPNCKLCGKPANLEHILSSCSVALSEGRYTWRHDQILSVLADSLEKARKRPPPKDKRLKFINFVRAGEREKTGSTGEGRGLLGTAGDWQMRADLKTRMQFPTEVASTNKRPDIVIWSPSSRQVIIVELTVPWEERMEDAFERKMGKYQELVADCQERGWRVWCFPVEVGTRGFVGQSLWRALRVIGVIGLERRQLIGRLSREAEIASLWLWRRREGQWGRQ

SEQ ID NO: 15212 - protein, 1130 aa, Argopecten irradians
MEKYPQGRARAGEDERPNLEDTMDMTPDRPRTERLNNGSTCSCGKTLKNERGLKIHMGKMGCAPILRLTQRTGQPGETEEEVVREENHSDHSVHVSYNEEDNRNDESTTENRSQHTPEVRLQEPNLADSRKAKIKWPASANKSEWEKFDVDVDAILNASLAGGVDRKIEGMTSIMYSVGLDRYGAEERKQPKKTITKNRRQQEITGMRKDLRRLAKSFKCATLEDRPALAELRRNIRERLKLLRRAERSRRRRKDRERARARFTANPFQYTSHLLGSKGSGTLKAEREEVEKHLHDTHSDPMRDEELENNEKLIRPDEPDHLFDESEPKLKEVKDVIRKARTASSPGPNGITYRVYKNCPRLTKRLWQLIRIVWRRGKLANCWHQAEGCFIPKEEQSETLKQFRTISLLNIEGKIFLAILAKRMTNYMLHNNYIDISVQKGGVPGVSGCVEHTSVLTQIIREAKEMKGELAVIWLDLANAYGSMPHKLVQLTLERYHVPEKTRHLLESYFDKLELRFTVQDYTTSWQRLEVGIVTGCTVSVILFAAAMNLMVKSVEKMSRGPWMRAGVRQPPVRAFMDDMTISTKTVIEARWTLQEIEDIIIWARMKIKPSKSRSLVLKKGKIKNETFKTADETIPTVSEKPVKCLGKCFEDSLSDIGNINNTQRQLEKWMDTIDRSGLPGKYKTWIYQHGVLPRVLWPLLVYDVPMTTVESMERLASRYLRRWLSVPRSFSSIGLYSSGSKLQLPLTSLKEEFKVTKVRQLLMLRDSRDAKVREARVNIRTGLKWSAKKTMEEAESQLQHGDIVGTVALGRQGLGVTTGKKWRTSNQEERRHLVQKEVRAMEEQSRMVRATGMKKQGNWLNWEGARQKKLSWNDIWCMEPQRLQFQLKSVYDVLPTPSNLATWGMTDDPACKLCGRPANLEHILSSCSVALADGRYTWRHDKVLSVLADTLENSRKRSKRDKGGLKFINFVKAGEQSVKGSVEGSGVLGTAEDWQLRADLNGRMTFPPEIAVTNQRPDIVIWSSSSKQAVLVELTVPWEDRINDAYERKQAKYQDLVSDCQQRGWRMWCLPVEVGCRGFVGQSMWRALRIIGITGIERRRLIGRLCREAEVASMWLWKKREEQWRGQHQ

SEQ ID NO: 15213 - protein, 1029 aa, Mytilus edulis
MVEGNQQEKEGLGNNRQPQEPKSTPDTSENIRRKKVKWPNNKSKSEWQQFDEDVDAILNTTLAGNIDRKIESMTSFIYNIGMDRFGADEKEVVRREGQKNRRESKIAKMRKDLRQLKKRYNQASEDEKPALSELRDTIRKKLKITRRAERTRKRRKKREKARAQFTSDPFQFTSRLLGKKGSGQLKASKEEVEEYLREMHSDPKREDELPDIEQLIRPEDPEQVFDESPPKLKEVVDVIKKGRAASAPGPNGVPYKVYKNCQRITRRLWKLIRVIWRRGRLAESWHKAEGCFIPKEEKSETLKQFRTISLLNVEGKIFLAILAKRMTNYMLSNEYIDIAVQKGGVPGVSGCIEHTSVLSQIIREAKDSKGELAVVWLDLANAYGTVPHKLVELMLERYHVPDGVRELIREYFNHLQLRFTVGDFTTSWQRLEVGIVTGCTISVILFSAAMNMIVKSVEKKSRGPWMKSGVRQPPGRAFMGDMTISTKTVIEARWTLQELDKMITWARMKVKPSKSRSLVVKNGKVKEERFKIGDEIIPTVSEKPVKCLGKWFNNTLSDKLNVEDTYKQLDDWLKAVDKSGLPGKYKAWIYQHGILPRLLWPLLVYDVPMTTVEGMERISNSYLRRWLGVPRSFSSVGLYSLGTKLQLPLKSITEEFKVTKVRQHLTLKNSRDEKVRSAKVEIRTGRKWSTKKTIEDAESRLKHSEIVGRVAVGRQGLDVTPTAKWRTATVEEKRHLVQKEVRSMEEESRMVKAVSMKKQGSWLNWEGARQQKLGWNEIWKMESHRLQFKLKSVYDVLPSPTNLATWGLIDDPKCVLCGKPANLEHILSSCSSALKDGRYTWRHDKVLGTLADTLERNIRKPRKNKEGLTFVNFVKEGEKGQKKKVEGSGLLVTATDWQMLVDLKQKLQFPPQIAVTNQRPDIVIWSASTKQAILLELTVPWEERIEDAYERKRLKYQDLLAECRDNGWRVWLFPVEVGSRGFVGQSMWRALRALGIVGGERSKLIGNLCKEAETASMWLWRKRSEQWKQ

SEQ ID NO: 15214 - protein, 1007 aa, Pecten maximus
MGCAPILRMTQRTGQPGETEEEVVQDSNHSDHSVHVADNEEGSQREEVTSGETDSQQTVEPRVQNAESTQRKARIKWPPSSKKVEWEKFDQDVDTILNTSLAGGVDRKIQGMATIMYNVGLDRFGAEEVKKQGEVTANKNRRQREIANLRRDLRQLAKRFRAAEEEEKAKLSELRNMAREKLKTLRRAERSRRRRKDRARARARFTANPFKFTSRLLGKRGSGVLRAGKEEVEQHLRDMHSDPRRNEDLGGNEKLIQPEEPEQLFDDAEPRLSEVNNVIRKARASSSPGPNGILYKVYKNCPRLTKRLWKHLRVVWRRGKLADSWHQAEGCFIPKEENSETLKQFRTISLLNVEGKIFLAVLAKRMTTYMLDNQYIDIAVQKGGVPGVSGCIEHTSILSQIIREAKELKGELAVVWLDLANTYGSMPHKLVQMTLERYHVPEKIRLLLQRYFDRLQLRFTVQDFTTSWQRLEVGIVTGCTVSVILFSAAMNLMVKSVEKMSRGPWMRAGVRQPPVRAFMDDMTISTKTIIEAKWTLKEIEEMVNWARMKIKPTKSRSLVLKNGKMREHKFQVGEEIIPKVSEKPVKCLGKFFDDTLGDTRNVRETSKQLEGWMLALDRSALPGKYKAWIYQHGILPRALWPLLVYDVPLTTVEAMERSVSSYLRRWLAVPRSFSSVGLYSSGTKLQLPITSVVEEYKVTKVRQLLLLRDSKDVKVRDAKVKIKSGWKWTAKKTVQEAESRLRHGDIVGSVAVGRQVLGVTSRTRWGTSSDKERRQLIQKEVRSMEEDTRMVRAVGMKKQGSWLNWEGVRQKKLSWKEIWSMEPQRLQFQLKSVYDVLPTPTNLATWGITDDANCKLCGRPANLDHTLSSCSVALADGRYTWRHDKVLSVLADTLERSRKKPRKKKRGLRFVNFVKAGEQTTRSTVEGSGLLGTAGDWQMRADLKGRMQFPQEIAVTNQRPDIVLWSTSIKQAVLVELTVPWEERIEEAHERKRNKYQDLVADCQQEG

SEQ ID NO: 15215 - protein, 1130 aa, Argopecten irradians
MEKYPQGRARAGEDERPNLEDTMDMTPDRPRTERLNNGSTCSCGKTLKIERGLKIHMGKMGCTPILRLTQRAGQPGETEEEVVREENHSDHSVHVSYNEEDNRNDESTTENRSQHTPEVRLQEPNLADSRKAKIKWPASANKSEWEKFDVDVDAILNASLAGGVDRKIEGMTSIMYSVGLDRYGAEERKQPKKTITKNRRQQEITGMRKDLRRLAKSFRCATLEDRPALAELRRNIRERLKLLRRAERSRRRRKDRERARARFTANPFQYTSHLLGSKGSGTLKAEREEVEKHLHDTHSDPMRDEELENNEKLIRPDEPDHLFDESEPKLKEVKDVIRKARTASSPGPNGITYRVYKNCPRLTKRLWQLIRIVWRRGKLANCWHQAEGCFIPKEEQSETLKQFRTISLLNIEGKIFLAILAKRMTNYMLHNNYIDISVQKGGVPGVSGCVEHTSVLTQIIREAKEMKGELAVIWLDLANAYGSMPHKLVQLTLERYHVPEKTRHLLESYFDKLELRFTVQDYTTSWQRLEVGIVTGCTVSVILFAAAMNLMVKSVEKMSRGPWMRAGVRQPPVRAFMDDMTISTKTVIEARWTLQEIEDIIIWARMKIKPSKSRSLVLKKGKIKNETFKTADETIPTVSEKPVKCLGKCFDDSLSDIGNINNTQRQLEKWMDTIDRSGLPGKYKTWIYQHGVLPRVLWPLLVYDVPMTTVESMERLASRYLRRWLSVPRSFSSIGLYSSGSKLQLPLTSLKEEFKVTKVRQLLMLRDSRDAKVREARVNIRTGRKWSAKKTMEEAESQLQHGDIVGTVALGRQGLGVTTGKKWRTSNQEERRHLVQKEVRAMEEQSRMVRATGMKKQGNWLNWEGARQKKLSWNDIWCMEPQRLQFQLKSVYDVLPTPSNLATWGMTDDPACKLCGRPANLEHILSSCSVALADGRYTWRHDKVLSVLADTLENSRKRSKRGKGGLKFINFVKAGEQSVQGSVEGSGVLGTAEDWQLRADLNGRMTFPPEIAVTNQRPDIVIWSSSSKQAVLVELTVPWEDRINDAYERKQAKYQDLVSDCQQRGWRMWCLPVEVGCRGFVGQSMWRALRIIGITGIERRRLIGRLCREAEVASMWLWKKREEQWRGQHQ

SEQ ID NO: 15216 - protein, 686 aa, Aurelia aurita
MYCCIIENLYKNSSFEVICGHKMSKRFHIVRGTKTGDPLSALLFIMVIDRVCKPMVAAAIVERNIRDEIYLNPMPVQAFADDIVLAANNLNVIKSMIGAAESKMDEAGLQVKHEKCAVFYGRRSGNNWYKGKENATPEVEIKSDKLPLYQRDKPYKYLGKSISIVGEDAKHISDIVDTYKDLVTKIKGSDLPLALKGSAMNNLALAKILHHFYNSRLSVKQLDQLDNIITDAVRELFSLYKSTTRIVIFLPRENGGLGIKRISDVYRSTRLAFLIKMLNHDVMHFRHIARSSLELDMKKRGVRPTDGANNFLGYELTDDGFLACNTNFGCQSDWPDMVRYARSLNVDIKYVNDKAMALIKGTWYDNQCELQKKLYQLCVVRDVEASKELTVQGCYLNLENVHIKSSHSIYYNWKVDDALVIFTIKARLSILPTNFTLHLWNRDHNPECPFCHSHTESVAHLLNGCNEFKNFYSRRHDRIVNKIAEFIKENKPRARISSNLLAETIFPEFKEGIKQIVHRKPDIVILDRIQRQCTIVEITVCYDLYLENAYQEKVTRYKELCDYLERNGFSVQLVVLCFGSLGCVKSDVWKGLRKFSQSKEKIKNVMKWCSISCWRKLYLDEQSKKVIFIHSLIHFIHSFISFIHSFIHSFISFIHSFISFIHSFIHSFIHSFIHSFIHSFYILSTK

SEQ ID NO: 15217 - protein, 916 aa, Tuta absoluta
MHKERATEEQTTVALHPSGSSSNSCQVHTPGAASLVDLPSLKRCTRVLKHVPKGARYLAAGKLSHIVEKCIQSNTTDDWFALLSFSFTALKVPDHDKQRSLTAKVKENIEAGQLEVGEVSGSRGTPSIHRAVEKKVFEGDLRGAARLLVSECSLAPASPETLSALQAKHPSPSRALDLPLAPDDSRPHLTVKPEQVISALNTFVNGSAPGLDGLRPEHFKELTSLSAGDNGLKLLESLTRLCNFLLKGSLNAEVCPYLYGGSLCALSKKDGGVRPIAVGSTIRRLVAKLGCRAVREDMATHLQPHQVGFGTVLGCEAAIHATRAFASNEDEGNVLIKIDLCNAFNSVERDSLLKEAKEHIPVLFPFLHQVYAAPSNLYYDGTAISSEVGAQQGDPLGPLLFSLAIQNVITTLDSPLNVWYLDDGTIGGSPDVVARDLQRLFPALKTMGLEVNSAKCEFYACRPDSTDAGDVFRELMPGLRIMAKADLYLLGAPIFAEAVSADLQTKTSALSSLAKHLEHLSAHVSLILLRSCFSMPKITYTIRTAPTWLFPREVASFDETLKHALEGILNIQLDDTQWTQASLPIRHGGLGVRRMRESSPSAFLASSFGVTELVARILPSNGSELCIPYASEALVAWSALCPSSDRPEDPTRQRQWDVILCKRLLYGLIGEAVGANEARLRAASQPESGAWLQALPSPHIGTLLDNDSLRVAAALRLGCAVCEPHVCVCGSLVDSTGHHGLACVRSAGRISRHHALNEIIRRAIVSTGVPCVLEPPGLCRTDGKRPDGLTLIPWQKGRCLLWDATCVSTFAISHIRGTQKSASSAAETAAGLKHTKYANFESAYDFLPFAVETSGTWGSEAKAFVREVSQRLRRSGGDPRAGSFLAQHIALAIQRGNAASILGTFGRDALQGGLFD

SEQ ID NO: 15218 - protein, 954 aa, Tuta absoluta
MSDNHDNNSLPRRGPCPYCPGLQKLFVLPHGLNRHIGRMHKERATEEQTTVALHPSGSSSNSCQVHTPGAASLVDLPSLKRCTRVLKHVPKGARYLAAGKLSHIVEKCIQSNTTDDWFALLSFSFTALKVPDHDKQRSLTAKVKENIEAGQLEVGEVSGSRGTPSIHRAVEKKVFEGDLRGAARLLVSECSLAPASPETLSALQAKHPSPSRALDLPLAPDDSRPHLTVKPEQVISALNTFVNGSAPGLDGLRPEHFKELTSLSAGDNGLKLLESLTRLCNFLLKGSLNAEVCPYLYGGSLCALSKKDGGVRPIAVGSTIRRLVAKLGCRAVREDMATHLQPHQVGFGTVLGCEAAIHATRAFASNEDEGNVLIKIDLCNAFNSVERDSLLKEAKEHIPVLFPFLHQVYAAPSNLYYDGTAISSEVGAQQGDPLGPLLFSLAIQNVITTLDSPLNVWYLDDGTIGGSPDVVARDLQRLFPALKTMGLEVNSAKCEFYACRPDSTDAGDVFRELMPGLRIMAKADLYLLGAPIFAEAVSADLQTKTSALSSLAKHLEHLSAHVSLILLRSCFSMPKITYTIRTAPTWLFPREVASFDETLKHALEGILNIQLDDTQWTQASLPIRHGGLGVRRMRESSPSAFLASSFGVTELVARILPSNGSELCIPYASEALVAWSALCPSSDRPEDPTRQRQWDDILCKRLLYGLIGEAVGANEARLRAASQPESGAWLQALPSPHIGTLLDNDSLRVAAALRLGCAVCEPHVCVCGSLVDSTGHHGLACVRSAGRISRHHALNEIIRRAIVSTGVPCVLEPPGLCRTDGKRPDGLTLIPWQKGRCLLWDATCVSTFAISHIRGTQKSASSAAETAAGLKHTKYANFESAYDFLPFAVETSGTWGSEAKAFVREVSQRLRRSGGDPRAGSFLAQHIALAIQRGNAASILGTFGRDALQGGLFD

SEQ ID NO: 15219 - protein, 954 aa, Tuta absoluta
MSDNHDNNSLPRRGPCPYCPGLQKLFVLPHGLNRHIGRMHKERATEEQTTVALHPSGSSSNSCQVHTPGAASLADLPSLKRCTRVLKHVPKGARYLAAGKLSHIVEKCIQSNTTDDWFALLSFSFTALKVPDHDKQRSLTAKVKENIEAGQLEVGEVSGSRGTPSIHRAVKKKVFEGDLRGAASLLVSECSLAPASPETLSALQAKHPSPSRALDLPLAPDDSKPHLTVKPEQVISALNTFVNGSAPGLDGLRPEHFKELTSLSAGDNGLKLLESLTRLCNFLLKGSLNAEVCPYLYGGSLCALSKKDGGVRPIAVGSTIRRLVAKLGCRAVREDMATHLQPHQVGFGTVLGCEAAIHATRAFASNEDEGNVLIKIDLCNAFNSVERDSLLKEAKEHIPVLFPFLHQVYAAPSNLYYDGTAISSEVGAQQGDPLGPLLFSLAIQNVITTLDSPLNVWYLDDGTIGGSPDVVARDLQRLFPALKTMGLEVNSAKCEFYACRPDSTDAGDVFRELMPGLRIMAKADLYLLGAPIFAEAVSADLQTKTSALSSLAKHLEHLSAHVSLILLRSCFSMPKITYTIRTAPTWLFPREVASFDETLKHALEGILNIQLDDTQWTQASLPIRHGGLGVRRMRESSPSAFLASSFGVTELVARILPSNGSELCIPYASEALVAWSALCPSSDRPEDPTRQRQWDDILCKRLLYGLIGGAVGANEARLRAASQPESGAWLQALPSPHIGTLLDNDSLRVAAALRLGCAVCEPHVCVCGSLVDSTGHHGLACVRSAGRISRHHALNEIIRRAIVSTGVPCVLEPPGLCRTDGKRPDGLTLIPWQKGRCLLWDATCVSTFAISHIRGTQKSASSAAETAAGLKHTKYANFESAYDFLPFAVETSGTWGSEAKAFVREVSQRLRRSGGDPRAGSFLAQHIALAIQRGNAASILGTFGRDALQGGLFD

SEQ ID NO: 15220 - protein, 958 aa, Tuta absoluta
MSLSCPHCPGLTKTFTPHGLKVHIGRLHKGVASSSHTARRGVPLLCGDPHTTHANDADTLVQRVQRASNALEGLATLRNSVKVLRHIPKAARNLAAGKMCEVINKCIETNEVADWYTLLTFAYSALRVPDIHDPGNLTTKVKSNISTVLSSTFGDIGDGAAPYRASSVLKTIESKVFEGDLRGAVRVLMSDDSIAAPGPETLASLQLKHPPPSRPLNFPQAPDRATPALSVKEDDVTLALGSFHNGSSAGLDGIRPAHLKELTSISAGDNGHRLLGCLTGLCNFLLSGRLNPEVCPYMYGANLCALSKKEGGIRPIAVGNTFRRLTAKMGCRAVKEEMAGYLQPYQLGFGTQMGCEAAIHATRTFVQEPGNAGCIVIKLDVKNAFNTVERDVLLSEVCENVPSLYPYLYQVYSAPSNLFFDKSLIPSQVGAQQGDPLGPLTFSLAIHKAISSLKSPLNLWYLDDGTIGGKPEEVEQDLLVLLPLFKQLGLEVNTAKCELFSCGPTTANPSFSRFRSILPDLKELSRNTFSLLGSPIFTEAIPDALQSRRHLLLLAQERLKNISAHVALVLLRMCFAVPKVTYLLRTAPTWLCPEDIVSFDNTLKDTLETIVNVFLTDDQWCQASLPIRHGGLGVRRVRDVSLPAFIASAHGVVGLVSAILSSKGDKVIIPFVADAVTEWSARFPTATVPHAPEVQRGWDDVGCKKTLDRLMVAAADTDLARLRAVSRSEAGAWLQALPSPHMGTLLDSDSLRVAVAFRLGCDVCQPHLCICGSMVEANGHHALSCCRCSGRFPRHHALNDIFRRAFISANVPCVLEPPGLSRSDGKRPDGLTLVPWQKGKCLLWDATCVSTFAASHLSRTKKSAGAAAEFAADKKRAKYSTLGENYYFVPLAFETTGCWGSEALKLVNEIGRRLRERGFDARSGSYLAQRLSIAIQRGNAASVMGTFAAGVTRGGIFD

SEQ ID NO: 15221 - protein, 968 aa, Pammene fasciana
MSSTSPQLVTCPHCPVSSRSFTPHGLKIHIGHIHKDVIRQRPQPTSARVAPRAGQSDGAITQPRDSQPSSINLKNLGALKTSVRVLRHIPKGARNLAAGALCNVINRCIETNETDDWCALLSFAYSALKTPGVEGPGNLTAKVKSNIVAAECLSCSLADVTTSVTGTSSRLPSVYKTIESKVYEGDVRGAVRVLMSDDSIAPPGPETLASLQTKHPPPSRPLSFPREPDRSFQPLIVNLEEVVHALGTFYNGSASGLDGIRPAHLKELTSSSAGDNGQRLLESLVKLCNFLLSGQLNLEVCPYLYGASLCALTKKEGGIRPIAVGSTFRRLVAKLGCRAVRDRMAGYLQPHQLGFGTPRGCEAAIHAARTFAGDSGNADCIVIKLDVKNAFNTVERDVLLTEVEGNIPSLYPFLYQVYHCPSNLFYNNSLISSQVGAQQGDPLGPLTFSLAIHKCISSLKSPLNIWYLDDGTIGGKPEVVEQDLVILLPRLKAMGLEVNAAKCEFYCCGPKSSSSSSVLSSFSSLLPGLKELSRDTFYLLGSPIFPEAIPEAIETRRRLLLIARKRLENVGSHVALILLRMCFAVPKITYLLRTTPTWLCPAEVCSFDDALRDTTEFVLNVSLSDDQWSQASLPIRHGGLGLRRAADVGLPAFLASAHGVRSLVSKILDPNGDMVVIPCVDDALARWTNLCPNASIPEAPQVQRAWDDVGAKNTLARLMGTASGVDLARLKSVSRAEAGAWLQALPAPHLGTLLDSDSMRVAVALRLGCDVCVPHKCICGSMVEANGHHALSCCRCSGRFPRHHALNDIVRRALVSANIPCVLEPPGLCRTDGKRPDGLTLVPWQKGKCLLWDATCVSTFAASHLSRTVQTAGAAAELAAVRKRGKYCALESNYYFVPLAFETTGCWGSEALTFIKEVGRRITERSSEARAGSYLVQRLAIAIQRGNAASVMGTFAPGTTRGGLFDGA

SEQ ID NO: 15222 - protein, 732 aa, Pammene fasciana
MSDDSIAPPGPETLASLQTKHPPPSRPLSFPREPDRSFQPLIVNLEEVVHALGTFYNGSASGLDGIRPAHSKELTSSSAGDNGQRLLESLVKLCNFLLSGQLNLEVCPYLYGASLCALTKKEGGIRPIAVGSTFRRLVAKLGCRAVRDRMAGYLQPHQLGFGTPRGCEAAIHAARTFAGNSGNADCIVIKLDVKNAFNTVERDVLLTEVEGNIPSLYPFLYQVYHCPSNLFYNNSLISSQVGAQQGDPLGPLTFSLAIHKCISSLKSPLNRWYLDDGTIGGKPEVVEQDLVILLPRLKAMGLEVNAPKCEFYCCGPKSSSSSSVLSSFSSLLPGLKELSRDTFYLLGSPIFPEAIPEAIETRRRLLLIARKRLENVGSHVALILLRMCFAVPKITYLLRTTPTWLCPAEVCSFDDALRDTTEFVLNVSLSDDQWSQASLPIRHGGLGLRRAADVGLPAFLASAHGVRSLVSKILDPNGDMVVIPCVDDALARWTNLCPNASIPEAPQVQRAWDDVGAKNTLARLMGTASGVDLARLKSVSRAEAGAWLQALPAPHLGTLLDSDSMRVAVALRLGCDVCVPHKCICGSMVEANGHHALSCCRCSGRFPRHHALNDIVRRALVSANIPCVLEPPGLCRTDGKRPDGLTLVPWQKGKCLLWDATCVSTFAASHLSRTVQTAGAAAELAAVRKRGKYCALESNYYFVPLAFETTGCWGSEALTFIKEVGRRITEEL

SEQ ID NO: 15223 - protein, 968 aa, Pammene fasciana
MSSTSPQLVTCPHCPVSSRSFTPHGLKIHIGHIHKDVIRQRPQPTSARVAPRAGQSDGAITQPRDSQPSSINLKNLGALKTSVRVLRHIPKGARNLAAGALCNVINRCIETNETDDWCALLSFAYSALKTPGVEGPGNLTAKVKSNIVAAECLSCSLADVTTSVTGTSSRLPSVYKTIESKVYEGDVRGAVRVLMSDDSIAPPGPETLASLQTKHPPPSRPLSFPREPDRSFQPLIVNLEEVVHALGTFYNGSASGLDGIRPAHLKELTSSSAGDNGQRLLESLVKLCNFLLSGQLNLDVCPYLYGASLCALTKKEGGIRPIAVGSTFRRLVAKLGCSAVRDRMAGYLQPHQLGFGTPRGCEAAIHAARTFAGDSGNADCIVIKLDVKNAFNTVERDVLLTEVEGNIPSLYPFLYQVYHCPSNLFYNNSLISSQVGAQQGDPLGPLTFSLAIHKCISSLKSPLNIWYLDDGTIGGKPEVVEQDLVILLPRLKALGLEVNAAKCEFYCCGPKSSSSSSVLSSFSSLLPGLKELSRDTFYLLGSPIFPEAIPEAIETRRRLLLIARKRLENVGSHVALILLRMCFAVPKITYLLRTTPTWLCPAEVCSFDDALRDTTEFVLNVSLSDDQWSQASLPIRHGGLGLRRAADVGLPAFLASAHGVRSLVSKILDPNGDMVVIPCVDDALARWTNLCPNASIPEAPQVQRAWDDVGAKNTLARLMGTASGVDLARLKSVSRGEAGAWLQALPAPHLGTLLDSDSMRVAVALRLGCDVCVPHKCICGSMVEANGHHALSCCRCAGRFPRHHALNDIVRRALVSANIPCVLEPPGLCRTDGKRPDGLTLVPWQKGKCLLWDATCVSTFAASHVSRTVQTAGAAAELAAVRKRGKYCALESNYYFVPLAFETTGCWGSEALTFIKEVGRRITERSSEARAGSYLVQRLAIAIQRGNAASVMGTFAPGTTRGGLFDGA

SEQ ID NO: 15224 - protein, 968 aa, Pammene fasciana
MSSTSPQLVTCPHCPVSSRSFTPHGLKIHIGHIHKDVIRQRPQPTTARVAPRAGQSDGAITQPRDSQPSSINLKNLGALKTSVRVLRHIPKGARNLAAGALCNVINRCIETNETDDWCALLSFAYSALKTPGVEGPGNLTAKVKSNIVAAECLSCSLADVTTSVTGTSSRLPSVYKTIESKVYEGDVRGAVRVLMSDDSIAPPGPETLASLQTKHPPPSRPLSFPREPDRSFQPLIVNLEEVVHALGTFYNGSASGLDGIRPAHLKELTSSSAGDNGQRLLESLVKLCNFLLSGQLNLEVCPYLYGASLCALTKKEGGIRPIAVGSTFRRLVAKLGCRAVRDRMAGYLQPHQLGFGTPRGCEAAIHAARTFAGDSGNADCIVIKLDVKNAFNTVERDVLLTEVEGNIPSLYPFLYQVYHCPSNLFYNNSLISSQVGAQQGDPLGPLTFSLAIHKCISSLKSPLNIWYLDDGTIGGKPEVVEQDLVILLPRLKAMGLEVNAAKCEFYCCGPKSSSSSSVLSSFSSLLPGLKELSRDTFYLLGSPIFPEAIPEAIETRRRLLLIARKRLENVGSHVALILLRMCFAVPKITYLLRTTPTWLCPAEVCSFDDALRDTTEFVLNVSLSDDQWSQASLPIRHGGLGLRRAADVGLPAFLASAHGVRSLVSKILDPNGDMVVIPCVDDALARWTNLCPNASIPEAPQVQRAWDDVGAKNTLARLMGTASGVDLARLKSVSRAEAGAWLQALPAPHLGTLLDSGSMRVAVALRLGCDVCVPHKCICGSMVEANGHHALSCCRCSGRFPRHHALNDIVRRALVSANIPCVLEPPGLCRTDGKRPDGLTLVPWQKGKCLLWDATCVSTFAASHLSRTVQTAGAAAELAAVRKRGKYCALESNYYFVPLAFETTGCWGSEALTFIKEVGRRITERSSEARAGSYLVQRLAIAIQRGNAASVMGTFAPGTTRGGLFDGA

SEQ ID NO: 15225 - protein, 966 aa, Cydia pomonella
MSSTPQTLICPHCPESSRRFTSQGLKIHIGHKHKDVAPQRRQPSSARVALRTSQGDSASQSDSATTCPQGLQPSGNTLKSLGALKSSVRVLRHIPRGARSLAAEKLCHIIGRCIETNETTDWCALLTFAYSALRAPDVEGPGNLTTKVKHNLVATGCCSSSLENISVVESPACMPSAGSVLKTIELKVFEGDVRGAARVLMSDDCIAPPGPETLASLQTKHPPPSRPLIFPREPDRTTQALTVNLEEVVQALGTFHNGSAAGLDGIRPAHLKELTSSSAGDNGQRLLECLVKLCNFLLSGQLNPEVCPYIYGASLCALSKKEGGIRPIAVGSTFRRLVAKLGCRAVRERMAGYLQPHQLGFGTQRGCEAAIHATRTFATDPANAECIIIKLDVKNAFNSVERDVLLGEVEEHLPSLYPFLYQVYYSPSNLFYNNSLIISQVGAQQGDPLGPLSFSLAIHKIISHLRSPLNTWYLDDGTLGGKPETVKQDLDVLLPRLRELGLEVNATKCELFCCGPTSSLNYFQTLLPGLKELSRSTFYLLGCPIFPEAIPDAIEIRRRLLLRARERLNNIGAHVALVLLRMCFAVPKITYLLRTAPTWLCPDEVSSFDDTLRDTAEAILNVSLSGDQWVQASLPVRYGGLGIRRAGDVGVPAFLASAHGVVDLVSKMLYPQGDKATIPFVNDALAKWTDRYPIVVVPDAPQVQRAWDDVGASALDRLMSAATGVDLARLRSVSKAEAGAWLQALPAPHLGTLLDSDSMRVAVALRLGCDVCISHKCICGSTVEANGHHALSCCRCSGRFPRHHALNDIVRRALVSANIPCVLEPPGLCRTDGKRPDGLTLVPWQKGKCLLWDATCVSTFAASHLGRTVRTAGAAAELAALRKRAKYSVLEANYYFVPLAFETTGCWGSDAIAFIREVGRRIREKTSEARACSYLVQRLAIAIQRGNAASVMGTFAPGAAYGGLLE

SEQ ID NO: 15226 - protein, 953 aa, Vanessa atalanta
MSSPFLRLTCPHCPSSARTFNSHGLKIHIGHKHKDVARFPAGSALARQSLQPDDNSISAPSLGSQTPINVLDSLATLRRSVRVLKHIPKGVRNLAAGRLCDIVRRCIETNGTTDWCTLLTFSYTALKLPLLHGSGNLTSKVKANITSRGAPDYVDGDVSYRASSVQKAIESKVFEGDLRGAVRLLMSDDTIAPPGPETLASLTSKHPSPSRPVAFPLAPDRSIQILKVKKEDVVQALGSFHNGSAGGLDGIRPVHLKELITNSAGDNGQRLLESLVDLCNFLLSGKLNPEICPYMYGASLCALSKKDGGIRPIAVGSIFRRLVAKLGCRAIREDMAKYLQPHQLGFGTQMGCEGAIHATRAFVTEPGNADCVVIKLDLKNAFNSVERDVLLNEVSRNIPSLYPFLQQVYQFPSKLFYENSLILSQVGAQQGDPLGPLIFSLAIHKAILSLKSPLNIWYLDDGTIGGKPEDVRQDILTLIPLFKDLGLEINSDKCEFFQCGASPFNKFSLFSSILPGLKELSRDTFNLLGSPIFPEAVPEAIEVGRRLLLLAQNRLTKISAHVALVLLRMCFAVPQITYLLRTSPVWLFPQDISSFDSSLKCTVENILNVSLNDTQWSQASLPVRFGGLGVRRVRDVCLPAFLASAHGAVSLVSKILSYDGGRTIIPFAAEGVAEWETLFPNAPLPEFPERQRAWDDMGYKSELGRLVSAASGVDLARLRAVSRAESGAWLQALPSPNFGTLLDSDSLRVAVALRLGCDVCQPHRCICGSMVGANGHHALSCGRCSGRFPRHHALNDIVRRALVSANVPCVLEPPGLCRSDGKRPDGLTLVPWQRGRSLLWDATCVNTFAVSHLAHTTRTAGAAAESAAAKKREKYAPLCKRFLFVPLAFETSGCWGSDALALIREIGYRLRERGFDSRSGSYLAQRLSIAVQRGNAACIMGSFASGGNQERLL

SEQ ID NO: 15227 - protein, 952 aa, Nymphalis urticae
MSSPFLRLTCPHCPGSARTFNSHGLKIHIGHKHKDVARFPAGSALAQQSLQPDDDGISAPSLSSQPPINVLDSLASLRRSVRVLKHIPKGVRNLAAGRLCDIIRRCIETNGITDWCTLLTFSYTALRLPLLQGSGNLTSKVKANITSCSAPDDVDGDVSYRASSVQKAIESKVFEGDLRGAVRLLMSEDTIAPSGPETLASLTSKHPSPSRPVAFPLAPDRPIQILKVKKEDVLQALGSFHNGSAGGLDGIRPVHLKELITNSAGDNGQRLLESLVDLCNFLLSGQLNPEICPYLYGASLCALSKKDGGIRPIAVGSIFRRLVAKLGCRAIREDMAKYLQPHQLGFGTQMGCEGAIHATRAFVTEPGNADCVVIKLDLKNAFNSVERDVLLDEVSRNIPSLYPFLLQVYQFPSKLFYENSLILSQVGAQQGDPLGPLIFSLAIHKAILSLKSPLNIWYLDDGTIGGKPEDVKQDILTLIPLFKDLGLEINSDKCEFFQCGAGPFNKFSLFSSILPGLKELSRDTFNLLGSPIFPEAVPEAIEVGRRLLLLAQNRLTKISAHVALVLLRMCFAVPQITYLLRTSPVWLFPQDISSFDSSLKCTVESILNVSLNDTQWSQASLPVRFGGLGVRRVRDVCLPAFLASAHGVVSLVSQILSSDGGRTIIPFAAEGVAEWETLFPNAPLPGFPERQRAWDDVGYKSELDRLVSEASGVDLARLRAVSRAESGAWLQALPSPYFGTLLDSDSLRVAVALRLGCDVCQPHRCICGSMVGANGHHALSCGRCSGRFPRHHALNDIVRRALLSANVPCVLEPPGLCRSDGKRPDGLTLVPWQRGRSLLWDATCVNTFAVSHLAHTTRTAGAAAESAAAKKREKYASLCTRFLFVPLAFETSGCWGSDALALIKEIGYRLRERGFDNHSGSYLAQRLSIAVQRGNAACIMGSFASGGNQERF

SEQ ID NO: 15228 - protein, 952 aa, Nymphalis urticae
MSSPFLRLTCPHCPGSARTFNSRGLKIHIGHKHKDVARFPAGSALAQQSLQPDDDGISAPSLSSQPPINVLDSLASLRRSVRVLKHIPKGVRNLAAGRLCDIIRRCIETNGITDWCTLLTFSYTALRLPLLQGSGNLTSKVKANITSCSAPDDVDGDVSYRASSVQKAIESKVFEGDLRGAVRLLMSDDTIAPSGPETLASLTSKHPSPSRPVAFPLAPDRPIQILKVKKEDVLQALGSFHNGSAGGLDGIRPVHLKELITNSAGDNGQRLLESLVDLCNFLLSGQLNPEICPYLYGASLCALSKKDGGIRPIAVGSIFRRLVAKLGCRAIREDMAKYLQPHQLGFGTQMGCEGAIHATRAFVTEPGNADCVVIKLDLKNAFNSVERDVLLDEVSRNIPSLYPFLLQAYQFPSKLFYENSLILSQVGAQQGDPLGPLIFSLAIHKAILSLKSPLNIWYLDDGTIGGKPEDVKQDILTLIPLFKDIGLEINSDKCEFFQCGAGPFNKFSLFSSILPGLKELSRDTFNLLGSPIFPEAVPEAIEVGRRLLLLAQNRLTKISAHVALVLLRMCFAVPQITYLLRTSPVWLFPQDISSFDSSLKCTVESILNVSLNETQWSQASLPVRFGGLGVRRVRDVCLPAFLASAHGVVSLVSQILSSDGGRTIIPFAAEGVAEWETLFPNAPLPGFPERQRAWDDVGYKSELDRLVSEASGVDLARLRAVSRAESGAWLQALPSPYFGTLLDSDSLRVAVALRLGCDVCKPHRCICGSMVGANGHHALSCGRCSGRFPRHHALNDIVRRALLSANVPCVLEPPGLCRSDGKRPDGLTLVPWQRGRSLLWDATCVNTFAVSHLAHTTRTAGAAAESAAAKKREKYASLCTRFLFVPLAFETSGCWGSDALALIKEIGYRLRERGFDNHSGSYLAQRLSIAVQRGNAACIMGSFASGGNQERF

SEQ ID NO: 15229 - protein, 953 aa, Vanessa atalanta
MSSPFLRLTCPHCPSSARTFNSHGLKIHIGHKHKDVARFPAGSALARQSLQPDDNSISAPSLGSQTPINVLDSLATLRRSVRVLKHIPKGVRNLAAGRLCDIVRRCIETNGTTDWCTLLTFSYTALKLPLLHGSGNLTSKVKANITSRGAPDYVDGDVSYRASSVQKAIESKVFEGDLRGAVRLLMSDDTIAPPGPETLASLTSKHPSPSRPVAFPLAPDRSIQILKVKKEDVVQALGSFHNGSAGGLDGIRPVHLKELITNSAGDNGQRLLESLVDLCNFLLSGKLNPEICPYMYGASLCALSKKDGGIRPIAVGSIFRRLVAKLGCRAIREDMAKYLQPHQLGFGTQMGCEGAIHATRAFVTEPGNADCVVIKLDLKNAFNSVERDVLLNEVSRNIPSLYPFLQQVYQFPSKLFYENSLILSQVGAQQGDPLGPLIFSLAIHKAILSLKSPLNIWYLDDGTIGGKPEDVRQDILTLIPLFKDLGLEINSDKCEFFQCGASPFNKFSLFSSILPGLKELSRDTFNLLGSPIFPEAVPEAIEVGRRLLLLAQNRLTKISAHVALVLLRMCFAVPQITYLLRTSPVWLFPQDISSFDSSLKCTVENILNVSLNDTQWSQASLPVRFGGLGVRRVRDVCLPAFLASAHGAVSLVSKILSYDGGRTIIPFAAEGVAEWETLFPNAPLPEFPERQRAWDDMGYKSELGRLVSAASGVDLARLRAVSRAESGAWLQALPSPNFGTLLDSDSLRVAVALRLGCDVCQPHRCICGSMVGANGHHALSCGRCSGRFPRHHALNDIVRRALVSANVPCVLEPPGLCRSDGKRPDGLTLVPWQRGRSLLWDATCVNTFAVSHLAHTTRTAGAAAESAAAKKREKYAPLCKRFLFVPLAFETSGCWGSDALALIREIGYRLRERGFDSRSGSYLAQRLSIAVQRGNAACIMGSFASGGNQERLF

SEQ ID NO: 15230 - protein, 953 aa, Vanessa atalanta
MSSPFLRLTCPHCPSSARTFNSHGLKIHIGHKHKDVARFPAGSALARQSLQPDENSISAPSLGSQTPINVLDSLATLRRSVRVLKHIPKGVRNLAAGRLCDIVRRCIETNGTTDWCTLLTFSYTALKLPLLHGSGNLTSKVKANITSRGAPDYVDGDVSYRASSVQKAIESKVFEGDLRGAVRLLMSDDTIAPPGPETLASLTSKHPSPSRPVAFPLAPDRSIQILKVKKEDVVQALGSFHNGSAGGLDGIRPVHLKELITNSAGDNGQRLLESLVDLCNFLLSGKLNPEICPYMYGASLCALSKKDGGIRPIAVGSIFRRLVAKLGCRAIREDMAKYLQPHQLGFGTQMGCEGAIHATRAFVTEPGNADCVVIKLDLKNAFNSVERDVLLNEVSRNIPSLYPFLQQVYQFPSKLFYENSLILSQVGAQQGDPLGPLIFSLAIHKAILSLKSPLNIWYLDDGTIGGKPEDVRQDILTLIPLFKDLGLEINSDKCEFFQCGASPFNKFSLFSSILPGLKELSRDTFNLLGSPIFPEAVPEAIEVGRRLLLLAQNRLTKISAHVALVLLRMCFAVPQITYLLRTSPVWLFPQDISSFDSSLKCTVENILNVSLNDTQWSQASLPVRFGGLGVRRVRDVCLPAFLASAHGAVSLVSKILSYDGGRTIIPFAAEGVAEWETLFPNAPLPEFPERQRAWDDMGYKSELGRLVSAASGVDLARLRAVSRAESGAWLQALPSPNFGTLLDSDSLRVAVALRLGCDVCQPHRCICGSMVGANGHHALSCGRCSGRFPRHHALNDIVRRALVSANVPCVLEPPGLCRSDGKRPDGLTLVPWQRGRSLLWDATCVNTFAVSHLAHTTRTAGAAAESAAAKKREKYAPLCKRFLFVPLAFETSGCWGSDALALIREIGYRLGERGFDSRSGSYLAQRLSIAVQRGNAACIMGSFASGGNQERLF

SEQ ID NO: 15231 - protein, 956 aa, Nymphalis c-album
MSSLCLRSTCPYCPSSARTFSSHGLKIHIGHKHKAVARFPAGPALAQQSLQPETDDISATSQGSQLPANILDSLASLRRSVRVLKHVPKGVRNLAAGRLCDIVSRCIETNRTTDWCTLLAFSYAALKLPPLQGSGNLTSKVKANITSCDAPGDVTIDVPYRSSSAQKAIESKVFEGDMRGAVRLLMSEDTIAPSGPETLASLRSKHPSPSRPLAFPLAPHCSTPILKVKKEDVVQALSSFHNSSAGGLDGIRPVHLKELTSNSAGDNGQRLLETLVALCNFLLSGKLNPEICPYMYGANLCALSKKDGGLRPIAVGSIFRRLVAKLGCRAVREDMAKYLQPHQLGFGTQMGCEAAIHATRTFVTEPGNADCIVIKLDLKNAFNSVERDVLLEEVSRNIPSLYPFLHQVYQFPSNLFFENSLILSQVGAQQGDPLGPLIFSLAIHKAILSLKSPLNIWYLDDGTIGGKPEDVRQDILTLLPLFKDLGLEINSGKCEFFQCGAGLFNNFSLFSSILPGLKEQSRGTFNLLGSPIFPEAVPEALEIRRRLLSHAKNRLANISAHVALALLKMCFAVPKITYLLRTSPAWLFPQDVASIDGSLKCMVESILNVSFNDTQWSQASLPVRFGGLGVRRVGDVCLPAFLASAHGVVGLVSKILSSEGGRTNIPFAAEGVAEWQMLFPNAPLPGAAERQRAWDDIRCKSELDRLIGAARGADLARLRAVSRVESGAWLQALPSPYAGTLLDRDCLRVAVALRLGCDVCQPHRCICGSMVEANGHHALSCGRCSGRFPRHHALNDIVRRALVSANVPCVLEPPGLSRSDGKRPDGLTLIPWQRGRSLVWDATCVNTFAVSHLPHTLQTAGAAAESAAERKREKYAPLCGNYIFVPLAFETSGCWGSDALAFIKEIGRRLRERGCDNRSESYLAQRLSIAVQRGNAACVVGSFASSEKDEEIFYEL

SEQ ID NO: 15232 - protein, 953 aa, Vanessa atalanta
MSSPFLRLTCPHCPSSARTFNSHGLKIHIGHKHKDVARFPAGSALARQSLQPDDNSISAPSLGSQTPINVLDSLATLRRSVRVLKHIPKGVRNLAAGRLCDIVRRCIETNGTTDWCTLLTFSYTALKLPLLHGSGNLTSKVKANITSRGAPDYVDGDVSYRASSVQKAIESKVFEGDLRGAVRLLMSDDTIAPPGPETLASLTSKHPSPSRPVAFPLAPDRSIQILKVKKEDVVQALGSFHNGSAGGLDGIRPVHLKELITNSAGDNGQRLLESLVDLCNFLLSGKLNPEICPYMYGASLCALSKKDGGIRPIAVGSIFRRLVAKLGCRAIREDMAKYLQPHQLGFGTQMGCEGAIHATRAFVTEPGNADCVVIKLDLKNAFNSVERDVLLNEVSRNIPSLYPFLQQVYQFPSKLFYENSLILSQVGAQQGDPLGPLIFSLAIHKAILSLKSPLNIWYLDDGTIGGKPEDVRQDILTLIPLFKDLGLEINSDKCEFFQCGASPFNKFSLFSSILPGLKELSRDTFNLLGSPIFPEAVPEAIEVGRRLLLLAQNRLTKISAHVALVLLRMCFAVPQITYLLRTSPVWLFPQDISSFDSSLKCTVENILNVSLNDTQWSQASLPVRFGGLGVRRVRDVCLPAFLASAHGAVSLVSKILSYDGGRTIIPFAAEGVAEWETLFPNAPLPEFPERQRAWDDMGYKSELGRLVSAASGVDLARLRAVSRAESGAWLQALPSPNFGTLLDSDSLRVAVALRLGCDVCQPHRCICGSMVGASGHHALSCGRCSGRFPRHHALNDIVRRALVSANVPCVLEPPGLCRSDGKRPDGLTLVPWQRGRSLLWDATCVNTFAVSHLAHTTRTAGAAAESAAAKKREKYAPLCKRFLFVPLAFETSGCWGSDALALIREIGYRLRERGFDSRSGSYLAQRLSIAVQRGNAACIMGSFASGGNQERLL

SEQ ID NO: 15233 - protein, 768 aa, Vanessa cardui
MSDDTMAPSGPETLASLTSKHPSPSRPVAFPLAPDQPIQILKVKKEDVVQALGSFHNGSAGGLDGIRPVHLKELITNSAGDNGQRLLESLVDLCNFLLSGQLNPEICPYLYGASLCALSKKDGGIRPIAVGSIFRRLVAKLGCRAIREDMAKYLQPHQLGFGTQMGCEGAIHATRAFVTEPGNADCVVIKLDLKNAFNSVERDVLLDEVSRNIPSLYPFLLQVYQFPSKLFYENSLILSQVGAQQGDPLGPLIFSLAIHKAILSLKSPFNIWYLDDGTIGGKPEDVKQDILTLIPLFKDLGLEINSDKCEFFQCGAGLFNKFSLFSSILPGLKELSRDTFYLLGSPIFPEAVPEAIEAGRRLLLLAQNRLTKITAHVALALLRMCFAVPQITYLLRTSPVWLFPQDISSFDGSLKCTVENILNVSLNDTQWSQASLPVRFGGLGVRRVRDVCLPAFLASAHGVVSLVSKILSSDGGRIIIPFAAEGVAEWETLFPNVPLPGFAERQRAWDDVGSKSELDRLVSSAGGVDLARLRAVSRAESGAWLQALPSPYFGTLLDSDSLRMAVALRLGCDVCQPHRCICGSMVGANGHHALSCGRCSGRFPRHHALNDIVRRALLSANVPCVLEPPGLCRSDGKRPDGLTLVPWQRGRSLLWDATCVNTFAVSHLAHTTRTAGAAAESAAAKKREKYASLCKRFLFVPLAFETSGCWGSDALALIREIGYRLRERGFDSHSGSYLAQRLSIAVQRGNAACIMGSFASGGNQERLF

SEQ ID NO: 15234 - protein, 953 aa, Vanessa atalanta
MSSPFLRLTCPHCPSSARTFNSHGLKIHIGHKHKDVARFPAGSALARQSLQPDDNSISAPSLGSQTPINVLDSLATLRRSVRVLKHIPKGVRNLAAGRLCDIVRRCIETNGTTDWCTLLTFSYTALKLPLLHGSGNLTSKVKANITSRGAPDYVDGDVSYRASSVQKAIESKVFEGDLRGAVRLLMSDDTIAPPGPETLASLTSKHPSPSRPVAFPLAPDRSIQILKVKKEDVVQALGSFHNGSAGGLDGIRPVHLKELITNSAGDNGQRLLESLVDLCNFLLSGKLNPEICPYMYGASLCALSKKDGGIRPIAVGSIFRRLVAKLGCRAIREDMAKYLQPHQLGFGTQMGCEGAIHATRAFVTEPGNADCVVIKLDLKNAFNSVERDVLLNEVSRNIPSLYPFLQQVYQFPSKLFYENSLILSQVGAQQGDPLGPLIFSLAIHKAILSLKSPLNIWYLDDGTIGGKPEDVRQDILTLIPLFKDLGLEINSDKCEFFQCGASPFNKFSLFSSILPGLKELSRDTFNLLGSPIFPEAVPEAIEVGRRLLLLAQNRLTKISAHVALVLLRMCFAVPQITYLLRTSPVWLFPQDISSFDSSLKCTVENILNVSLNDTQWSQASLPVRFGGLGVRRVRDVCLPAFLASAHGAVSLVSKILSYDGDRTIIPFAAEGVAEWKTLFPNAPLPEFPERQRAWDDMGYKSELGRLVSAASGVDLARLRAVSRAESGAWLQALPSPNFGTLLDSDSLRVAVALRLGCDVCQPHRCICGSMVGANGHHALSCGRCSGRFPRHHALNDIVRRALVSANVPCVLEPPGLCRSDGKRPDGLTLVPWQRGRSLLWDATCVNTFAVSHLAHTTRTAGAAAESAAAKKREKYAPLCKRFLFVPLAFETSGCWGSDALALIREIGYRLRERGFDSRSGSYLAQRLSIAVQRGNAACIMGSFASGGNQERLF

SEQ ID NO: 15235 - protein, 953 aa, Vanessa atalanta
MSSPFLRLTCPHCPSSARTFNSHGLKIHIGHKHKDVARFPAGSALARQSLQPDENSISAPSLGSQTPINVLDSLATLRRSVRVLKHIPKGVRNLAAGRLCDIVRRCIETNGTTDWCTLLTFSYTALKLPLLHGSGNLTSKVKANITSRGAPDYVDGDVSYRASSVQKAIESKVFEGDLRGAVRLLMSDDTIAPPGPETLASLTSKHPSPSRPVAFPLAPDRSIQILKVKKEDVVQALGSFHNGSAGGLDGIRPVHLKELITNSAGDNGQRLLESLVDLCNFLLSGKLNPEICPYMYGASLCALSKKDGGIRPIAVGSIFRRLVAKLGCRAIREDMAKYLQPHQLGFGTQMGCEGAIHATRAFVTEPGNADCVVIKLDLKNAFNSVERDVLLNEVSRNIPSLYPFLQQVYQFPSKLFYENSLILSQVGAQQGDPLGPLIFSLAIHKAILSLKSPLNIWYLDDGTIGGKPEDVRQDILTLIPLFKDLGLEINSDKCEFFQCGASPFNKFSLFSSILPGLKELSRDTFNLLGSPIFPEAVPEAIEVGRRLLLLAQNRLTKISAHVALVLLRMCFAVPQITYLLRTSPVWLFPQDISSFDSSLKCTVENILNVSLNDTQWSQASLPVRFGGLGVRRVRDVCLPAFLASAHGAVSLVSKILSYDGGRTIIPFAAEGVAEWETLFPNAPLPEFPERQRAWDDMGYKSELGRLVSAASGVDLARLRAVSRAESGAWLQALPSPNFGTLLDSDSLRVAVALRLGCDVCQPHRCICGSMVGANGHHALSCGRCSGRFPRHHALNDIVRRALVSANVPCVLEPPGLCRSDGKRPDGLTLVPWQRGRSLLWDATCVNTFAVSHLAHTTRTAGAAAESAAAKKREKYAPLCKRFLFVPLAFETSGCWGSDALALIREIGYRLRERGFDSRSGSYLAQRLSIAVQRGNAACIMGSFASGGNQERLF

SEQ ID NO: 15236 - protein, 768 aa, Nymphalis io
MSDDAIAPPGPETLASLRSKHPSPLRPLAFPLAPDRSIQILKVKKEDVVQALGSFHNGSAGGLDGIRPVHLKELITNSAGDNGQRLLESLVDLCNFLLSGQLNPEVCPYMYGASLCALSKKDGGIRPIAVGSIFRRLVAKLGCRAIREDMAKYLQPHQLGFGTQMGCEGAIHATRTFVTEPGNADCVVIKLDLKNAFNSVERDVLLVEVSRNIPSLYPFLQQVYQFPSKLFFENSLILSQVGAQQGDPLGPLTFSLAIHKAILSLKSPLNIWYLDDGTIGGKPEDVRQDILTLIPLFKDLGLKINSDECEFFQCGAGPLNKFSLFSSILPGLKELSRETFNLLGSPIFPEAVPEAIEVGRRLLLLAQNRLTGISAHVALVLLRMCFAVPKITYLLRTSPVWLFPQDISSFDSSLKCTVESILNVSLNETQWSQASLPVRAGGLGVRRVRDVCLPAFLASAHGVVSLVSKILSSVGGKTIIPFAAEGVAKWETLFPNAPLPGFPERQRSWDDVGYKSELDRLVSAAGGADLARLRAVSRTESGAWLQALPSPYFGTLLDSDSLRVAVALRLGCDVCQPHRCICGSMVGANGHHALSCGRCSGRFPRHHALNDIVRRALVSANVPCVLEPPGLSRSDGKRPDGLTLVPWQRGRSLIWDATCVNTFAASHLAHTTRTAGAAAESAAARKREKYAPFLKNYLFVPLAVETSECWGSDALSLIREIGCRLRERGFDSRSGSHLAQRLSIAIQRGNAACIMGSFASGGNREGLF

SEQ ID NO: 15237 - protein, 949 aa, Nymphalis io
MSSPFLRLTCPHCPSSARTFNSHGLKIHIGHKHKDVARFPVGTASAQQSLQPDDDGIGAPSLGSQPPINVLDGLALLRRSVRVLRHVPKGVRNLAAGRLCDIIGRCIETNGTTDWCTLLTFSYTALKLPLLQGSGNLTSKVKANIISCGAPDDVDIDVSYRASLVEKAIESKVFEGDLRGSVRLLMSDDAIAPPGPETLASLRSKHPSPSRQLAFPLAPDLSIQILKVKKEDVVQALGSFHNGSAGGLDGIRPVHLKELITNSAGDNGQRLLDLCNFLLSGQLNPEVCPYMYGASLWALSNKDGGIRPIAMGSIFRRLVAKLGCRAIREDMAKYLQPHQLGFGTQMGCEGVIHATRTFVTEPGNTDCVVIKLDLKNAFNSVERDVLLDEVSRNIPSLYPFLQQVYQFPSKLFFENFLILSQVGAQQGDPLGPLTFSLAIHKAILSLKSPLNIWYLDDGTIGGKPEDVRQDILTLIPLFKDLGLEINSDKCEFFQCGAGPFNKFSLFSSILPFLKELFRETFNLLGSPIFPEAVLEAIEVGRRLLLLAQNRLTGISAHVALVLLRMCFAVPKITYLLRTSPVWLFPQDISSFDCSLKCTVESILNVSLNETQWSQASLPVRSGGLGVRRVRDVCLPAFLASAHGVVSLVSKILSSDGGRTIIPFAAEGVAKWETLFPNAPLPRFPERQRSWDDVGYKSELDRLVSAAGGADLARLRAVLRAESGAWLQALPSPYFGTLLDSDSLRVAVALSLGCDVCQPHRCICGSMVGANGHHAMSCGRCSGRFPRHHALNDIVRRALVSANVPCVLEPPGLSRSDGKRPDGLTLVPWQRGRSLIWDATCVNTFAASHLAHTTRTAGAAAESAAARKREKYAPLFKNYLFVPLAVETSGCWGSNALSLIREIGCRLRERGFDSRSGSHLAQRLSIAIQRGNAACIMGSFASGGNREGLF

SEQ ID NO: 15238 - protein, 952 aa, Nymphalis urticae
MSSPFLRLTCPHCPGSARTFNSRGLKIHIGHKHKDVARFPAGSALAQQSLQPDDDGISAPSLSSQPPINVLDSLASLRRSVRVLKHIPKGVRNLAAGRLCDIIRRCIETNGITDWCTLLTFSYTALRLPLLQGSGNLTSKVKANITSCSAPDDVDGDVSYRASSVQKAIESKVFEGDLRGAVRLLMSDDTIAPSGPETLASLTSKHPSPSRPVAFPLAPDRPIQILKVKKEDVLQALGSFHNGSAGGLDGIRPVHLKELITNSAGDNGQRLLESLVDLCNFLLSGQLNPEICPYLYGASLCALSKKDGGIRPIAVGSIFRRLVAKLGCRAIREDMAKYLQPHQLGFGTQMGCEGAIHATRAFVTEPGNADCVVIKLDLKNAFNSVERDVLLDEVSRNIPSLYPFLLQAYQFPSKLFYENSLILSQVGAQQGDPLGPLIFSLAIHKAILSLKSPLNIWYLDDGTIGGKPEDVKQDILTLIPLFKDLGLEINSDKCEFFQCGAGPFNKFSLFSSILPGLKELSRDTFNLLGSPIFPEAVPEAIEVGRRLLLLAQNRLTKISAHVALVLLRMCFAVPQITYLLRTSPVWLFPQDISSFDSSLKCTVESILNVSLNDTQWSQASLPVRFGGLGVRRVRDVCLPAFLASAHGVVSLVSQILSSDGGRTIIPFAAEGVAEWETLFPNAPLPGFPERQRAWDDVGYKSELDRLVSEASGVDLARLRAVSRAESGAWLQALPSPYFGTLLDSDSLRVAVALRLGCDVCQPHRCICGSMVGANGHHALSCGRCSGRFPRHHALNDIVRRALLSANVPCVLEPPGLCRSDGKRPDGLTLVPWQRGRSLLWDATCVNTFAVSHLAHTTRTAGAAAESAAAKKREKYASLCTRFLFVPLAFETSGCWGSDALALIREIGYRLRERGFDNHSGSYLAQRLSIAVQRGNAACIMGSFASGGNQERF

SEQ ID NO: 15239 - protein, 953 aa, Vanessa cardui
MSSPFLRLTCPHCPGSARTFSSHGLKIHIGHKHKDVARFPAGSALAQQSLQPNDDGISAPSLSSQPPIYVLDSLASLRRSVRVLKHIPKGVRNLAAGRLCEIIGRCIETNGTTDWCTLLTFSYTALKLPLLQGSGNLTSKVKANITSCGAPDDVDGDVSYRASSVQKVIESKVFEGDLRGAVRLLMSDDTMAPSGPETLASLTSKHPSPSRPVAFPLAPDQPIQILKVKKEAVVQALGSFHNGSAGGLDGIRPVHLKELITNSAGDNGQRLLESLVDLCNFLLSGQLNPEICPYLYGASLCALSKKDGGIRPIAVGSIFRRLVAKLGCRAIREDMAKYLQPHQLGFGTQMGCEGAIHATRAFVTEPGNADCVVIKLDLKNAFNSVERDVLLDEVSRNIPSLYPFLLQVYQFPSKLFYKNSLILSQVGAQQGDPLGPLIFSLAIHKAILSLKSPFNIWYLDDGTIGGKPEDVKQDILTLIPLFKDLGLEINSDKCEFFQCGAGLFNKFSLFSSILPGLKELSRDTFYLLGSPIFPEAVPEAIEAGRRLLLLAQNRLTKISAHVALALLRMCFAVPQITYLLRTSPVWLFPQDISSFDGSLKCTVENILNVSLNDTQWSQASLPVRFGGLGVRRVRDVCLPAFLASAHGVVSLVSKILSSDGGRIIIPFAAEGVAEWETLFPNVPLPGFAERQRAWDDVGSKSELDRLVSAAGGVDLARLRAVSRAESGAWLQALPSPYFGTLLDSDSLRMAVALRLGCDVCQPHRCICGSMVGANGHHALSCGRCSGRFPRHHALNDIVRRALLSANVPCVLEPPGLCRSDDKRPDGLTLVPWQRGRSLLWDATCVNTFAVSHLAHTTRTAGAAAESAAAKKREKYASLCKRFLFVPLAFETSGCWGSDALALIREIGYRLRERGFDSHSGSYLAQRLSIAVQRGNAACIMGSFASGGNQERLF

SEQ ID NO: 15240 - protein, 952 aa, Nymphalis urticae
MSSPFLRLTCPHCPGSARTFNSRGLKIHIGHKHKDVARFPAGSALAQQSLQPDDDGISAPSLSSQPPINVLDSLASLRRSVRVLKHIPKGVRNLAAGRLCDIIRRCIETNGITDWCTLLTFSYTALRLPLLQGSGNLTSKVKANITSCSAPDDVDGDVSYRASSVQKAIESKVFEGDLRGAVRLLMSDDTIAPSGPETLASLTSKHPSPSRPVAFPLAPDRPIQILKVKKEDVLQALGSFHNGSAGGLDGIRPVHLKELITNSAGDNGQRLLESLVDLCNFLLSGQLNPEICPYLYGASLCALSKKDGGIRPIAVGSIFRRLVAKLGCRAIREDMAKYLQPHQLGFGTQMGCEGAIHATRAFVTEPGNADCVVIKLDLKNAFNSVERDVLLDEVSRNIPSLYPFLLQAYQFPSKLFYENSLILSQVGAQQGDPLGPLIFSLAIHKAILSLKSPLNIWYLDDGTIGGKPEDVKQDILTLIPLFKDLGLEINSDKCEFFQCGAGPFNKFSLFSSILPGLKELSRDTFNLLGSPIFPEAVPEAIEVGRRLLLLAQNRLTKISAHVALVLLRMCFAVPQITYLLRTSPVWLFPQDISSFDSSLKCTVESILNVSLNDTQWSQASLPVRFGGLGVRRVRDVCLPAFLASAHGVVSLVSQILSSDGGRTIIPFAAEGVAEWETLFPNAPLPGFPERQRAWDDVGYKSELDRLVSEASGVDLARLRAVSRAESGAWLQALPSPYFGTLLDSDSLRVAVALRLGCDVCQPHRCICGSMVGANGHHALSCGRCSGRFPRHHALNDIVRRALLSANVPCVLEPPGLCRSDGKRPDGLTLVPWQRGRSLLWDATCVNTFAVSHLAHTTRTAGAAAESAAAKKREKYASLCTRFLFVPLAFETSGCWGSDALALIKEIGYRLRERGFDNHSGSYLAQRLSIAVQRGNAACIMGSFASGGNQERF

SEQ ID NO: 15241 - protein, 953 aa, Vanessa atalanta
MSSPFLRLTCPHCPSSARTFNSHGLKIHIGHKHKDVARFPAGSALARQSLQPDNNSISAPSLGSQTPINVLDSLATLRRSVRVLKHIPKGVRNLAAGRLCDIVRRCIETNGTTDWCTLLTFSYTALKLPLLHGSGNLTSKVKANITSRGAPDYVDGDVSYRASSVQKAIESKVFEGDLRGAVRLLMSDDTIAPPGPETLASLTSKHPSPSRPVAFLLAPDRSIQILKVKKEDVVQALGSFHNGSAGGLDGIRPVHLKELITNSAGDNGQRLLESLVDLCNFLLSGKLNPEICPYMYGASLCALSKKDGGIRPIAVGSIFRRLVAKLGCRAIREDMAKYLQPHQLGFGTQMGCEGAIHATRAFVTEPGNADCVVIKLDLKNAFNSVERDVLLNEVSRNIPSLYPFLQQVYQFPSKLFYENSLILSQVGAQQGDPLGPLVFSLAIHKAILSLKSPLNIWYLDDGTIGGKPEDVRQDILTLIPLFKDLGLEINSDKCEFFQCGASPFNKFSLFSSILPGLKELSRDTFNLLGSPIFPEAVPEAIEAGRRLLLLAQNRLTRISAHVALVLLRMCFAVPQITYLLRTSPVWLFPQDISSFDSSLKCTVENILNVSLNDTQWSQASLPVRFGGLGVRRVRDVCLPAFLASAHGAVSLVSKILSYDGGRTIIPFAAEGVAEWETLFPNAPLPEFPERQRAWDDMGYKSELGRLVSAASGVDLARLRAVSRAESGAWLQALPSPNFGTLLDSDSLRVAVALRLGCDVCQPHRCICGSMVGANGHHALSCGRCSGRFPRHHALNDIVRRALVSANVPCVLEPPGLCRSDGKRPDGLTLVPWQRGRSLLWDATCVNTFAVSHLAHTTRTAGAAAESAAAKKREKYAPLCKRFLFVPLAFETSGCWGSDALALIREIGYRLRERGFDSRSGSYLAQRLSVAVQRGNAACIMGSFASGGNQERLF

SEQ ID NO: 15242 - protein, 963 aa, Pammene fasciana
MSSASRTLTCSHCPASSRKFTPHGLKIHIGHLHKDVARQLHQPSSARVTPSASQTNQNTTCPQSSQVTLPQGNALNQLGALKSSVRVLRHIPKGARNLAAEKLSSIINKCIDTNETADWCSLLTFAYSALKAPDVEGPGNLTTKVKHNIANYLPNSCESVSFVEPSARLPSVQRIIESKVFEGDVRGAARVLMSDDAIAPPGPETLASLQSKHPSPTRSLVFPSEPDKSIQALTVNLEEMVQALGMFHNGSASGLDGIRPAHLKELTASSAGDNGQRLLECLVKLCNFLLSGQLNPEVSPYMYGASLCALTKKQGGIRPIAVGSTFRRLVAKLGCRAVRERMAGYLQPHQLGFGTQRGCEAAIHATRTFAAEPGNLNSVIIKLDVKNAFNSVERDVLLREVKEHIPSLYPFLYQVYHSPSNLYYNNSLILSQVGAQQGDPLGPLTFSLAIQKIILSLKSPLNVWYLDDGTLGGKPDTIEQDLAFLLPRLKEMGLEVNATKCEFFCCEPTSSTSSSLSSFRILLPGLKEISRSTFYLLGSPIFPDAIPDALETRRQLLLLARQRLYNIGAHVALTLLRMCFTIPKITYLLRTTPTWLFPDEISSFDNTLKDTTEVILNVSLTDDQWSQASLPIRHGGLGLRRAGDVGLPAFLASAHGVGDLVSKILKYNGDQVTIPYLDNALAKWSTRYPGASVPEVPQIQKAWDEAGVRKDLAGLLNAATGVDLARLRSVSRAEAGAWLQALPAPHLGTLLDNDSMRVAVALRLGCDVCVPHECICGSMVEANGHHALSCYRCSGRYPRHHALNDIVRRALISANIPCVLEPPGLSRTDGKRPDGLTLVPWERGKCLLWDATCVNTFAASHLTRTVRTAGAAAEIAAVRKRDKYSFLVSNYLFVPLAFETTGCWGSEAIAFVKELGRRITQRGSDVRAGSYLAQRLAIAIQRGNAASVMGTFAPGIARGGLFD

SEQ ID NO: 15243 - protein, 963 aa, Pammene fasciana
MSSASRTLTCSHCPASSRKFTPHGLKIHIGHLHKDVARQLHQPSSARVTPSASQTNQNTTCPQSSQVTLPQGNALNQLGALKSSVRVLRHIPKGARNLAAEKLSSIINKCIDTNETADWCSLLTFAYSALKAPDVEGPGNLTTKVKHNIANYLPNSCESVSFVEPSARLPSVQRIIESKVFEGDVRGAARVLMSDDAIAPPGPETLASLQSKHPSPTRSLVFPSEPDKSIQALTVNLEEVVQALGMFHTGSASGLDGIRPAHLKELTASSAGDNGQRLLECLVKLCNFLLSGQLNPEVSPYMYGASLCALTKKQGGIRPIAVGSTFRRLVAKLGCRAVRERMAGYLQPHQLGFGTQRGCEAAIHATRTFAAEPGNLNSVIIKLDVKNAFNSVERDVLLREVKEHIPSLYPFLYQVYHSPSNLYYNNSLILSQVGAQQGDPLGPLTFSLAIQKIILSLKSPLNVWYLDDGTLGGKPDTIEQDLAFLLPRLKEMGLEVNATKCEFFCCEPTSSTSSSLSSFRILLPGLKEISRSTFYLLGSPIFPDAIPDALETRRQLLLLARQRLYNIGAHVALTLLRMCFTIPKITYLLRTTPTWLFPDEISSFDNTLKDTTEVILNVFLTDDQWSQASLPIRHGGLGLRRAGDVGLPAFLASAHGVGDLVSKILKYNGDQVTIPYLDNALAKWSTRYPGASVPEVPQIQKAWDEAGVRKDLAGLLNAATGVDLARLRSVSRAEAGAWLQALPAPHLGTLLDNDSMRVAVALRLGCDVCVPHECICGSMVEANGHHALSCYRCSGRYPRHHALNDIVRRALISANIPCVLEPPGLSRTDGKRPDGLTLVPWERGKCLLWDATCVSTFAASHLTRTVRTAGAAAEIAAVRKRDKYSFLVSNYLFVPLAFETTGCWGSEAIAFVKELGRRITQRGSDVRAGSYLAQRLAIAIQRGNAASVMGTFAPGIARGGLFD

SEQ ID NO: 15244 - protein, 934 aa, Blastobasis adustella
MINSSPFLKCPHCADSFRSFSPHGLKVHIGRMHKDISRTPVASQSSNVASHPLQVSDGTEALKSLATLKRTIRVLRHVPKGARSLAAGRLCHLIDDCIELNGIEQWSVLLTFAYKGLKSPEATGPGTLTTKVKENIQNCCGCCFSDGTGGNKSPTTVERRIENKVFEGDLRRAVRLLMSNDTVAPPGPETLASLHVKHPPPSRPLDFPRSPDRSTPTYTIKAQDVVQALNTFYNGSASGLDGIRPAHLKELTSPSAGDNGHRLVDSLAKLCNFLFSGQLNTEVCPFLYGATLCALSKKYGGLRPIAIGNTIRRLAAKLGCCAVREEIAGYLSPHQLGFGTRLGCEPAIHAVRAFAMDPGQTGSVIVKLDIKNAFNSVERDVLLSEVGEKLPSLYQLYHSPSNLFYDETLILSQVGAQQGDPLGPLAFSLAIHKAILELKSPLNVWYLDDGTIGGKPEVVEQDLKILLPHFRRLGLEINSTKCKFFSCGLESRSSFPLFSSLLPGLRELSPSSFHILGSPIFPEAILLVAGRRLKNLSAHVALLLLRMCFAVPKVNFFLRTCPTWLYPDSIAAFDEVLRNSVERILNVALNAEQWSQASLPIRCGGLGVRRVRDVSLPAFLASSHGVVSLVTNILTVNGGRTNIPYVSDALTAWGALNPTSPLPEGPECQRSWDGVGVKRTLEQLESVAMGVDLARLKAVSRPESGAWLHALPSPHLGTLLDSDSLRVAVSLRLGCDVCVPHQCICGSRVEANGHHALSCCRCSGRFPRHHALNDIVRRALVAANIPCTLEPPGLCRSDGKRPDGLTLVPWQRGKCLLWDATCVSTFAASHLARTVRAAGAAAELAALRKRDKYSELENNYLFVPLAAETTGCWCEEARGFIKDVGRRMRERGGDPRSGSFLLQRLSIAIQRDNAASVMGTFGPGMAKSGASSLS

SEQ ID NO: 15245 - protein, 947 aa, Blastobasis adustella
MINSSPFLKCPHCADSFRSFSPHGLKVHIGRMHKDISRTPVASQSSNVASHPLQVSDGIEALKSLATLKRTVRVLRHVPKGARSLAAGRLCHLIDDCIELNGIEQWSVLLTFAYKGLKSPEATGPGTLTTKVKENIQNCCGCCFSDGTGGNKSLTTVERRIENKVFEGDLRGAVRLLMSNDTVAPPGPETLASLRVKHPPPSRPLDFPRSPDRSIPTYTIKAQDVAQALNTFHNGSASGLDGIRPAHLKELTSPSAGDNGHRLVDSLAKLCNFLFSGQLNTEVCPFLYGATLCALSKKYGGLRPIAIGNTIRRLAAKLGCCAVREEIACYLSPHQLGFGTRLGCEAAIHAVRAFAMDPGQTASVIVKLDIKNAFNSVERDVLLSEVGEKLPSLYPFLYQLYHSPSNLFYDETLILSQVGAQQGDPLGPLAFSLAIHKAILELKSPLNVWYLDDGTIGGKPEVVEQDLKILLPHFRRLGLEINSTKCEFFSCGLESRSSFPLFSSLLPGLRELSPSSFHILGSPIFPEAIPEAFEFRRQLLLVAGRRLENLSAHVALLLLRMCFAVPKVNYFLRTCPTWLYPDSIAAFDEVLRDSVERILNVALNAEQWSQASLPIRCGGLGVRRVRDVSLPAFLASHGVVSLVTNILTVNGGRTNIPYVSDALTAWRALNPTSPLPEGPECQRSWDGVGVKRTLEQLESVAMGVDLARLKAVSRPESGAWLHALPSPHLGTLLDSDSLRVAVSLRLGCDVCVPHQCICGSRVEANGHHALSCCRCSGRFPRHHALNDIVRRALVAANIPCTLEPPGLCRSDGKRPDGLTLVPWQRGKCLLWDATCVSTFAASHLARTVRAAGAAAELAALRKRDKYSELENNYLFVPLAAETTGCWCEEARGFIKDVGRRMRERGGDPRSGSFLLQRLSIAIQRGNAASVMGTFGPGMAKSGASSLS

SEQ ID NO: 15246 - protein, 961 aa, Pammene fasciana
MSSSSHTLTCSHCPGSSRRFTSHGLKIHIGHLHKDVARQRHLPSSAHVAPSTSQTDRNITCPQGTQDTQPPGNALHRLGALKSSVRVLRHIPKGARNLAAEKLSSVISKCIDTNETADWCALLTFAYSALKAPDVEGPGNLTTKVKQNITNYLPGSCGSVSNVDPSARLPSAQRIIESKVFEGDVRGAARLLMSDDCIAPPSPETLASLQSKHPSPSRPLVFPREPDNSIQALTVNLEEVVQALGSFHNGSASGLDGIRPAHLKELIACSAGDNGQRLLECIVKLCNFLLSGQLNPEVCPYMYGASLCALTKKEGGIRPIAVGSTFRRLVAKLGCRAVREPMAGYLQPHQLGFGTQRGCEAAIHATRTFAAESGNSNCVIIKLDVKNAFNTVERDVLLGEAKAHIPSLYPFLYQVYHSPSNLYYNNSLILSQVGAQQGDPLGPLTFSLAIQKIIPSLKSPLNLWYLDDGTLGGNPDTIKQDLTFLLPRLKEIGLEVNATKCDFFCCGPTSSNTLSSFRTLLPGLKELSRSTFYLLGSPIFPDAIPEALETRRRLLLLARQRLSNIGAHVALTLLRMCFAVPKVTYLLRTTPTWLYPDEVSTFDEALRDTTEIILNVSLSDDQWSQASLPIRHGGLGLRRAGDIGLPAFLASAHGVSSLVSKILKSNGDQVTIPYLANALAKWKTRYPDTSVPEVPKVQKSWDEAGARKELSRLINAATGVDLARLRSVSRAEAGAWLQALPAPHLGTLLDSDSMRVAVALRLGCNVCVPHQCICGSMVEANGHHALSCCRCSGRFPRHHALNDIVRRALISANVPCVLEPPGLSRTDGKRPDGLTLVPWERGKCLLWDATCVSTFAASHLTRTVQTAGAAAEIAAVRKHDKYSCLVGNYLFVPLAFETTGCWGSEAIAFVKELGRRIAERGSDVRAGSYLAQRLSIAIQRGNAASVMGIFAPGTARGGLFE

SEQ ID NO: 15247 - protein, 927 aa, Adoxophyes honmai
MHKDVARAGSRPAPRRVAGLGDGDSPPTPLDLSSRGVSLESIGALKRSVRVLKHIPKGARSLAAEKLCTVISRCVETNDVADWYALLTFAYSALRAPDQQSKGNLTTKVKANIAAVDGWSSSAELLSVGEASFALPSVLRTIESKVYEGDVRGAVRVLMSEDSVAPQGPDTLASLQAKHPPPSRTLTFPREPDQSFQALSVGMDDVVRALGTFHNGSAAGLDGVRPAHLKELTSTSAGDNGRRLLESLVVFCNFLLGGQVHREICPYLYGASLCALIKKEGGVRPIAVGSTFRRLVAKLGCYMVKGQMAEYLQPHQLGFGTQRGCEAAIHATRTFVTDPGNADCVVLKLDLKNAFNSVERDVLLGEAEKHIPTLYPFLYQVYQSPSNLVYGDSLISSQVGAQQGDPLGPLVFSLAIQEVVSSLKSPLNLWYLDDGMLGGEPEVVKQDLAFLIPRLRTMGLEVNADKCEVYCCGPTSSISLISLKSVLPGLKELFRGLFTLLGSPVFQEAIPGALEGRRRLLMLAQERLRDVGAHVALTLLRMCFAVPKITYLLRTTPTWLCPDDVDAFDSALKDSAETLLNVSLSDEQWVQASLPIRCGGLGLRRAVDVGLPAFLASAHGVGCLVSKILNPNGGMVTIPFVEDALARWAALYPAASLPGNPQIQREWDDVGARDALARLMGVATGADLARLKSVSRVEAGAWLQALPAPYLGTLLDSDSLRVAVALRLGCDVCVPHKCICGSMVEANGHHALSCCRCSGRFPRHHALNDIVRRALISANIPCTLEPPGLYRTDGKRPDGLTLVPWQKGKCLLWDATCVSTYAASHLNRTVHKAGAAADFAALKKRAKYIDLSNNYYFVPLAFEASGCWGSDAIDFIREVGRRIRERGSEARAGLYLVQRLSIAIQRGNAASVMGTFAPGATRGGLFD

SEQ ID NO: 15248 - protein, 960 aa, Pammene fasciana
MSSPSRTSTCPHCHESSRRFTSHGLKIHIGRVHKDVARVSSQPEPTQVSPCCDRPDRASPPPRSSPPPGVALESLGALKKSVRVLKHIPKGARNLAAEKLCAVISKCVETNDTADWYALLTFAYSALRAPEVHSPGNLTTKVKSNIAAADCWSCSVELGSVEAASHGTPSVLKTIESKVYEGDVRGAVRVLMSDDSIAPPGPETLASLRTKHPPPSRTLNFPREPDRSFQALTVSLEDVTRALGTFHSGSAAGLDGIRPAHLKELTSCSAGDNGKRLLESLVKLCNFLLSGQLNREICPYLYGASLCALSKKEGGIRPIAVGSTFRRLVAKLGCHEVKERMAGHLQPHQLGFGTQRGCEAAIHATRTFVMDPKNAECIVLKLDLKNAFNTVERDVLLGEVEKHIPTLYPFLHQVYHSPSNLIYDDSLILSQVGAQQGDPLGPLVFSLAIHEAVSSLNSPLNIWYLDDGTLGGEPEVVRQDLALLIPRLRDMGLEVNAEKCEVYCCGPNCFSSLTSLKSLLPGLKELSHRTFTLLGSPIFQEAISSAIETRKRLLLIAQERLKKISAHVALTLLRMCFAVPKVTYLLRTTPTWLCPGDVSSFDAALRDTAEAILNVSFSDEQWIQASLPIRHGGLGLRCAGDVGLPAFLASAHGVVGLVSKILNSHGDTVTIPFVEDASARWTARYPAASLPEAPQVQRVWDDVGARDALARLIGVATGVDLARLKSVSRIESGAWLQALPAPHLGTLLDDDSLRVAVALRLGCDVCVPHKCICGSMVEANGDHALSCCRCSGRFPRHHALNDIVRRALISANIPCVLEPPGLCRTDGKRPDGLTLVPWKRGKCLLWDATCVSTFATSHLGRTMRTAGAAADFAAVKKRDKYATLGSNYYFVPLAFEITGCWGSEATAFIREVGRRIRGRGFDVRAGLYLVQRLSIAIQRGNAASVMGTFAPGTIRGGLFD

SEQ ID NO: 15249 - protein, 987 aa, Adoxophyes honmai
MYVCMYKILSYICVCFLFCWHCISIWDNVMSSTSLSVACPHCPESSRRFTSHGLRVHLGRVHKDVARAGSRPARRRLAVLVDADSPPAPLDLSPPGVSLESIGALKRSVRVLKHVPKGARSLAAEKLCTVISRCVETNNVADWYALLTFAYSALKAPEQQSKGNLTTKVKANIAAVDCWSSSAELGNVGEASFAPPSVLRTIESKVYEGDVRGAVRVLMSEDSVAPQGPDTLASLQAKHPLPSRSLTFPQEPDRSFQALSVDVGDVVRALGTFHNGSAAGLDGVRPAHLRELTSTSAGDSGRRLLESLVVLCNFLLGGKVNREICPYLYGASLCALIKKEGGVRPIAVGSTFRRLVAKLGCHVVKGQMAEYLQPRQLGFGTQRGCEGAIHATRTFVTDPGNADCVVLKLDIRNAFNTVERDVLLGEVEKHIPILYPFLFQVYHSPSNLVYGDAVILSQVGAQQGDPLGPLVFSLAIQEVVSSLKSPLNVWYLDDGTLGGEPEVIKQDLAFLIPRLRAMGLEVNADKCEVYCCGPTSSDSLIGLKSVLPGIKELFRGSFTLLGSPIFQEAIPGALEGRRRLLMLARERLRDVGAHVALTLLRMCFAVPKITYLLRTTPTWLCPDDVDAFDSALKDSAETLLNVSLSDEQWVQASLPIRCGGLGLRRAVDVGLPAFLASTHGVGGLVSKVLNSNGGMVTIPFVEDALARWTALYPTASLPEAPQIQREWDDVGARDALARLTGAATGADLARLKSVSKVEAGAWLQALPAPYLGTLLDSDSLRVAVALRLGCDVCVPHKCICGSMVEANGHHALSCCRCSGRFPRHHALNDIVRRALISANIPCVLEPPGLCRTDGKRPDGLTLVPWQKGKCLLWDATCVSTYAASHLGRTILAAGAAADFAALRKRAKYSELVNNYFFVPLAFEASGCWGSDAVDFVREVGRKMRERGGDARAGSYLVQRLSIAIQRGNAASVMGTFAPGATRGGLLD

SEQ ID NO: 15250 - protein, 960 aa, Cydia splendana
MSSPSRTLTCPHCPVPSRRFAPHGLKVHIGMKHKDVALVHPQPASDQVSPSLDQPGRTASPPRSVPPPGVALESLGALKKSVRVLKHIPRGARNLAAEKLCTVISKCIETNDTADWYALLTFAYSALKAPEVQACGNLTTKVKSNIVAADSWSSTVELGSVGEPAPRSPSVLKTIESKVYEGDLRGAVRVLMSDDSIAPPSPETLASLQTKHPPPSRTLTFPREPDRSFQATTISVEDVVRALGTFHSGSAAGLDGIRPAHLKELTSSSAGDSGQRLLGSLVKLCNFLLSGQLNREVCPYLYGASLCALTKKEGGIRPIAVGSTFRRLVAKLGCYEVKERMAKFLQPHQLGFGTQRGCEAAIHATRTFVMDPENANCVVLKLDLKNAFNTVERDVLLGAVEKYIPTLYPFLHQVYHSPSNLVYDDSLILSQVGAQQGDPLGPLAFSLAIHEAVSSLKAPLNTWYLDDGTLGGEPEVVEQDLAFLIPRLRDMGLEVNAGKCEVYCCGPTSSSSFSSLRSLLPGLKELSDETFTLLGSPIFPEAISNAIETRKRLLLLAQERLKYINAHVALTLLRMCFAVPKITYLLRTAPTWLCPGDVSSFDGALRVTAETILNVSFSDEQWTQASLPIRHGGLGLRCAGDVGLPAFLASAHGVGDLVFKILHCQGERVTIPFVDDALTRWTARYPTASLPEAPQVQRLWDDVGAGDALARLMGMATGVNLARLKSVSRVEAGAWLQALPAPHLGTLLDNDSLRVAVALRLGCDVCVPHKCICGSMVEANGHHGLSCCRCSGRFPRHHALNDIVRRALISANIPCVLEPPGLCRTDGKRPDGLTLVPWQRGKCLLWDATCVSTFAASHLGRTVRAAGAAADFAAAKKLEKYANLAGNYYFVPLAFETTGCWGSEATAFIREVGRRMREKGSDARAGSYLVQRLSIAIQRGNAASVMGTFAPGTTRGGLFD

SEQ ID NO: 15251 - protein, 955 aa, Pammene fasciana
MSSPSKSTCPYCHNSSRLFTSQGLKVHITRKHKDVPRPCALRPVAGADAAVRPPDFTQPLPDAQTYSCNLDQLASFKATVRVLRHIPKGARCAAASKLCKIIEGCIAINGVDDWCALLSFAYRALRTPETGGTSSLTAKVKANIEAFSYLSSDEGAAASRSLSLTKTIEAKVHEGDLRGAVRLLMSEDSFAPSGPDTFAALQSKDPSPSRPLCFPAEPDQNCPALSVKVDDVALAVGSFHCGSAAGLDGIRPAHLKELISSSAGDGGARLLEALTKLCNFLLAGKLNPQVCPYLYGATLCALKKKEGGVRPIAVGCTLRRLVAKLGCRAVREEMATYLQPHQVGYGTPLGCEAAIHAVRAFTLDPANSASVVIKLDVKNAFNTLERDVLLNEVRENIPTLFPFLHQVYQLPSNLFHGSNLISSQVGAQQGDPLGPLAFSLAIHKIITELKSPLNIWYLDDGTIGGKPDEVEQDLLVLLPRLRELGLEVNTSKCEFFPCGTESSCQFSFFSSLLPGLKELDTNSFCLLGAPIFLSAVPGALQSRRDLLLLAGERLKGISPHVSLVLMQKCFAVPKITYLLRTAPVWSFLDEVISFDETIKSTIESVVNVSLSDDQWTQAALPVRHGGIGVRRVQDVSLPAFLASAHGVADLVANILSLDGDRASLPYVADALREWLALNPGANVPENPKVQRAWDDVGCKAMLNGLIGNAVGADRARLLAASQSESGAWLHALPSPQLGTLLDGDSLRVATALRLGCDVCQPHRCICGTMVGADGHHALSCRRCTGRHPRHHALNDIVQRALRSAGVPSVLEPPGLSRTDGKRPDGLTLVPWEKGRCLVWDATCVSTFAASHVVRTTRAAGAAAESQAAVKRQKYAPLGAGYVFVPFAVETAGCWGVDAKKFVRDIGHRLRQKGEDPRSESFLVQRLSVAIQRGNAASVMGTFAPETTTNGSNVYS

SEQ ID NO: 15252 - protein, 949 aa, Chrysoteuchia culmella
MNSLSELTCPHCQPPSSRKFTTRGLKIHITRVHKDLPRPPPSQPVSAGATLPAATGPPSGGRCSLEHLASMKAKVRVLRHIPKGARSVVAGRLCALIDSCIASNGVDEWCSLLSFAYTALRTPDQTGAGSLTAKIKANIEADSCQASIVCGSFASGSRSLKKAVESKVHEGDLRGAVRLLMSEDSVAPPGPETVAALQSKHPSPSRPLCYPPEPGLGAPRLLVAEEDVMLAVNSFYNGSAAGLDGIRPAHLKELTSSTAGDNGQRLIKALTKLSNFLLGGQVNPAVCPYLYGATLCALKKKEGGLRPIAVGSVFRRLVAKLGCRAVKENMASYLQPHQLGFGTRLGCEAAIHALRTFALDPRNAGAVVIKLDLKNAFNSLERDAMLGEVLEKIPMLYPFLHQVYHRPSNLFFGSELIQSQVGAQQGDPLGPLTFSLAIHGAISELRSPLNIWYLDDGTIGGKPEEVERDLLVLLPRLKELGLEVNPTKCEFFSCSAESSSSFLSFTSLLPGLKERNRQTLCLLGAPIFPAAIPEALETRRETLLLASERLKVITPHVALVLMQKCFAVPKMTYLLRTVPIWLFPGAVESVDAVIRSIMEAILNVSLSGEHWTQAILPVRYGGLGVRCIRDVSLPAFLASAHGVADLVADILSLNGDKATIPHAADAIKTWLARFPGAAVPENPEFQRSWDDVACKAILDRLTDGAEAVDLARLLAVSRPESGAWLQALPSPHIGTLLDADSLRVAVALRLGCNVCEPHICICGTMVGADGHHALSCRRCIGRHPRHHALNDILQRALTSAGIPSVLEPPGLSRTDGKRPDGLTLVPWEKGRCLVWDATCVSTFAATHICRTSRAAGAAAEYQAVAKHQKYAPLEQGYIFIPLAVETAGCWGAEAIQFIKDLGRRLRQKNCDPRSGSFLVQRLSIAIQRGNAASVMGTFAPGTTRGGLLD

SEQ ID NO: 15253 - protein, 947 aa, Pammene fasciana
MSSPSESTCPHCLNSSRLFTSRGLKAHITRMHKDVPRPSASQPVSGAALHSDAAQPGPHTQSCNLDQLASLKKSVRVLRHIPKGARSVAASKLCGIIQRCITINGVDEWCAFLSFSYRALKTPEAGGTESLTAKVKANIEAFSYLSPDSCALASRSISLIRTIEGKVHEGDLRGAVRLLMSEDTIAPAGPDTFAALQTKHPSPSRPLCFPAEPDLDCLALSVKVEDVALAISSFHSGSAAGLDGIRPAHLKELTSNTAGDSGVRLMEALTSLCNFLLSGKLNPQVCPYLYGATLCALRKKEGGVRPIAVGSTFRRLVAKLGCRAVKGEMASYLQPHQVGFGTQLGCEAAIHAVRAFALKPENSGSVIVKLDLKNAFNMVERDVLLGEVKEKIPALFPYLHQVYCSPSNLFYGADLILSQVGAQQGDPLGPLAFSLAIHKVIAELKSPLNVWYLDDGTIGGKPEEVEQDLLVLLPRLKDLGLEVNSSKCEFFPCGLQSSSLLSFFSALLPGLTELSTDSFCLLGAPIFPSSVPEALKTRRDLLILAGKRLKDLNPHVALVLMQKCFAVPQINYLLRTAPVWLFPEDIGTFDLIIKATIESVVNVSLSDGQWAQAGLPIRFGGIGVRRVGDVSLPAFLASAHGVADLVAKILSLNGDQVSVPYVADAVREWWAVNPEATVPENPRHQRAWDDVGCKAILNGLVGSASGVDRARLMAVSRPESGAWLQALPSPQLGTLLDGDSLRVSVALRLGCDVCQPHVCICGSTVEANGHHALSCRRCVGRHPRHHALNDIVQRALRSAGVPSVLEPLGLSRTDGKRPDGLTLVPWERGRCLVWDATCVSTFAASHISRTTRAAGAAAESQAVVKRQKYAPLGAGYIFVPFAVETAGCWGADAKQFVRDIGRRLRQKGEDPRSESFLVQRLSMAIQRGNVASIMGTFGPEATRSGYD

SEQ ID NO: 15254 - protein, 954 aa, Chilo suppressalis
MSSLPESTCPYCHNSSRKFTSRGLKIHITRIHRDVLSPLSQPPPPPSVAAPVIAPSTPGAANPQSCDRCILLDQLATLRDTVRVLRHIPKGARSVAAGRLCDIIDGCVATNGLEEWSSLLSFSYTAFRTPEKAGNGSLTSKVKVNVGVVRCFFSADCALLVRKPLSLTRVIESKVHEGDLRGAVRLLMSEDSIAPPGPETVAALQSKHPHPSRLLHFPPEPVSCIPGLLVTEEDVVLAVNSFYNGSAAGLDGIRPSHLKELISSSAGDNGQRLIKAFTRLSNFLLSGQLNSDVCPYLYGATLCALKKKEGGLRPIAVGSVLRRLVAKLGCRAVKEQMASYLQPHQLGFGIRLGCEAGIHAVRTFAMDPENVDGVIVKLDLKNAFNTLERDVMLREVMENIPELYPFLHQAYHIPSNLYVGTDLILSQVGAQQGDPLGPLAFSLAIHKVITELKSPLNIWYLDDGTIGGKPEEVERDLAFLLPRLGELGLEVNFTKCEFFSCSSVSSQSFSSFTCLLPGLKELNKDSFNLLGAPIFPSAVPEAMKTRRDVLLLASERLEAIAPHVALVLLQKCFAIPKITYLLRTAPVWMFGDDIASFDAVIKNAVQTILNVSLSGNHWKQASLPILYGGIGVRSVSDVSLPAFLASAHGVSGLVANILSMNGDKVTVPFAADALAAWLALVPGAAVPRNPEFQRSWDDVNCKATLELLTGGATGVDLARILAVSQPESGAWLHALPSPHMGTLLDGDSLRVAVALRLGCDVCQPHVCICGTMVGADGHHALSCRRCTGRHPRHHALNDIVLRGLRSAGVPSVLEPPGLSRTDGKRPDGLTLVPWEKGRCFVWDATCVSTFAATHIGRTTRRAGAAAEYQATAKRLKYSSLGQGYIFVPLAVETAGCWSAEAKQFVWDLGRRLRQKTNDPRSGSFLAQRLSIAIQRGNAASIMGTFAPETIRGDI

SEQ ID NO: 15255 - protein, 950 aa, Cydia splendana
MSSLSESTCPHCLDSSRVFTSRGLKSHITRKHKDVPHLIPPQPAGNASIRFDTSPPAPTSQTRSCSLDQLASFKGSVRVLRHIPKGARSMAASKLCSIIDNCVTINGVNEWFALLSFSYRALRTPESEEAGSLTTKVKANIDAFSYLASAECTAARRSLSLTKLIEAKVHEGDLRGAVRILMSEDTIAPQGPDTLTALQSKHPTPSRPLCFPAEPDLNCPTLSVKVEDVAWAINSFHSGSAAGLDGIRPDLLKELTSGSAGDGGVRLMESLTKLCNFLLSGKLHDEVCPYLYGATLCALRKKEGGVRPIAVGSTFRRLVAKLGCRAVREQMASYLQPLQVGFGTPLGCEAAIHAVRSFALDPENAGSVIVKLDLKNAFNSVERDALLNEVREYIPILYPFLYQVYHLPSNLFYGSSRITSQVGAQQGDPLGPLTFSLSIQKAIAELKSPLNIWYLDDGTIGGKPEEVKRDLLILLSRLKDLGLEVNASKCEFFACGSESSSFLPSFSSILPGLKELSSNSFNLLGSPIFQSAVPEAMLKRKELLLLAGERLKDIDPHVALFLLQKCFAAPKVTYLLRTAPVWLFPDDIGCFDAAIKLTIECIVNISMNENQWTQAALPVRHGGLGLRRIQDVCLPAFLASAHGVADLVAHILPKNGDRVCIPYVADALKAWLCTNQGATVPENPKIQRAWDDTRSKATIDNLIASAAGVDRARLLAVSQPESGAWLHALPSPQLGTLLDGSSLRVAVALRLGCDVCQPHLCICGSMVGADGHHALSCRRCAGRHPRHHALNDTIQRALRSAGVPSVLEPPGLSRTDGKRPDGLTLLPWERGRCLVWDATCVSTFAASHISRTSRVAGAAAETQADLKRQKYAPLSPGYIVIPFSVETAGCWSADAKRFTRDLGRRLRQKGEGPRSESFLVQRLSVVIQRGNAVSIMGTFAPGTAGSGLFF

SEQ ID NO: 15256 - protein, 950 aa, Pammene fasciana
MSSLPDSTCPHCDGSSRVFTSRGLKTHITRKHKDVPRPAVPQPTSSVAVHIIASPPSPNSQTQGCTLDQLASLKKSVRVLRHIPKGARSMAAGKLCSIIDRCIAVNGLDEWNALLSFSYRALRTPETGEVGSLTAKVKANIDAFSYLSSNDCTAAARSLSLTKLIEAKVHEGDLRGAVRLLMSEDTIAPSNPDTLAALQSKHPNPSRPLYFPAEPDPNCPILTVKVEDVALAVSSFHSGSAAGLDGIRPDHLKELTSSAAGDSGVRLMEALTKLSNFLLSGKLHPEVCPYLYGASLCALRKKEGGVRPIAVGSTFRRLVAKLACHAVRQEMASHLQPLQLGFGTRLGCEAAIHALRSFVMDPNNSGSVVVKLDLKNAFNSVERDALLNEVRENVPLLYPFLYQVYHLPSNLFYGSNLIMSQVGAQQGDPLGPLTFSLSIHKIISELKSPLNVWYLDDGTIGGKPEEVEQDLLTLLPRLKHLGLEVNTSKCEFFPCGPESSSVFPAFSLLLPGLKELSSNSLSLLGAPIFTPAVPEALLTRKHLLLVAGERLKGVNTHVALALMQKCFAVPKVTYLLRTAPVWLFPGDIDSFDAAIKYIIESIVNISMNETQWKQAALPVRHGGLGVRRVQDVCLPAFLASAHGVTNLVANILSHNGNEVSIPFVADATRSWLDLNPGATVPESPNIQRAWDNIGSKATIDGLVADAVGVDRARLLAVSRSESGAWLHALPSPQLGTLLDGDSLRVAVALRLGCDVCQPHVCICGAMVRADGHHALSCRRCTGRHPRHHALNDTVQRALRSAGVPSVLEPPGLSRTDGKRPDGLTLVPWERGRCLVWDATCVSTFAASHISRTSRTAGAAAETQAALKRLKYAPLGSSYIFVPLAVETSGCWGVDAKRFVHELGRRLRQKGEDPRSESFLVQRLSIVIQRGNAASIMGTFAPGTAGSGLFV

SEQ ID NO: 15257 - protein, 949 aa, Cydia splendana
MNSPPKTTCPYCHNSSRLFTSRGLKSHIRWMHQGVSSSATLPVSGTAVISDAAQPVPNAQSHSCNLDELASFKESVRVLRHIPRGARSVAADKLCKIIQSCITVNGVDDWYALLSFAYRALRTPEAGGTSSLTAKVKANVEAFSYLSSDDGTAASRSLSLTRIIEAKVHEGDLRGAVRLLMSEDAIAPSGSGTLAALQSKHPSPSRPLCFPAEPDQDCPTLSMKVEDVVLAINSFHNGSAAGLDGIRPAHLKELISSSAGDGGVRLLEALTKLCNFLLGGKLNPLVCPYLYGATLCALKKKEGGVRPIAVGCTLRRLVAKLGCRAVRGEMASYLQPHQVGFGTRLGCEAAIHAVRAFALDPANSGCVIVKLDVKNAFNSLERDVLLNEVSKNIPTLFPFLHQVYQLPSNLFHGSDRILSQVGAQQGDPLGPLTFSLAIHKVITELKSPLNIWYLDDGTIGGKPDEVEQDLLILLPRLRDLGLEVNTSKCEFFPCGPESSCLFPRFSSLLPGLRQLDTNSFYLLGAPIFPSAVPEALRVSRDLLQLASERLKEISPHIALVLMQKCFAVPKMTYLLRTSPVWQFPDEITSFDDTIKATFEAVVNVSLSDDQWRQAALPVRHGGIGVRRIQDVSLPAFLASAHGVADLVADILSLNGDRASIPFVADALREWLALNPGANVPENPKVQRAWDDVGCKDTLNGLIGNAVGTDHARLLAVSQSESGAWLHALPSPQLGTLLDSDSLRVSVALRLGCKVCEPHICICGTMVGADGHHALSCRRYAGRHPRHHALNDIVQRALRSAGIPSVLEPPGLSRTDGKRPDGLTLVPWERGRCLVWDATCVSTFAASHISRTVRAAGAAAESQAAVKRQKYAPLGAGYIFVPFAVETAGCWGADAKNMVRDIGRRLRQKGEDPRSESFLVQRLSIAIQRGNAASIMGTFAPEASRSGSNV

SEQ ID NO: 15258 - protein, 945 aa, Cydia splendana
MSSLSESTCPYCPNSTRVFTSRGLKSHITWMHKDVSLPSASQPASGVAVHSDAAQPVQRHSCNLDQLASLKKSVRVLRHIPRGARSVAARKLCGTIESCIAVNGVDEWCDLLSFSYRALRTPEAGGTGSLTAKVKANIEACSYLSPEDCAVASRSVSLNRTIEAKVHEGDLRGAVRLLMSEDTIAPAGPDTFAALQSKHPSPSRPLSFPTEPDLDAPAVSVKVEDVSLAVSSFHSGSAAGLDGIRPAHLKELTSGTAGDSGVRLMEALTNLCNFLLSGKLNPQVSPYLYGATLCALNKKEGGLRPIAVGSTFRRLVAKLGCRAVRGEMASYLQPHQVGFGTQLGCEAAIHAVRAFALKPENAGSVIIKLDLKNAFNSVERDVLLGEAKEKIPALYSFLHQVYHSPSNLFYGTDRILSQVGAQQGDPLGPLTFSLAIQKVITDLKSPLNIWYLDDGTIGGKPEEVEQDLLVLLPRLKDMGLEVNTSKCEFFPCGPQSSSLFSFFSGLLPGLKELHTDSFCLLGAPIFPSAVPEALQIRRNLLLLAGERLKGLTPHVALVLLQKCFAVPKITYLLRTAPVWLFPGDIETFDMAIKSTIESVVNVSLDDIQWTQAGLPIRHGGIGVRRVGDISLPAFLASAHGVADLVAKMLSLNGDGVSIPYVADAVRQWLAINPGASVPENPRLQRAWDEVGCKATLDGLVGNASGVDRARLLAVARPESGAWLQALPSPQLGTLLDGDSLRVSVALRLGCDVCQPHLCICGSTVGADGHHALSCRRCVGRHPRHHALNDIVQRALRSAGVPSVLEPPGLSRTDGKRPDGLTLVPWERGRCLVWDATCVSTFAASHISRTARAAGAAAESQAAVKRQKYVPLGSGYIFVPFAVETAGCWGADAKQFVRDIGRRLRQKGEDPRSESFLVQRLSIAIQRGNAVSVMGTFAPEAIRNGF

SEQ ID NO: 15259 - protein, 950 aa, Pammene fasciana
MSSLPDSTCPHCDGSSRVFTSRGLKTHITRKHKDVPRPAVPQPTSSVAVHIIASPPSPNSQTQGCTLDQLASLKKSVRVLRHIPKGARSMAAGKLCSIIDRCIAVNGLDEWNALLSFSYRALRTPETGEVGSLTAKVKANIDAFSYLSSNDCTAAARSLSLTKLIEAKVHEGDLRGAVRLLMSEDTIAPSNPDTLAALQSKHPNPSRPLYFPAEPDPNCPILTVKVEDVALAVSSFHSGSAAGLDGIRPDHLKELMSSAAGDSGVRLMEALTKLSNFLLSGKLHPEVCPYLYGASLCALRKKEGGVRPIAVGSTFRRLVAKLACHAVRQEMASHLQPFQLGFGTRLGCEAAIHALRSFVMDPNNSGSVVVKLDLKNAFNSVERDALLNEVRENIPLLYPFLYQVYHLPSNLFYGSNLIMSQVGAQQGDPLGPLTFSLSIHKIISELKSPLNVWYLDDGTIGGKPEEVEQDLLTLLPRLKHLGLEVNTSKCEFFPCGPESSSVFPAFSLLLPGLKELSSNSLSLLGAPIFTPAVPEALLTRKHLLLVAGERLKGVNTHVALALMQKCFAVPKVTYLLRTAPVWLFPDDIDSFDAAIKYIIESIVNISMNETQWKQAALPVRHGGLGVRRVQDVCLPAFLASAHGVTNLVANILSHNGNEVSIPFVADATRSWLDLNPGATVPESPNIQRAWDNIGSKATIDGLVADAVGVDRARLLAVSRSESGAWLHALPSPQLGTLLDGDSLRVAVALRLGCDVCQPHVCICGAMVRADGHHALSCRRCTGRHPRHHALNDTVQRALRSAGVPSVLEPPGLSRTDGKRPDGLTLVPWERGRCLVWDATCVSTFAASHISRTSRTAGAAAETQAALKRLKYAPLGSSYIFVPLAVETSGCWGVDAKRFVHELGRRLRQKGEDPRSESFLVQRLSIVIQRGNAASIMGTFAPGTAGSGLFV

SEQ ID NO: 15260 - protein, 950 aa, Cydia pomonella
MSSLPESSCPHCLDSSRVFTSRGLKAHITRKHKDVPRLIHTQPAGDASVRFNITPPAPTSQANSCSLDQLASFKGSVRVLRHIPKGARSIAASKLCNIIDNCITINGVNEWYALLSFSYRALRTPESVEAGSLTAKVKANIDAFSYLASAECTAAHRSLSLTKLIEAKVHEGDLRGAVRILLSEDTIAPQGPDTLTALQSKHPAPSRPLCFPAEPDLNCPTLSVKVEDVAWAINSFHSGSAAGLDGIRPDLLKELTSGSAGDSGVRLLESLTKLCNFLLSGKLLAEVCPYLYGATLCALRKKEGGVRPIAVGCTFRRLVAKLGCRTVREQMASYLQPLQVGFGTPLGCEAAIHAVRSFALDSENAGSVIVKLDLKNAFNSVERDVLLKEVSENIPFLYPFLHQVYHLPSNLFYGSSRIMSQVGAQQGDPLGPLTFSLSIQKAIAELKSPLNIWYLDDGTIGGKPEEVKRDLLILLPRLKDLGLEVNASKCEVFACGLESSSFFPSFSSVLPGLRELSSNSFTLLGAPLFPSAVPEALLRRKELLLLAGERLKDINPHVALVLLQKCFAVPKVTYLLRTAPVWLFPDDIDCFDAAIKLSIESLVNIFMNENQWTQAALPVRHGGIGVRRIKDVCLPAFLASAHGVADLVANIVPKNGDRVCIPHVADALRAWLCINPGATVPENPKIQRAWDDTLSKATLDNLIMSAAGVDRARLLAVSQPESGAWLHALPSPQLGTLLDSDSLRVAVALRLGCDVCQPHFCICGSMVGADGHHALSCRRCAGRHPRHHALNDTVQRALRSAGVPSVLEPPGLSRTDGKRPDGLTLIPWERGRCLVWDATCVSTFAASHISRTSRTAGAAAETQAALKRQKYAPICPGYIFVPFAVETAGCWGADAKRFIRELGRRLRQKGEGPRSESFLVQRLSMVIQRGNAASIMGAFAPGTVGSGLFV

SEQ ID NO: 15261 - protein, 954 aa, Chilo suppressalis
MSSLPESTCPYCHNSSRKFTSRGLKIHITRIHRDVLSPLSQPPPPPSVAAPVIAPSTPGAANPQSCDRCILLDQLATLRDTVRVLRHIPKGARSVAAGRLCDIIDGCVATNGLEEWSSLLSFSYTAFRTPEKAGNGSLTSKVKVNVGVVRCFSSADCALLVRKPLSLTRVIESKVHEGDLRGAVRLLMSEDSIAPPGPETVAALQSKHPHPSRLLHFPPEPVSCIPGLLVTEEDVVLAVNSFYNGSAAGLDGIRPSHLKELISSSAGDNGQRLIKALTRLSNFLLSGQLNPDVCPYLYGATLCALKKKEGGLRPIAVGSVLRRLVAKLGCRAVKEQMASYLQPHQLGFGIRLGCEAGIHAVRTFAMDPENVDGVIVKLDLKNAFNTLERDVMLHEVMENIPELYPFLHQAYHIPSNLYVGTDLILSQVGAQQGDPLGPLAFSLAIHKVITELKSPLNIWYLDDGTIGGKPEEVERDLAFLLPRLGELGLEVNFTKCEFFSCSSVSSQSFSSFTCLLPGLKELNKDSFNLLGAPIFPSAVPEAMKTRKDVLLLASERLEAIAPHVALVLLQKCFAIPKITYLLRTAPVWMFRDDIASFDAVIKNAVQTILNVSLSGNHWKQASLPIRYGGIGVRSVSDVSLPAFLASAHGVSGLVANILSMNGDRVTVPFAADALAAWLALVPGMAVPKNPEFQRSWDDVNCKATLELLTGGATGVDLVRILAVSQPESGAWLHALPSPHMGTLLDGDSLRVAVALRLGCDVCQPHVCICGTMVGADGHHALSCRRCTGRHPRHHALNDIVLRGLRSAGVPSVLEPPGLSRTDGKRPDGLTLVPWEKGRCLVWDATCVSTFAATHIGRTTRRAGAAAEYQATAKRLKYSSLGQGYIFVPLAVETAGCWSAEAKQFVWDLGRRLRQKTNDPRSGSFLAQRLSIAIQRGNAASIMGTFAPETIRGDI

SEQ ID NO: 15262 - protein, 954 aa, Chilo suppressalis
MSSLPESTCPYCHNSSRKFTSRGLKIHITRIHRDVLSPLSQPPPPPSVAAPVIAPSTPGAANPQSCDRCILLDQLATLRDTVRVLRHIPKGARSVAAGRLCDIIDGCVATNGLEEWSSLLSFSYTAFRTPEKAGNGSLTSKVKVNVGVVRCFSSADCALLVRKPLSLTRVIESKVHEGDLRGAVRLLMSEDSIAPPGPETVAALQSKHPHPSRLLHFPPEPVSCIPGLLVTEEDVVLAVNSFYNGSAAGLDGIRPSHLKELISSSAGDNGQRLIKALTRLSNFLLSGQLNPDVCPYLYGATLCALKKKEGGLRPIAVGSVLRRLVAKLGCRAVKEQMASYLQPHQLGFGIRLGCEAGIHAVRTFAMDPENVDGVIVKLDLKNAFNTLERDVMLHEVMENIPELYPFLHQAYHIPSNLYVGTDLILSQVGAQQGDPLGPLAFSLAIHKVITELKSPLNIWYLDDGTIGGKPEEVERDLAFLLPRLGELGLEVNFTKCEFFSCSSVSSQSFSSFTCLLPGLKELNKDSFNLLGAPIFPSAVPEAMKTRKDVLLLASERLEAIAPHVALVLLQKCFAIPKITYLLRTAPVWMFRDDIASFDAVIKNAVQTILNVSLSGNHWKQASLPIRYGGIGVRSVSDVSLPAFLASAHGVSGLVANILSMNGDKVTVPFAADALAAWLALVPGMAVPKNPEFQRSWDDVNCKATLELLTGGATGVDLVRILAVSQPESGAWLHALPSPHMGTLLDGDSLRVAVALRLGCDVCQPHVCICGTMVGADGHHALSCRRCTGRHPRHHALNDIVLRGLRSAGVPSVLEPPGLSRTDGKRPDGLTLVPWEKGRCLVWDATCVSTFAATHIGRTTRRAGAAAEYQATAKRLKYSSLGQGYIFVPLAVETAGCWSAEAKQFVWDLGRRLRQKTNDPRSGSFLAQRLSIAIQRGNAASIMGTFAQETIRGDI

SEQ ID NO: 15263 - protein, 950 aa, Pammene fasciana
MSSLPDSTCPHCDGSSRVFTSRGLKTHITRKHKDVPRPAVPQPTSSVAVHIIASPPSPNSQTQGCTLDQLASLKKSVRVLRHIPKGARNMAAGKLCSIIDRCIAVNGLDEWNALLSFSYRALRTPETGEVGSLTAKVKANIDAFSYLSSNDCTSAARSLSLTKLIEAKVHEGDLRGAVRLLMSEDTIAPSNPDTLAALQSKHPNPSRPLYFPAEPDPNCPILTVKVEDVALAVSSFHSGSAAGLDGIRPDHLKELTSSAAGDSGVRLMEALTKLSNFLLSGKLHPEVCPYLYGASLCALRKKEGGVRPIAVGSTFRRLVAKLACHAVRQEMASHLQPLQLGFGTRLGCEAAIHALRSFVMDPNNSGSVVVKLDLKNAFNSVERDALLNEVRENIPLLYPFLYQVYHLPSNLFYGSNLIMSQVGAQQGDPLGPLTFSLSIHKIISELKSPLNVWYLDDGTIGGKPEEVEQDLLTLLPRLKHLGLEVNTSKCEFFPCGPESSSVFPAFSLLLPGLKELSSNSLSLLGAPIFTPAVPEALLTRKHLLLVAGERLKGVNTHVALALMQKCFAVPKVTYLLRTAPVWLFPDDIDSFDAAIKYIIESIVNISMNETQWKQAALPVRHGGLGVRRVQDVCLPAFLASAHGVTNLVANILSHNGNEVSIPFVANATRSWLDLNPGATVPESPNIQRAWDNIGSKATIDGLVADAVGVDRARLLAVSRSESGAWLHALPSPQLGTLLDGDSLRVAVALRLGCDVCQPHVCICGAMVRADGHHALSCRRCTGRHPRHHALNDTVQRALRSAGVPSVLEPPGLSRTDGKRPDGLTLVPWERGRCLVWDATCVSTFAASHISRTSRTAGAAAETQAAVKRLKYAPLGSSYIFVPLAVETSGCWGVDAKRFVHELGRRLRQKGEDPRSESFLVQRLSIVIQRGNAASIMGTFAPGTAGSGLFV

SEQ ID NO: 15264 - protein, 950 aa, Pammene fasciana
MSSLSESTCPHCVGSSRVFSSRGLKTHITRIHKDIPRTTVPRPTSSAAVRINSSPPTPNTQTVGCTLDQLASLKKSVRVLRHIPKGARNMAASKLCSIIDRCVAINGLDEWCALLSFSYRALRTPETASAGSLTAKVKANIDAFSYLSPDDCTATARSLSLTKLIESKVHEGDLRGAVRLLMSEDTVAPSSPDTLAALQSKHPSPSRPLHFPMEPDQNCPTLSVKVEDVTMAVSSFHSGSAAGLDGIRPDLLKDLTSSAAGDSGVRLMEALTKLCNFLLSGKLHPEVCPYLYGATLCALRKKEGGVRPIAVGSTFRRLVAKLGCRAVRQEMASYLQPTQLGFGTRLGCEAAIHALRTFVMDPQNGGNVVVKLDLKNAFNCVERDTLLSEVKEIVPTLYPFLYQVYHLPSNLFYDTNPIMSQVGAQQGDPLGPLTFSLSIQKVIAELKSPLNIWYLDDGTIGGKPEEVEQDLLMLLPRLRDLGLEVNTAKCEIFSCGPGSNFFLPTFSSLLPGLRELNFNSLSLLGAPIFPSAVPEALLTRKELLLLAGDRLKDLNPHVALVLLQKCFTVPKVTYLLRTAPVWLFPNDISLFDAALKSTLESVVNVSLNDAQWTQAALPVRHGGLGVRRVQDVSLPAFLASAHGVADLVAKILYVNGDRASIPYMADALNAWSALNPGTSVPENPRVQRTWDDTGSKATVEGLIANAVGVDRARLLAASRSESGAWLHALPSPQLGTLLDGTSLRVAVALRLGCTVCQPHTCICGAMVGADSHHALSCRRCTGRHPRHHALNDTIQRALRSAGVPSMLEPPGLSRTDGKRPDGLTLVPWERGRCLVWDATCVSTFAASHISRTSRAAGAAAETQAALKRQKYAPLGSGYIFVPFAVETAGCWGADAKRFIRELGRRFRQKGEDPRSESFLVQRLSIIIQRGNAASVMGTFVPGAAGSEMFG

SEQ ID NO: 15265 - protein, 1141 aa, Osmia bicornis
MDEDEGASDTGTPGPGIPVADLSAMDRRATVDDQGMNTDYDLEFIVDLPLSGEIKCSACEREGRNRVFLQEGKLNEHIEQQHPQMNMKWRCARCGKSFQKLHGCRCHLPKCKGEEEPRADATFMCTSCERSFGTKRGLSTHERHRHPEMRNEKRKKPEPRPGRSRPGNRASAWSKEEERLLLELNERFKNERFINVAISRFLPGKTYKQISDKRRILPAQGRSEMEEELSDSSSSPSTPQSAAEGDIEIIYESSGPSTADNTIEWKAVLKEHILAQSLEENNELRYIEQRIQHWAREELGDSHDIENLIWELTEKLKEGVDDNPPGGREGRNNGNQNRMNKKKSDHTRRKDFTYARYQELYKKCPKKLIDMAVAGTQVEAGERMELPDKGMIESLYGNLWGRVVSTAGLPKFGGPSESVPIKEIFVPITEGELISKVKKLKTDKAAGIDGIKKIHLRKNGTLHLLSQLFNLIMMREVYPTNWKLNRTTLIPKPGKDQRDPKNWRPITIGSLMGRLYSSMLDSRLRDKIKQHKRQKGFTREDGCKYNITILETAIKEMKMKGGGIVTIVDISKAFDTVPHSALGEGLKLKGIAPTIAEYITKMYDGCKTELKTDNKGGTLKIHLKRGVKQGDPLSPLLFNLIVDPLIGNIEQTTEGVKINGETVSILAFADDLVLIAKNKTEAKRQMRKLLKYLSDLGMKIQAEKCATFQIIHKNKTWYLQDPEIKIEETQIPETKPEDMFKYLGVTISPWRGLERIDINEITKAATNIIKMKLKPHQKINLIRTYLLPKYIHKLVANPPPLNTLDTIDHEIKAIIKKALHLHPSTTDGIIYSDKSHGGLGIQRLADIVRIAKLRNGLKMRESDDEIVREAYKGQEKIINKYAQSVGLQWPSDLEEIENARTNLKKSHTDKWRQLSSQGHGVHEFAGDKIGNAWLYKPNLLKPSRYLDALKLRTNTFGTRVALKRARKDIDPICRRCNMQVETLGHILGICLHTKPARIKRHDEIVKIIEEKSARNHIVYTEPTINVIGELKKPDLVIKDQDGIYVVDVTVRYEDKDNLKRAYKEKAEKYKETAEFIKRRTNMRWAKVLPIVVGSRGAIPTSTKDNLKALGFNKNEIMTIALTALRSSIEMANAFIDYDHIR

SEQ ID NO: 15266 - protein, 1148 aa, Megachile rotundata
MMTEEGASDIEVPGPGTSVADLSALDRRTNDDDLGIRTDTEMTQCINLPLDGPIICHGCLENQRDQRFLQEAAFIKHVEQTHPRLEIVWRCAACKKNFVKLHGCKCHIPKCKGPVEQQTVAEFVCDSCGSSFETKRGLSTHERHRHPEVRNEKRKLPEVRSERVSSNSRSSTWTEEEVNLLIELNEKYKNERYPNVTISKYLPGKTYKQISDKRRILPTRSEIDNVPEITEEINLSEQVFLEINNEDSCENIIQNEGSRNDWKNILKEQILNFSLDKENVFKDLEEKVQEWTREENDSLIDIDSVILKYTERLKGDDNDGENLNADKKINKNRRNFKNSKNDKSAYKKRGRHARNKSFVYSRYQEIYKKCPRKLIDLAVAGTPIMAGDKIDLPEKAEIERAYTNLWGRVVSTSGLPRIGRMSNENILTKEIFTPITEEELIMKLKKIKSDKAAGVDGIKKIHLRKDGAVHMLAQILNFIMMKRIYPKQWKINRTTLIPKPGKDNKDIKNWRPITIGSLLSRLYSSMLDSRLRNKIVQYSRQKGFTNEDGCKYNISILDTTIKEMKRKGGGITTIIDISKAFDTIPHTAISDGLKLKGIPTEIADYITTMYDGCQTQLKTDYRGSNLKLILKRGVKQGDPLSPLLFNLIVEPLIVNINETTEGINLNGENISILAFADDIILIAKNKREAFLQLKKVYKYLKQLGMDIQPDKCATFQIVQRNKTWFLQDPNLELDKNKIPEVSPDELVKYLGIYLNPWKGLEHAQASEVITAATNVNNMKLKPYQKINLIRTYLLPRYIHKWVSNPPPLKTLEEIDHKIKQIVKNILHLHQSTTDGIIYSDKGHGGLGIQRVTDIVRIAKLRNGLKMMNSEDPAVREAYLHQEDLLIKYARSIGLQWPVTLETIENARVLLKKEQTKRWEQQTSQGIGVHEFAGDKIGNVWLYNPNLLKSSRYIDALKLRTNTFGTKIAIRRAKQNIDPICRRCKLQVETLGHILGICLHTKPARIKRHNEIVNVIKENVSKRKAVFVEPVINVIGDLKKPDLVINDQDGITLVDVTVRFENKDNLKKAYKEKEIKYKETAEFIKARTNSKNAKILPIVVGCRGAIPKETKDNLKILGLKRSEMVTIAMIALRSSIEMANAFIDYDRIV

SEQ ID NO: 15267 - protein, 1126 aa, Alatina alata
MCDRTPKDTRVCSPVQVKIATETSKRVCPYDLRKRREDNRSIGLDNTEMDLGTLMDNGNGKNISCCGKVFSSVRGLKSHQRQVCKKGVSQQCMSMDSQTRSDFSQEANHSGDNPTAEKESKCNEYQAKKPKINWPKANEAARYKEFDERVIKILRHQKGSSEEKLNMLAEVVYNEGKECFGLEKQLPSDKSLKVNRTKQVSRRERKVQQLRKERKGLRTKWVRANDEEKEGLKRLYEEVKRKLREEVRRERRVARRRAREKCRKSFVRDPFKYAKSFFIENKSGKLECSKEELEEHLRKTYTDANRKTELPSIEGLRKPSQPGVPFDMSELKRMEIESVVKKARAKSSPGNDGVSYKVYKRCAKLRFRLCVLLQNMWRNKTVAEKWCIAEGVYLPKEVDSRDFGQFRPISLLNVDGKILFSVVANRLIKFVTLNGFVNESVQKAGIPGVPGCIEHAFAIWENIQETKKSKGDTVTVWLDLANAYGSVPHVVIQEAMEFFWVPKTIQSMLMAYYDTFMMRFTANSFTTNWQRLEVGIAAGCTISVILFVLVMEMILRSTNCESTHTSAPLKAFMDDIAVSSKNQQGMREVLARLDELIVWSRMKFKARKSRSVTYVKGQQKEVRYGIGGEDIPTVKEQPVKSLGRWYKGSLSDRHQGKAIQGQVDEWLKKIDKSELPGKFKCWCYQYGLLPRLMWPLQMYEIPLTRVERIEQRCSVYIRKWLGLPKMLNNSAIFGKNAQLQLPIASVVEEYKAGKVRTVLMLRFSRDSEIRDDPPEVRTGRKWKAEEAANKVVSNLEHADIVGAVQITREGFGRQSFKPFCKSSVKERREAAVREIRKEEQEKRYLHLVQCAQQGQCLRWQEHVVERKIGWREIWKWEKARTAFLIKATYDAMPTPANLVRWKLEGSDKCRCGNKGTLRHILSNCSLALDRYTWRHDQILSLVEKALSSKISQFNSGNLPQVEKITKLTFCKEGSAGGRMSHHRTTTKDRRWEGIWKIAADVGESLVFPLIVAAQRPDIVVWNEGKKEAILLELTVPWKENFSNAEERKELRYRELREECEEQGWRVEYYHLAVGVRGFVERKLCNLFRKRFCFTVAESRKLVNQLQETAEKTSFWVWLKRNDPCWQ

SEQ ID NO: 15268 - protein, 1163 aa, Triplophysa tibetana
MVTTKQHKDKDPGPSGHGANLYTDENVSGAVSDKEPKCPECERTFPTERSLGMHRHHQHPQEVNTERLAMKAGRRKIWSEHEDTLLIRLANQTWQPKMPKMALYDHLQGAHPLRTAEAIKRRLRTLGWQPEATAHDQRPKTPDDIPQPLRHTDNPADPHTSIPAAADRRWTESEEAQLRINADSIWRDGMTKKELAIRIGSHMMHRSADAILKRLAAVKWTASASDLTPKLPSTGPPASTPDREGTPHPATTISASSSQPRSRPQTPTPATAMTPETSSPTQDPDSQPQTPTPATTTTSETSPPILDPYNAWRRRMMETILTEMKELPLLNTLRETARALMEEEITTEDGARAVEEQIAMMFPVTWRYKEPRPKEQRPCGKPRELRRKQYAAIQRLLHTSRKDAASAVLDGSWREAWRDTAQGPEGLDDFGSEVIGQSGPPAKTPGTASDGEHWALLDPISVEELRGALRSLTNKAVGIDKITATNLLSWHLPSLASLLNLILVTESLPAPMARARITLIPKIQTPTSPNDYRPLAISPILTRALHKVIARRMRDQLEFSPTQYAFLQRDGCLEASMVLHAVLRNAHDHHRPLAMALLDLSKAFDTVTHEALGEAAMKAGLPMPLLRYVNSVLQNSESIIGSNTIKAGRGVRQGDPLSPILFILAMERPISEAHPELGVELESHHLHSILYADDMVLLANSSQDLQTKMDGLTSSLARCGMSLNARKSAALTIEKDGRTKSMLLAPTHYNTGKDQIEPMVIGGTQKYLGLEFDWKGKVTPKRTLDLERMLGEMKAAPLKPQQRLALLKDFLIPRLIHGLVLGHAHRNTLRRMDLMVRRAIRLWLRLPKDTSLGLIHAPNNRGGLGIPSLETHIPMAQKSRLSKLLDGSDTIIQAVTKTTAFQVILRRLAIPIRAGGTMVLSPTEARSAWTDRLISSVDGRELAEVDVDGASHLWLKNPDRVFPRLYIRSLQLRGGTLTTQARATRGRVSPGDERRCRGGCQEVETQHHILQRCAKTHDVRCARHNRIVRLVCKKLKRKELSFSVEPIIPRAKTHIKPDIIVHRTERLTVMDVTVVSGYRLHESWDIKTRKYGGEESKEAMGAWWGSEVEVDHLPIVISSRGLIFGPTGRGLRRLGFTSTDIMDLALCTIQGSLNTYDTYMRGT

SEQ ID NO: 15269 - protein, 1163 aa, Triplophysa tibetana
MVTTKQHKDKDPGPSGHGANLYTDENVSGAVSDKEPKCPECERTFPTERSLGMHRHHQHPQEVNTERLAMKAGRRKIWSEHEDTLLIRLANQTWQPKMPKMALYDHLQGAHPLRTAEAIKRRLRTLGWQPEATAHDQRPKTPDDIPQPLRHTDNPADPHTSIPAAAGRRWTESEEAQLRINADSIWRDGMTKKELAIRIGSHMMHRSADAILKRLAAVKWTASASDRTPKLPSTGPPTSTPDREGTPHPATTTLALSSQPRSRPQTPTPATATTPETSSPTQDPDSQPQTPTPAITTTPETSPPIPDPYNAWRRRMMETILTEMKELPLLNTLRETARALMEEEITTEDGARAVEEQIAMMFPVTWRYKEPRPKEQRPCGKPRELRRKQYAAIQRLLHTSRKDAASAVLDGSWREAWRDTAQGPEGLDDFWTEVIGQSGPPAKTPGTASDGEHWALLDPISVEELRGALRSLTNKAVGIDKITATNLLSWHLPSLASLLNLILVTESLPAPMARARITLIPKIQTPTSPNDYRPLAISPILTRALHKVIARRMRDQLEFSPTQYAFLQRDGCLEASMVLHAVLRNAHDHHRPLAMALLDLSKAFDTVTHEALGEAAMKAGLPMPLLRYVNSVLQNSESIIGSNTIKAGRGVRQGDPLSPILFILAMERPISEAHPELGVELESHHLHSILYADDMVLLANSSQDLQTKMDGLTSSLARCGMSLNARKSAALTIEKDGRTKSMLLAPTQYNTGKDQIEPMVIGGTQKYLGLEFDWKGKVTPKRTLDLERMLGELKAAPLKPQQRLALLKDFLIPRLIHGLVLGHAHRNTLRRMDLMVRRAIRLWLRLPKDTSLGLIHAPNNRGGLGIPSLETHIPMAQKSRLSKLLDGNDTIIQAVTKTTAFQVILRRLAIPIQAGGTMVLSPTEARSAWTDRLISSVDGRELAEVDVDGASHLWLKNPDRVFPRLYIRSLQLRGGTLTTQARATRGRVSPGDERRCRGGCQEVETQHHILQRCAKTHDVRCARHNRIVRLVCKKLKRKELSFSVEPIIPRAKTHIKPDIIVHRTERLTVMDVTVVSGYRLHESWDIKTRKYGGEESKEAMGAWWGSKVEVDHLPIVISSRGLIFGPTGRGLRRLGFTSTDIMDLALCTIQGSLNTYDTYMRGT

SEQ ID NO: 15270 - protein, 1170 aa, Triplophysa dalaica
MVTTKQSKDKDPGPSGRGANHNTDENVSGAAFITEPKCPECDRTFPTLRSLGMHRYHLHPQAVNSESLTTMAGRKKIWSEHEDTLLIRLANQIWQPKMLKTALYDLLQSAHPQRTAEALKRRLRTLGWQPEATAHDPQPETTDAIPQPLHHVDNPSDLHTTIPVAAGRRWTESEEALLRINANSIWRDGMTKRELATRIGSLMTHRSAEAILKRLAAVKWTVSTRVSTAKTPSTGPSTCTPDWERTICPVTSTLAPSTQTCSRPQTPTPATATTPKAPSPTQDPDGQHLTPAPATRTTSATSSPSQDPYNAWRRRMLETILTDMEELPPIANTLRETARALMEEEITTEDGARAVEERTAMMFPDTWRYREPRPKEQRPCEKPRELRRKQYAAIQRLLNTNRKDAADAVLDGSWREAWRDTARGPEGLVDFWSEVIGQSGPPAKTPGTTLDGEHWALLDPISVEELRGALRSLTNKAVGMDKVTATNLLSWHLPSLASLLNLILVTESLPAPMARARITLILKIPTPTSPNDYRPLAISSILTRALHKVIARRMRDQLEFSPSQYAFLQRDGCLEASMVLHVALRNAHDYHRPLAMALLDLSKAFDTVTHEVLGEAAMKAGLPTPLLRYVNSVLRNSESIIGPNTIKAGRGVRQGDPLSPILFILAMERPISEAHPELGVELESNHLHSILYADDMVLLANTPEDLQTKLDGLITSLAGCGMSLNARKSAALTIVKDGRTKAMILTPTHYNTGKEQIAPMGIGGIQKYLGLEFNWKGKVTPKRTLDLERMLGEVKAAPLKPQQRLALLKDFLIPRLIHGLMLGQAHRNTLRRMDLMVRRAIRLWLRFPKDTSLGLFHPPNSRGGLGILSLETHIPMVQKSRLSKLLDGKDSIIQAVTKTTAFQVILRRMAIPIRAGGTMVLSPTEARNAWTDRLISSVDGRELAEADVDGASHLWLKNPDRVFPRLYIRSLQLRGGTLTTQARATRGRISPGDERKCRGGCQAVETQHHILQRCAKTHDVRCARHNRIVRLVCKKLKRKEQSFSVEPIIPRARTHIKPDIVVHRTERLTIMDVTVVAGYRLHESWDTKIKKYGGEESREAMGAWWGSEVEVDHLPIVISSRGLIFGPTGRGLYIHGLGTVYPTGVDKHVRYIHEGDIIQARIMKLLIRRR

SEQ ID NO: 15271 - protein, 1139 aa, Triplophysa tibetana
MTLLSWLHGPGASSWRQKLNQEKDPGPSGLGANLEDDDVSGARTTSDLEWSCQECQRKFPSERSRGMHRHHMHPKEVNDERITLKAGRRKIWTERDEDLLSTTANQIWREGMRKAILYQHLQDLFPHRSTEAIKRRLLLLKWQPQIADPDTRPPDDPTPPLGRTIQRTDPNPTTSTPGSRRQQIDPITVRTTGRKWTEEEEASLRRVADSIWQPTMSKKELTQRSTVAFPHRSADAIGKRLLLIKWTPPTTSPPSDQPPARSPTPPPADIATAKTPRLTTQDTYVNWRRRMLDSTLGNLQEPTPLAVALRKIAKSLMEDTLTTEEGATAMEEQVAEIFPSTWHQKGTRPREQHRPNTKRELRRQQYASTQRLMSTSRKDAATAVLNGSWREANQGTPSAPQGLNDYWARIIGMDGPPAKAPTTIRRETHWPLLDPIGVEELRTSLKTLTSKAVGMDKLTATDLLSWHLPTLAGLLNLILITENLPTPLARSRITMIPKLSTPLDNNDYRPLAISPILTRALHKIIARRMRDQLVFSPTQFAFLQRDGCLEASVVLHAILRNSHDKQRPLALAFLDLSKAFDTITHEALGEAAERAGMPTPLLKYINNALSRSESVIGPHTIRTRRGVKQGDPLSPILFVLAMERPISGARPDIGIEIEDHHLHSILYADDMVLLATSASELQVKLDGLVTTLAGCGMTLNAKKSSAITIEKDGRTKAMLLAPEYYRTGNRQINPLGIGDTQRYLGLDYGWKGRVTPKRTAELERMLEEVKNAPLKPQQRLSILGDFLVPRLIHGLVLGNAHRNTLRKMDIMIRRAVRLWLRLPRDTSLGLFYTPTSKGGLNIISLEVHIPLAQKTRFSKLLSGRENIIQAITGSISFNTMLRRTEAPVKAAGSVVTSTNEARTVWTKRLVSSVDGRELAEVDVDEGSHQWIKNPDRVFPRLFIRGLQLRGGTLSTKSRASRGRASSVEDRNCRGGCQAIETLHHILQKCARTHDVRCARHNRVMRLVCKKLRRTDHNISVEPVVPCLGTYIKPDIVVHRTERLTVLDITVVSGYRLRESWDLKAQKYGGVDCMEAMRAWWGTELKIDHLPVVVSSRGVMYGPTGRGLRRLGFTTRDVMDICLSAIQGSLNTYDMYMRGN

SEQ ID NO: 15272 - protein, 1246 aa, Hypothenemus hampei
MSKPKPPPGRRDSKGGGPSSKTQGGARNSVASPSPASMASLVCEVCDASYRTRSGLKKHKQRCEVTGRRECNYCVRTFESFASLRKHERLGHPTEYAKEGEDKLKVPESEIFLTLAAIEVFRTGPYFVKDMINKTGLTKDQIKHRREKPEYKKYLRLELERLRTSNSLLSKFAIPTCRKRCYTDSAANASSAASSSPHTPAPPQDPKNCPNKAAVCPQTNVQDSTQNPPSTVCDSDSDVDDVFTTPQDIVPNQQSAIKKRRAKGSPDLVFETSAAPPRLGADSAMKKPLKRPRQLDMSVPAPGTSAVRSSLESHSPNHIRIIQDITILPPLSPPRPSIQEIAATPATSATPEVTQNIPPIHQFGPPLIKDYLQQLMLEMTGPIEEVDRLGKHRENNIKLLKASLTAQVDDLDKEMTAWIRHNFSKGRRKNTKSTGREGNTDVNAARVTNNRPKHYRQSNTGSGPKASNYKKAQDLYAKNRAGLAATIMAGKPLSTVEQHSSVEDTESLYVGIFESTTTYDDEPILDQMTAHKNLDVPILPAEVEGALTGWSPSAAGPDGISVNAVKATNVNQLALLFNVIYYRAHIPNLWRATRTTLIPKEGRLTDPSNWRPISIASAILRLLHRLIAARIRSSVTLNLNQRGFTDIDGTFANTLVLQQYLKSRRDARKAHNIFLLDVRKAFDTVSHSSVLRAMRRAGLSSHVIQYVADTFEGASTVIKLGKETTRNIEIRRGVRQGDPLSPLLFNLVIDEFLSRLESEGGGGSLDDQGQVKVKAMAYADDLLLMEDDEINIPLVLATASKFFECRSMELNLSKTSLLAAALVPGEGKLVSRSKPFLRFRDHLLPVVTNINTAKYLGHQLGGTGIMKPSINNLAMWTDNIASAALKPDQKLSLLKSHAIPRVLYGLQTSTITAKTLREADRLVRFAVKHILHLNVHTPDAALYARVRDGGLGILSLRHMIPKILSSRMKKLLLDENDVNLNFVMQHPNQTRTLERLEQMIGPFPPELHRAEQLKSSPFLSGLEAASDDRSSRAWIDQKPTGWSGRDYVKAIQLRTANLPTKGVPSNPPEERRCRAGCSKSESISRVLQACPAGHAERVRRHNEIARKIYNHCKAKYPASVEEPLIRHHSGTLFKPDMAIVRNSSVVIVDVQVSWEGNIPLATSHANNKRKYEEDPRFREAAAATFPGKDLLFAPVTIRARGIWPSCNRPAEEYLELPHGLKASCIHSALKWAASIHGSFSARVWRR

SEQ ID NO: 15273 - protein, 1350 aa, Ancistrocerus nigricornis
MHEGETPRAGRTRRGGPKTPAAPRRSSVGRRAPVGPAVPRRLTRAATAAMRLQGDGGREPSILDVTSAKEESGARTTSQGPTCPRRKSIVTGATITSRRSSLGLTPQMRPSARPGDTPATTYAEVVADRPRPTPNSTQGWAEGGPGVAPRTPPQQIITPGLVTLTTVTTTTSVCGGSITSPGVAQRSPGAPQRDETTPGRVASPVNGTPPARVIVGPEDDFPPLATTSGRREERRAEKKRSTPPTKDTAVEGTRATPERQQEASPRGAEREEGPGPSASPRTPLTGGEEPLNTDWRVVGRGRRVSSSPTRNRMVRGPGGQTPPSISCGRPISSGGETQSFNPFQILNRDDDGGTPMGVETNGVGGSPPSPAAASRRGRGGSRTGRASNDGERGGGRGAPRGRGARDPREPTEDQLALVREAEAAMTGEDLEQVAVKAAEYFRFRAAPRRGDNGEGGGNRARGRGGPAKQTGPETQPGDSSGQERIRRATRLQRLYRTKRRRAVQEVVAGPSQVCGVDRERIRDHFTAVHRAYEGNVELPDVFSRDPPTEDSNGALVAPLGRGEVSARLWRMKNSSPGPDGLSYLDLRGADRGCHILTALFNACLRLEAVPDCWKDSTTVLLHKKGDRDCLGNWRPIAMGPTTARLFAALVAGRLTSWAQMNKRISPSQKGFLPYEGFVEHNFVLQTILDDARKKGKEVVVAWLDLANAFGSVPHAAIYDALCRQKVPNKIVSLVENMYNGATTRVRTVDGLTEPIPILAGVRQGCPLSPIVFDLTFEAVIRPLCDLAVGYSLLGRIINNLVYADDVALVAGTPEGMRIMLQRISEAARAVGLKFNPSKCATLHLRGKGPSRVQPTHFDIQGEQMRPLGEGESYGHLGTPTGFKVNQTPNETINEVIREVRAVDASLLAPWQKLDALSTFILPKLDFCLGGSHVEKGPLTLADKVIKRAAKGWLHLPQRASAELVFLPPREGGGGLLPLADLADALTIAHAFKLLTSRDGVVGALAWDSLRETVARRLARVTINNEDIARYLSGDITGDFERASGDTSSLWSRARNAARRQTKKLKIKWEWCQARGEMSLGCRGVGNWSVRVTPSSRGQVVGRLRAAIASWYRESLLAKPDQGKAFEVFSRCRESNHFMRDGRNTRFADWRFVHRARLGVLPLNGTRRWAEGDKRCRRCGDMETIPHVLNHCGPHAAARQLRHDAIVERLVRANRTPGTISVNQHVEGAHEMWNGLKPDIVIKNDRDKRLVIIDVAVPFENRGEALEEARNRKISKYLPLANDFKERGYEIAVEPFIVGALGSWDHRNERAIGLLGINKSYSSMMKRLMVSDTIRWSRDIYVEHVSGVRQY

SEQ ID NO: 15274 - protein, 1651 aa, Ancistrocerus nigricornis
MEGIRVIVLSFPYPAQLTCELCPAANVGRVFRDGRQRGVFKGERRHEDYVKHLKLCHKGEFEVTFKCRDCDYRGAGAYPRRAISKHYKEIHGSPTAGEGLGVAPPGQSNASSRSVLPANNNNNNNNNNFPPTTATATTTITTTTTTTTTTTSGGGQPPRAEGSAPRVVSVVTLGPKTVRVAGSSRKTTAPATQSILGFKKAQPVRAKTSTPPPITTAAATTTATTTTAATRTRTSRGSSGAPTTAGSNRTSLPRTSPALGARTTPQASQPTPTGRPASSTGGRGAIPGRTPPSANMQEGETPRAGATRRGGPKTPAAPRRSSVGRRAPVGPAVPRRITRAATAAMRLQGDGGREPSILDVTAAKEESGARTTSRGPTCPRRKSIVTGATITPRRSSLGLTPQMRSSARPGDTPATTYAEVVADRPRPTPNSIQGWAEGGPGVAPRTPPQQIITPGLVTLTTATTTTTVCGGSITSPGVAQRSPGAPQGHKRAPGQVASPTNGTPPARLIVGPEQDFPPLATTSGRREERRAEKRSTPPTGDTAVEGTHATPERQQQGGSPRGAEREEGPGPSTSPRTPLTGGEEPLNTDWRVVGRGRRVSSSPTRNRIVRGPGGQTPPSTSCGRPISSGGEAQSSNLNFNSNIFHVLTRDDDGGAPPEREANGAGGRPPSPARASRRGRGGARTGRASNDGERGGGRGAPRGRGARDPREPTEDQLALVREAEAAMTGEDLEQVAVKAAEYFRSRAAPRRGDNGEGGGNRARGRGGPAKQTGPETQPGDSSGQERIRRATRLQRLYRTKRRRAVQEVVAGPSQVCGVDRERIRDHFTAVHRAYEGNVELPDVFSRDPPTEDSNGALVAPLGRGEVSARLWRMKNSSPGPDGLSYLDLRGADRGCHILTALFNACLRLEAVPDCWKDSTTVLLHKKGDRDCLGNWRPIAMGPTTARLFAALVAGRLTSWAQMNERISPSQKGFLPYEGCVEHNFVLQTILDDARKKGKEVVVAWLDLANAFGSVPHAAIYDALRRQKVPNKIVSLVENMYNGATTRVRTVDGLTEPIPILAGVRQGCPLSPIVFDLTFEAVIRPLCDLAVGYSLLGRIINNLVYADDVALVAGTPEGMRIMLQRISEAARAVGLKFNPSKCATLHLRGKGPSRVQPTHFDIQGEQMRPLGEGESYGHLGTPTGFKVNQTPNETINEVIREVRAVDASLLAPWQKLDALSTFILPKLDFCLGGSHVEKGPLTLADKVIKRAAKGWLHLPQRASAELVFLPPREGGGGLLPLADLADALTIAHAFKLLTSRDGVVGALAWDSLRETVARRLARVTINNEDIARYLSGDITGDFERASGDTSSLWSRARNAARRQTKKLKIKWEWCQARGEMSLGCRGVGSRSVRVTPSSRSQVVGRLRAAIASWYRESLLAKPDQGKAFEVFSRCRESNHFMRDGRNTRFADWRFVHRARLGVLPLNGTRRWAEGDKRCRRCGDMETVPHVLNHCGPHAAARQLRHDAIVERLVRANRTPGTISVNQHVEGAHEMWNGLKPDIVIKNDRDKRLVIIDVAVPFENRGEALEEARNRKISKYLPLANDFKERGYEIAVEPFIVGALGSWDHRNERAIGLLGINKSYSSMMKRLMVSDTIRWSRDIYVEHVSGVRQY

SEQ ID NO: 15275 - protein, 1645 aa, Ancistrocerus nigricornis
MEGIRAIVLSFPYPAQLTCELCPAVNIGRVFRDGRQRGVFKGERRHEDYVKHLKLCHKGEFEVLFKCRDCDYRGVGAYPRRDIAKHFKLIHGSPLAGEGLGVAPPGQNNASSRSVLPANNNNNSNNNNFTPTTATATTTITTTTTTTTTTTSGGGQPPRAGGSAPRVVSVVTLGPKAVRVAGSSRKAIAPATQSILGFKKAQPVRAKSSTPPPITTAAATTTATTTTAATRTRTSRGSSGAPTTAGSSRTSLPRTSPALGARRTPQASQPTPTGRPASSTRDRGSIPGRTPPSANMLERETPRAGATRRGGPKTPAAPRRSSVGRRAPIGPAVPRRLTRAATAAMRLQGDGGREPSILDVTSAKEESGARTTSQGPTCPRRKSIVTGATITQRRSSLGLTPQMRSSARPGDTPATTYAEVVADRPRPTPILTQGWAEGGRGVAPPTTPPQQTIIPGLVMLTTATTTTTMCGGSITSPGAAQRSPGAPQSDTRPPGQVASPVNGTPPARIIVGPEKDFPPLASTSGRREERRAEKRLTPPAGDTAVEGTHATPERQQGGSPRGAEREEGPGPSTSPRTPLTGGEEPQNTDWRVVGRGRRVSSSPTRNRIVRGPGGQTPPSISCGRPISSGGETQSYNLFQVLNRDDDGGTPMGVETNGVGGSPPPPAAANRRGRGGARTGRVANGGERGRGRGAPRGRGARDPREPTEDQLALVREAEAAMTGEDLEQVAVKAAEYFRSRAASGRGDSGEGGGNRARGGGGPAKQARPETQPGDSSGQERIRRATRLQRLYRTKRRRAVQEVVAGPSQVCGVDRERIRDHFTAVHRAYEGDVELPDVFSRDPPTEDSNGALVAPLGRGEVSARLWRMKNSSPGPDGLSYPDLRGADRGCHILTSLFNACLRLEAIPDCWKDSTTVLIHKKGDRECLGNWRPIAMGPTTARLFAALVADRLTSWALLNNRISPSQKGFLPYEGCVEHNFVLQSILTDARKKGKEVVVAWLDLANAFGSVPHAAIYGALRRQQVPNKITSLIKNMYNGATTRVRTVDGLTDPIPIRSGVKQGCPLSPMIFNLTFEAVIRRLCDLEVGYSLYGETFNNLVYADDVALIAGTPEGMRIILQMISEAAEAVGLKFNPSKCATLHLRGKGSSRAQPTRFAIQREEMRPLGEGESYGHLGTPTGFKVNQTPTEAISDLIKEVRAVDASLLAPWQKLDALSTFILPKLDFCLGGSHVEKGPLTIADKIIKRAAKGWLHLPQRASAELVFLPPREGGGGLLPLADLADALTIAHAFKLLTSRDGVVSALAWDSLRETVTRRLARPINNNNDIARYLSGDITGDFERASGDTSSLWSRARNAARRQSIKLKIKWEWCVERGELSLGCRGVGNRSVRVTPSSRSQVVGRLRAAIASWYRESLLAKPDQGKAFEVFSRCRESNHFMRDGRNTRFADWRFVHRARLGVLPLNGTRRWAEGDKRCRRCGDMETIPHVLNHCGPHAAARQLRHDAIVERLVRANRTPGTISVNQHVEGVHELWNDLKPDIVIKNDRDKKLIIIDVAVPFENRGEALEEARDRKISKYLPLANDFKERGYEIAVEPFIVGALGSWDRRNERAISLLGINKRYSGMMKRLMVSDTIKWSRDIYVEHVSGVRQY

SEQ ID NO: 15276 - protein, 899 aa, Ancistrocerus nigricornis
MVRGGGNRARGGGGPAKQARPETQPGDSSGQERIRRATRLQRLYRTKRRRAVQEVVAGPSQVCGVNRERVRDHFTAVHRAYEGDVELPDVFSRDPPTEDSNGALVAPFGRGEVSARLWRMKNSSPGPDGLSYPDLRGADRGCHILTSLFNACLRLEAIPDCWKDSTTVLIHKKGDRECLGNWRPIAMGPTTARLFAALVADRLTSWALLNNRKSPSQKGFLPYEGCVEHNFVLQGILTDARKKGKEVVVAWLDLANAFGSVPHAAIYGALRRQQVPNKITSLIKNMYNGATTRVRTVDGLTDPIPIRSGVKQGCPLSPMIFNLTFEAVIRRLCDLEVGYSLYGETFNNLVYADDVALVAGTLEGMRIILQIISEAAEAVGLKFNPSKCATLHLRGKGSSRAQPTRFVIQREEMRPLGEGESYGHLGTPTGFKVNQTPNETINEVIREVRAVDASLLAPWQKLDALSTFILPKLDFCLGGSHVEKGPLTLADKVIKRAAKGWLYLPQRASAELVFLPPREGGGGLLPLADLADALTIAHAFKLLTSRDGVVGALAWDSLRETVARRLARVTINKEDIARYLSGDITGDFERASGDTSSLWSRARNAARRQSKKLKIKWEWCQARGEMSLGCRGVGNRSVRVTPSSRSQVVGRLRAAIASWYRESLLAKPDQGKAFEVFSRCRESNHFMRDGRNTRFADWRFVHRARLGVLPLNGTRRWAEGDRRCRRCGDVQTIPHVLNHCGPHAAARQLRHDAIVERLVRANRTPGTVTVNQTVEGAHELGRNLKPDIVIKNDRDKKLIIIDVAVPFENRGEAMEEARERKITKYLPLANDFKERGYSVAVEPFVVGALGSWDRKNERTIGLLSINRSYAGMMRKMMVSETIKWSRDIYVEHVSGNRQY

SEQ ID NO: 15277 - protein, 780 aa, Ancistrocerus nigricornis
MKNSSPGPDGLSYLDLRGADRGCHVLTSLFNACLRLETVPDCWKDSTTVLLHKKGDRDCLGNWRPIAMGLTTARLFAAVVAGRLTSWAQINNRISPSQKGFLPYEGCVEHNFVLQSILDDAKKKGREVVVAWLDLANAFGSVPHAAIYDALRRQQVPNKIVSLIESMYSGSATRVRTVDGLTDPIPIRSGVKQGCPLSPMIFDLTFEAVIRPLCDLEVGYSLQGVKFNNLVFADDVALVAGTPEGMRVLLQIISEAAEAVGLKFNPSKCATLHLRGKGPSRAQPTRFALQNKVMRPLGEGESYGHLGTPTGFKVNQTPIEAINDVIKDVRAVDASLLAPWQKLDALSTFILPKLDFCLGGSHVEKGPLTIADKVIKRAAKGWLHLPQRASAELVFLPPREGGGGLLPLADLADALTIAHAFKLLTSRDGVVSALAWDSLRETVNRRLARPINNNNDIARYLSGDTTGDFERASGDTSSLWSRARNAARRQSKKLLIKWEWCVERGELSLGCRGVGNRSVRVTPSARNQVVGRLRAAIVSWYRESLLAKPDQGKAFEVFSRCRESNHFMRDGRNTRFADWRFVHRARLGVLPLNGTRRWAEGDRRCRRCGDVETIPHVLNHCGPHAAARQFRHDAIVERLVRANRTPGTISVNQTVEGAHELGRNLKPDIVIKNDRDKKLIIIDVAVPFENRGEAMEEARQRKITKYLPLANDFKERGYSVAVEPFVVGALGSWDRKNERTIGLLSINRSYAGMMRRMMVSETIKWSRDIYVEHVSGNRQY

SEQ ID NO: 15278 - protein, 1646 aa, Ancistrocerus nigricornis
MEGIRAIVLSFPYPAQLTCELCPAANVGRVFRDGRQRGVFKGERRHEDYVKHLKLCHKGEFEVTFKCRDCDYRGVGAYPRRDITKHFRSVHGSPLAGEGLGVAPPGRSNASSRSVLPANNNNNNNNNITPTTATATTTITTTTTTTTTTTSGGGQPPRAGGSAPRVVSVVTLGPKAVRVAGSSRKAIAPATQSTLGFKKAQPVRAKSSTPPPTTITAAATTTATTTTAATRTRTSRGSSGAPTTAGSSRTSLPRTSPALGARTTPQASQPTPTGRPASSAGNRGAIPGRTPPLASMHEGETPRAGGTRRGGPKTPAAPRRSSVGRRAPVGPAVPRRITRAATAAMRLQGDGGREPSVLDVTAAKEESGARTTSQGPTCPRRRSIVTGATITSRRSSLGLTPQMRPSARPGDTPATTYAEVVADRPRPTPILTQGWAEGSRGVAPPTTPPQQTIIPGLVMLTTATTTTTMCGGSITSPGAAQRSPGAPQRDTTTPGQVASPASGTPPARIIVGPADDFPPLATTSGRREERRAEKKRLTPPTRDTAVEGTRATPERQQGGSPRGAEREEGPGPSTSPRTPLTGGEEPLNTDWRVVGRERRVSSSPTRNRIVRGPGGQTPPSMSCGRPISSGGEIQSFNPFQLLNSDDDGGTSIGIETNGVGGSPPSPAAASRRGRGGARTGRASNGGERGGGRGVPSGRHARDPREPTEEQLALVREAEAAVTGEDLEQVAVKAAEYFRSRAAPRRGDNGEGGGNRARGRGGPAKQTGPETQPGDSSGQERIRRATRLQRLYRTKRRRAVQEVVAGPSQVCGVDRERIRDHFTAVHRAYEGNVELPDVFSRDPPTEDSNGALVAPLGRGEVSARLWRMKNSSPGPDGLSYLDLRGADRGCHILTALFNACLRLEAVPDCWKDSTTVLLHKKGDRDCLGNWRPIAMGPTTARLFAALVAGRLTSWAQMNERISPSQKGFLPYEGCVEHNFVLQSILDDAKKKGREVVVAWLDLANAFGSVPHAAIYDALRRQQVPNKIVSLIESMYSGSATRVRTVDGLTDPIPIRSGVKQGCPLSPMIFDLTFEAVIRPLCDLEVGYSLQGVKFNNLVFADDVALVAGTPEGMRVLLQIISEAAEAAGLKFNPSKCATLHLRGKVPSRAQPTRFALQNEVMRPLGEGESYGHLGTPTGFKVNQTPIEAINDVIKDVRAVDASLLAPWQKLDALSTFILPKLDFCLGGSHVEKGPLTIADKVIKRAAKGWLHLPQRASAELVFLPPREGGGGLLPLADLADALTIAHAFKLLTSRDGVVSALAWDSLRETVNRRLARPINNNNDIARYLSGDTTGDFERASGDTSSLWSRARNAARRQSKKLLIKWEWCVERGELSLGCRGVGNRSVRVTPSARNQVVGRLRAAIVSWYRESLLAKPDQGKAFEVFSRCRESNHFMRDGRNTRFADWRFVHRARLGVLPLNGTRRWAEGDRRCRRCGDVETIPHVLSHCGPHAAARQFRHDAIVERLVRANRTPGTISVNQTVEGAHELGRNLKPDIVIKNDRDKKLIIIDVAVPFENRGEAMEEARQRKITKYLPLANDFKERGYSVAVEPFVVGALGSWDRKNERTIGLLSINRSYAGMMRRMMVSETIKWSRDIYVEHVSGNRQY

SEQ ID NO: 15279 - protein, 1356 aa, Ancistrocerus nigricornis
MQEGETPRAGATRRGGPKTPAAPRRSSVGRRAPVGPAVPRRITRAATAAMRLQGDGGREPSILDITSAKEESGARTTSQGPTCPRRKSIVTGATITSRRSSLGLTPQMRPSAKPGDTPATTYAEVVADRPRPTPNSIQGWAEGGPGVAPRTPPLQIITPGLTTLTTATTTTTVCGGPITSPGVAQRSPGAPQGDRRSPGQVASPASGTPPARLIVGPEQDFPPLATTSGRREERRAEKRSTPPTGDTAVEGTHATPERQQQGGSPRGAEREEGPGPSTSPRTPLTGGEEPLNTDWRVVGRGRRVSSSPTRNRIVRGPGGQTPPSTSCGRPISSGGEAQSSNLNFNSNIFHVLTRDDDGGAPPEREANGAGGRPPSPARASRRGRGGARAGRASNDGERGGGRGAPRGRGARDPREPTEDQLALVREAEAAMTGEDLEQVAVKAAEYFRSRAAPRRGDNGEGGGNRARGRGGPAKQTGPETQPGDSSGQERIRRATRLQRLYRTKRRRAVQEVVAGPSQVCGVDRERIRDHFTAVHRAYEGNVELPDVFSRDPPTEDSNGALVAPLGRGEVSARLWRMKNSSPGPDGLSYLDLRGADRGCHILTALFNACLRLEAVPDCWKDSTTVLLHKKGDRDCLGNWRPIAMGPTTARLFAALVAGRLTSWAQMNERISPSQKGFLPYEGCVEHNFVLQTILDDARKKGKEVVVAWLDLANAFGSVPHAAIYDALRRQKVPNKIVSLVENMYNGATTRVRTVDGLTEPIPILAGVRQGCPLSPIVFDLTFEAVIRPLCDLAVGYSLLGRIINNLVYADDVALVAGTPEGMRIMLQRISEAARAVGLKFNPSKCATLHLRGKGPSRVQPTHFDIQGEQMRPLGEGESYGHLGTPTGFKVNQTPNETINEVIREVRAVDASLLAPWQKLDALSTFILPKLDFCLGGSHVEKGPLTLADKVIKRAAKGWLHLPQRASAELVFLPPREGGGGLLPLADLADALTIAHAFKLLTSRDGVVGALAWDSLRETVARRLARVTINNEDIARYLSGDITGDFERASGDTSSLWSRARNAARRQSKKLKIKWEWCQARGEMSLGCRGVGNRSVRVTPSSRSQVVGRLRAAIASWYRESLLAKPDQGKAFEVFSRCRGSNYFMRDGRNTRFADWRFVHRARLGVLPLNGTRRWAEGDRRCRRCGDVETIPHVLNHCGPHAAARQLRHDAIVERLVRANRTPGTISVNQHVEGVHELWNNLKPDIVIKNDRDKKLIIIDVAVPFENRGEALEEARDRKISKYLPLANDFKERGYEIAVEPFIVGALGSWDRRNERAISLLGINKSYSSMMKRLMVSDTIRWSRDIYVEHVSGVRQY

SEQ ID NO: 15280 - protein, 1651 aa, Ancistrocerus nigricornis
MEGIRVIVLSFPYPAQLTCELCPAANVGRVFRDGRQRGVFKGERRHEDYVKHLKLCHKGEFEVTFKCRDCDYRGAGAYPRRAISKHYKEVHGSPTAGEGLGVAPPGQSNASSRSVLPANNNNNNNNNNFPPTTATATTTITTTTTTTTTTTSGGGQPPRAGGSAPRVVSVVTLGPKAVRVAGSSRKAIAPATQSTLGFKKAQPVRAKSSTPPPTATTTAAITTTTTATTTIRTRTSRGSSGAPTTAGSSRTSLPRTSPALGARTTPQASQPTPTGRPASSAGGRGAIPGRTPPSANMQEGETPRVGATRRGGPKTPAAPRRSSVGRRAPVGPAVPRRITRAATAAMRLQGDGGREPSILDVTSAKEESGARTTSQGPTCPRRRSIVTGARIASRRSSLGLTPPMRPSARPGDTPATTYAEVVADRPRPTPNSIQGWAEGGQGVAPRTPPQQIITPGLVTLTTATTTTTVCGGSITSPGVAQRSPGAPQGDRRSPGQVASPANGTPPARSIIGPEKDFPPLATTSGRREERRAEKRTTSSTGDAVVEGTPTIHERQTGGSPRGAIHEEGPGPSSPRTPLTGGEEPLNTDWRVVGRGRRVSSSPTRNRIVRDPGGQTPPSTSCGRPISSGGEAQGFNLNFNNFNTFHALTRDDDGGAPPERETNGAGGRPPSPARPSRRGRGGARTGRAANGGERGGGRGAPRGRGARDPREPTEDQLALVREAEAAMTGEDLEQVAVKAAEYFRSRAAPRRGDNGEGGGNRARGRGGPAKQTGPETQPGDSSGQERIRRATRLQRLYRTKRRRAVQEVVAGPSQVCGVDRERIRDHFTAVHRAYEGNVELPDVFSRDPPTEDSNGALVAPLGRGEVSARLWRMKNSSPGPDGLSYLDLRGADRGCHILTALFNACLRLEAVPDCWKDSTTVLLHKKGDRDCLGNWRPIAMGPTTARLFAALVAGRLTSWAQMNERISPSQKGFLPYEGCVEHNFVLQTILDDARKKGKEVVVAWLDLANAFGSVPHAAIYDALRRQKVPNKIVSLVANMYSGATTRVRTVDGLTEPIPILAGVRQGCPLSPIVFDLTFEAVIRPLCDLAVGYSLYGKILNNLVYADDVALVAGTPEGMRIMLQRLSEAARAVGLKFNPSKCATLHLRGKGPSRVQPTRFDIQGEQMRPLGEGESYGHLGTPTGFKINQTPTEAINELVREVRAVDASLLAPWQKLDALSTFILPKLDFCLGGSHVEKGPLTLADKVIKRAAKGWLHLPQRASAELVFLPPREGGGGLLPLADLADALTIAHAFKLLTSRDGVVGALAWDSLRETVARRLARVTINNEDIARYLSGDITGDFERASGDTSSLWSRARNAARRQSKKLKIKWEWCQARGELSLGCRGVGNRSVRVTPSSRSQVVGRLRAAIASWYRESLLAKPDQGKAFEVFSRCRESNHFMRDGRNTRFADWRFVHRARLGVLPLNGTRRWAEGDKRCRRCGDMETIPYVLNHCGPHAAARQLRHDAIVERLVRANRTPGTISVNQHVEGAHEMWNGLKPDIVIKNDRDKRLVIIDVAVPFENRGEALEEARNRKISKYLPLANDFKERGYEIAVEPFIVGALGSWDHRNERAIGLLGINKSYSSMMKRLMVSDTIRWSRDIYVEHVSGVRQY

SEQ ID NO: 15281 - protein, 1644 aa, Ancistrocerus nigricornis
MEGIRVIVLSFPYPAQLTCELCPAANVGRVFRDGRQRGVFKGERRHEDYVKHLKLCHKGEFEVTFKCRDCDYRGAGAYPRRAISKHYKEIHGSPTAGEGLGVAPPGQNNASSRSVLPANNNNNNNNNITPTTATATTTITTTTTTTTTTTSGGGQPPRAGGSAPRVVSVVTLGPKAVRVAGSSRKAIAPATQSTLGFKKAQPVRAKSSTPPPTTITAAATTTATTTTAATRTRTSRGSSGAPTTAGSSRTSLPRTSPALGARTTPQASQPTPTGRPASSAGNRGAIPGRTPPLASMHEGETPRAGGTRRGGPKTPAAPRRSSVGRRAPVGPAVPRRITRAATAAMRLQGDGGREPSVLDVTAAKEESGARTTSQGPTCPRRRSIVTGATITSRRSSLGLTPQMRPSARPGDTPATTYAEVVADRPRPTPILTQGWAEGSRGVAPPTTPPQQTIIPGLVMLTTATTTTTMCGGSITSPGAAQRSPGAPQRDTTTPGQVASPASGTPPARIIIGPEQDFPPLATTSGRREERRAEKTSTPPTGDTAVEGTHATPERQQGGSPRGATPEEGPGPSSPRTPLTGGEEPPNTDWRVVGRERRVSSSPTRNRIVRGPGGQTPPSISCGRPISSGGEIQSFNPFQLLNSDDDGGTSIGIETNGVGGSPPSPAAASRRGRGGARTGRASNGGERGGGRGAPRGRHARDPREPTEEQLALVREAEAAVTGEDLEQVAVKAAEYFRSRAAPRRGDNGEGGGNRARGRGGPAKQTGPVTQPGDSSGQERIRRATRLQRLYRTKRRRAVQEVVAGPSQVCGVDRERIRDHFTAVHRAYEGNVELPDVFPREPPTEDSNGALVAPLGRGEVSARLWKMKNSSPGPDGLSYLDLRGADRGCHVLTSLFNACLRLETVPDCWKDSTTVLLHKKGDRDCLGNWRPIAMGLTTARLFAAVVAGRLTSWAQINNRISPSQKGFLPYEGCVEHNFVLQSILDDAKKKGREVVVAWLDLANAFGSVPHAAIYDALRRQQVPNKIVSLIESMYSGSATRVRTVDGLTDPIPIRSGVKQGCPLSPMIFDLTFEAVIRPLCDLEVGYSLQGVKFNNLVFADDVALVAGTPEGMRVLLQIISEAAEAAGLKFNPSKCATLHLRGKGPSRAQPTRFALQNEVMRPLGEGESYGHLGTPTGFKVNQTPIEAINDVIKDVRAVDASLLAPWQKLDALSTFILPKLDFCLGGSHVEKGPLAIADKVIKRAAKGWLHLPQRASAELVFLPPREGGGGLLPLADLADALTIAHAFKLLTSRDGVVSALAWDSLRETVNRRLARPINNNNDIARYLSGDTTGDFERASGDTSSLWSRARNAARRQSKKLLIKWEWCVERGELSLGCRGVGNRSVRVTPSARNQVVGRLRAAIVSWYRESLLAKPDQGKAFEVFSRCRESNHFMRDGRNTRFADWRFVHRARLGVLPLNGTRRWAEGDRRCRRCGDVETIPHVLNHCGPHAAARQFRHDAIVERLVRANRTPGTISVNQTVEGAHELGRNLKPDIVIKNDRDKKLIIIDVAVPFENRGEAMEEARQRKITKYLPLANDFKERGYSVAVEPFVVGALGSWDRKNERTIGLLSINRSYAGMMRRMMVSETIKWSRDIYVEHVSGNRQY

SEQ ID NO: 15282 - protein, 932 aa, Ancistrocerus nigricornis
MRAAEAATSGEDLEQVAVKAAEYFRSRAAPGRGGNGEGGDGRARGRGGSAKQTRPGTLPGAPSGQERIRRATRLQRLYRTKRRRAVQEVIAGPSQVCGVNRERVRDHFTAVHRAHEGEVELPDVFPREPPTDDSNGALVAPFGRGDVSARLWKMKNSSPGPDGLSYPDLRAADPGCHILTSIFNACLRLETVPACWKDSNTVLLYKKGDRECLDNWRPIAMGDTTARLFAALVAGRLTAWAQLNKRISPSQKGFLPYEGCVEHNFVLQEILTDAKKKGKEVVVAWLDLANAFGSVPHAAIHEALRRHGVPGKISAIIKSMYQGAATRVRTTDGLTDPIFMRSGVRQGCPLSPIVFDLTFEAVISPLCDLEVGYSLYGRKFNNLVYADDVATVAGTPEGMRVLLQNIGEAARAVGLKFNPNKCATLHLRGKGTNRVQPTRFAIQGEEMRPLGEGEPYEHLGTPTGYKVNQTPKEAIIELVADVRAVDSSLLAPWQKLDALATFLLPRLDFCLGGSHVEKGPLTLADRVIKRAAKGWLHLPQRASAELVFLPPREGGGGLLPLADLADALTISHTFKLLTSRDGVVSGLAWDSLRETVARRLARPIDNSDIARYLSGDLTGDFERASGDTSSVWSRARNAARRQREKLKIKWEWCEERQEISVGCRGFGNRSVRVTPSARVQVVSRMRAAIASWYRERLLAKPDQGKAFEVFSRCRESNHFMRDGRNTRFADWRFVHRARLGVLPLNGTRRWAEGDRRCRRCGDVETIPHVLNHCGPHAAARQFRHDAIVERLVRANRTPGTVSVNQRVEGAHELGNNLKPDIVIKNDRDKKLIIIDVAVPFENRGEALEEARNRKISKYLPLANDFKERGYEIAVEPFIVGALGSWDRRNERAISLLGINKRYSSMMKRLMVSDTIRWSRDIYVEHVSGVRQY

SEQ ID NO: 15283 - protein, 779 aa, Ancistrocerus nigricornis
MKNSSPGPDGLSYPDLRAADPGCHILTSIFNACLRLETVPACWKDSNTVLLYKKGDRECLDNWRPIAMGDTTARLFAALVAGRLTAWAQLNKRISPSQKGFLPYEGCVEHNFVLQEILTDAKKKGKEVVVAWLDLANAFGSVPHAAIHEALRRHGVPGKISAIIKSMYQGAATRVRTTDGLTDPIFMRSGVRQGCPLSPIVFDLTFEAVISPLCDLEVGYSLYGRKFNNLVYADDVATVAGTPEGMRVLLQNIGEAARAVGLKFNPNKCATLHLRGKGTNRVQPTRFAIQGEEMRPLGEGEPYEHLGTPTGYKVNQTPKEAIIELVADVRAVDSSLLAPWQKLDALATFLLPRLDFCLGGSHVEKGPLTLADRVIKRAAKGWLHLPQRASAELVFLPPREGGGGLLPLADLADALTISHAFKLLTSRDGVVSGLAWDSLRETVARRLARPIDNSDIARYLSGDLTGDFERASGDTSSVWSRARNAARRQREKLKIKWEWCEERQEISVGCRGFGNRSVRVTPSARVQVVSRMRAAIASWYRERLLAKPDQGKAFEVFSRCRESNHFMRDGRNTRFADWRFVHRARLGVLPLNGTRRWAEGDRRCRRCGDVETIPHVLNHCGPHAAARQFRHDAIVERLVRANRTPGTVSVNQRVEGAHELGNNLKPDIVIKNDRDKKLIIIDVAVPFENRGEALEEARNRKISKYLPLANDFKERGYEIAVEPFIVGALGSWDRRNERAISLLGINKRYSSMMKRLMVSDTIRWSRDIYVEHVSGVRQY

SEQ ID NO: 15284 - protein, 779 aa, Ancistrocerus nigricornis
MKNSSPGPDGLSYPDLRAADPGCHILTSIFNACLRLETVPVCWKDSNTVLLYKKGDRECLDNWRPIAMGDTTARLFAALVAGRLTAWAQLNKRISPSQKGFLPYEGCVEHNFVLQEILTDAKKKGKEVVVAWLDLANAFGSAPHAAIHEALRRHGVPGKITSIIKSMYLGAATRVRTTDGLTDPIFMRSGVRQGCPLSPIVFDLTFEAVISPLCDLEVGYSLHGRKFNNLVYADDVATVAGTPEGMRVLLQNIGEAARAVGLKFNPNKCATLHLRGKGTHRVQPTRFAIQGEEMRPLGEGEPYEHLGTPTGYKVNQTPKEAIIELVADVRAVDSSLLAPWQKLDALATFLLPRLDFCLGGSHVEKGPLTLADRVIKRAAKGWLHLPQRASAELVFLPPREGGGGLLPLADLADALTISHAFKLLTSRDGVVSGLAWDSLRETVARRLARPIDNSDIARYLSGDLTGDFERASGDTSSVWSRARNAARRQREKLKIKWEWCEERQEISVGCRGFGNRSVRVTPSARVQVVSRMRAAIASWYRERLLAKPDQGKAFEVFSRCRESNHFMRDGRNTRFADWRFVHRARLGVLPLNRTRRWAEGDRRCRRCGDVETIPHVLNHCGPHAAARQFRHDAIVERLVRANRTPGTVSVNQRVEGAHELGNNLKPDIVIKNDRDKKLIIIDVAVPFENRGEALEEARNRKISKYLPLANDFKERGYEIAVEPFIVGALGSWDRRNERAISLLGINKRYSSMMKRLMVSDTIRWSRDIYVEHVSGVRQY

SEQ ID NO: 15285 - protein, 1650 aa, Ancistrocerus nigricornis
MEGIRAIVLSFPYPAQLTCELCPAANVGRVFRDGRQRGVFKGERRHEDYVKHLKLCHKGEFEVTFKCRDCDYRGAGAYPRRAISKHYKEVHGSPTAGEGLGVAPPGQRNLRSVLPANNSNNNNNNNNNIPITTAATTTITTTTTTTTTTTTASTSGGVQIPRAEGPAPRVVSVVTLGPKTVRVAGSSKTVAPTAQSTLGFKKAQPVRAKTSTPPPITIAAAATTTATTTTAAAKTRTSRGSSGAPTTAGSSRTSLPRTSPALGARKTPQASQPPSTGRPASSAGSRGAIPGRTPPSANMHEGETPRAGRTRRGGPKTPAAPRRSSVGRRAPIGPAVPRRLTRAATAAMRLQGDGGREPSILDVTSAKEESGARTTSQGPTCPRRKSIVTGATITQRRSSLGLTPQMRSSARPGDTPATTYAEVVADRPRPTPILTQGWAEGGRGVAPPTTPPQQTIIPGLVMLTTATTTTTMCGGSITSPGAAQRSPGAPQSDTRPPGQVASPVNGTPPARIIVGPEKDFPPLASTSGRREERRAEKRLTPPAGDAAVEGTHATPERQQGGSPRGAEREEGPGPSTSPRTPLTGGEEPLNTDWRVVGRGRRVSSSPTRNRIVRSPGGQTPPSTSCGRSINAGGETNINISNNSFQILNIDDDGGSSSGTVPTGPGGGAPLHGAASQRVRGGARAGRAANEGERGNGRGSPRGSRARATREPTEAQLALVRAAEAATSGEDLEQVAVKAAEYFRSRAAPGRGGNGEGGDGRARGRGGSAKQTRPGTLPGAPSGQERIRRATRLQRLYRTKRRRAVQEVIAGPSQVCGVNRERVRDHFTAVHRAHEGEVELPDVFPREPPTDDSNGALVAPFGRGDVSARLWKMKNSSPGPDGLSYPDLRAADPGCHILTSIFNACLRLETVPACWKDSNTVLLYKKGDRECLDNWRPIAMGDTTARLFAALVAGRLTAWAQINKRISPSQKGFLPYEGCVEHNFVLQEILTDAKKKGNEVVVAWLDLANAFGSVPHAVIHEALRRHGVPGKITAIIKSMYLGAATRVRTTDGLTDPIFMRSGVRQGCPLSPIVFDLTFEAVISPLCDLEVGYSLHGRKFNNLVYADDVATVAGTPEGMRVLLQNIGEAARAVGLKFNPSKCATLHLRGKGTNRVQPTRFAIQGEEMRPLGEGEPYEHLGTPTGYKVNQTPKEAIIELVADVRAVDSSLLAPWQKLDALATFLLPRLDFCLGGSHVEKGPLSLADRVIKRAAKGWLHLPQRASAELVFLPPREGGGGLLPLADLADALTISHAFKLLTSRDGVVSGLAWDSLRETVTRRLARPINNSDIARYLSGDLTGDFERASGDTSSVWSRARNAARRQREKLKIKWEWCEERQEISVGCRGIGNRSVRVTPSARVQVVSRMRAAIASWYRERLLAKPDQGKAFEVFSRCRESNHFMRDGRNTRFADWRFVHRARLGVLPLNGTRRWAEGDRRCRRCGDVETIPHVLNHCGPHAAARQFRHDAIVERLVRANRTPGTVSVNQRVEGAHELGNNLKPDIVIRNDRDKKLTIIDVAVPFENRGEALDEARNRKISKYLPLANDFKERGYEIAVEPFIVGALGSWDRRNERAISLLGINKRYSSMMKRLMVSDTIRWSRDIYVEHVSGVRQY

SEQ ID NO: 15286 - protein, 1648 aa, Ancistrocerus nigricornis
MEGIRVIVLSFPYPAQLTCELCPAANVGRVFRDGRQRGVFKGERRHEDYVKHLKLCHKGEFEVTFKCRDCDYRGAGAYPRRAISKHYKEIHGSPTAGEGLGVAPPGQSNASSRSVLPANNNNSNNNNNTIPTTATATTTITTTTTTTTTTTSGGGQPPRAGGSAPRVVSVVTLGPKAVRVAGSNRKAIAPATQSTLGFKKAQPVRAKSSTPPPTTITAAATTTATTTTAATRTRTSRGSSGAPTTAGSSRTSLPRTSPALGARTTPQASQPTPTGRPASSAGNRGAIPGRTPPSANMQEGETPRAGATRRGGPKTPAAPRRSSVGRRAPVGPAVPRRITRAATAAMRLQGDGGREPSILDVTAAKEESGARTTSQGPTCPRRKSIVTGATITRRRSSLGLTPQMRSSARPGGTPATTYAEVVADRPRPTPNYIQGWAEGGQGVAPRTPPQQIITPGLVTLTTVTTTTTVCGGSITSPGVAQRSPGAPQRDGTTPGQVASPASGTPPTRNIVGPVDDFPPLPTTSGRREERRAEKKRSTPPTRDTAVEGTRATPERQQGGSPRGAEREEGPGPSTLPRTPLTGGEEPLNTDWRVVGRGRRVSSSPRQDIVSRSPGGQTPPSTSCGRPINLGGEISINSNNNFQFLNIDDDGGSSSGTIPTGAGGGAPLHGAASRRVRGGARAGRAANEGERGNGRGSPRGSRARATREPTEAQLALVRAAEAATTGEDLEQVAVKAAEYFRSRAAPGRRGNGEGGDGRARGRGGSAKQTRPGTLPGAPSGQERIRRATRLQRLYRTKRRRAVQEVIAGPSQVCGVNRERVRDHFTAVHRAHEGEVELPDVFPREPPTDDSNGALVAPFGRGDVSARLWKMKNSSPGPDGLSYPDLRAADPGCHILTSIFNACLRLETVPACWKDSNTVLLYKKGDRECLDNWRPIAMGDTTARLFAALVAGRLTAWAQLNKRISPSQKGFLPYEGCVEHNFVLQEILTDAKKKGRKEVVVAWLDLANAFGSVPHAAIHEALRRHGVPGKISAIIKSMYQGAATRVRTTDGLTDPIFMRSGVRQGCPLSPIVFDLTFEAVISPLCDLEVGYSLYGRKFNNLVYADDVATVAGTPEGMRVLLQNIGEAARAVGLKFNPNKCATLHLRGKGTNRVQPTRFAIQGEEMRPLGEGEPYEHLGTPTGYKVNQTPKEAIIELVADVRAVDSSLLAPWQKLDALATFLLPRLDFCLGGSHVEKGPLTLADRVIKRAAKGWLHLPQRASAELVFLPPREGGGGLLPLADLADALTISHAFKLLTSRDGVVSGLAWDSLRETVARRLARPIDNSDIARYLSGDLTGDFERASGDTSSVWSRARNAARRQREKLKIKWEWCEERQEISVGCRGFGNRSVRVTPSARVQVVSRMRAAIASWYREGLLAKPDQGKAFEVFSRCRESNHFMRDGRNTRFADWRFVHRARLGVLPLNGTRRWAEGDRRCRRCGDVETIPHVLNHCGPHAAARQFRHDAIVERLVRANRTPGTVSVNQRVEGAHELGNNLKPDIVIKNDRDKKLIIIDVAVPFENRGEALEEARNRKISKYLPLANDFKERGYEIAVEPFIVGALGSWDRRNERAISLLGINKRYSSMMKRLMVSDTIRWSRDIYVEHVSGVRQY

SEQ ID NO: 15287 - protein, 1650 aa, Ancistrocerus nigricornis
MEGIRAIVLSFPYPAQLTCELCPAANVGRVFRDGRQRGVFKGERRHEDYVKHLKLCHKGEFEVTFKCRDCDYRGAGAYPRRAISKHYKEVHGSPTAGEGLGVAPPGQRNLRSVLPANNSNNNNNNNNNIPITTAATTTITTTTTTTTTTTTASTSGGVQIPRAEGPAPRVVSVVTLGPKTVRVAGSSKTVAPTAQSTLGFKKAQPVRAKTSTPPPITIAAAATTTATTTTAAAKTRTSRGSSGAPTTAGSSRTSLPRTSPALGARKTPQASQPPSTGRPASSAGSRGAIPGRTPPSANMHEGETPRAGRTRRGGPKTPAAPRRSSVGRRAPIGPAVPRRLTRAATAAMRLQGDGGREPSILDVTSAKEESGARTTSQGPTCPRRKSIVTGATITQRRSSLGLTPQMRSSARPGDTPATTYAEVVADRPRPTPILTQGWAEGGRGVAPPTTPPQQTIIPGLVMLTTATTTTTMCGGSITSPGAAQRSPGAPQSDTRPPGQVASPVNGTPPARIIVGPEKDFPPLASTSGRREERRAEKRLTPPAGDAAVEGTHATPERQQGGSPRGAEREEGPGPSTSPRTPLTGGEEPLNTDWRVVGRGRRVSSSPTRNRIVRSPGGQTPPSTSCGRSINAGGETNINISNNSFQILNIDDDGGSSSGTVPTGPGGGAPLHGAASQRVRGGARAGRAANEGERGNGRGSPRGSRARATREPTEAQLALVRAAEAATSGEDLEQVAVKAAEYFRSRAAPGRGGNGEGGDGRARGRGGSAKQTRPGTLPGAPSGQERIRRATRLQRLYRTKRRRAVQEVIAGPSQVCGVNRERVRDHFTAVHRAHEGEVELPDVFPREPPTDDSNGALVAPFGRGDVSARLWKMKNSSPGPDGLSYPDLRAADPGCHILTSIFNACLRLETVPACWKDSNTVLLYKKGDRECLDNWRPIAMGDTTARLFAALVAGRLTAWAQINKRISPSQKGFLPYEGCVEHNFVLQEILTDAKKKGNEVVVAWLDLANAFGSVPHAVIHEALRRHGVPGKITAIIKSMYLGAATRVRTTDGLTDPIFMRSGVRQGCPLSPIVFDLTFEAVISPLCDLEVGYSLHGRKFNNLVYADDVATVAGTPEGMRVLLQNIGEAARAVGLKFNPSKCATLHLRGKGTNRVQPTRFAIQGEEMRPLGEGEPYEHLGTPTGYKVNQTPKEAIIELVADVRAVDSSLLAPWQKLDALATFLLPRLDFCLGGSHVEKGPLSLADRVIKRAAKGWLHLPQRASAELVFLPPREGGGGLLPLADLADALTISHAFKLLTSRDGVVSGLAWDSLGETVTRRLARPINNSDIARYLSGDLTGDFERASGDTSSVWSRARNAARRQREKLKIKWEWCEERQEISVGCRGIGNRSVRVTPSARVQVVSRMRAAIASWYRERLLAKPDQGKAFEVFSRCRESNHFMRDGRNTRFADWRFVHRARLGVLPLNGTRRWAEGDRRCRRCGDVETIPHVLNHCGPHAAARQFRHDAIVERLVRANRTPGTVSVNQRVEGAHELGNNLKPDIVIRNDRDKKLTIIDVAVPFENRGEALDEARNRKISKYLPLANDFKERGYEIAVEPFIVGALGSWDRRNERAISLLGINKRYSSMMKRLMVSDTIRWSRDIYVEHVSGVRQY

SEQ ID NO: 15288 - protein, 847 aa, Ancistrocerus nigricornis
MSGEDLEQVAVKAAEYFRSRAAPGRGGNGEGGDGRARGRGGSAKQTRPGTLPGAPSGQERIRRATRLQRLYRTKRRRAVQEVIAGPSQVCGVNRERVRDHFTAVHRAHEGEVELPDVFPREPPTDDSNGALVAPFGRGDVSARLWKMKNSSPGPDGLSYPDLRAADPGCHILTSIFNACLRLETVPACWKDSNTVLLYKKGDRECLDNWRPIAMGDTTARLFAALVAGRLTAWAQENKRISPSQKGFLPYEGCVEHNFVLQEILTDAKKKGNEVVVAWLDLANAFGSVPHAVIHEALRRHGVPGKITAIIKSMYLGAATRVRTTDGLTDPIFMRSGVRQGCPLSPIVFDLTFEAVISPLCDLEVGYSLHGRKFNNLVYADDVATVAGTPEGMRVLLQNIGEAARAVGLKFNPSKCATLHLRGKGIHRVQPTRFAIQGEEMRPLGEGEPYEHLGTPTGYKVNQTPKEAIIELVADVRAVDSSLLAPWQKLDALATFLLPRLDFCLGGSHVEKGPLSLADRVIKKAAKGWLHLPQRASAELVFLPPREGGGGLLPLADLADALTISHAFKLLTSRDGVVSGLAWDSLRETVTRRLARPINNSDIARYLSGDLTGDFERASGDTSSVWSRARNAARRQREKLKIKWEWCEERQEISVGCRGIGNRSVRVTPSARVQVVSRMRAAIASWYRERLLAKPDQGKAFEVFSRCRESNHFMRDGRNTRFADWRFVHRARLGVLPLNGTRRWAEGDRRCRRCGDVETIPHVLNHCGPHAAARQFRHDAIVERLVRANRTPGTVSVNQRVEGAHELGNNLKPDIVIRNDRDKKKKINNNRRGSTIRKPGGGFRRSEK

SEQ ID NO: 15289 - protein, 987 aa, Ancistrocerus nigricornis
MGIEASGAGGGPPSPAAASRRGRGGARTGRASGGGERGGGRGVPRGRRARDPREPTEDQLALVREAEAAVTGEDLEQVAVKAAEYFRSRAPPRRGDNGEGGGNRARGRGGPAKQTGPETQPGDSSGQERIRRATRLQRLYRTKRRRAVQEVVAGPSQVCGVDRERIRDHFTAVHRAYEGRVELPDVFPREPPTEDSNGALVAPLGRGEVSARLWKMKNSSPGPDGLSYLDLRGADRGCHVLTSLFNACLRLETVPDCWKDSTTVLLHKKGDRDCLGNWRPIAMGPTTARLFAALVAGRLTSWAQLNNRISPSQKGFLPYEGCVEHSFVLQSILDDAKKKGREVVVAWLDLANAFGSVPHAAIYDALRRQQVPDKIVSLIMSMYNGAATRVRTVDGLSGVRQGCPLSPMVFNLTFEAVIRPLCDLEVGYSLQGQIFNNLVFADDVALVAGTSEEMRMMLQGLSEAARAVGLKFNPNKCATLHLRGKGSSRVQPTHFTIQGEQMRPLGEGESYGHLGTPTGYKINQTPTEAISELVREVRAVDASLLAPWQKLDAISTFILPKLDFCLGGSHVEKGPLTIADKVIKRAAKGWLHLPQRASAELVFLPPREGGGGLLPLADLADALTIAHAFKLLTSRDGAVGALAWGALRETVTRRLARPIDNSDIARYLSGDLTGDFERASGDTSSVWSRARYAARRQREKLKIKWEWCEERQEISVGCRGFGNRSVRVTPSARVQVVSRMRAAIASWYRERLLAKPDQGKAFEVFSRCRESNHFMRDGRNTRFADWRFVHRARLGVLPLNGTRRWTEGDRRCRRCGDVETIPHVLNHCGPHAAARQFRHDAIVERLVRANRTPGTVSVNQRVEGAHELGNNLKPDIVIKNDRDKKLIIIDVAVPFENRGEALEEARNRKISKYLPLANDFKERGYEIAVEPFIVGALGSWDRRNERAISLLGINKRYSSMMKRLMVSDTIRWSRDIYVEHVSGVRQY

SEQ ID NO: 15290 - protein, 1646 aa, Ancistrocerus nigricornis
MEGIRVIVLSFPYPAQLTCELCPAANVGRVFRDGRQRGVFKGERRHEDYVKHLKLCHKGEFEVLFKCRDCDYRGVGAYPRRDITKHFKSVHGSPLAGEGLGVAPPGQSNASSRSVLPANNNNNNNNNNITPTTATATTTITTTTTTTTTTTSGGGQPPRAGGSAPRVVSVVTLGPKAVRVAGSSRKAIAPATQSTLGFKKAQPVRAKSSTPPPITTAAATTTATTTTAATRTRTSRGSSGAPTTAGSSRTSLPRTSPALGARTTPQASQPTPTGRPASSAGSRGAIPGRTPPSANMQEGETPRAGATRRGGPKTPAAPRRSSVGRRAPVGPAVPRRITRAATAAMRLQGDGGREPSVLDVTSAKEESGARTTSQGPTCPRRKSIVTGATITQRRSSLGLTPQMRSSARPGGTPATTYAEVVADRPRPTPNYIQGWAEGGQGVAPRTPPQQIITPGLVTLTTVTTTTTVCGGSITSPGVAQRSPGAPQRDGTTPGQVASPASGTPPTRNIVGPVDDFPPLPTTSGRREERRAEKKRSTPPTRDTAVEGTRATPERQQGGSPRGAEREEGPGPSTSPRTPLTGGEEPLNTDWRVVGRGRRVSSSPRQDIVSRSPGGQTPPSTSCGRPINLGGEISINSNNNFQFLNIDDDGGSSSGTIPTGAGGGAPLHGAASRRVRGGARAGRAANEGERGNGRGSPRGSRARATREPTEAQLALVRAAEAATTGEDLEQVAVKAAEYFRSRAAPGRRGNGEGGDGRARGRGGSAKQTRPGTLPGAPSGQERIRRATRLQRLYRTKRRRAVQEVIAGPSQVCGVNRERVRDHFTAVHRAHEGEVELPDVFPREPPTDDSNGALVAPFGRGDVSARLWKMKNSSPGPDGLSYPDLRAADPGCHILTSIFNACLRLETVPACWKDSNTVLLYKKGDRECLDNWRPIAMGDTTARLFAALVAGRLTAWAQLNKRISPSQKGFLPYEGCVEHNFVLQEILTDAKKKGKEVVVAWLDLANAFGSVPHAAIHEALRRHGVPGKISAIIKSMYQGAATRVRTTDGLTDPIFMRSGVRQGCPLSPIVFDLTFEAVISPLCDLEVGYSLYGRKFNNLVYADDVATVAGTPEGMRVLLQNIGEAARAVGLKFNPNKCATLHLRGKGTNRVQPTRFAIQGEEMRPLGEGEPYEHLGTPTGYKVNQTPKEAIIELVADVRAVDSSLLAPWQKLDALATFLLPRLDFCLGGSHVEKGPLTLADRVIKRAAKGWLHLPQRASAELVFLPPREGGGGLLPLADLADALTISHAFKLLTSRDGVVSGLAWDSLRETVARRLARPIDNSDIARYLSGDLTGDFERASGDTSSVWSRARNAARRQREKLKIKWEWCEERQEISVGCRGFGNRSVRVTPSARVQVVSRMRAAIASWYRERLLAKPDQGKAFEVFSRCRESNHFMRDGRNTRFADWRFVHRARLGVLPLNGTRRWAEGDRRCRRCGDVETIPHVLNHCGPHAAARQFRHDAIVERLVRANRTPGTVSVNQRVEGAHELGNNLKPDIVIKNDRDKKLIIIDVAVPFENRGEALEEARNRKISKYLPLANDSKERGYEIAVEPFIVGALGSWDRRNERAISLLGINKRYSSMMKRLMVSDTIRWSRDIYVEHVSGVRQY

SEQ ID NO: 15291 - protein, 1352 aa, Ancistrocerus nigricornis
MLERETPRAGATRRGGPKTPAAPRRSSVGRRAPVGPAVPRRITRAATAAMRLQGDGGREPSILDVTSAKEESGARTTSQGPTCPRRKSIVTGATITQRRSSLGLTPQMRPSARPGDTPATTYAEVVADRPRPTPNSIQGWAEGSRGVAPPTTPPQQTIIPGLVMLTTATTTTTMCGGSITSPGAAQRSPGAPQRDTRPPGQVASPASGTPATRNIVGPVDDFPPLATTSGRREERRAEKKRLTPPTRDTAVEGTRATPERQQGGSPRGAEREEGPGPSTSPRTPLTGGEEPLNTDWRVVGRGRRVSSSPRQEIVTRSPGGQTPPSTSCGRPINLGGEIFINSNNNFQFLNIDDDGGSSSGTVPTGAGGGAPLHGAASRRVRGGARAGRAANEGERGNGRGSPRGSRARATREPTEAQLALVRAAEAATTGEDLEQVAVKAAEYFRSRAAPGRGGNGEGGDGRARGRGGSAKQTRPGTLPGAPSGQERIRRATRLQRLYRTKRRRAVQEVIAGPSQVCGVNRERVRDHFTAVHRAHEGEVELPDVFPREPPTDDSNGALVAPFGRGDVSARLWKMKNSSPGPDGLSYPDLRAADPGCHILTSIFNACLRLETVPACWKDSNTVLLYKKGDRECLDNWRPIAMGDTTARLFAALVAGRLTAWAQVNKRISPSQKGFLPYEGCVEHNFVLQEILTDAKKKGKEVVVAWLDLANAFGSVPHAAIHEALRRHGVPGKITSIIKSMYLGAATRVRTTDGLTDPIFMRSGVRQGCPLSPIVFDLTFEAVISPLCDLEVGYSLHGRKFNNLVYADDVATVAGTPEGMRVLLQNIGEAARAVGLKFNPNKCATLHLRGKGTHRVQPTRFAIQGEEMRPLGEGEPYEHLGTPTGYKVNQTPKEAISELVADVRAVDSSLLAPWQKLDALATFLLPRLDFCLGGSHVEKGPLTLADRVIKRAAKGWLHLPQRASAELVFLPPREGGGGLLPLADLADALTISHAFKLLTSRDGVVSGLAWDSLGETVARRLARPIDNSDIARYLSGDLTGDFERASGDTSSVWSRARNAARRQREKLKIKWEWCEERQEISVGCRGFGNRSVRVTPSARVQVVSRMRAAIASWYRERLLAKPDQGKAFEVFSRCRESNHFMRDGRNTRFADWRFVHRARLGVLPLNGTRRWAEGDRRCRRCGDVETIPHVLNHCGPHAAARQFRHDAIVERLVRANRTPGTVSVNQRVEGAHELGNNLKPDIVIKNDRDKKLIIIDVAVPFENRGEALEEARNRKISKYLPLANDFKERGYEIAVEPFIVGALGSWDRRNERAISLLGINKRYSSMMKRLMVSDTIRWSRDIYVEHVSGVRQY

SEQ ID NO: 15292 - protein, 779 aa, Ancistrocerus nigricornis
MKNSSPGPDGLSYPDLRAADPGCHILTSIFNACLRLETVPACWKDSNTVLLYKKGDRECLDNWRPIAMGDTTARLFAALVAGRLTAWAQVNKRISPSQKGFLPYEGCVEHNFVLQEILTDAKKKGKEVVVAWLDLANAFGSVPHAAIHEALRRHGVPGKITSIIKSMYLGAATRVRTTDGLTDPIFMRSGVRQGCPLSPIVFDLTFEAVISPLCDLEVGYSLHGRKFNNLVYADDVATVAGTPEGMRVLLQNIGEAARAVGLKFNPNKCATLHLRGKGTHRVQPTRFAIQGEEMRPLGEGEPYEHLGTPTGYKVNQTPKEAISELVADVRAVDSSLLAPWQKLDALATFLLPRLDFCLGGSHVEKGPLTLADRVIKRAAKGWLHLPQRASAELVFLPPREGGGGLLPLADLADALTISHAFKLLTSRDGVVSGLAWDSLGETVARRLARPIDNSDIARYLSGDLTGDFERASGDTSSVWSRARNAARRQREKLKIKWEWCEERQEISVGCRGFGNRSVRVTPSARVQVVSRMRAAIASWYRERLLAKPDQGKAFEVFSRCRESNHFMRDGRNTRFADWRFVHRARLGVLPLNGTRRWAEGDRRCRRCGDVETIPHVLNHCGPHAAARQFRHDAIVERLVRANRTPGTVSVNQRVEGAHELGNNLKPDIVIKNDRDKKLIIIDVAVPFENRGEALEEARNRKISKYLPLANDFKERGYEIAVEPFIVGALGSWDRRNERAISLLGINKRYSSMMKRLMVSDTIRWSRDIYVEHVSGVRQY

SEQ ID NO: 15293 - protein, 1647 aa, Ancistrocerus nigricornis
MEGIRAIVLSFPYPAQLTCELCPAANVGRVFRDGRQRGVFKGERRHEDYVKHLKLCHKGEFEVTFKCKECDYRGAGAYPRRAIAKHFKEVHGSPLAGEGLGVAPPGQNNASTRSVLPANNNNNNNNNNFTLTTATATTTITTTTTTTTTTTSGGGQPPRAGGSAPRVVSVVTLGPKAVRVAGSSRKTIAPATQSTLGFKKAQPVRAKTSTPPPTTTTTIAAAITTATTTTAATRTRTSRGSSGAPTTAGSSRTSLPRTSPALGARTTPQASQPTPTGRPASSTGGRGAIPGRTPPSASMHEGETPRAGGTRRGGPKTPAAPRRSSVGRRAPVGPAVPRRITRAATAAMRLQGDGGREPSILDVTSAKEESGARTTSQGPTCPRRKSIVTGATITSRRSSLGLTPQMRPSARPGDTPATTYAEVVADRPRPTPNSIQGWAEGGPGVAPRTPPLQIITPGLTTLTTATTTTTVCGGSITSPGVAQRSPGAPQRDETTPGQVASPASGTPPTRITVGPDDDFPPLATTSGRREERRAEKKRLTPPTRDTAVEGTRATPERQPGGSPRGAEREEGPGPSTSPRTPLTGGEEPQNTDWRVVGRGRRVSSSPTRNRIVRGPGGQTPPSTSCGRPISSGGETQSFNLFQILNRDDDGGTPIGVETNGVGGSPPSPAAASRRGRGGARAGRVANGGERGGGRGAPRGRGARDPREPTEDQLALVREAEAAMTGEDLEQVAVKAAEYFRSRAAPRRGDNGEGGGNRARGGGGPAKQARPETQPGDSSGQERIRRATRLQRLYRTKRRRAVQEVIAGPSQVCGVNRERVRDHFTAVHRAYEGDVELPDVFSRDPPTEDSNGALVAPLGRGEVSARLWRMKNSSPGPDGLSYLDLRGADRGCHILTSLFNACLRLEAIPDCWKDSTTVLIHKKGDRECLGNWRPIAMGQTTARLFAALIADRLTSWAILNNKISPSQKGFLPYEGCVEHNFVLQSILTDARKRGKEVVVAWLDLANAFGSVPHAAIYGALRRQQVPNKINSLIENMYNGATTRVRTVDGLTDPIPILAGVKQGCPLSPMIFNLTFEAVIRRLCDLEVGYSLQGEIFNNLVYADDVALVAGTPEGMRVILQIIGEAAEAVGLKFNPSKCATLHLRGKGSSRAQPTRFVIQREEMRPLGEGESYGHLGTPTGFKVNQTPTEAINDLIKEVRAVDASLLAPWQKLDALSTFILPKLDFCLGGSHVEKGPLIIADKIIKRAAKGWLHLPQRASAELVFLPPREGGGGLLPLADLADALTIAHAFKLLTSRDGVVSALAWDSLRETVTRRLARPINNNDIARYLSGDITGDFERASGDTSSLWSRARNAARRQSIKLKIKWEWCVERGELSLGCRGVGNRSVRVTPSSRSQVVGRLRAAIASWYRESLLAKPDQGKAFEVFSRCRESNHFMRDGRNTRFADWRFVYRARLGVLPLNGTRRWAEGDRRCRRCGDVETIPHVLNHCGPHAAARQLRHDAIVERLVRANRTPGTISVNQHVEGVHELWNDLKPDIVIKNDRDKKLIIIDVAVPFENRGEALEEARDRKISKYLPLANDFKERGYEIAVEPFIVGALGSWDRRNERAISLLGINKRYSGMMKRLMVSDTIKWSRDIYVEHVSGVRQY

SEQ ID NO: 15294 - protein, 1644 aa, Ancistrocerus nigricornis
MEGIRAIVLSFPYPAQLTCELCPAANVGRVFRDGRQRGVFKGERRHEDYVKHLKLCHKGEFEVTFKCKECDYRGAGAYPRRAIAKHYKEVHGSPLAGEGLGVAPPGQNNASSRSVLPANNNNNSNNNNFTPTTATATTTITTTTTTTTTTTSGGGQPPRAGGSAPRVVSVVTLGPKAVRVAGSSRKAIAPATQSILGYKKAQPVRAKSSTPPPITTAAATTTATTTTAATRTRTSRGSSGAPTTAGSSRTSLPRTSPALGARRTPQASQPTPTGRPASSTRDRGAIPGRTPPSANMLERETPRAGATRRGGPKTPAAPRRSSVGRRAPVGPAVPRRITRAATAAMRLQGDGGREPSILDVTSAKEESGARTTSQGPTCPRRKSIVTGATITPRRSSLGLTPQMRPSARPGDTPATTYAEVVADRPRPTPNSIQGWAEGGQGVAPRTPPQQIITPGLVTLTTVTTTTTVCGGSITSPGVAQRSPGAPQRDETTPGQVASPASGTPPTRNIVGPVDDFPPLPTTSGRREERRAEKKRSTPPTKDTAVEGTRATPERQQGGSPRGAECEEGPGPSASPETPLTGGEEPLNTDWRVVGRGRRVSTSPTRNRIVRGPGGHTPPSTSCGRPISSGGETQSFNLFQILNRDDDGGTPIGVETNGVGGSPPSPAAASRRGRGGARTGRVANGGERGGGRGAPRGRGARDPREPTEDQLALVREAEAAMTGEDLEQVAVKAAEYFRSRAAPRRGDNGEGGGNRARGGGGPAKQARPETQPGDSSGQERIRRATRLQRLYRTKRRRAVQEVIAGPSQVCGVNRERVRDHFTAVHRAYEGDVELPDVFSRDPPTEDSNGALVAPLGRGEVSARLWRMKNSSPGPDGLSYLDLRGADRGCHILTSLFNACLRLEAIPDCWKDSTTVLIHKKGDRECLGNWRPIAMGQTTARLFAALIADRLTSWAILNNKISPSQKGFLPYEGCVEHNFVLQSILTDARKRGKEVVVAWLDLANAFGSVPHAAIYGALRRQQVPNKINSLIENMYNGATTRVRTVDGLTDPIPILAGVKQGCPLSPMIFNLTFEAVIRRLCDLEVGYSLQGEIFNNLVYADDVALVAGTPEGMRVILQIIGEAAEAVGLKFNPSKCATLHLRGKGSSRAQPTRFVIQREEMRPLGEGESYGHLGTPTGFKVNQTPTEAINDLIKEVRAVDASLLAPWQKLDALSTFILPKLDFCLGGSHVEKGPLIIADKIIKRAAKGWLHLPQRASAELVFLPPREGGGGLLPLADLADALTIAHAFKLLTSRDGVVSALAWDSLRETVTRRLARPINNNDIARYLSGDITGDFERASGDTSSLWSRARNAARRQSIKLKIKWEWCVERGELSLGCRGVGNRSVRVTPSSRSQVVGRLRAAIASWYRESLLAKPDQGKAFEVFSRCRESSHFMRDGRNTRFADWRFVHRARLGVLPLNGTRRWAEGDRRCRRCGDVETIPHVLNHCGPHAAARQLRHDAIVERLVRANRTPGTISVNQHVEGVHELWNDLKPDIVIKNDRDKKLIIIDVAVPFENRGEALEEARDRKISKYLPLANDFKERGYEIAVEPFIVGALGSWDRRNERAISLLGINKRYSGMMKRLMVSDTIKWSRDIYVEHVSGVRQY

SEQ ID NO: 15295 - protein, 1645 aa, Ancistrocerus nigricornis
MEGIRAIVLSFPYPAQLTCELCPAANVGRVFRDGRQRGVFKGERRHEDYVKHLKLCHKGEFEVTFKCRDCDYRGVGAYPRRDIAKHFKAVHGSPLAGEGLGVAPPGQNNASSRSVLPANNNNNNNNNNTTPTTATATTTITTTTTTTTTTTSGGGQPPRAGGSAPRVVSVVTLGPKAVRVAGSSRKTIAPATQSTLGFKKAQPVRAKTSTPPPTTTAAATTTATTTTAATRTRTSRGSSGAPTTAGSSRTSLPRTSPALGARTTPQASQPTPTGRPASSAGNRGAIPGRTPPSASMQEGETPRAGRTRRGGPKTPAAPRRSSVGRRAPVGPAVPRRITRAATAAMRLQGDGGREPSILDVTAAKEESGARTTSQGPTCPRRKSILTGATITSRRSSLGLTPQTRPSARPGDTPATTYAEVVADRPRPTPNYTQGWAEGGRGVAPPSTPPLQIITPGLTTLTTATTTTSVCGGSITSPGVAQRSPGAPQRDETTPGRVASPVNGTPPARVIVGPEDDFPPLATTSGRREERRAEKKRSTPPTKDTAVEGTRATPERQQGGSPRGAEREEGPGPSASPRTPLAGGEEPLNTDWRVVGRGRRVSSSPTRNRMVRGPGGQTPPSISCGRPTSSGGETQSFNPFQILNRDDDGGTPMGVETNGVGGSPPSPAAASRRGRGGSRAGRVANGGERGGGRGAPRGRGARDPREPTEDQLALVREAEAAMTGEDLEQVAVKAAEYFRSRAAPRRGDNGEGGGNRARGGGGPAKQARPETQPGDSSGQERIRRATRLQRLYRTKRRRAVQEVIAGPSQVCGVNRERVRDHFTAVHRAYEGDVELPDVFSRDPPTEESNGALVAPLGRGEVSARLWRMKNSSPGPDGLSYLDLRGADRGCHILTSLFNACLRLEAIPDCWKDSTTVLIHKKGDRECLGNWRPIAMGQTTARLFAALIADRLTSWALLNNKISPSQKGFLPYEGCVEHNFVLQSILTDARKKGKEVVVAWLDLANAFGSVPHAAIYGALRRQQVPNKINSLIENMYNGATTRVRTVDGLTDPIPILAGVKQGCPLSPMIFNLTFEAVIRRLCDLEVGYSLQGEIFNNLVYADDVALVAGTPEGMRVILQIIGEAAEAVGLKFNPSKCATLHLRGKGSSRAQPTRFVIQREEMRPLGEGESYGHLGTPTGFKVNQTPTEAISDLIKEVRAVDASLLAPWQKLDALSSFILPKLDFCLGGSHVEKGPLTIADKIIKRAAKGWLHLPQRASAELVFLPPREGGGGLLPLADLADALTIAHAFKLLTSRDGVVSALAWDSLRETVTRRLARPIDNNDIARYLSGDITGDFERASGDTSSLWSRARNAARRQSKKLKIKWEWCVERGELSLGCRGVGNRSVRVTPSSRSQVVGRLRAAIASWYRESLLAKPDQGKAFEVFSRCRESNHFMRDGRNTRFADWRFVHRARLGVLPLNGTRRWAEGDKRCRRCGDMETIPHVLNHCGPHAAARQLRHDAIVERLVRANRTPGTISVNQHVEGVHELGNNLKPDIVIKNDRDKKLIIIDVAVPFENRGEALEEARNRKISKYLPLANDFKERGYEIAVEPFIVGALGSWDHRNERAISLLGINKSYSNMMKRLMVSDTIRWSRDIYVEHVSGVRQY

SEQ ID NO: 15296 - protein, 1645 aa, Ancistrocerus nigricornis
MEGIRAIVLSFPYPAQLTCELCPAANVGRVFRDGRQRGVFKGERRHEDYVKHLKLCHKGEFEVTFKCRDCDYRGVGAYPRRDITKHFKLVHGSPLAGEGLGVAPPGQNNASSRSVLPANNNNNNNNNNNFTLTTATATTTITTTTTTTTTTTSGGRQPPRAEGSAPRIVSVVTLGPKAVRVAGSSRKTIAPATQSTLGFKKAQPVRAKTSTPPPTTTATAATTTATTTTAARTRTSRGSSGAPTTAGSSRTSLPRTSPALGARKTPQASQPPSTGRPASSAGSRGAIPGRTPPTATMHEGETPRAGRARRGGPKTPAAPRRSSVGRRAPVGPAVPRRLTRAATAAMRLQGDGGREPSLLDVTSAKEESGARTTSQGPTCPRRKSIVTGATITPRRSSLGLTPQMRPSARPGDTPATTYAEVVADRPRPTPNSIQGWAEGGPGVAPRTPPQQIITPGLVTLTTATTTTSVCGGSITSPGVAQRSPGAPQRDETTPGRVASPVNGTPPARVIVGPEDDFPPLATTSGRREERRAEKKRSTPPTKDTAVEGTRATPERQQGGSPRGAEREEGPGPSASPRTPLAGGEEPLNTDWRVVGRGRRVSSSPTRNRMVRGPGGQTPPSISCGRPTSSGGETQSFNPFQILNRDDDGGTPMGVETNGIGGSPPSPAAASRRGRGGSRAGRVANGGERGGGRGAPRGRGARDPREPTEDQLALVREAEAAMTGEDLEQVAVKAAEYFRSRAAPRRGDNGEGGGNRARGGGGPAKQARPETQPGDSSGQERIRRATRLQRLYRTKRRRAVQEVIAGPSQVCGVNRERVRDHFTAVHRAYEGDVELPDVFSRDPPTEESNGALVAPLGRGEVSARLWRMKNSSPGPDGLSYLDLRGADRGCHILTSLFNACLRLEAIPDCWKDSTTVLIHKKGDRECLGNWRPIAMGQTTARLFAALIADRLTSWALLNNKISPSQKGFLPYEGCVEHNFVLQSILTDARKKGKEVVVAWLDLANAFGSVPHAAIYGALRRQQVPNKINSLIENMYNGATTRVRTVDGLTDPIPILAGVKQGCPLSPMIFNLTFEAVIRRLCDLEVGYSLQGEIFNNLVYADDVALVAGTPEGMRVILQIIGEAAEAVGLKFNPSKCATLHLRGKGSSRAQPTRFVIQREEMRPLGEGESYGHLGTPTGFKVNQTPTEAISDLIKEVRAVDASLLAPWQKLDALSTFILPKLDFCLGGSHVEKGPLTIADKIIKRAAKGWLHLPQRASAELVFLPPREGGGGLLPLADLADALTIAHAFKLLTSRDGVVSALAWDSLRETVTRRLARPIDNNDIARYLSGDITGDFERASGDTSSLWSRARNAARRQSKKLKIKWEWCVERGELSLGCRGVGNRSVRVTPSSRSQVVGRLRAAIASWYRESLLAKPDQGKALEVFSRCRESNHFMRDGRNTRFADWRFVHRARLGVLPLNGTRRWAEGDKRCRRCGDMETIPHVLNHCGPHAAARQLRHDAIVERLVRANRTPGTISVNQHVEGVHELGNNLKPDIVIKNDRDKKLIIIDVAVPFENRGEALEEARNRKISKYLPLANDFKERGYEIAVEPFIVGALGSWDHRNERAISLLGINKSYSNMMKRLMVSDTIRWSRDIYVEHVSGVRQY

SEQ ID NO: 15297 - protein, 1643 aa, Ancistrocerus nigricornis
MEGIRAIVLSFPYPAQLTCELCPAVNVGRVFRDGRQRGVFKGERRHEDYVKHLKLCHKGEFEVTFKCRDCDYRGVGAYPRRDITKHFKSVHGSPLAGEGLGVAPPGRSNASSRSVLPANNNNNNNNNTTPTTATATTTITTTTTTTTTTMSGGGQPPRAEGSAPRVVSVVTLGPKTVRVAGSSRKTTAPATQSILGFKKAQPVRAKTSTPPPITTAAATTTATTTTAATRTRTSRGSSGAPTTAGSSRTSLPRTSPALGARKTPQASQPTPTGRPASSAGSGGAIPGRTPPSANMQEGETPRAGATRRGGPKTPAAPRRSSVGRRAPVGPAVPRRITRAATAAMRLQGDGGREPSILDVTSAKEESGARTTSQGPTCPRRKSIVTGATITSRRSSLGLTPQMRPSARPGDTPATTYAEVVADRPRPTPNSIQGWAEGGPGVAPRTPPLQIITPGLTTLTTATTTTTVCGGSITSPGVAQRSPGAPQRDETTPGQVASPASGTPPTRITVGPDDDFPPLATTSGRREERRAEKKRLTPPTRDTAVEGTRATPERQPGGSPRGAEREEGPGPSTSPRTPLTGGEEPQNTDWRVVGRGRRVSSSPTRNRIVRGPGGQTPPSISCGRPISSGGETQSFNPFQILNRDDDGGTPMGVETNGVGGSPPSPAAASRRGRGGSRTGRVANGGERGGGRGAPRGRGARDPREPTEDQLALVREAEAAMTGEDLEQVAVKAAEYFRSRAAPRRGDNGEGGGNRARGGGGPAKQARPETQPGDSSGQERIRRATRLQRLYRTKRRRAVQEVIAGPSQVCGVNRERVRDHFTAVHRAYEGDVELPDVFSRDPPTEESNGALVAPLGRGEVSARLWRMKNSSPGPDGLSYLDLRGADRGCHILTSLFNACLRLEAIPDCWKDSTTVLIHKKGDRECLGNWRPIAMGQTTARLFAALIADRLTSWALLNNKISPSQKGFLPYEGCVEHNFVLQSILTDARKKGKEVVVAWLDLANAFGSVPHAAIYGALRRQQVPNKINSLIENMYNGATTRVRTVDGLTDPIPILAGVKQGCPLSPMIFNLTFEAVIRRLCDLEVGYSLQGEIFNNLVYADDVALVAGTPEGMRVILQIIGEAAEAVGLKFNPSKCATLHLRGKGSSRAQPTRFVIQREEMRPLGEGESYGHLGTPTGFKVNQTPTEAISDLIKEVRAVDASLLAPWQKLDALSTFILPKLDFCLGGSHVEKGPLTIADKIIKRAAKGWLHLPQRASAELVFLPPREGGGGLLPLADLADALTIAHAFKLLTSRDGVVSALAWDSLRETVTRRLARPIDNNDIARYLSGDITGDFERASGDTSSLWSRARNAARRQSKKLKIKWEWCVERGELSLGCRGVGNRSVRVTPSSRSQVVGRLRAAIASWYRESLLAKPDQGKAFEVFSRCRESNHFMRDGRNTRFADWRFVHRARLGVLPLNGTRRWAEGDKRCRRCGDMETIPHVLNHCGPHAAARQLRHDAIVERLVRANRTPGTISVNQHVEGVHELGNNLKPDIVIKNDRDKKLIIIDVAVPFENRGEALEEARNRKISKYLPLANDFKERGYEIAVEPFIVGALGSWDHRNERAISLLGINKRYSNMMKRLMVSDTIRWSRDIYVEHVSGVRQY

SEQ ID NO: 15298 - protein, 1644 aa, Ancistrocerus nigricornis
MEGIRVIVLSFPYPAQLTCELCPAANVGRVFRDGRQRGVFKGERRHEDYVKHLKLCHKGEFEVLFKCRDCDYRGVGAYPRRDITKHFKSVHGSPLAGEGLGVAPPGQSNASSRSVLPANNNNNNNNNNITPTTVTATTTITTTTTTTTTTTSGGGQPPRAGGSAPRVVSVVTLGPKAVRVAGSSRKAIAPATQSTLGFKKAQPVRAKSSTPPPITTAAATTTATTTTAATRTRTSRGSSGAPTTAGSSRTSLPRTSPALGARTTPQASQPTPTGRPASSAGSRGAIPGRTPPSANMQEGETPRAGATRRGGPKTPAAPRRSSVGRRAPVGPAVPRRITRAATAAMRLQGDGGREPSVLDVTSAKEESGARTTSQGPTCPRRKSIVTGATITQRRSSLWLTPQMRPSARPGDTPATTYAEVVADRPRPTPNSIQGWAEGGPGVAPRTPPLQIITLGLTTLTTATTTTTVCGGSITSPGVAQRSPGAPQRDETTPGQVAPPASGTPPTRITVGPDDDFPPLATTSGRREERRAEKKRLTPPTRDTAVEGTRATPERQPGGSPRGAEREEGPGPSTSPRTPLTGGEEPLNTDWRVVGRGRRVSSSPTRNRIVRGPGGQTPPSTSCGRPISSGGETQSFNLFQILNRDDDGGTPMGVETNGVGGGPPPPAAANRRGRGGARTGRVANGGERGRGRGAPRGRGARDPREPTEDQLALVREAEAAMTGEDLEQVAVKAAEYFRSRAASGRGDSGEGGGNRARGGGGPAKQARPETQPGDSSGQERIRRATRLQRLYRTKRRRAVQEVIAGPSQVCGVNRERVRDHFTAVHRAYEGDVELPDVFSRDPPTEDSNGALVAPLGRGEMSARLWRMKNSSPGPDGLSYLDLRGADRGCHILTSLFNACLRLEAVPDCWKDSTTVLIHKKGDRECLGNWRPIAMGLTTARLFAALVADRLTSWALINNKISPSQKGFLPYEGCVEHNFVLQSILTDARKKGKEVVVAWLDLANAFGSVPHAAIYGALRRQQVPNKITSLIKNMYNGASTRVRTVDGLTDPIPIRSGVKQGCPLSPMIFNLTFEAVIRRLCDLEVGYSLYGETFNNLVYADDVALVAGTPEGMRIILQIISEAAEAVGLKFNPSKCATLHLRGKGSSRAQPTRFVIQREEMRPLGEGESYGHLGTPTGFKVNQTPTEAISDLIKEVRAVDASLLAPWQKLDAISTFILPKLDFCLGGSHVEKGPLTIADKVIKRAAKGWLHLPQRASAELVFLPPREGGGGLLPLADLADALTIAHAFKLLTSRDGVVGALAWDSLRETVTRRLARPINNNDIARYLSGDITGDFERASGDTSSLWSRARNAARRQSKKLKIKWEWCIERGELSLGCRGVGNRSVRVTPSSRSQVVGRLRAAIASWYRESLLAKPDQGKAFEVFSRCQESNHFMRDGRNTRFADWRFVHRARLGVLPLNGTRRWAEGDKRCRRCGDMETVPHVLNHCGPHAAARQLRHDAIVERLVRANRTPGTISVNQHVEGVHELGNNLKPDIVIKNDRDKKLIIIDVAVPFENRGEALEEARNRKISKYLPLANDFKERGYEIAVEPFIVGALGSWDHRNERAISLLGINKRYSNMMKRLMVSDTIRWSRDIYVEHVSGVRQY

SEQ ID NO: 15299 - protein, 1347 aa, Ancistrocerus nigricornis
MQEGETPRAGRTRRGGPKTPAAPRRSSVGRRAPVGPAVPRRLTRAATAAMRLQGDGGREPSILDVTAAKEESGARTTSQGPTCPRRKSILTGATITSRRSSLGLTPQTRPSARPGDTPATTYAEVVADRPRPTPNYTQGWAEGGRGVAPPSTPPQQIIIPGLMTLTTATTTTTVCGGSITSPGVAQRSPGAPQRNETTPGRVASLANGTPPARSVGPEMDFPPLATTSGRREERRAEKRSTPSIGDTAVEGTHATLERHQGGSPRGATPEEGPGPSSPRTPLTGGEEPLNTDWRVVGRGRRVSSSPTRNRIVRGPGGQTPPSTSCGRPIGSGGEIRSPNLFQFLSRDDDGGTSMGIETNGAGGSPPSPATAGRRGRGGARAGRASGGGERGGGRGAPRGRRARDPREPTEEQLALAREAEAAVTGEDLEQVAVKAAEYFRSRAAPRRGDNGEGGGNRARGRGGPAKQTGPETQPGDSSGQERIRRATRLQRLYRTKRRRAVQEVVAGPSQVCGVDRERIRDHFTAVHRAYEGSVELPDVFPREPPTEDSNGALVAPLGRGEVSARLWKMKNSSPGPDGLSYLDLRGADRGCHVLTSLFNACLRLETVPDCWKDSTTVLLHKKGDRDCLGNWRPIAMGPTTARLFAALVAGRLASWAQLNNRISPSQKGFLPYEGCVEHNFVLQSILDDAKKKGREVVVAWLDLANAFGSVPHAAIYDALRRQNVPDKIVSLIKSMYNGAATRVRTVDGLTDLIPILAGVRQGCPLSPMIFNLTFEAVIRPLCDLEVGYSLQGQKFNNLVFADDVALVAGTPEGMRMMLQRLSEAARAVGLKFNPNKCATLHLRGKGSSRVQPTHFTIQGEQMRPLGEGESYGHLGTPTGFKVNQTPTEAISELIREVRAVDASLLAPWQKLDAISTFILPKLDFCLGGSHVEKGPLTIADKVIKRAAKGWLHLPQRASAELVFLPPREGGGGLLPLADLADALTVAHAFKLLTSRDGAVGALAWDALRETVTRRLARPVNNNDIARYLSGDTTGDFERASGDTSSLWSRARNAARRQSKKLLIKWEWCVERGELSLGCRGVGNRSVRVTPSARNQVVGRLRAAIVSWYRESLLAKPDQGKAFEVFSRCRESNHFMRDGRNTRFADWRFVHRARLGVLPLNGTRRWAEGDRRCRRCGDVETIPHVLNHCGPHAAARQFRHDAIVERLVRANRTPGTISVNQTVEGAHELGRNLKPDIVIKNDRDKKLIIIDVAIPFENRGEAMEEARERKITKYLPLANDFKERGYSVAVEPFVVGALGSWDRKNERTIGLLSINRSYAGMMRRMMVSETIKWSGDIYVEHVSGNRQY

SEQ ID NO: 15300 - protein, 1643 aa, Ancistrocerus nigricornis
MEGIRVIVLSFPYPAQLTCELCPAANVGRVFRDGRQRGVFKGERRHEDYVKHLKLCHKGEFEVLFKCRDCDYRGVGAYPRRDIAKHFKLIHGSPLAGEGLGVAPPGQNNASSRSVLPANNNNNSNNNNFTPTTATATTTITTTTTTTTTTTSGGGQPPRAGGSAPRVVSVVTLGPKAVRVAGSSRKAIAPATQSTLGFKKAQPVRAKSSTPPPTTITAAATTTATTTTAATRTRMSRGSSGAPTTAGSSRTSLPRPSPALGTRKTPQASQPPSTGRPASSAGSRGAIPGRTPPLASMHEGETPRAGVTRRGGPKTPAAPRRNSVGRRAPVGPAVPRRLTRAATAAMRLQGDGGREPSLLDVTSAKEESGARTTSQGPTCPRRKSIVTGATITPRRSSLGLTPQMRPSARPGDTPATTYAEVVADRPRPTPNSIQGWAEGGRGVAPPITPPQQIIIPGLMTLTTATTTTTVCGGSITSPGVAQRSPGAPQRNETTPGRVASLANGTPPARSVGPEMDFPPLATTSGRREERRAEKRSTPSIGGTAVEGTHATLERQQGGSPRGATPEEGPGPSSPRTPLTGGEEPLNTDWRVVGRGRRVSSSPTRNRIVRGPGGQTPPSISCGRPIGPGGEIRSPNLFQFLSRDDDGGTSIGIETNGAGGSPPSPATAGRRGRGGARAGRASGGGERGGGRGAPRGRRARDPREPTEEQLALVREAEAAVTGEDLEQVAVKAAEYFRSRAAPRRGDNGEGGGNRARGRGGPAKQTGPETQPGDSSGQERIRRATRLQRLYRTKRRRAVQEVVAGPSQVCGVDRERIRDHFTAVHRAYEGSVELPDVFPREPPTEDSNGALVAPLGRGEVSARLWKMKNSSPGPDGLGYLDLRGADRGCHVLTSLFNACLRLETVPDCWKDSTTVLLHKKGDRDCLGNWRPIAMGPTTARLFAALVAGRLASWAQLNNRISPSQKGFLPYEGCVEHNFVLQSILDDAKKKGREVVVAWLDLANAFGSVPHAAIYDALRRQNVPDKIVSLIKSMYNGAATRVRTVDGLTDLIPILAGVRQGCPLSPMIFNLTFEAVIRPLCDLEVGYSLQGQKFNNLVFADDVALVAGTPEGMRMMLQRLSEAARAVGLKFNPNKCATLHLRGKGSSRVQPTHFTIQGEQMRPLGEGESYGHLGTPTGFKVNQTPTEAISELIREVRAVDASLLAPWQKLDAISTFILPKLDFCLGGSHVEKGPLTIADKVIKRAAKGWLHLPQRASAELVFLPPREGGGGLLPLADLADALTVAHAFKLLTSRDGAVGALAWDALRETVTRRLARPVNNNDIARYLSGDTTGDFERASGDTSSLWSRARNAARRQSKKLLIKWEWCVERGELSLGCRGVGNRSVRVTPSARNQVVGRLRAAIVSWYRESLLAKPDQGKAFEVFSRCRESNHFMRDGRNTRFADWRFVHRARLGVLPLNGTRRWAEGDRRCRRCGDVETIPHVLNHCGPHAAARQFRHDAIVERLVRANRTPGTISVNQTVEGAHELGRNLKPDIVIKNDRDKKLIIIDVAVPFENRGEAMEEARERKITKYLPLANDFKERGYSVAVEPFVVGALGSWDRKNERTIGLLSINRSYAGMMRRMMVSETIKWSRDIYVEHVSGNRQY

SEQ ID NO: 15301 - protein, 779 aa, Ancistrocerus nigricornis
MKNSSPGPDGLSYLDLRGADQGCHVLASLFNACLRLETVPDCWKDSTTVLLHKKGDRDCLGNWRPIAMGPTTARLFAALVAGRLTSWAQLNNRISPSQKGFLPYEGCVEHNFVLQSILDDAKKKGREVVVAWLDLANAFGSVPHAAIYDALRRQKVPNKIISLIKSMYSGAATRVRTVDGLTDLIPILAGVRQGCPLSPMIFNLTFEAVIRPLCDLEVGYSLQGQTFNNLVFADDVALVAGTPEGMRMMLQGLSEAARAVGLKFNPNKCATLHLRGKGSSRVQPTHFTIQGEQMRPLGEGESYGHLGTPTGYKINQTPTEAISELIREVRAVDASLLAPWQKLDAISTFILPKLDFCLGGSHVEKGPLTIADKVIKRAAKGWLHLPQRASAELVFLPPREGGGGLLPLADLADALTIAHAFKLLTSRDGTVGALAWGALRETVTRRLARPINNNDIARYLSGDTTGDFERASGDTSSLWSRARNAARRQSKKLLIKWEWCVERGELSLGCRGVGNRSVRVTPSARNQVVGRLRAAIVSWYRESLLAKPDQGKAFEVFSRCRESNHFMRDGRNTRFADWRFVHRARLGVLPLNGTRRWAEGDRRCRRCGDVETIPHVLDHCGPHAAARQFRHDAIVERLVRANRTPGTITVNQTVEGAHELGRNLKPDIVIKNDRDKKLIIIDVAVPFENRGEAMEEARERKITKYLPLANDFKERGYSVAVEPFVVGALGSWDRKNERTIGLLSINRSYAGMMRRMMVSETIKWSRDIYVEHVSGNRQY

SEQ ID NO: 15302 - protein, 1644 aa, Ancistrocerus nigricornis
MEGIRAIVLSFPYPAQLTCELCPAANVGRVFRDGRQRGVFKGERRHEDYVKHLKLCHKGEFEVTFKCRDCDYRGVGAYPRRDIAKHFKAVHGSPLAGEGLGVAPPGQNNASSRSVLPANNNNNNNNNNTTPTTATATTTITTTTTTMTTTTSGGGQPPRAGGSAPRVVSVVTLGPKAVRVAGSSRKTIAPATQSTLGFKKAQPVRAKTSTPPPTTTAAATTTATTTTAATRTRTSRGSSGAPTTAGSSRTSLPRTSPALGAKKTPQASQPPSTGRPASSAGSRGAIPGRTPPSANMHEGETPRAGRTRRGGPKTPAAPRRSSVGRRAPVGPAVPRRLTRAATAAMRLQGDGGREPSILDVTSAKEESGARTTSQGPTCPRRKSIVTGATITSRRSSLGLTPQVRPSARPGDTPATTYAEVVADRPRPTPNYTQGWAEGGRGVAPPSTPPLQIITPGLTTLTTATTTTTMCGGSIPSPGAAQRSPGAPQGHKRTPGQVASPTNGTPPARFIVGPEKDFPPLASTSGRREERRAEKRLTPPAGDTAVEGTHATPERQQGGSPRGAEREEGPGPSTSPRTPLTGGEEPLNTDWRVVGRGRRVSSSPTRNRIVRGPGGQTPPSISCGRPISSGGEIQSSNLFQLLNSDDDGGTSTGIETNGAGGSPPSPAAASRRGRGGARTGRASDGGERGGGRGVPRGRRARDPREPTEEQLALVREAEAAVTGEDLEQVAVKAAEYFRSRAAPRRGDNGEGGGNRARGRGGPAKQTGPETQPGDSSGQERIRRATRLQRLYRTKRRRAVQEVVAGPSQVCGVDRERIRDHFTAVHRAYEGSVELPDVFPREPPTEDSNGALVAPLGRGEVSARLWKMKNSSPGPDGLSYLDLRGADRGCHVLTSLFNACLRLETVPDCWKDSTTVLLHKKGDRDCLGNWRPIAMGPTTARLFAALVAGRLTSWAQLNNRISPSQKGFLPYEGCVEHNFVLQSIIDDAKKKGREVVVAWLDLANAFGSVPHAAIYDALRRQKVPNKIISLVKSMYSGAATRVRTVDGLTDLIPILAGVRQGCPLSPMIFNLTFEAVIRPLCDLEVGYSLQGKKFNNLVFADDVALVAGTPEGMRMMLQGLSEAARAVGLKFNPNKCATLHLRGKGSPRVQPTHFTIQGEQMRPLGEGESYGHLGTPTGYKINQTPTEAISELIRDVRAVDASLLAPWQKLDALSTFILPKLDFCLGGSHVEKGPLTLADKVIKRAAKGWLHLPQRASAELVFLPPREGGGGLLPLADLADALTIAHAFKLLTSRDGVVSALAWDSLRETVTRRLARPINNNDIARYLSGDTTGDFERASGDTSSLWSRARNAARRQNKKLKIKWEWCAERGELSLGCRGVGNRSVRVTPSARNQVVGRLRAAIVSWYRESLLAKPDQGKAFEVFSRCRESNHFMRDGRNTRFADWRFVHRARLGVLPLNGTRRWAEGDRRCRRCGDVETIPHVLNHCGPHAAARQYRHDAIVERLVRANRTPGTVTVNQTVEGAHELGRNLKPDIVIKNDRDKKLIIIDVAVPFENRGEAMEEARERKITKYLPLANDFKERGYSVAVEPFVVGALGSWDRKNERTIGLLSINRSYAGMMRRMMVSETIKWSRDIYVEHVSGNRQY

SEQ ID NO: 15303 - protein, 994 aa, Ancistrocerus nigricornis
MGIEASGAGGGPPSPAAASRRGRGGARTGRASGGGERGGGRGVPRGRRARDPREPTEDQLALVREAEAAVTGEDLEQVAVKAAEYFRSRAPPRRGDNGEGGGNRARGRGGPAKQTGPETQPGDSSGQERIRRATRLQRLYRTKRRRAVQEVVAGPSQVCGVDRERIRDHFTAVHRAYEGNVELPDVFSRDPPTEDSNGALVALLGRGEVSARLWRMKNSSPGPDGLRYLDLRGADRGCHILTALFNACLRLEAVPDCWKDSTTVLLHKKRDRDCLGNWRPIAMGPTTARLFAALVAGRLTSWAQMNERISPSQKGFLPYEGCVEHNFVLQTILDDARKKGKEVVVAWLDLANAFGSVPHAAIYDALRRQKVPNKIVSLVANMYSGATTRVRTVDGLTEPIPILAGVRQGCPLSPIVFDLTFEAVIRPLCDLAVGYSLYGKILNNLVYADDVALVAGTPEGMRIMLQRLSEAARAVGLKFNPSKCATLHLRGKGPSRVQPTRFDIQGEQMRPLSEGESYGHLGTPTGFKINQTPTEAINELVREVRAVDASLLAPWQKLDALSTFILPKLDFCLGGSHVEKGPLTLADKVIKRAAKGWLHLPQRASAELVFLPPREGGGGLLPLADLADALTIAHAFKLLTSRDGVVGALAWDSLRETVTRRLARPVNNNDIARYLSGDTTGDFERASGDTSSLWSRARNAARRQSKKLKVKWEWCEERGALSLGCRGVGDRSVRVTPSSRSQVVGRLRAAIASWYRESLLAKPDQGKAFEVFSRCRESNHFMRDGRNTRFADWRFVHRARLGVLPLNGTRRWAEGDKRCRRCGDMETIPHVLNHCGPHAAARQLRHDAIVERLVRANRTPGTISVNQHVEGAHEMWNGLKPDIVIKNDRDKRLVIIDVAVPFENRGEALEEARNRKISKYLPLANDFKERGYEIAVEPFIVGALGSWDHRNERAIGLLGINKSYSSMMKRLMVSDTIRWSRDIYVEHVSGVRQY

SEQ ID NO: 15304 - protein, 925 aa, Ancistrocerus nigricornis
MTGEDLEQVAVKAAEYFRSRAAPRRGDNGEGGGNRARGRGGPAKQTGPETQPGDSSGQERIRRATRLQRLYRTKRRRAVQEVVAGPSQVCGVDRERIRDHFTAVHRAYEGNVELPDVFSRDPPTEDSNGALVAPLGRGEVSARLWRMKNSSPGPDGLSYLDLRGADRGCHILTALFNACLRLEAVPDCWKDSTTVLLHKKGDRDCLGNWRPIAMGPTTARLFAALVAGRLTSWAQMNERISPSQKGFLPYEGCVEHNFVLQTILVDARKKGKEVVVAWLDLANAFGSVPHAAIYDALRRQKVPNKIVSLVANMYSGATTRVRTVDGLTEPIPILAGVRQGCPLSPIVFDLTFEAVIRPLCDLAVGYSLYGKILNNLVYADDVALVAGTPEGMRIMLQRLSEAARAVGLKFNPSKCATLHLRGKGPSRVQPTRFDIQGEQMRPLGEGESYGHLGTPTGFKINQTPTEAINELVREVRAVDASLLAPWQKLDALSTFILPKLDFCLGGSHVEKGPLTLADKVIKRAAKGWLHLPQRASAELVFLPPREGGGGLLPLADLADALTIAHAFKLLTSRDGVVGALAWDSLRETVTRRLARPVNNNDIARYLSGDTTGDFERASGDTSSLWSRARNAARRQSKKLKVKWEWCEERGELSLGCRGVGDRSVRVTPSSRSQVVGRLRAAIASWYRESLLAKPDQGKAFEVFSRCRESNHFMRDGRNTRFADWRFVHRARLGVLPLNGTRRWAEGDKRCRRCGDMETIPHVLNHCGPHAAARQLRHDAIVERLVRANRTPGTISVNQHVEGAHEMWNGLKPDIVIKNDRDKRLVIIDVAVPFENRGEALEEARNRKISKYLPLANDFKERGYEIAVEPFIVGALGSWDHRNERAIGLLGINKSYSSMMKRLMVSDTIRWSRDIYVEHVSGVRQY

SEQ ID NO: 15305 - protein, 1649 aa, Ancistrocerus nigricornis
MEGIRVIVLSFPYPAQLTCELCPAANVGRVFRDGRQRGVFKGERRHEDYVKHLKLCHKGEFEVLFKCRECDYRGAGAYPRRAIAKHFKEIHGSPLAGEGLGVAPPGQNNASSRSVLPANNSNNNNNNNNNIPITTAATTTITTTTTTTTTSTVTASTSGGVQPPRAEGTAPRVVSVVTLGPKTVRVAGSNRKGIAPATQSTLGFKKAQPVRAKSSTPPPTTTATAATTTATTTTAARTRTSRGSSGAPTTAGSSRTSLPRTSPALGARKTPQASQPPSTGRPASSAGSRGAIPGRTPPTANMHEGETPRAGRARRGGPKTPAAPRRSSVGRRAPVGPAVPRRLTRAATAAMRLLGDGGREPSVLDVTAAKEESGARTTSQGPTCPRRRSIVTGATITTRRSSLGLTPQMRPSARPGDTPATTYAEVVADRPRPTPNSIQGWAEGGPGVAPRTPPQQIITPGLVTLTTATTTTTVCGGSITSPGVAQRSPGAPQRDETTPGQVASPASGTPPARSIVGPEKDFPPLASTSGRRGERRAEKRLTPPTGGTTVEGTHATPERQQGGSPRGAEREVGPGPSTSPRTPLTGGEEPLNTDWRVVGRGRRVSSSPTRNRIVRGPGGQTPPSISCGRPTSSGGEIQSFNSFQFLNSDDDGGTSMGIEASGAGGGPPSPAAASRRGRGGSRTGRASGGGERGGGRGVPRGRRARDLREPTEDQLALVREAEAAVTGEDLEQVAVKAAEYFRSRAPPRRGDNGEGGGNRARGRGGPAKQTGPGTQPGDSSGQERIRRATRLQRLYRTKRRRAVQEVVAGPSQVCGVDRERIRDHFTAVHRAYEGSVELPDVFPREPPTEDSNGALVAPLGRGEVSARLWKMKNSSPGPDGLSYLDLRGADRGCHVLTSLFNACLRLETVPDCWKDSTTVLLHKKGDRDCLGNWRPIAMGPTTARLFAALVAGRLTSWAQLNNRISPSQKGFLPYEGCVEHNFVLQSIIDDAKKKGREVVVAWLDLANAFGSVPHAAIYDALRRQKVPNTIISLIKSMYSGAATRVRTVDGLTDQIPILAGVRQGCPLSPMIFNLTFEAVIRPLCDLEVGYSLQGKKFNNLVFADDVALVAGTPEGMRMMLQGLSEAARAVGLKFNPNKCATLHLRGKGSSRVQPTHFTIQGEQMRPLGEGESYGHLGTPTGYKINQTPTEAISELIRDVRAVDASLLAPWQKLDALSTFILPKLDFCLGGSHVEKGPLTLADKVIKRAAKGWLHLPQRASAELVFLPPREGGGGLLPLADLADALTIAHAFKLLASRDGVVSALAWDSLRETVTRRLARPINNNDIARYLSGDTTGDFERASGDTSSLWSRARNAARRQNKKLKIKWEWCAERGELSLGCRGVGNRSVRVTPSARNQVVGRLRAAIVSWYRESLLAKPDQGKAFEVFSRCRESNHFMRDGRNTRFADWRFVHRARLGVLPLNGTRRWAEGDRRCRRCGDVETIPHVLNHCGPHAAARQYRHDAIVERLVRANRTPGTVTVNQTVEGAHELGRNLKPDIVIKNDRDKKLIIIDVAVPFENRGEAMEEARERKITKYLPLANDFKERGYSVAVEPFVVGALGSWDRKNERTIGLLSINRSYAGMMRRMMVSETIKWSRDIYVEHVSGNRQY

SEQ ID NO: 15306 - protein, 1349 aa, Ancistrocerus nigricornis
MQEGETPRAGRTRRGGPKTPAAPRRSSVGRRAPVGPAVPRRITRAATAAMRLQGDGGREPSILDVTAAKEESGARTTSQGPTCPRRKSILTGATITSRRSSLGLTPQTRPSARPGDTPATTYAEVVADRPRPTPNYTQGWAEGGRGVAPPSTPPLQIITPGLTTLTTATTTTTMCGGSIPSPGAVQRSPGAPQGHKRTPGQVASPTNGTPPARFIVGPEKDFPPLASTSGRREERRAEKRLTPPAGDTAVEGTHATPERQQGGSPRGAEREEGPGPSTSPRTPLTGGEEPLNTDWRVVGRGRRVSSSPTRNRIVRGPGGQTPPSISCGRPISSGGEIQSSNLFQLLNSDDDGGTSTGIETNGAGGSPPSPAAASRRGRGGARTGRASDGGERGGGRGVPRGRRARDPREPTEEQLALVREAEAAVTGEDLEQVAVKAAEYFRSRAAPRRGDNGEGGGNRARGGGGPAKQTGPETQPGDSSGQERIRRATRLQRLYRTKRRRAVQEVVAGPSQVCGVDRERIRDHFTAVHRAYEGSVELPDVFPREPPTEDSNGALVAPLGRGEVSARLWKMKNSSPGPDGLSYLDLRGADRGCHVLTSLFNACLRLETVPDCWKDSTTVLLHKKGDRDCLGNWRPIAMGPTTARLFAALVAGRLTSWAQLNNRISPSQKGFLPYEGCVEHNFVLQSILDDAKKKGREVVVAWLDLANAFGSVPHAAIYDALRRQKVPNKIISLIKSMYSGAATRVRTVDGLTDLIPILAGVRQGCPLSPMIFNLTFEAVIRPLCDLEVGYSLQGQTFNNLVFADDVALVAGTPEGMRMMLQGLSEAARAVGLKFNPNKCATLHLRGKGSPRVQPTHFTIQGEQMRPLGEGESYGHLGTPTGYKINQTPTEAISELIREVRAVDASLLAPWQKLDAISTFILPKLDFCLGGSHVEKGPLTIADKVIKRAAKGWLHLPQRASAGLVFLPPREGGGGLLPLADLADALTIAHAFKLLTSRDGTVGALAWGALRETVTRRLARPINNNDIARYLSGDTTGDFERASGDTSSLWSRARNAARRQSKKLLIKWEWCAERGELSLGCRGVGNRSVRVTPSARNQVVGRLRAAIVSWYRESLLAKPDQGKAFEVFSRCRESNHFMRDGRNTRFADWRFVHRARLGVLPLNGTRRWAEGDRRCRRCGDVETIPHVLNHCGPHAAARQFRHDAIVERLVRANRTPGTITVNQTVEGAHELGRNLKPDIVIKNDRDKKLIIIDVAVPFENRGEAMEDARQRKITKYLPLANDFKERGYSVAVEPFVVGALGSWDRKNERTIGLLSINRSYAGMMRRMMVSETIKWSRDIYVEHVSGNRQY

SEQ ID NO: 15307 - protein, 1649 aa, Ancistrocerus nigricornis
MEGIRVIVLSFPYPAQLTCELCPAANVGRVFRDGRQRGVFKGERRHEDYVKHLKLCHKGEFEVLFKCRDCDYRGVGAYPRRDITKHFKSVHGSPLAGEGLGVAPPGQSNASSRSVLPANNNNNNNNNNITPTTVTATTTITTTTTTTTTTTSGGGQPPRAGGSAPRVVSVVTLGPKAVRVAGSSRKAIAPATQSTLGFKKAQPVRAKSSTPPPITTAAATTTATTTTAATRTRTSRGSSGAPTTAGSSRTSLPRTSPALGARTTPQASQPTPTGRPASSAGSRGAIPGRTPPSANMQEGETPRAGATRRGGPKTPAAPRRSSVGRRAPVGPAVPRRITRAATAAMRLQGDGGREPSILDVTSAKEESGARTTSQGPTCPRRNSIVTGASITSRRSSLGLTPQMRPSARPGDTPATTYAEVVADRPRPTPNSIQGWAEGGPGVAPRTPPLQIITPGLTTLTTATTTTTVCGGSITSPGVAQRSPGAPQGDRRSPGQVASPANGTPPARSIIGPEKDFPPLATTSGRREERRAEKRTTSSTGDAVVEGTPTIHERQTGGSPRGAIHEEGPGPSSPRTPLTGGEEPLNTDWRVVGRGRRVSSSPTRNRIVRGPGGQTPPSTSCGRPISSGGEAQGFNLNFNNFNTFHALTRDDDGGAPPERETNGAGGRPPSPARPSRRGRGGARTGRAANGGERRGGRGAPRGRGASDPREPTEDQLALVREAEAAMTGEDLEQVAVKAAEYFRSRAAPRRGDNGEGGGNRARGRGGPAKQTGPETQPGDSSGQERIRRATRLQRLYRTKRRRAVQEVVAGPSQVCGVDRERIRDHFTAVHRAYEGNVELPDVFSRDPPTEDSNGALVAPLGRGEVSARLWRMKNSSPGPDGLSYLDLRGADRGCHILTALFNACLRLEAVPDCWKDSTTVLLHKKGDRDCLGNWRPIAMGPTTARLFAALVAGRLTSWAQMNERISPSQKSFLPYEGCVEHNFVLQTILDDARKKGKEVVVAWLDLANAFGSVPHAAIYDALRRQKVPNKIVSLVANMYSGATTRVRTVDGLTEPIPILAGVRQGCPLSPIVFDLTFEAVIRPLCDLAVGYSLYGKILNNLVYADDVALVAGTPEGMRIMLQRLSEAARAVGLKFNPSKCATLHLRGKGPSRVQPTRFDIQGEQMRPLGEGESYGHLGTPTGFKINQTPTEAINELVREVRAVDASLLAPWQKLDALSTFILPKLDFCLGGSHVEKGLLTLADKVIKRAAKGWLHLPQRASAELVFLPPREGGGGLLPLADLADALTIAHAFKLLTSRDGVVGALAWDSLRETVTRRLARPVNNNDIARYLSGDTTGDFERASGDTSSLWSRARNAARRQSKKLKVKWEWCEERGELSLGCRGVGNRSVRVTPSSRSQVVGRLRAAIASWYRESLLAKPDQGKAFEVFSRCRESNHFMRDGRNTRFADWRFVHRARLGVLPLNGTRRWAEGDKRCRRCGDMETIPHVLNHCGPHAAARQLRHDAIVKRLVRANRTPGTISVNQHVEGVHELWNDLKPDIVIKNDRDKKLIIIDVAVPFENRGEALEEARDRKISKYLPLANDFKERGYEIAVEPFIVGALGSWDRRNERAISLLGINKRYSGMMKRLMVSDTIKWSRDIYVEYVSGVRQY

SEQ ID NO: 15308 - protein, 925 aa, Ancistrocerus nigricornis
MTGEDLEQVAVKAAEYFRSRAASGRGDSGEGGGNRARGGGGPAKQARPETQPGDSSGQERIRRATRLQRLYRTKRRRAVQEVIAGPSQVCGVNRERVRDHFTAVHRAYEGDVELPDVFSRDPPTEDSNGALVAPLGRGEVSARLWRMKNSSPGPDGLSYLDLRGADRGCHILTSLFNACLRLEAVPDCWKDSTTVLIHKKGDRECLGNWRPIAMGLTTARLFAALVADRLTSWALINNKISPSQKGFLPYEGCVEHNFVLQSILTDARKKGKEVVVAWLDLANAFGSVPHAAIYGALRRQQVPNKITSLIKNMYNGASTRVRTVDGLTDPIPIRSGVKQGCPLSPMIFNLTFEAVIRRLCDLEVGYSLYGETFNNLVYADDVALVAGTPEGMRIILQIISEAAEAVGLKFNPSKCATLHLRGKGSSRAQPTRFVIQREEMRPLGEGESYGHLGTPTGFKVNQTPTEAISDLIKEVRAVDASLLAPWQKLDAISTFILPKLDFCLGGSHVEKGPLTIADKVIKRAAKGWLHLPQRASAELVFLPPREGGGGLLPLADLADALTIAHAFKLLTSRGGVVGALAWDSLRETVTRRLARPINNNDIARYLSGDRTGDFERASGDTSSLWSRARNAARRQSKKLKIKWEWCIERGELSLGCRGVGNRSVRVTTSSRSQVVGRLRAAIASWYRESLLAKPDQGKAFEVFSRCRESNHFMRDGRNTRFADWRFVHRARLGVLPLNGTRRWAEGDKRCRRCGDMETIPHVLNHCGPHAAARQLRHDAIVERLVRANRTPGTISVNQHVEGVHELGNNLKPDIVIKNDRDKKLIIIDVAVPFENRGEALEEARNRKISKYLPLANDFKERGYEIAVEPFIVGALGSWDHRNERAISLLGINKRYSNMMKRLMVSDTIRWSRDIYVEHVSGVRQY

SEQ ID NO: 15309 - protein, 1646 aa, Ancistrocerus nigricornis
MEGIRAIVLSFPYPAQLTCELCPAANVGRVFRDGRQRGVFKGERRHEDYVKHLKLCHKGEFEVTFKCRDCDYRGAGAYPRRAISKHYKEVHGSPTAGEGLGVAPPGQRNLRSVLPANNSNNNNNNNNNIPITAAATTTITTTTTTTTTTTTASTSGGVQIPRAEGPAPRVVSVVTLGPKTVRVAGSSKTVAPTAQSTLGFKKAQPVRAKTSTPPPITIAAAATTTATTTTAAAKTRTSRGSSGAPTTAGSSRTSLPRTSPALGARKTPQASQPTPTGRPASSAGNRGAIPGRTPPSASMQEGETPRAGRTRRGGPKTPAAPRRSSVGRRAPVGPAVPRRITRAATAAMRLQGDGGREPSILDVTAAKEESGARTTSQGPTCPRRKSILTGATITSRRSSLGLTPQTRPSARPGDTPATTYAEVVADRPRPTPNSIQGWAEGGRGVAPPITPPQQIITPGLMTLTTATTTTTVCGGSITSPGVAQRSPGAPQRNETTPGRAASLANGTPPARSVGPEMDFPPLATTSGRREERRAEKRSTPSIGDTAVEGTHATLERQQGGSPRGATPEEGPGPSTPPRTPLTGGEEPLNTDWRVVGRGRRVSSSPTRNRIVRGPGGQTPPSISCGRPISSGGEIQNSNVFQLLNSDDDGGTSMGIEASGAGGGPPSPAAASRRGRGGARTGRASGGGERGGGRGVPRGRRARDPREPTEDQLALVREAEAAATGEDLEQVAVKAAEYFRSRAPPRRGDNGEGGGNRARGRGGPAKQTGPETQPGDSSGQERIRRATRLQRLYRTKRRRAVQEVVAGPSQVCGVDRERIRDHFTAVHRAYEGSVELPDVFPREPPTEDSNGALVAPLGRGEVSARLWKMKNSSPGPDGLSYLDLRGADRGCHVLTSLFNACLRLETVPDCWKDSTTVLLHKKGDRDCLGNWRPIAMGPTTARLFAALVAGRLASWAQLNNRISPSQKGFLPYEGCVEHNFVLQSILDDAKKKGRAVVVAWLDLANAFGSVPHAAIYDALRRQNVPDKIVSLIKSMYNGAATRVRTVDGLTDLIPILAGVRQGCPLSPMIFNLTFEAVIRPLCDLEVGYSLQGQKFNNLVFADDVALVEGTPEGMRMMLQRLSEAARAVGLKFNPNKCATLHLRGKGSSRVQPTHFTIQGEQMRPLGEGESYGHLGTPTGFKVNQTPTEAISELIREVRAVDASLLAPWQKLDAISTFILPKLDFCLGGSHVEKGPLTIADKVIKRAAKGWLHLPQRASAELVVLPPREGGGGLLPLTDLADALTIAHAFKLLTSRDGAVGALAWDALRETVTRRLARPVNNNDIARYLSGDTTGDFERASGDTSSLWSRARNAARRQSKKLLIKWEWCVERGELSLGCRGVGNRSVRVTPSARNQVVGRLRAAIVSWYRESLLAKPDQGKAFEVFSRCRESNHFMRDGRNTRFADWRFVHRARLGVLPLNGTRRWAEGDRRCRRCGDVETIPHVLNHCGPHAAARQFRHDAIVERLVRANRTPGTISVNQTVEGAHELGRNLKPDIVIKNDRDKKLIIIDVAVPFENRGEAMEEARERKITKYLPLANDFKERGYSVAVEPFVVGALGSWDRKNERTIGLLSINRSYAGMMRRMMVSETIKWSRDIYVEHVSGNRQY

SEQ ID NO: 15310 - protein, 1642 aa, Ancistrocerus nigricornis
MEGIRVIVLSFPYPAQLTCELCPAANVGRVFRDGRQRGVFKGERRHEDYVKHLKLCHKGEFEVTFKCRDCDYRGAGAYPRRAISKHYKEIHGSPTAGEGLGVAPPGQNNASSRSVLPANNNNNNNNNNNTPTTATATTTITTTTTTTTTTTSGGGQPPRAEGSAPRVVSVVTLGPKTVRVAGSSRKAIAPATQSILGFKKAQPVRAKSSTPPPTATTTAAITTTTTATITIRTSRGSSGAPTTAGSSRTSLPRTSPALGARTTPQASQPTPTGRPASSAGNRGAIPGRTPPLASMHEGETPRAGGTRRGGPKTPAAPRRSPVGRRAPVGPAVPRRITRAATAAMRLQGDGGREPSVLDVTAAKEESGARTTSQGPTCPRRRSIVTGATITSRRSSLGLTPPMRPSARPGDTPATTYAEVVADRPRPTPILTQGWAEGSRGVAPPTTPPQQTIIPGLVMLTTATTTTTMCGGSITSPGAAQRSPGAPQRDTTTPGQVASPASGTPPARIIIGPEQDFPPLATTSGRREERRAEKTSTPPTGDTAVEGTHATPERRQGGSPRGATPEEGPGPSSPRTPLTGGEEPPNTDWRVVGRERRVSSSPTRNRIVRGPGGQTPPSISCGRPTSSDGEIQSFNPFQLLNSDDDGGTSIGIETNGVGGSPPSPAAASRRGRGGARTGRASNGGERGGGRGVPRGRHARDPREPTEEQLALVREAEAAVTGEDLEQVAVKAAEYFRSRAAPRRGDNGEGGGNRARGRGGPAKQTGPVTQPGDSSGQERIRRATRLQRLYRTKRRRAVQEVVAGPSQVCGVDRERIRDHFTAVHRAYEGNVELPDVFPREPPTEDSNGALVAPLGRGEVSARLWKMKNSSPGPDGLSYLDLRGADRGCHVLTSLFNACLRLETVPDCWKDSTTVLLHKKGDRDCLGNWRPIAMGLTTARLFAAVVAGRLTSWAQINNRISPSQKGFLPYEGCVEHNFVLQSILDDAKKKGREVVVAWLDLANAFGSVPHAAIYDALRRQQVPNKIVSLIESMYSGSATRVRTVDGLTDPIPIRSGVKQGCPLSPMIFDLTFEAVIRPLCDLEVGYSLQGVKFNNLVFADDVALVAGTPEGMRVLLQIISEAAEAAGLKFNPSKCATLHLRGKAPSRAQPTRFALQNEVMRPLGEGESYGHLGTPTGFKVNQTPIEAINDVIKDVRAVDASLLAPWQKLDALSTFILPKLDFCLGGSHVEKGPLTIADKVIKRAAKGWLHLPQRASAELVFLPPREGGGGLLPLADLADALTIAHAFKLLTSRDGVVSALAWDSLRETVTRRLARPVNNNDIARYLSGDTTGDFERASGDTSSLWSRARNAARRQSKKLLIKWEWCVERGELSLGCRGVGNRSVRVTPSARNQVVGRLRAAIVSWYRESLLAKPDQGKAFEVFSRCRESNHFMRDGRNTRFADWRFVHRARLGVLPLNGTRRWAEGDRRCRRCGDVETIPHVLNHCGPHAAARQFRHDAIVERLVRANRTPGTISVNQTVEGAHELGRNLKPDIVIKNDRDKKLIIIDVAVPFENRGEAMEEARQRKITKYLPLANDFKERGYSVAVEPFVVGALGSWDRKNERTIGLLSINRSYAGMMRRMMVSETIKWSRDIYVEHVSGNRQY

SEQ ID NO: 15311 - protein, 1644 aa, Ancistrocerus nigricornis
MEGIRVIVLSFPYPAQLTCELCPAVNIGRVFRDGRQRGVFKGERRHEDYVKHLKLCHKGEFEVTFKCRDCDYRGVGAYPRRDITKHFKLVHGSPLAGEGLGVAPPGRSNASSRSVLPANNNNNNNNNNFTPTTATATTTITTTTTTTTTTTSGGGQPPRAGGSAPRVVSVVTLGPKAVRVAGSSRKAIAPATQSTLGFKKAQPVRAKSSTPPPITTAAATTTATTTTAATRTRTSRGSSGAPTTAGSSRTSLPRTSPALEARKTPQASQPPSTGRPASSAGSRGAIPGRTPPLANMHEGETPRAGRTRRGGPKTPAAPRRSSVGRRAPVGPAVPRRLTRAATAAMRLQGDGGREPSVLDVTSAKEESGARTTSQGPTCPRRKSIVTGATITQRRSSLGLTPQMRPSARPGDTPATTYAEVVADRPRPTPNSIQGWAEGGPGVAPRTPPLQIITPGLTTLTTATTTTTVCGGSITSPGVAQRSPGAPQRDETTPGQVASPASGTPPTRITVGPDDDFPPLATTSGRREERRAEKKRSTPPTRDTAVEGTHATPESQQGGSPRGAEREEGPGPSTSPRTPLTGGEEPLNTDWRVVGRGRRVSSSPTRNRIVRGPGGQTPPSISCGRPISSGGETQSFNLFQILNRDDDGGTPMGVETNGVGGGPPPPAAANRRGRGGARTGRVANGGERGRGRGAPRGRGARDPREPTEDQLALVREAEAAMTGEDLEQVAVKAAEYFRSRAASGRGDSGEGGGNRARGGGGPAKQARPETQPGDSSGQERIRRATRLQRLYRTKRRRAVQEVIAGPSQVCGVNRERVRDHFTAVHRAYEGDVELPDVFSRDPPTEDSNGALVAPLGRGEVSARLWRMKNSSPGPDGLSYLDLRGADRGCHILTSLFNACLRLEAVPDCWKDSTTVLIHKKGDRECLGNWRPIAMGLTTARLFAALVADRLTSWALINNKISPSQKGFLPYEGCVEHNFVLQSILTDARKKGKEVVVAWLDLANAFGSVPHAAIYGALRRQQVPNKITSLIKNMYNGASTRVRTVDGLTDPIPIRSGVKQGCPLSPMIFNLTFEAVIRRLCDLEVGYSLYGETFNNLVYADDVALVAGTPEGMRIILQIISEAAEAVGLKFNPSKCATLHLRGKGSSRAQPTRFVIQREEMRPLGEGESYGHLGTPTGFKVNQTPTEAISDLIKEVRAVDASLLAPWQKLDAISTFILPKLDFCLGGSHVEKGPLTIADKVIKRAAKGWLHLPQRASAELVFLPPREGGGGLLPLADLADALTIAHAFKLLTSRDGVVGALAWDSLRETVTRRLARPINNNDIARYLSGDITGDFERASGDTSSLWSRARNAARRQSKKLKIKWEWCIERGELSLGCRGVGNRSVRVTPSSRSQVVGRLRAAIASWYRESLLAKPDQGKAFEVFSRCQESNHFMRDGRNTRFADWRFVHRARLGVLPLNGTRRWAEGDKRCRRCGDMETIPHVLNHCGPHAAARQLRHDAIVERLVRANRTPGTISVNQHVEGVHELGNNLKPDIVIKNDRDKKLIIIDVAVPFENRGEALEEARNRKISKYLPLANDFKERGYEIAVEPFIVGALGSWDHRNERAISLLGINKRYSNMMKRLMVSDTIRWSRDIYVEHVSGVRQY

SEQ ID NO: 15312 - protein, 986 aa, Ancistrocerus nigricornis
MGRSPSPAAASRRGRGGARTGRVANGGERGGGRGAPRGRGARDPREPTEDQLALVREAEAAMTGEDLEQVAVKAAEYFRSRAAPRRGDNGEGGGNRARGGGGPAKQARPETQPGDSSGQERIRRATRLQRLYRTKRRRAVQEVVAGPSQVCGVNRERVRDHFTAVHRAYEGDVELPDVFSRDPPTEDSNGALVAPLGRGEVSARLWRMKNSSPGPDGLSYPDLRGADRGCHILTSLFNACLRLEAIPDCWKDSTTVLIHKKGDRECLGNWRPIAMGPTTARLFAALVADRLTSWALLNNRISPSQKGFLPYEGCVEHNFVLQSILTDARKKGKEVVVAWLDLANAFGSVPHAAIYGALRRQQVPNKITSLIKNMYNGATTRVRTVDGLTDPIPIRSGVKQGCPLSPMIFNLTFEAVIRRLCDLEVGYSLYGETFNNLVYADDVALIAGTPEGMRIILQMISEAAEAAGLKFNPSKCATFHLRGKGSSRAQPTRFVIQREEMRPLGEGESYGHLGTPTGFKVNQTPTEAISDLIKEVRAVDASLLAPWQKLDALSTFILPKLDFCLGGSHVEKGPLTIADKIIKRAAKGWLHLPQRASAELVFLPPREGGGGLLPLADLADALTIAHAFKLLTSRDGVVSALAWDSLRETVTRRLARPINNNDIARYLSGDITGDFERASGDTSSLWSRARNAARRQSIKLKIKWEWCVERGELSLGCRGVGNRSVRVTPSSRSQVVGRLRAAIASWYRESLLAKPDQGKAFEVFSRCRESNHFMRDGRNTRIADWRFVHRARLGVLPLNGTRRWAEGDKRCRRCGDMETIPHVLNHCGPHAAARQLRHDAIVERLVRANRTPGTISVNQHVEGVHELWNDLKPDIVIKNDRDKKLIIIDVAVPFENRGEALEEARDRKISKYLPLANDFKERGYEIAVEPFIVGALGSWDHRNERAISLLGINKRYSGMMKRLMVSDTIKWSRDIYVEHVSGVRQY

SEQ ID NO: 15313 - protein, 1305 aa, Ancistrocerus nigricornis
MRLQGDGGREPSILDVTAAKEESGVRTPSQGPTCPRRKSIVTGATITRRRSSLGLTPQMRSSARPGGTPATTYAEVVADRPRPTPNYIQGWAEGGQGVAPPSTPPLQIITPGLTTLTTATTTTTVCGGSITSPGVAQRSPGAPQGDRRTPGQVASPANGTPPARSIIGPERDFPPLATTSGRREERRAEKRTTSSTGDAVVEGTPTIHERQTGGSPRGAIHEEGPGPSSPRTPLTGEEEPLNTDWRVVGRGRRVSSSPQQNGTAHSPGGRVNPSIGCDRPDYTGGACTISNNIFNNLPRDGDGEVFELLEANSERIASPSPGAVAPPARATGRRVSGGPRPRRAANGGERRGGRGNPRGSRAHLLREPTEAQLAVVRAAEAAASAGDVERVTAKAVELFMSHVVARGRGGTGEGTGRARGARRGQQTGPGTQSGAPDGQERIRRAARLQRLYRTKRRRAVQEVVAGSPQNCGINRERIRDHFTAVHRAYEGDIELPDVFPREPPTEDSNDALVAPLGRAEVSARLWKMKNSSPGPDGLTYLDLRAADPGCHVLTALFNTCLRLEVVPGQWKESTTVLLFKKGDRDCLGNWRPIAMSDTTARLFSALVADRLAAWARLNNRISPSQKGFLPYEGCVEHNFILQEILTDAKKKNREVVVAWLDLANAFGSVPHAAIHEALRRQCIPLKIRGLINNMYQGVTTRVRTTDGLTEPVHILSGVRQGCPLSPIVFDLTIEAIIRPLCDLGVGYSLFGQTFNNFAYADDVALVAGSPEEMEALLEKVEDAAGRIGLKFNSSKCATLHLRGKGLQRIRPTRFSIQGGEMRPLGEGEPYDHLGTPTGYKINQTPLKAIDELIRDVRAVDSSLLAPWQKLDAVSTFLLPRLDFCLGGSHVEKGPLTLADKVIKRAAKGWLHLPQRASAELVVLPPREGGGGLLPLADLADVLTIAHAFKLLTSRDGVVSALAWSSLRATATRRLARPVSNKDIARYLSGDITGEFERASGDTSSVWSRARNAARRCGKFKIKWEWSEERQELALGCRGIGDRLIRVTPSARGQVVGRLRASVVSWYRERLLAKPDQGKAYEVFSRCPESNHFLRDGRNTRFADWRFIHRARLGVLPLNGTRRWAEGDKRCRRCGETETIPHVLNHCGPHSAARQYRHDAIVERLVRANRTPGTVHVNQCVEGVHQLWSGLKPDIVIRNDRDRKVTIIDVAVPFENRGEAIEEARIRKIDKYLPLANDLSSQGYEVAVEPFIVGALGAWDQNNQRAISLLGINKNYAGMMKRLMVSETIKWSRDIYVEHVSGVRQY

SEQ ID NO: 15314 - protein, 1654 aa, Ancistrocerus nigricornis
MEGIRAIVLSFPYPAQLTCELCPAVNIGRVFRDGRQRGVFKGERRHEDYVKHLKLCHKGEFEVTFKCRDCDYRGVGAYPRRDITKHFKLVHGSPLAGEGLGVAPPGQRNSRSVLPANNSTNNSINPITATATTTTITTTTTTTTTTTTASTSGGVQPPRAEGPAPRVVSVVTLGPKTVKVAGSNRKAIAPTAQSILSFKKALPVRGKSSTPPQTITTTATTTTATTTAAIKTRTSRGSSGAPTTTGSQRTSLPRTSPALGGTRTTPQASQPSSIGRPATSTGSRGAIPGRTPPSANLHEGETPRAGGTRRGGPKTPAAPRRSSVGRRAPVGPAVPRRLTRAATAAMRLQGDGGREPSILDVTAAKEESGVRTPSQGPTCPRRRSIVTGARIMTRRSSLGLTPPMRSSGRPGGTPATTYAEVVANQHGCTPNITQGCIGGDGGLAIPPTPPQQITTPGMATLTTATTTTTMCGGSIISPRAAQRSPGAPHACPTPSQVASPRISGTPPTDIATGSGQDFPPLAATPGRREEWRAEKRSTPATTGDTVVEGTPTEPERQPGGSPGGATTQNGPGTPPRIPVEGEETPNTDWRVVGRGRRVSSSPQQNSAAHSPGGRVNPSIGCGRSDYAGGACIISNNIFNNLPRDGDGEVFELDQNHRVEASIERIASPSPGAVAPPARATGRRVSGGPRPRRAADGGERRGGRGNPRGSRAHLLREPTGAQLAVVRAADAAASAGDLERVTARAVELFMSHVAARGRGGTGEGTGRARGARPGQQTGPGTQSGAPDGQERIRRAARLQRLYRTKRRRAVQEVIAGSPQNCGINRERIRDHFTAVHRAYVGDTELPDVFPREPPTEDTSDALVAPLSRAEVSARLWKMKNSSPGPDGLTYLDLRVADPGCHVLTALFNACLRLEAVPGQWKESTTVLLHKKGDRDCLGNWRPIAMSDTTARLFSALVADRLTVWARQNNRISASQKGFLPYEGCVEHNFVLQEILTDSKKKNKEVVVAWLDLANAFGSVPHAAIHDALRRQSVPQKIRSLIGNMYRGVTTRVRTADGLTEPIHILSGVRQGCPLSPIVFDLTFEAIIRPLYGLGVGYSLFGHIFNNLSYADDIALVAGSPEGMRALLEKIEESAGRIGLKFNSKKCATLHLRGRGPQRARPTRFSIQGEEMRPLGEGEPYDHLGTPTGYKVKQTPLESIDELIKDVRAVDSSLLAPWQKLDAVSTFLLPRLDFCLGGSHVEKGPLALADKVIKRAAKGWLHLPQRASAELVVLPPREGGGGLLPLADLADVLTIAHAFKLLTSRDGVVSSLAWDSLRASATRRLARPANNKDIARYLSGDITGEFERASGDTSSVWSRARNATRRCEKFKIKWEWCEERHELALGCRGIGDRLIRVTPSARGQVVGRLRASVVSWYRERLLAKPDQGKAYEVFSRCPESNHFLRDGRNTRFADWRFIHRARLGVLPLNGTRRWAEGDRRCRRCGETETIPHVLNHCGPHSAARQYRHDAIVERLVGANRTPGTISVNQCVEGVHQLWSGLKPDIVIRNDRDRKVTIIDVAVPFENRTTAIEEARARKINKYSPLANDLANQGYEVAVEPFIVGALGSWDRNNQRAISLLGINKNYANMMKRLMVSDTIKWSRDIYVEHVSGVRQY

SEQ ID NO: 15315 - protein, 1650 aa, Ancistrocerus nigricornis
MEGIRVIVLSFPYPAQLTCELCPAVNIGRVFRDGRQRGVFKGERRHEDYVKHLKLCHKGEFEVTFKCRDCDYRGVGAYPRRDIAKHFKLVHGSPLAGEGLGVAPPGQRNSRSVLPANNSTNNSINLITATATTTTITTTTTTTTTTTTASTSGGVQPPRAEGPAPRVVSVVTLGPKTVKVAGSNRKAIAPTAQPILSFKKALPVRGKSSTPPQTIKTTATTTTATTTAAIRTRTSRGSSGAPTTTGSQRTSLPRTSPALGGTRTTPQASQPPSIGRPATSTGSRGAIPGRTPPSANLHEGETPRAGGTRRGGPKTPAAPRRSSVGRRAPVGPAVPRRLTRAATAAMRLQGDGGREPSILDVTAAKEESGARTTSQGPTCPRRKSIVTGATITRRRSSLGLTPQMRSSARPGGTPATTYAEVVADRPRPTPNYIQGWAEGGQGVAPPSTPPLQIITPGLTTLTTATTTTTVCGGSITSPGVAQRSPGAPQGDRRTPGQVASPANGTPPARNIIGPERDFPPLATTSGRREERRAEKRTTSSTGDAVVEGTPTIHERQTGGSPRGAMQEEGPGPSSPRTPLTGGEEPLNTDWRVVGRGRRVSSFPQQNSTAHSPGGRVNPSIGCGRPDYTGGASIISNNIFNNLPRDGDGEAFEPLEANIERIASPSPGAVAPPARATGRRVSGGPRPRRAADGGERRGGRGNPRGSRAHLLREPTEAQLAVVRAAEAAASAGDMERATAKAVELFMSHVAARGRGGTGEGTCRARGARPAQQTGPGTQSGAPDGQERIRRAARLQRLYRTKRRRAVQEVIAGSPQNCGINRERIRDHFTAVHRAYVGDTELPDVFPREPPTEDTSDALVAPLSRAEVSARLWKMKNSSPGPDGLTYLDLRVADPGCHVLTALFNACLRLEAVPGQWKESTTVLLHKKGDRDCLGNWRPIAMSDTTARLFSALVADRLTVWARQNNRISASQKGFLPYEGCVEHNFVLQEILTDSKKKNKEVVVAWLDLANAFGSVPHAAIHDALRRQSVPQKIRSLIGNMYRGVTTRVRTADGLTEPIHILSGVRQGCPLSPIVFDLTFEAIIRPLYGLGVGYSLFGHIFNNLSYADDIALVAGSPEGMRALLEKIEESAGRIGLKFNSKKCATLHLRGRGPQRARPTRFSIQGEEMRPLGEGEPYDHLGTPTGYKVKQTPLESIDELIKDVRAVDSSLLAPWQKLDAVSTFLLPRLDFCLGGSHVEKGPLALADKVIKRAAKGWLHLPQRASAELIVLPPREGGGGLLPLADLADVLTIAHAFKLLTSRDGVVSSLAWDSLRASATRRLARPANNKDIARYLSGDITGEFERASGDTSSVWSRARNATRRCEKFKIKWEWCEERHELALGCRGIGDRLIRVTPSARGQVVGRLRASVVSWYRERLLAKPDQGKAYEVFSRCPESNHFLRDGRNTRFADWRFIHRARLGVLPLNGTRRWAEGDRRCRRCGETETIPHVLNHCGPHSAARQYRHDAIVERLVGANRTPGTISVNQCVEGVHQLWSGLKPDIVIRNDRDRKVTIIDVAVPFENRTTAIEEARARKINKYSPLANDLANQGYEVAVEPFIVGALGSWDRNNQRAISLLGINKNYANMMKRLMVSDTIKWSRDIYVEHVSGVRQY

SEQ ID NO: 15316 - protein, 778 aa, Ancistrocerus nigricornis
MKNSSPGPDGLSYPDLRAADPGCHILTSIFNACLRLETVPACWKDSNTVLLYKKGDRECLDNWRPIAMGDTTARLFAALVAGRLTAWAQLNKRISPSQKGFLPYEGCVEHNFVLQEILTDAKKKGKEVVVAWLDLANAFGSVPHAAIHEALRRHGVPGKITSIIKSMYLGAATRVRTTDGLTDPIFMRSGVRQGCPLSPIVFDLTFEAVISPLCDLEVGYSLHGRKFNNLVYADDVATVAGTPEGMRVLLQNIGEAARAVGLKFNPNKCATLHLRGKGTHRVQPTRFAIQGEEMRPLGEGEPYDHLGTPTGYKVKQTPLESIDELIKDVRAVDSSLLAPWQKLDAVSTFLLPRLDFCLGGSHVEKGPLALADKVIKRAAKGWLHLPQRASAELVVLPPREGGGGLLPLADLADVLTIAHAFKLLTSRDGVVSSLAWDSLRASATRRLARPANNRDIARYLSGDITGEFERASGDTSSVWSRARNATRRCEKFKIKWEWCEERHELALGCRGIGGRLIRVTPSARGQVVGRLRASVVSWYRERLLAKPDQGKAYEVFSRCPESNHFLRDGRNTRFADWRFIHRARLGVLPLNGTRRWAGGDKRCRRCGETETIPHVLNHCGPHSAARQYRHDAIVERLVGANRTPGTISVNQCVEGVHQLWSGLKPDIVIRNDRDRKITIIDVAVPFENRITAIEEARARKINKYSPLANDLANQGYEVAVEPFIVGALGSWDRDNKYAISLLGINKNYANMMKRLMVSDTIKWSRDIYVEHVSGVRQY

SEQ ID NO: 15317 - protein, 1650 aa, Ancistrocerus nigricornis
MEGIRVIVLSFPYPAQLTCELCPAVNIGRVFRDGRQRGVFKGERRHEDYVKHLKLCHKGEFEVTFKCRDCDYRGVGAYPRRDIAKHFKLVHGSPLAGEGLGVAPPGQRNSRSVLPANNSTNNSINLITATATTTTITTTTTTTTTTTTASTSGGVQPPRAEGPAPRVVSVVTLGPKTVKVAGSNRKAIAPTAQPILSFKKALPVRGKSSTPPQTITTTATTTTATTTAAIRTRTSRGSSGAPTTTGSQRTSLPRTSPALGGTRTTPQASQPPSIGRPATSTGSRGAIPGRTPPSANLHEGETPRAGGTRRGGPKTPAAPRRSSVGRRAPVGPAVPRRLTRAATAAMRLQGDGGREPSILDVTAAKEESGARATSQGPTCPRRKSIVTGATITRRRSSLGLTPQMRSSARPGGTPATTYAEVVADRPRPTPNYIQGWAEGGQGVAPPSTPPLQIITPGLTTLTTATTTTTVCGGSITSPGVAQRSPGAPQGDRRTPGQVASPANGTPPARNIIGPERDFPPLATTSGRREERRAEKRTTSSTGDAVVEGTPTIHERQTGGSPRGAMQEEGPGPSSPRTPLTGGEEPLNTDWRVVGRGRRVSSFPQQNSTAHSPGGRVNPSIGCGRPDYTGGASIISNNIFNNLPRDGDGEAFEPLEANIERIASPSPGAVAPPARATGRRVSGGPRPRRAADGGERRGGRGNPRGSRAHLLREPTEAQLAVVRAAEAAASAGDMERATAKAVELFMSHVAARGRGGTGEGTCRARGARPGQQTGPGTQSGAPDGQERIRRAARLQRLYRTKRRRAVQEVIAGSPQNCGINRERIRDHFTAVHRAYVGDTELPDVFPREPPTEDTSDALVAPLSRAEVSARLWKMKNSSPGPDGLTYLDLRAADPGCHVLTALFNACLRLEAVPGQWKESTTVLLHKKGDRDCLGNWRPIAMSDATARLFSALVADRLTAWARQNNRISASQKGFLPYEGCVEHNFVLQEILTDSKKKNKEVVVAWLDLANAFGSVPHAAIHDALRRQSVPQKIRSLIGNMYRGVTTRVRTADGLTEPIHILSGVRQGCPLSPIVFDLTFEAIIRPLYGLGVGYSLFGHIFNNLSYADDIALVAGSPEGMRALLEKIEDSAGRIGLKFNSKKCATLHLRGRGPQRARPTRFSIQGEEMRPLGEGEPYDHLGTPTGYKVKQTPLESIDELIKDVRAVDSSLLAPWQKLDAVSTFLLPRLDFCLGGSHVEKGPLALADKVIKRAAKGWLHLPQRASAELIVLPPREGGGGLLPLADLADVLTIARAFKLLTSRDGVVSSLAWDSLRASATRRLARPANNRDIARYLSGDITGEFERASGDTSSVWSRARNATRRCEKFKIKWEWCEERHELALGCRGIGDRLIRVTPSARGQVVGRLRASVVSWYRERLLAKPDQGKAYEVFSRCPESNHFLRDGRNTRFADWRFIHRARLGVLPLNGTRRWAEGDRRCRRCGETETIPHVLNHCGPHSAARQYRHDAIVERLVGANRTPGTISVNQCVEGVHQLWSGLKPDIVIRNDRDRKVTIIDVAVPFENRTTAIEEARARKINKYSPLANDLANQGYEVAVEPFIVGALGSWDRNNQRAISLLGINKNYANMMKRLMVSDTIKWSRDIYVEHVSGVRQY

SEQ ID NO: 15318 - protein, 1304 aa, Ancistrocerus nigricornis
MRLQGDGGREPSILDVIAAKEESGVRTPSQGPTCPRRKSIVTGATITQRRSSLGLTPQMRSSARPGGTPATTYAEVVADRPRPTPNYIQGWAEGGQGVAPRTPPQQIITPGLVTLTTATTTTTVCGGSITSPGVAQRSPGAPQGDRRTPGQVASPANGTPPTRSIIGPENDFPPLATTSGRREERRAEKTTTSSTGDAVVEGTPIIHERQTGGSPRGAIHEEGPGPSSPRTPLTGGEEPLNTDWRVVGRGRRVSSSPQQNSTAHSPGGRVNSSIGCDRPDYTGGACIISNNIFNNLPRDGDGEVFELLEANSERIASPSPGAVAPPARATGRRVSGGPRPRRAADGGERRGGRGNPRGSRAHLLREPTEAQLAVVRAAEAAASAGDVERVTAKAVELFMSHVAARGRGGTGEGTGRARGARPGQQTGPGTQSGAPDGQERIRRAARLQRLYRTKRRRAVQEVVAGSPQNCGINRERIRDHFTAVHRAYEGDIELPDVFPREPPTEDSNDALVAPLSRAEVSARLWKMKNSSPGPDGLTYLDLRAADPGCHVLTALFNTCLRLEVVPGQWKESTTVLLFKKGDRDCLGNWRPIAMSDTTARLFSALVADRLAAWARLNNRISPSQKGFLPYEGCVEHNFILQEILTDAKKKNREVVVAWLDLANAFGSVPHAAIHEALRRQCIPLKIRGLINNMYQGVTTRVRTTDGLTEPVHILSGVRQGCPLSPIVFDLTIEAIIRPLCDLGVGYSLFGQTFNNFAYADDVALVAGSPEEMGALLEKVEDAAGRIGLKFNSSKCATLHLRGKGPQRIRPTRFSIQGGEMRPLGEGEPYDHLGTPTGYKINQTPLKAIDELIRDVRAVDSSLLAPWQKLDAVSTFLLPRLDFCLGGSHVEKGPLALADKVIKRAAKGWLHLPQRASAELVFLPPREGGGGLLPLADLADVLTIAHAFKLLTSRDGVVSALAWNSLRATATRRLARPVSNKDIARYLSGDITGEFERASGDTSSVWSRARNAARRCGKFKIKWEWCEEREELALGCRGIGDRLIRVTPSARGQVVGRLRASVVSWYRERLLAKPDQGKAYEVFSRCPESNHFLRDGRNTRFADWRFIHRARLGVLPLNGTRRWAEGDKRCRRCGETETIPHVLNHCGPHSAARQYRHDAIVERLVRANRTPGTVYVNQSVEGVHQLWSGLKPDIVIRNDRDRKVTIIDVAVPFENRGEAIEEARIRKIDKYLPLADDLSSQGYEVAVEPFIVGALGAWDQNNRRAISLLGINKNYAGMMKRLMVSETIKWSRDIYVEHVSGVRQY

SEQ ID NO: 15319 - protein, 1650 aa, Ancistrocerus nigricornis
MEGIRVIVLSFPYPAQLTCELCPAVNIGRVFRDGRQRGVFKGERRHEDYVKHLKLCHKGEFEVLFKCRDCDYRGVGAYPRRDIGKHFKEVHGSPLAGEGLGAAPPGQRNSRSVLPANNSTNNNITPTTATATTTTITTTTTTTTTTTTASTSGGVQPPRAEGPAPRVVSVVTLGPKTVKVAGSNRKAIAPTAQPILSFKKALPVRGKSSTPPQTTTVTAATTTAATTTAARTRTSRGSSGAPSTTGSQRTSLPRTSPALGGMRTTPQASQPPSIGRPATSTGSRGAIPGRTPPSANLHEGETPRAGGTRRGGPKTPAAPRRSSVGRRAPVGPAVPRRLTRAATAAMRLQGDGGREPSILDVTAAKEESGARTTSQGPTCPRRKSIVTGATITRRRSSLGLTPQMRSSARPGGTPATTYAEVVADRPRPTPNYIQGWAEGGQGVAPPSTPPLQIITPGLTTLTTATTTTTVCGGSITSPGVAQRSPGAPQGDRRTPGQVASPANGTPPARNIIGPERDFPPLATTSGRREERRAEKRTTSSTGDAVVEGTPTIHERQTGGSPRGAIHEEGPGPSSPRTPLTGGEEPLNTDWRVVGRGRRVSSSPQQNSTAHSPGGRVNSSIGCDRPDYTGGACIISNNIFNNLPRDGDGEVFELLEANSERIASPSPGAVAPPARATGRRVSGGPRPRRAADGGERRGGRGNPRGSRAHLLREPTEAQLAVVRAAEAAASAGDVERVTAKAVELFMSHVAARGRGGTGEGTGRARGARPAQQTGPGTQSGAPDGQERIRRAARLQRLYRTKRRRAVQEVVAGSPQNCGINRERIRDHFTAVHRAYEGDIELPDVFPREPPTEDSNDALVAPLSRAEVSARLWKMKNSSPGPDGLTYLDLRAADPGCHVLTALFNTCLRLEVVPGQWKESTTVLLFKKGDRDCLGNWRPIAMSDTTARLFSALVADRLAAWARLNNRISPSQKGFLPYEGCVEHNFILQEILTDAKKKNREVVVAWLDLANAFGSVPHAAIHEALRRQCIPLKIRGLINNMYQGVTTRVRTTDGLTEPVHILSGVRQGCPLSPIVFDLTIEAIIRPLCDLGVGYSLFGQTFNNFAYADDVALVAGSPEEMGALLEKVEDAAGRIGLKFNSSKCATLHLRGKGPQRIRPTRFSIQGGEMRPLGEGEPYDHLGTPTGYKINQTPLKAIDELIRDVRAVDSSLLAPWQKLDAVSTFLLPRLDFCLGGSHVEKGPLALADKVIKRAAKGWLHLPQRASAELVFLPPREGGGGLLPLADLADVLTIAHAFKLLTSRDGVVSALAWNSLRATATRRLARPVNNKDIARYLSGDITGEFERASGDTSSVWSRARNAARRCGKFKIKWEWCEEREELALGCRGIGDRLIRVTPSARGQVVGRLRASVVSWYREGLLAKPDQGKAYEVFSRCPESNHFLRDGRNTRFADWRFVHRARLGVLPLNGTRRWAEGDRRCRRCGETETIPHVLNHCGPHSAARQYRHDAIVERLVRANRTPGTVYVNQSVEGVHQLWSGLKPDIVIRNDRDRKVTIIDVAVPFENRGEAIEEARIRKIDKYLPLADDLSSQGYEVAVEPFIVGALGAWDQNNRRAISLLGINKNYAGMMKRLMVSETIKWSRDIYVEHVSGVRQY

SEQ ID NO: 15320 - protein, 1552 aa, Ancistrocerus nigricornis
MGLLSLAKASASPPPGQNNASSRSVLPANNSNNNNNNNITPTTATATTTITTTTTTTTTTTSGGGQLPRAEGSAPRVVSVVTLGPKTVRVAGSSRKAIAPATQSTLGFKKAQPVRAKSSTPPPITTAAATTTATTTTAATRTRTSRGSSGAPTTAGSSRTSLPRTSPALGARTTPQSSQPTPTGRPASSAGSRGAIPGRTPPSANMQEGETPRAGATRRGGPKTPAAPRRSSVGRRAPVGPAVPRRITRAATAAMRLQGDGGREPSILDVTSAKEESGARTTSQGPTCPRRRSIVTGARIASRRSSLGLTPPMRPSARPGDTPATTYAEVVADRPRPTPNSIQGWAEGGRGVTPPITPPQQLIIPGLMTLTTATTTTTVCGGSITSPGVAQRSPGAPQRNETTPGRVASLANGTPPARSVGPEMDFPPLATTSGRREERRAEKRSTPSIGDTAVEGTHATLERQQGGSPRGATPEEGPGPSSPRTPLTGGEEPLNTDWRVVGRGRRVSSSPTRNRIVRGPGGQTPPSISCGRPISSGGEIQSFNPFQLLNSDDDGGTSIGIETNGVGGSPPSPAAASRRGRGGARTGRASNGGERGGGRGVPRGRHARDPREPTEEQLALVREAEAAVTGEDLEQVAVKAAEYFGSRAAPRRGDNGEGGGNRARGRGGPAKQTGPVTQPGDSSGQERIRRATRLQRLYRTKRRRAVQEVVAGPSQVCGVDRERIRDHFTAVHRAYEGNVELPDVFPREPPTEDSNGALVAPLGRGEVSARLWKMKNSSPGPDGLSYLDLRGADRGCHVLTSLFNACLRLETVPDCWKDSTTVLLHKKGDRDCLGNWRPIAMGLTTARLFAAVVAGRLTSWAQINNRISPSQKGFLPYEGCVEHNFVLQSILDDAKKKGREVVVAWLDLANAFGSVPHAAIYDALRRQQVPNRIVSLIESMYSGSATRVRTVDGLTDPIPIRSGVKQGCPLSPMIFDLTFEAVIRPLCDLEVGYSLQGVKFNNLVFADDVALVAGTPEGMRVLLQIISEAAEAVGLKFNPSKCATLHLRGKGPSRAQPTRFALQNEVMRPLGEGESYGHLGTPTGFKVNQTPIEAINDVIKDVRAVDASLLAPWQKLDALSTFILPKLDFCLGGSHVEKGPLTIADKVIKRAAKGWLHLPQRASAELVFLPPREGGGGLLPLADLADALTIAHAFKLLTSRDGVVGALAWDSLRETVTRRLARPVNNNDIARYLSGDTTGDFERASGDTSSLWSRARNAARRQSKKLKVKWEWCEERGELSLGCRVVGNRSVRVTPSSRSQVVGRLRAAIASWYRESLLAKPDQGKAFEVFSRCRESNHFMRDGRNTRFADWRFVHRARLGVLPLNGTRRWAEGDRRCRRCGDVETIPHVLNHCGPHAAARQLRHDAIVERLVRANRTPGTITVNQTVEGAHELGRNLKPDIVIKNDRDKKLIIIDVAVPFENRGEAMEEARQRKITKYLPLANDFKERGYSVAVEPFVVGALGSWDRKNERTIGLLSINRSYAGMMRRMMVSETIKWSRDIYVEHVSGNRQY

SEQ ID NO: 15321 - protein, 1021 aa, Dreissena rostriformis
MDEPTRTEHDLGSQGSRTDDRLERIKWPAMNDTQWKEFDEDVDGILEQVLLGTVERKLRSMSRLVYAVGKERFGVTPSERKQTTVTKNRRQIEIEKLRKDLRNLRNQYRQASELEKIGLQELRDHTRSRLQDLRKAERIRKARREKARQRSRFLSNPYGFSKEVLEEKKAGQLNCSKEEAEEHLKNTHSDQARHMQMDGHERIAPVPIPTVAFTEGEPTFKEVQEITKKARSKSAPGPNGIPYKVYKSCPKLLRRLWKLLKVVWRKGDVPVEWQRAEGIFVPKEEVSKDIGQFRTISLLNVEGKIFMSVVARRLTTFMTSNGYIDTSAQKGGVPGFSGCIEHTCAISQLIREAKINKTDLTVVWLDLANAYGTVPHQLIEFALKHHHVPEHIQSIIRSYYRNINMRFTTKNFTTSWIQLQKGIVTGCTVSVVLFIAAMNLIIKAGDRESRGPKTETDIRLPPQRGFMDDLTITTESHIQARWILSALEDVVSWARMAFKPRKSRFLILRRGKIWQKTTLRVQGEDIPSLIDSPIKCLGKWFDTTLGDSRNNTERIRQQLRNGLAKIEGTGLPGKFKAWLFQHGLLPRLLWPLMLYEIPTSMVDSLESMINKSLRRWFGLPSCMTSIGLYNRTGMLQLPLSSIVEEYKVSKARLVLTLRDSSDMSIRNAGIEVRTGRRWSASNAVEQAESRLRHQDIVGTSCQGRQGLGLNTRQPWSSATTVQRRELVQSEIRKEEEETRKVKAVQMGSQGSWTKWQTTERKLSWTDIWKYQFFQLQFLIRAVYDVLPTPANLQRWGLIEAAECTLCGGRATLDHILSSCKEALAQGRYRWRHDQVLREVADTLERHKKKARVHAGAKHINFVPAGTVTKGTKGGHPSILDGTNDWELQADLRKQLQFPDIVHTTLRPDIVMISEKTKKIILVELTVPWEERCTQAHERKKAKYEDLVQECREAGWRAWNYPIEVGCRGFPAPSLGKMFQDVGIVGQARKVAIKKASQAAERSSSWLWLRRNASSWKPSTNG

SEQ ID NO: 15322 - protein, 1052 aa, Sinonovacula constricta
MGCRPDREQSQCTDLPDGLSGETQENHSQEEHHSAEDLHDDDQEQADESPVSGTGLGSQSSRAEPDSSRLEHVKWPAMNDTQWRDFDTDVDKILEQVSAGTVVRKLESMTRLIYAVGKERFGLRTSGGKKAAGSKKNRRQLEIERLRRDLRNLRKQYVKASELEKIGLQGLRDHLRSRLKELRKAERIRKARREKTRKRARFLSNPYGFVKETLEQKRTGQLLCSREEVEEHLRNTHSDQSRHIEMEGHERIADVPMPEVAFIEGEPTLKEVQDIVKKARSKSAPGPNGIPYKVYKSCPKLLRRLWKLLKVVWRKGDVPTEWQRAEGIFVPKEEDSKDIGQFRTISLLNAEGKIFMSVLARRLTTYMTSNGYIDTSAQKGGIPGFSGCIEHISAISQLIREAKINKQDLTVVWLDLANAYGTVPHQLIDFALKHHHVPEHIQNIVRSYYSDINMRFTTRNFTTSWIQLEKGIVTGCTVSVILFIAAMNLIMKAGDRETRGPKTKSDIRLPPNRGFMDDLTITTESHIQARWILNALEDVVTWARMSFKPRKSRVLILRKGRVWPNTTLRVQGEEIPSLINNPVKCLGKWFDTTLSDTNNTERTKQQLQDGLKKIDGTGLPGKFKAWLFQHGLLPRLLWPLTLYEVPTSTVEGLETMVNRYLRRWFGLPPSMTSIGLYNKTRMLQLPLSSIVEEYKVSKARLVLTLRDSSDMSISRAGIEVRTGRRWSASSAVEKAESRLKHQDIVGISCSGRQGLGNNTRPLWNSATTGERRALVQSEIRREEEESRKVKAVQMGNQGSWTKWQTSERKLNWTDIWKYQFFQLQFLIRAVYDVLPTPANLQRWGLAEAAECALCGSRATLDHILSSCKEALSQGRYRWRHDQVLREIADTLERQKKARVHVKPRHINFIQAGARIEGNKGGQPCSILDGSNDWVLQADIGKQLQFPDIVHTTLRPDIVMSSTKAKKIVIVELTVPWEERCTQAYERKKAKYEDLIQECRQAGWKAWNYPVEVGCRGFPAPSLGKMFQDVGIVGQARKLAIKKASQSAEKSSS

SEQ ID NO: 15323 - protein, 1148 aa, Sinonovacula constricta
MTSSQGFTHTTATSTTREEYPQGLPRGGAEERSTRTDNLVTTRLVQRTLTGEALQETARCVCGKVCKNAKGLKIHQSRMGCRPDREQSQCTDLPDGLSGETQENHSQEEHHSAEDLHDDDQEQADESPVSGTGLGSQSSRAEPDSSRLEHVKWPAMNDTQWRDFDTDVDKILEQVSAGTVVRKLESMTRLIYAVGKERFGLRTSGGKKAAGSKKNRRQLEIERLRRDLRNLRKQYVKASELEKIGLQGLRDHLRSRLKELRKAERIRKARREKTRKRARFLSNPYGFVKETLEQKRTGQLLCSREEVEEHLRNTHSDQSRHVEMEGHERIADVPMPEVAFIEGEPTLKEVQDIVKKARSKSAPGPNGIPYKVYKSCPKLLRRLWKLLKVVWRKGDVPTEWQRAEGIFVPKEEDSKDIGQFRTISLLNAEGKIFMSVLARRLTTYMTSNGYIDTSAQKGGIPGFSGCIEHTSAISQLIREAKINKQDLTVVWLDLANAYGTVPHQLIDFALKHHHVPEHIQNIVRSYYSDINMRFTTRNFTTSWIQLEKGIVTGCTVSVILFIAAMNLIMKAGDRETRGPKTKSDIRLPPNRGFMDDLTITTESHIQARWILNALEDVVTWARMSFKPRKSRVLILRKGRVWPNTTLRVQGEEIPSLINNPVKCLGKWFDTTLSDTNNTERTNQQLQDGLKKIDGTGLPGKFKAWLFQHGLLPRLLWPLTLYEVPTSTVEGLETMVNRYLRRWFGLPPSMTSIGLYNKTGMLQLPLSSIVEEYKVSKARLVLTLRDSSDMSISRAGIEVRTGRRWSASSAVEKAESRLKHQDIVGISCSGRQGLGNNTRPLWNSATTGERRALVQSEIRREEEESRKVKAVQMGNQGSWTKWQTSERKLNWTDIWKYQFFQLQFLIRAVYDVLPTPANLQRWGLAEAAECALCGSRATLDHILSSCKEALSQGRYRWRHDQVLREIADTLERQKKKARVHVKPRHINFIQAGARIEGNKGGQPCSILDGSNDWVLQADIGKQLQFPDIVHTTLRPDIVMSSTKAKKIVIVELTVPWEERCTQAYERKKAKYEDLIQECRQAGWKAWNYPVEVGCRGFPAPSLGKMFQDVGIVGQARKLAIKKASQSAEKSSSWLWLRRNASSWKPSTNG

SEQ ID NO: 15324 - protein, 955 aa, Carposina sasakii
MQNVVQHAASVASAENLVQCDKCSQPRFFNGLRGLKIHIGKTHKNPVSPTTSSAPIINLLDPQNSNLDQPFWKQLSVLKNNTPLVKRIPRGARIAVAQKLAADIRAATTQNTKRTWEHLLTFAFRILHVRKHSDARLSLTSHIKQNCICDSLPPDFQTKPHTVTNTSKIIEAKLSEGDIKGAARLLFSTDAIAPDNPETLTSLRCKHPPPAASLSLPDGPNPDDPVLMVTADAIRRAVFSFPGGSAGGLDGISPQHLKDLIGGGCGEAGEALTKELTSLATLMLSGKVNSDIIATLYGANLCALRKKDGGIRPIAVGATYRRLVAKICCRGTADTLAQYFNPHQLGFGSKGGCEAAVHALRTHLHRQDSGVLLKVDIKNAFNSVDRGALLTQVQNKVPSIFKFIWQCYSAPTNLLYKDHLISSAVGCQQGDPLGPAIFSLAIHPIIKRLQSKLNVWYLDDGTLGGEAVSILDDLKLLMQELRLIGLELNTEKCELYVPASNLSRDQIIHSFHQVAPNLSVLEGSSLRLLGSPILDESLPSYVNEKIQNFSEVSDRLFKINTHMAYFIIRHCLFAPKFMYSLRCSQIWKFPDLLSLLDNITKQTLSSIININFDDRSWAQASLPIRFGGMGVRKISSVALPAFLASAHGTHSLVMKILNDYSTTTYYMAEAKNAWKLACPNAVEPSFPSSQRLWDEPLCKLVRKNLLDTPTSSAERARLLALGEWESGLWLQALPSANVGTLLDRTTFRIAACLRLGAPCNVPHRCRCGDAVDPLGHHGLSCTKSAGRIPRHSTLNDIIRRALSTAGAPSVLEPLGLVRDDGKRPDGMTLVPWRMGRCLVWDATCVDTLAVSHLPGTSIRTGSAAASAENLKRRKYANLSGDYIFEPFGVETMGPWGPGAHALFRGISKRLVEASHDRRAGAYFGQRVSLAIQRGNAASLLGTLPSVEDLQAVFYL

SEQ ID NO: 15325 - protein, 956 aa, Carposina sasakii
MQKAAQSVPIASVENWIQCDKCSQPRFFKGLRGLKIHIGKNHKEVTPTSPTPSAPINSSDQPNPNANQPFWKYLSTLKNSTPVLKRIPRGARISVAQKLSSEIRAATTYNTKEAWEHLLTFAFRILHVQQKKSDNKSSLTSHIKENCSSDTPLPRYNAKSHRAPINTSKVIESKLSEGDIKGAARLLFSSDAIAPDTPETLTSLLDKHPSPAASPNLPDSPNPTDAALVVSADTIRQAIFSFPGGSAGGLDGISPQHLKDLISGGCGEAGEALTKELTAMANLMLSGKVCADVVTTLYGANLCALRKRDGGIRPIAVGTTFRRLVAKMCCRSAADDLAKHFQPHQLGFGSRGGCEAAVHSLRAFLCDQGDGVLLKVDIKNAFNTVDRGALLTQIKFKTPSIYNFLWQCYSAPTNLLYKNNLLLSAVGCQQGDPLGPAIFSLAIHPIIEKIKSKFNVWYLDDGTLGGEASTVLSDLKLLMQELQLIGLELNTAKCELYVPASNPVRSTIISDFNMLAPNLTIVDRSSLRLLGSPIMDESLPSFVEDKIQNFADVSDRLFKINTHMAYFIIRHCLFAPKFMYTLRCCQLWKFPDLLSILDTTIKNTLSSIINISLNNRSWAQASLPIRFGGLGVRKISSVSLPAFLSSAHSVQTLVSKILKQPQPEIPFMAEAKNAWELACPNGVEPSNPCSQRLWDEPLCKLVRNNLLETSASSAERARLLALGEWESGLWLQALPSPNIGTLLDRTTFRIATSLRLGAPCNVLHRCRCGDVVDQQGHHGLSCMRSAGRISRHANLNDVIRRALSTAGAPSVLEPVGLVRDDGKRPDGMTLVPWKMGRSLVWDATCVDTLAASHLPGTTIKSGSAANAAENLKRRKYANLSGDYLFEPFGVETMGPWGPGAHNLFKDISKRLVEASHDQRAGSFFGQRVSLAIQRGNAASLLGTLPAVEDLQGVFYL

SEQ ID NO: 15326 - protein, 956 aa, Carposina sasakii
MQKAAQSVPIASVENWIQCDKCSQPRFFKGLRGLKIHIGKNHKEVTPTSPTPSAPINSSDQPNPNANQPFWKYLSTLKNSTPVLKRIPRGARISVAQKLSSEIRAATTYNTKEAWEHLLTFAFRILHVQQKNSDNKSSLTSHIKENCSSDTPLPRYNAKPHRAPINTSKVIESKLSEGDIKGAARLLFSSDAIAPDTPETLTNLLDKHPSPAASPNLPDSPNPTDAALVVSADTIRQAIFSFPGGSAGGLDGISPQHLKDLISGGCGEAGEALTKELTAMANLMLSGKVCADVVTTLYGANLCALRKRDGGIRPIAVGTTFRRLVAKMCYRSAADDLAKHFQPHQLGFGSRGGCEAAVHSLRAFLCDQGDGVLLKVDIKNAFNTVDRGALLTQIKFKTPSIYNFLWQCYSAPTNLLYKNNLLLSAVGCQQGDPLGPAIFSLAIHPIIEKIKSKFNVWYLDDGTLGGEASTVLSDLKLLMQELQLIGLELNTAKCELYVPASNPVRSTIISDFNMLAPNLTIVDRSSLRLLGSPIMDESLPSFVEDKIQNFADVSDRLFKINTHMAYFIIRHCLFAPKFMYTLRCCQLWKFPDLLSILDTTIKNTLSSIINISLNNRSWAQASLPIRFGGLGVRKISSVSLPAFLSSAHSVQTLVSKILKQPQPEIPFMAEAKNAWELACPNGVEPSNPCSQRLWDEPLCKLVRNNLLETSASSAERARLLALGEWESGLWLQALPSPNIGTLLDRTTFRIATSLRLGAPCNVLHRCRCGDVVDQQGHHGLSCMRSAGRISRHANLNDVIRRALSTAGAPSVLEPVGLVRDDGKRPDGMTLVPWKMGRSLVWDATCVDTLAASHLPGTTIKSGSAANAAENLKRRKYANLSGDYLFEPFGVETMGPWGPGAHNLFKDISKRLVEASHDQRAGSFFGQRVSLAIQRGNAASLLGTLPAVEDLQGVFYL

SEQ ID NO: 15327 - protein, 955 aa, Carposina sasakii
MQNVVQHAASVASAENLVQCDKCSQPRFFNGLRGLKIHIGKTHKNPVSPTTSSAPIINLLDPQNSNLDQPFWKQLSVLKNNTPLVKRIPRGARIAVAQKLAADIRAATTQNTKRTWEHLLTFAFRILHVRKHSDARLSLTSHIKQNCISDSLPPDFQTKPHTVTNTSKIIEAKLSEGDIKGAARLLFSTDAIAPDNPETLTSLRCKHPPPAASLSLPDGPNPDDPVLMVTADAIRRAVFSFPGGSAGGLDGISPQHLKDLIGGGCGEAGEALTKELTSLATLMLSGKVNSDIIATLYGANLCALRKKDGGIRPIAVGATYRRLVAKICCRGTADTLAQYFNPHQLGFGSKGGCEAAVHALRTHLHRQDSGVLLKVDIKNAFNSVDRGALLTQVQNKVPSIFKFIWQCYSAPTNLLYKDHLISSAVGCQQGDPLGPAIFSLAIHPIIKRLQSKLNVWYLDDGTLGGEAVSILDDLKLLMQELRLIGLELNTEKCELYVPASNLSRDQIIHSFHQVAPNLSVLEGSSLRLLGSPILDESLPSYVNEKIQNFSEVSDRLFKINTHMAYFIIRHCLFAPKFMYSLRCSQIWKFPDLLSLLDNIIKQTLSSIININFDDRSWAQASLPIRFGGMGVRKISSVALPAFLASAHGTHSLVMKILNDNSTTTYYMAEAKNAWKLACPNAVEPSFPSSQRLWDEPLCKLVRKNLLDTPTSSAERARLLALGEWESGLWLQALPSANVGTLLDRTTFRIAACLRLGAPCNVPHRCRCGDAVDPLGHHGLSCTKSAGRIPRHSTLNDIIRRALSTAGAPSVLEPLGLVRDDGKRPDGMTLVPWRMGRCLVWDATCVDTLAVSHLPGTSIRTGSAAASAENLKRRKYANLSGDYIFEPFGVETMGPWGPGAHALFRGISKRLVEASHDRRAGAYFGQRVSLAIQRGNAASLLGTLPSVEDLQAVFYL

SEQ ID NO: 15328 - protein, 956 aa, Carposina sasakii
MQKAAQSVPIASVENWIQCDKCSQPRFFKGLRGLKIHIGKNHKEVTPTSPTPSAPINSSDQPNPNANQPFWKYLSTLKNSTPVLKRIPRGARISVAQKLSSEIRAATTYNTKEAWEHLLTFAFRILHVQQKNSDNKSSLTSHIKENCSSDTPLPRYNAKSHRAPINTSKVIESKLSEGDIKGAARLLFSSDAIAPDTPETLTSLLDKHPSPAASPNLPDSPNPTDAALVVSADTIRQAVFSFPGGSAGGLDGISPQHLKDLISGGCGEAGEALTKELTAMANLMLSGKVCADVVTTLYGANLCALRKRDGGIRPIAVGTTFRRLVAKMCCRSAADDLAKHFQPHQLGFGSRGGCEAAVHSLRAFLCDQGDGVLLKVDIKNAFNTVDRGALLTQIKFKTPSIYNFLWQCYSAPTNLLYKNNFILSAVGCQQGDPLGPAIFSLAIHPIIEKMKSKFNVWYLDDGTLGGEASTVLSDLKLLRQELQLIGLELNTAKCELYVPASNPVRSTIISDFNMLAPNLTIVDSSSLRLLGSPIMDESLPSFVEDKIQYFADVSDRLFKINTHMAYFIIRHCLFAPKFMYTLRCCQLWKFPDLLSILDTKIKNTLSSIINISLNNRSWAQASLPIRFGGLGVRKISSVSLPAFLSSAHSVQTLVAKILKQPQPEIPFMAEAKNAWELACPNGVEPSNPCSQRLWDEPLCKLVRNNLLETSASSAERARLLALGEWESGLWLQALPSPNIGTLLDRTTFRIATSLRLGAPCNVLHRCRCGDVVDQQGHHGLSCMRSAGRISRHANLNDVIRRALSTAGAPSVLEPVGLVRDDGKRPDGMTLVPWKMGRSLVWDATCVDTLAASHLPGTTIKSGSAANAAENLKRRKYANLSGDYLFEPFGVETMGPWGPGAHNLFKDISKRLVEASHDQRAGSFFGQRVSLAIQRGNAASLLGTLPAVEDLQGVFYL

SEQ ID NO: 15329 - protein, 956 aa, Carposina sasakii
MQKAAQSVPIASVENWIQCDKCSQPRFFKGLRGLKIHIGKNHKEVTPTSPTPSAPINSSDQPNPNANQPFWKYLSTLKNSTPVLKRIPRGARISVAQKLSSEIRAATTYNTKEAWEHLLTFAFRILHVQQKNSDNKSSLTSHIKENCSSDTPLPRYNAKSHRAPINTSKVIESKLSEGDIKGAARLLFSSDAIAPDTPETLTSLLDKHPSPAASPNLPDSPNPTDAALVVSADTIRQAIFSFPGGSAGGLDGISPQHLKDLISGGCGEAGEALTKELTAMANLMLSGKVCADVVTTLYGANLCALRKRDGGIRPIAVGTTFRRLVAKMCCRSAADDLAKHFQPHQLGFGSRGGCEAAVHSLRAFLCDQGDGVLLKVDIKNAFNTVDRGALLTQIKFKTPSIYNFLWQCYSAPTNLLYKNNLLLSAVGCQQGDPLGPAIFSLAIHPIIEKIKSKFNVWYLDDGTLGGEASTVLSDLKLLMQELQLIGLELNTAKCELYVPASNPVRSTIISDFNMLAPNLTIVDRSSLRLLGSPIMDESLPSFVEDKIQNFADVSDRLFKINTHMAYFIIRHCLFAPKFMYTLRCCQLWKFPDLLSILDTTIKNTLSSIINISLNNRSWAQASLPIRFGGLGVRKISSVSLPAFLSSAHSVQTLVSKILKQPQPEIPFMAEAKNAWELACPNGVEPSNPCSQRLWDEPLCKLVRNNLLETSASSAERARLLALGEWESGLWLQALPSPNIGTLLDRTTFRIATSLRLGAPCNVLHRCRCGDVVDQQGHHGLSCMRSAGRISRHANLNDVIRRALSTAGAPSVLEPVGLVRDDGKRPDGMTLVPWKMGRSLVWDATCVDTLAASHLPGTTIKSGSAANAAENLKRRKYANLSGDYLFEPFGVETMGPWGPGAHNLFKDISKRLVEASHDQRAGSFFGQRVSLAIQRGNAASLLGTLPAVEDLQGVFYL

SEQ ID NO: 15330 - protein, 956 aa, Carposina sasakii
MQKAAQSVPIASVENWIQCDKCSQPRFFKGLRGLKIHIGKNHKEVTPTSPTPSAPINSSDQPNPNANQPFWKYLSTLKNSTPVLKRIPRGARISVAQKLSSEIRAATTYNTKEAWEHLLTFAFRILHVQQKNSDNKSSLTSHIKENCSSDTPLPRYNAKSHRAPINTSKVIESKLSEGDIKGAARLLFSSDAIAPDTPETLTSLLDKHPSPAASPNLPDSPNPTDAALVVSADTIRQAIFSFPGGSAGGLDGISPQHLKDLISGGCGEAGEALTKELTAMANLMLSGKVCADVVTTLYGANLCALRKRDGGIRPIAVGTTFRRLVAKMCCRSAADDLAKHFQPHQLGFGSRGGCEAAVHSLRAFLCDQGDGVLLKVDIKNAFNTVDRGALLTQIKFKTPSIYNFLWQCYSAPTNLLYKNNLLLSAVGCQQGDPLGPAIFSLAIHPIIEKIKSKFNVWYLDDGTLGGEASTVLSDLKLLMQELQLIGLELNTAKCELYVPASNPVRSTIISDFNMLAPNLTIVDRSSLRLLGSPIMDESLPSFVEDKIQNFADVSDRLFKINTHMAYFIIRHCLFAPKFMYTLRCCQLWKFPDLLSILDTTIKNTLSSIINISLNNRSWAQASLPIRFGGLGVRKISSVSLPAFLSSAHSVQTLVSKILKQPQPEIPFMAEAKNAWELACPNGVEPSNPCSQRLWDEPLCKLVRNNLLETSASSAERARLLALGEWESGLWLQALPSPNIGTLLDRTTFRIATSLHLGAPCNVLHRCRCGDVVDQQGHHGLSCMRSAGRISRHANLNDVIRRALSTAGAPSVLEPVGLVRDDGKRPDGMTLVPWKMGRSLVWDATCVDTLAASHLPGTTIKSGSAANAAENLKLRKYANLSGDYLFEPFGVETMGPWGPGAHNLFKDISKRLVEASHDQRAGSFFGQRVSLAIQRGNAASLLGTLPAVEDLQGVFYL

SEQ ID NO: 15331 - protein, 665 aa, Carposina sasakii
MANLMLSGKVCADVVTTLYGANLCALRKRDGGIVAKMCCRSAADDLAKHFQPHQLGFGSRGGCEAAVHSLRAFLCDQGDGVLLKVDIKNAFNTVDRGALLTLIKFKTPSIYNFLWQCYSAPTNLLYKNNLLLSAVGCQQGDPLGPAIFSLAIHPIIEKMKSKFNVWYLDDGTLGGEASTVLSDLKLLRQELQLIGLELNTAKCELYVPASNPVRSTIISDFNMLAPNLTIVDSSSLRLLGSPIMDESLPSFVEDKIQYFADVSDRLFKINTHMAYFIIRHCLFAPKFMYTLRCCQLWKLPDLLSILDTTIKNTLSSIINISLNNRSWAQASLPIRFGGLGVRKISSVSLPAFLSSAHSVQTLVAKILKQPQTEIPFMAEAKNAWELACPNGVEPSNPCSQRLWDEPLCKLVRNNLLETSASSAEHARLLALGEWESGLWLQALPSPNIGTLLDRTTFRIATSLRLGAPCNVLHRCRCGDVVDQQGHHGLSCMRSAGRISRHANLNDVIRRALSTAGAPSVLEPVGLVRDDGKRPDGMTLVPWKMGRSLVWDATCVDTLAASHLPGTTIKSGSAANAAENLKRRKYANLSGDYLFEPFGVETMGPWGPGAHNLFKDISKRLVEASHDQRAGSFFGQRVSLAIQRGNAASLLGTLPAVEDLQGVFYL

SEQ ID NO: 15332 - protein, 956 aa, Carposina sasakii
MQKAAQSVPIASVENWIQCDKCSQPRFFKGLRGLKIHIGKNHKEVTPTSPTPSAPINSSDQPNPNANQPFWKYLSTLKNSTPVLKRIPRGARISVAQKLSSEIRAATTYNTKEAWEHLLTFAFRILHVQQKNSDNKSSLTSHIKENCSSDTPLPRYNAKSHRAPINTSKVIESKLSEGDIKGAARLLFSSDAIAPDTPETLTSLLDKHPSPAASPNLPDSPNPTDAALVVSADTIRQAVFSFPGGSAGGLDGISPQHLKDLISGGCGEAGEALTKELTAMANLMLSGKVCADVVTTLYGANLCALRKRDGGIRPIAVGTTFRRLVAKMCCRSAADDLAKHFQPHQLGFGSRGGCEAAVHSLRAFLCDQGDGVLLKVDIKNAFNTVDRGALLTQIKFKTPSIYNFLWQCYSAPTNLLYKNNLLLSAVGCQQGDPLGPAIFSLAIHPIIEKMKSKFNVWYLDDGTLGGEASTVLSDLKLLRQELQLIGLELNTAKCELYVPASNPVRSTIISDFNMLAPNLTIVDSSSLRLLGSPIMDESLPSFVEDKIQYFADVSDRLFKINTHMAYFIIRHCLFAPKFMYTLRCCQLWKFPDLLSILDTTIKNTLSSIINISLNNRSWAQASLPIRFGGLGVRKISSVSLPAFLSSAHSVQTLVAKILKKPQPKIPFMAEAKNAWELACPNGVEPSNPCSQRLWDEPLCKLVRNNLLETSASSAERARLLALGEWESGLWLQALPSPNIGTLLDRTTFRIATSLRLGAPCNVLHRCRCGDVVDQQGHHGLSCMRSAGRISRHANLNDVIRRALSTAGAPSVLEPVGLVRDDGKRPDGMTLVPWKMGRSLVWDATCVDTLAASHLPGTTIKSGSAANAAENLKRRKYANLSGDYLFEPFGVETMGPWGPGAHNLFKDISKRLVEASHDQRAGSFFGQRVSLAIQRGNAASLLGTLPAVEDLQGVFYL

SEQ ID NO: 15333 - protein, 648 aa, Graphium doson
MLKTNYTSLFPKVEGATLPEDHRPITVASILVRALTGILATRLSQHVLLDSCQFGFTASDGCLQATVLLDFILRKFPHSELISLDLRKAFDSVCHESIVKSLEGTGVDFRTVSLVKDLYSGSSTRLKHKGQISRILSISRGVRQGDPLSPLLFNLAINPIFSLLREQGIGPTIGGICVPAIGYADDLVLVSTCFDHEQIYDTAVGFLQSVNLSVNESKSFIVSRVLESDQNSTQADWQTAIHTIPPNQSFTYLGVQFTSNGLDHPHTDDIQTNLDKLTRARIRPEQRLMLARTYLMPSLLHRLVLGKVSDTKLQSLDLCFRKWVKHTLHLPHYTCDEFLELPLRSGGLGFSSFRIGIPWRARHRLSKLHNSQSPIMRAITRSLYFLRRSHNLTQLHQSISTGDQLANLALKSDGKACHSFIDNSISVSRIFRGYTSIKGGYYIKYAHLRFGVTKCRVNAVRYLRGTGQSAEVECRICSEAPESIGHVLSSCNGLTNHYTTRHNHALDMLEAALSRDGWTIHRERRIAHQGRHFEPDLLIWKPGRAMLLDVAVAFESGEHALKKSYLAKVAKYRQLSTRVMEYFPNANPLTPVEVHGVVFGARGTIYHKSLNVLRGLGVTKSTIHSIFESIAKNSIKIFQHLHRFSPHS

SEQ ID NO: 15334 - protein, 970 aa, Atrophaneura dixoni
MSIQVGETTPNSLSFSPIYSSFSLSPTNFSPPHTQNDTQGAFGDAQTRKTGGTPWTDEELGCLAGAEMRLRSAGYYSVPAVCAEHQLVYPNRTFSAVSGCLHSARYRRFFDRSVYLTDNINSRTVPPSGEHNLDHYILSLLSDIPIGHDDFTTTACLALQNLAQLEDVLSEFYKIVRPQRASQRVNRRYTNTHRSPSSRLSQARGADFAYNQYLYKTRPKALFEKVTGKSHTSNIDLNIGERYFTELFSLPAHPPTFQYSNSNQSISAAYAITPDDISIYLTKKSKSAPGPDQLRARHLFQHTTETAVLLNLCLREGRVPSQLKTNYTSLFPKTDSASQPEDHRPITVASILVRALTATLASRLSKLVPLDPCQFGFTSSDGCLHATVLLDFILKHFPAFDLISVDLRKAFDSVCHESIIAALASTGIDERTLNLVTDLYSGSNTRLKHKSKLSRPIQMARGVRQGDPLSPFLFNLTLNPIFNKLRELDIGPAIGGTTVPAIGYADDLILISHFHDNAQVYDKAANFLQEIRLAVNESKSFIVTRLTDTDQDDSSQHDWYHALRTLLPHESFKYLGIEFTSHGLEHPSLDSAQHTLSQITRARVRPEQRLTLARNYFLPSLQYRLTLSTVTDTTLSELDLCIRKWVKHTLHLPHYTCNEFLELSLKNGGLGFPSFRIDIPWRARRRLTKLYNSDSPILRAITRSLYFLRRSHNLTQLHQAVGSSDQLLSLASKSDGKACHLFVDKGISISRIFSGYSCIRGGNYIKYAHLRFGVSKCRVNAVRHLRRTGESAEVQCRICSSAPESIGHVLNSCNGLTNLYISRHDEALNQLEHCLQRQGWTTIRERRILHQGIHYVPDLLICKPGRAMILDVAVAFESGDNALKCGYLGKIAKYRCLAGRVMEQFPLANPLTPVEVHGVIFGSRGAIHHKSLKVLRGLGVTKNTIHSILESISINSIKIFKHLHRYSPHP

SEQ ID NO: 15335 - protein, 1145 aa, Epargyreus clarus
MRTYFQTTKLETEFTTFRKHMHDMFLQKYQDTNVTQQRLSVQRGVIIRNKLLSDEEINKIRHEVEKEYNLKNSERLTVNTNQVNTSQFSPNSDTFNATPDILPESLLSNPDFNPEHLTVNNTEKELALIETLKQQFQINLTKYSTIDPILRPSLPRIKPSRYLSYLIMLFNKNILPPKISIINNITDTHTFIYCTSITIVEHLNIKIHRTSKNTEYKPAWQIRLEQEIEQLRKDIGRLTQFKSGNTSKKLINKIKDILTKSKKHSSYEKDNKKVTEHLDTLKQKLLIKSHRLARYKKAKNRKESNRLFTVNEKQFYRKMRESNKKLINPPDVESLKQFWAGVWECNTEHNKEADWIQREKVRAEKVEEMNFETFTREELQTVLNKSHNWKAPGPDGIHNFWLKKLGIFHDCLAEQISDIIQGNSIFPDFLSRGKTFLLPKNTSTQDPSQYRPITCLPTLYKIITSCIANRIYKHLEEYNILSEEQKGCRRHHMGCKEQLIIDSTILKHVQKSKKDLYVAYIDYQKAFDSIPHSWLTQVLEIYKVHPTIVIFLKHVMQTWRTTLNLQTNTTLIETGEIEINRGIFQGDSLSPLWFCLALNPLSRELNNSKLGFNIKNNRQTLFQITHLLYMDDLKLYSNTNSNINKLLDITTKFTNDIKMSFGLDKCRKLNIKNGKLIHGAYKINDEQYISAMENNELYKYLGYSQARVIEYRLIKENLKKEYFKRLQAVCKQQLTSRNLFKAINTYAIPVLTYSFGIIKWGKTELHQLEIKTRTLLTQHRYHHPKSAIERVNASRKEGGRGLIEITQLHNKQIENLKNFFINKNNNSLHGAINTIDKNFTPLNLSDQTVEPVDTIKNNQDKYRRWREKELHGRHLHDLESTHIDKEASNKWLESAGLFPETEGFIIAIQDQVISTKNYRKYIIKDNTLPNDLCRKCFSKPETIQHITGACVTLTQNDYTHRHNQLTNIIHQKLAMKYNLNKNPHTPYYTYTPPAILENTTHKLYYDRTVLTDHTIYNNRPDITLVDKKNKHTYIIDIAVPNTNNLQSTIVEKIRKYTELQVEIKKLWKMNSVTIVPIVVSTTGVIPKQLFHSLKALDLPKFTYLALQKAAILNTCRIVRKFLQLDSDNDTLHNITHITPDTINLN

SEQ ID NO: 15336 - protein, 1226 aa, Cecropterus toxeus
MSSQQKQNKYNLRSLSRACRRSLKNEEVNTTVDSRTPETSQTQTGDNREFSETQPAENVSRVATAMKPATTKAGKPRVRMKWDRDVNIFIMRTYYQTTKLETEFTTFRKQMHDMFLQKYQDTNVTQQRLSVQRGVIIRNKLLSDEEINKIRYEVEKEYHMNNIDRRILNTPQNKSMFNSNTNNLNATNDILPDSLLSNDFDPEPIIANNTGKEPALIEALKELLENNLIKYGDIDPLLRPSLPRIKPSRYLSYLLMLFNKNILPPKMNIIHNIVDTHKLVYCTSLTIAEHLNVKTHRTSYNENFKPAWQIRLEQDIEQLRKDIGRLTQYKSGNTSKKLENKIKIILTKSRKHSSYEKENNKITEHLDTLKQKLFIKSHRLARYKKAKNRKESNKLFTVSEKQFYRKMRGSNKQVLNPPDAEILKQFWSNIWEYNVEHNENADWIQREKVRMDRVEEMNFEDVTQEELQIVLNKAHNWKASGPDGIHNYWFKKLDIFHNCLAKQITDIIKGSSAFPEFLSKGKTFLLPKSTSTQDPSQYRPITCLPTLYKVITSCIANRIYKHLDDFNILSEEQKGCRRQHMGCKEQLIIDSTILKHVQKSRKDLFVAYIDYQKAFDSIPHSWLTQVLEIYKVHPTIITFLKNVMHTWRTTLNLQTNTTLINTEEIKINRGIFQGDSLSPLWFCLALNPLSQELNHSKVGFDIKNNRQTLFQITHLLYMDDLKLYSNTNLNMKKLLDITTKFTIDIKMNLGLDKCRKLNIKKGKLVQGKYKINEEQYISSMENNELYKYLGYNQARVIEHTVIKENLKNEYFKRIQVLCKQQLTSKNLFKSINTYAIPVLTYSFGIIKWGKTDLQQLEIKTRTLLTQHRYHHPKSAIERVNISRKEGGRGLIEITHLHNRQIESLKNFFITKNNISLHGAINTIDKNFTPLNLSDQTIEPVDTLKNKHEKFKKWREKELHGRHLHDLESTHIDNEASNKWLESAGLFPETEGFIIAIQDQVISTKNYRKYIIKDPTLSNDLCRKCFSKPETIQHITGACVTLTQNDYTHRHNQLTKIIHQKLAIKYNLNKNSHTPYYNYTPPAILENCNHKIYYDRTVFTDHTIYNNRPDITLVDKKNKHTYIIDIAVPNTNNLQSTIVEKIRKYTELQEEIKKIWKMNRVTIVPIVVSTTGVIPKQLFHSLKAIDLPKFTYLTLQKAAILNTCRIVRKFLQLDTDNKTLQEAIPSI

SEQ ID NO: 15337 - protein, 1226 aa, Polygonus savigny
MKSNQTQNKYNLRSLTKTCRRPSNNDIMSHQSSTSTQSQSAETIECVESPPVEDVSRVATVMKPATTKAGKPRVRMKWNKEINMFIMRTYYLTTKLETEFTTFRKQMHDMFIQKYQDTNVTQQRLSVQRGVIIRNKLLSDEEISKIRREVEKENHINISRNIDKATSNNLNTCSQNLENLSSSFDILHNSSLNDNFSSQQLSLSDKATNETRLIETLTEKLEINLTKYSDIDPTSRPILRRIKTSRYLTYLIMLFNKHILPSKINVINNIKDTHTYIYCISLTISEHLNMKFYQTLINSDYKPAWQLRLEQDIEKLRKDIGRLTQYKNGNASKKLLNKIQVILRNSTKHSSYDQDNKKINEHLDTLKQKLLIKSHRLARYKKAKQRKESNRLFTVNEKQFYRKMKEVNNHLSNPPSAESIKEYWTSIWGCNTKHNIEAEWIQKEKNRVGAIEEMSFEDVNKEELQTVLNKTHNWKAPGPDGIHNYWFKKLSILHDVLAKQITDIIKGNSIFPEFLSKGKTFLLPKSDSTQNPSQYRPITCLPTLYKIITSCIANRIYKHLDQFNVLSEEQKGCRRNHMGCKEQLIIDSTILKQVQKSRKDLFVAYIDYQKAFDSIPHSWLIQVLEIYKINPIIVNFLKCIMQSWRTIINLNTSKTSIVAGEIEINRGIFQGDSLSPLWFCLALNPLSRELNDSKLGFNIKNNRQTLFQITHLLYMDDLKLYSNTNANINKLLDITVKFTNDIKMNLGLDKCRKLNIKKGKLTSSNYKINDDNYITAIEGNEVYKYLGYNQGRVIEHTVIKEKLKIEYFKRLHALCRQQLYSKNLFKAINAYAIPVLTYSFGIIKWSKTELNQLEIKTRTLLTQYRYHHPKSAIERIVIPRKEGGRGLIEISHLHNRQINSLKAFFNSKNNIPLHKAINIIDKNFTPLNLSDQTVELIDKIKNNQEKYRKWREKELHGRHLHDLESTHIDKEASNKWLESAGLFPETEGFIIAIQDQVINTKNYRKYIIKDSGLPNDLCRKCLSKPETIQHITGACITLTQNDYTHRHNQLTNIIHQKLAMKYNLIKHPHAPYYAYTPSPVLENTTHKLYYDRTVLTDHTIYNNRPDITLVDKQNKHTYIIDIAVPNTNNLQSTIVEKIRKYTELQEEIRKVWKMSNVTIVPIVVSTTGVIPKQLHHSLKVINLPKFTYITLQKAAILNTCRIVRKFLQLDNNENDSQHQINTTNLI

SEQ ID NO: 15338 - protein, 1230 aa, Chioides albofasciatus
MNKTQTQNKYNLRSLSRACRRSANNEEECRKVDTETSESESQSPLVDTTEFSETPPAENVSRVATVMKPATTKAGKPRVRMKWDKDVNIFIMRTYYQTTKLETEFTTFRKQMHDMFIQKYQDTNVTQQRLSVQRGAIIRNKLLSDEEINKIRYDVEKEYHIKNNERVSVNISQNQANIPQLSPNLESLNETSDILPNSNTDFNPENLTLNNTSKELALIETLKEQFEINLTKYSEIDPIFRPSLPRIKPSRYLSYLIMLFNKNILPPKINIINNITETHTFVYCTSITIVEHLKIKIHRTSKNVDYKPAWQIRLEQEIEQLRKDIARLTQYKSGNTSKKLMNKIKDILTKSKKHSSYEKDNKKITEHLDTLKQKLLIKSHRLARYKKAKNRKENNRLFTVNEKQFYRKIRESNKHILNPPDVESLKQFWSGIWEHNTVHDKEADWIQKEKARTGMVEEMQFEHITREELLIVLNKSHNWKAPGADGIHHYWLKKLTIFHDCLAKQITDIIQGNSTFPEFLSRGKTFLLPKSSSTQDPSQYRPITCLPTLYKVITSCIANRIYKHLDDYNIISEEQKGCRRHHMGCKEQLIIDSTILKHVQKTSKDLYVAYIDYQKAFDSIPHSWLTQVLEIYKVHPTIVTFLKHVMQTWRTTLNLQTNTTLLETGEIEINRGIFQGDSLSPLWFCLALNPLSRELNDSKLGFDIKNNRQTLFQITHLLYMDDLKLYSNTNSNMNKLLDITTKFTNDIKMSLGLNKCRKLNIKKGKLIRGAYKIEEEQYISAMENNELYKYLGYDQARVIDYKLIKENLKKEYFKRLQAICKQQLTSRNLFKAINTYAIPVLTYSFGVIKWGKTDLHQLEIKTRTLLTQHRYHHPKSAIERVSIPRKEGGRGLIDISHLHNKQIENLKNFFINKNNSPLHKAINTLDKNFTPLNLSDQTVEPVDTIKNNQEKYRRWKEKELHGRHIHDLESMHTDKEASNKWLESAGLFPETEGFIIAIQDQVISTKNYRKYIIKDNTLPNDLCRKCFSKPETIQHITGGCITLTQNDYTHRHNQLTKIIHQKLAIKHNLNKSSPTPYYTYTPLPILENTTHKLYYDRTVLTDHTIYNNRPDIILVDKKNKHTYIIDIAVPNTNNLQTTIVEKIRKYTELQEEIKKIWKMNSVTIVPIVVSTTGVIPKQLFHSLKTIDLPKFTYLTLQKAAILNTCRIVRKFLQLDTDNNTLLDNNTIILN

SEQ ID NO: 15339 - protein, 1222 aa, Autochton itylus
MNSHQKQNKYNLRSLSRACRRSSNNDVKGKTVDSKLPVTSQTQTVDTTEFSETPPAEIVSRVATAMKPATTKAGKPRVRMKWDKDVNIFIMRTYYQTTKLETEFTTFRKQMHDMFLRKYQDTNVTQQRLSVQRGVIVRNKLLSDEEINKIRYDVEKEYHTKNSEQRTLNSPQNPNTSSPNPDNLNVSSDILPNSRLSNDFDPEQLTLNNISKEAAVIEELKGRLEINLTKYGDINPILRPSLPRIKPSRYLSYLIVLFNKNILPTKLNIINNIADTHTFIYCTSLTIAEHLNIKISRASKNGNYKPAWQIRLEQEIEQLRKDIGRLTQYKSGNTSKKLLNKIKYILTKSKKHSLHEPDNKKITEHLDTLKQKLIIKSHRLARYKKAKERKDNNRLFTVNEKHFYRNMRENNKNLLNSPNEERLKQFWSGIWECNTEHNKEADWIKREMVRADRVQEMRFEDITQEELQTVLNKSHNWKAPGADGIQNYWFKKLSIFHNSLAKQITDIIKGNSIFPEFLSRGKTFLLPKSSSTQDPAQYRPITCLPTLYKIITSCIANRIHKHIEDFNILSEEQKGCRRHHMGCKEQLIIDSTILKHIQKSRKDLYVAYIDYQKAFDSIPHSWLIQVLEIYKIHPTIVTFLKHIMQTWRTTLSMQTNSTAINTGEIEINRGIFQGDSLSPLWFCLALNPLSRELNDSKLGFDIKNNRQTLVQITHLLYMDDLKLYSDTNSNLNKLLDITTNFTKDINMSFGLDKCRKLNIKKGKLIHGRYKINEEQYIAAMESNELYKYLGYNQTRVIEHTTVKETLKKEYFKRLQALCKQQLSSKNLFKSINTYAIPVLTYSFGIIKWGKTDLNQLEIKTRTFLTQHRYHHPKSAIERVNMPRKDGGRGLIDITQLHNRQIVSLKKFFIAKNNSSLHRAINTIDKNFTPLNLSDQTIEQVDTIKNNQEKFRRWREKELHGRHLHDLESTHIDKEASNKWLESAGLFPETEGFIIAIQDQVISTKNYRKYIIKDNTLPNDLCRKCFSKPETIQHITGACVTLTQNDYTHRHNQLTKIIHQKLAVKYNLNKNPYTPYYTYIPSPILENTTHKLYYDRTLFTDHTIYNNRPDITLVDKINKHTYIIDIAVPNTNNLQSTIVEKIRKYTELQEEIKKIWKKDTVTIVPIVVSTADVIPKPLFHSFKAVDLPKFTYLTLQKAAILNTCQIVRKFLQLDTDNTLQQLH

SEQ ID NO: 15340 - protein, 1051 aa, Cecropterus dorantes
MFSSNNLNATYDILANSQLSNNFDLEQLTSNNTGKESALIEALKELLENNLTKYGDIDPCLRPFLPRIKPSRYLSYVITLFNKYILPSKMNIIHDIADTHKFVYCTSLTIAEHLKIKIHRTSKNINYKPAWQVRLEQDIEQLRKDIGRLTQYKSGNTSKKLENKIKIILTKSRKHSSYEKDNKKITEHLDTLKQKLLIKSHRLARYKKARNRKESNRLFTVNEKQFYRKMSQSNKQVLNPPDVESLKQFWSSIWECDSEHNKEAEWIQREKVRMDRVEEMNFEDVTQEELQIVLNKAHNWKAPGPDGIHNYWFKKLNVFHNCLAKQITDIIKGSHVFPEFLSKGKTFLLPKSTSTQDPSKYRPITCLPTLYKIITSCIANRIYKHLDDFNILAEEQKGCRRQHMGCKEQLIIDSTILKHVQKSRKDLFVAYIDYQKAFDSIPHSWLTQVLEIYKVHPAIVTFLKTVMQTWRTTLNLQTNTTLINTGEIEINRGIFQGDSLSPLWFCLALNPLSRELNDSKLGFDIKNNRLTLFQITHLLYMDDLKLYSNTNLNMNKLLDITTKFTNDIKMNLGLDKCRKLNIKKGKLVQGKYKINEEQYISAMENNELYKYLGYNQARVIEHTVIKENLKKEYFKRLLALCKQQLNSKNLFKSINTYAIPVLTYSFGIIKWGKTELQQLEIKTRTFLTQHRYHHPKSAIERVNVPRKEGGRGLIEITHLHNRQIESLKKFFITKHNSSLHGSINTIDKNFTPLNLSDQNIEPVDTIKNYQEKCKRWREKELHGRHLHDLESTHIDKEASNKWLESAGLFPETEGFIIAIQDQVISTKNYRKYIIKDTTLPNDLCRKCFSKPETIQHITGACITLTQNDYTHRHNQLTKIVHQKLAIKYNLNKTSHTPYYNYTPPAILENSNHKLYYDRTVLTDHTIYNNRPDITLVDKKNKHTYIIDIAVPNTNNLQSTIVEKIRKYTELQEEIKKIWKMNSVVIVPIVVSTTGVIPKQLFHSLKAIDLPKYTYLALQKAAILNTCRIVRKFLQLDSDNNILQENSTTTLS

SEQ ID NO: 15341 - protein, 819 aa, Venada nevada
MKESNQQSLTNPPDVESLKQFWSDIWEHKAEHNRKADWIQRERMRASMIEEMNFGDVNVEELQMILNKTHNWKAPGADGIHNYWFKKFSIFHDSLTKQITDIIRGDSTFPEFLTRGKTFLLPKRNPTQEPSQYRPITCLPTLYKVITSCIANRIYKHIDRFNILSEEQKGCRRYHMGCKEQLIIDSTILKHVQKSRKDLSVTYIDYQKAFDSIPHSWLIQVLEIYKIHPVIVTFLKNIMQTWRTTLNLKSNSTFISTEEIEINRGIFQGDSLSPLWFCLALNPLSRELNNSKLGFDIKNNRHNLFHITHLLYMDDLKLYSDTNSNMNKLLDITTKFTNDINMKFGLDKCRKLSIKKGKLIQRQYKINEDHYISALESNELYKYLGYNQAQVIDHKVIKENLKNEYFKRLQALCKQQLTSKNLFKSINTYAIPVLTYSFGIIKWSKTDLNQLDIKTRTFLTQHRYHHPKSAIERINIPRKEGGRGLIEITHLHNRQIESLKNFFITKNNNPLHGAINIMDKNFTPLNLSDQTIEPADTVKNKQEKHRRWREKELHGRHLHDLESTHIDKEASNKWLESAGLFPETEGFIVAIQDQVISTKNYRKYIIKDSTLPNDLCRKCFSKPETIQHIIGGCITLTQNDYTHRHNQLTKIIHQKLAMKYSLNKSPHTPYYTYTPCPILENSTHKIYYDRTVLTDHTIYNNRPDITLIDKNNKHTYIIDIAVPNTNNLQSTIVEKIRKYTELQQEIKKIWKMNTVTIVPIVVSTTGVIPKNLFNSLKTLDLPKFTYITLQKAAILNTCRIVRKFLQLDTDNDTFNIHLN

SEQ ID NO: 15342 - protein, 1218 aa, Cecropterus confusis
MSRQQKQNTYNLRSLSRACRRSLKNEVGSTTIVDSRTPEKSQSQTDDNKELSETLPAENVSRVATAMKPATTKAGKPRVRMKWDKDVNIFIMRTYYQTTKLETEFTTFRKQMHDMFLLKYQDTNVTQQRLSVQRGVIIRNKLLSDEEISKIRYDVEKEYQIKNSDRINTPQNENMFSPNKNNLNTTCDILANSQSSKDLGPEQITLNSTVKELALIEALKEQLENNLTKYGDIDPFLRPSVPRIKPSRYLSYLLMLFNKNILSSKMNIIHNIADTHKFVYCTSLTIAEHLNIKIHRTPKNENYKPAWQIRLEQDIEQLRKDIGRLTQYKSGNTSKKLENKIKIILTKSKKHSSYEKDNNKITEHLDTLKQKLLIKSHRLARYKKAKNRKESNRLFAVNEKQFYRKMKQSNKEVLKPPDVESLKQFWSSIWECNAEHNKDADWIQREKVRMDRVKEMNFEDVTQEELQIVLNKAHNWKAPGPDGVHNYWFKKLIIFHKCLAKQITDIIKGSSIFPKFLSKGKTFLLSKSTSTQDPSQYRPITCLPTLYKVITSCIANRIYKHIDYFNILSEEQKGCRRQHMGCKEQLIIDSTILNHVQKSRKDLFVAYIDYQKAFDSIPHSWLTQVLEIYKVHPAIIIFLKNVMQTWRTTLNLQTNTTLINTGEIEINRGIFQGDSLSPLWFCLALNPLSRELNDSKLGFDIKNNRRTLFQITHLLYMDDLKLYSNTNLNMKKLLDITTKFTKDIKMNLGLDKCRKLNIKKGKLVQGTYKINEEQYISAMECNELYKYLGYNQARVVEHTVIKENLKKEYFKRLQTLCKQQLTSKNLFKSINTYAIPVLTYSFGIIKWGKTELQQLQIKTRTLLTQHRYHHPKSAIERINISRKEGGRGLIEITHLHNRQIESLKKFFIAKNNSSLHGAINTVDKNFTPLNLSDQTVEPVDTIKNNHEKYKRWREKELHGRHLQDLESINIDKEASNKWLESAGLFPETEGFIIAIQDQVISTKNYRKYIIKDTTLPNDLCRKCFSKPETIQHITGACVTLTQNDYTHRHNQLTKIIHQKLAIKYNLNKNSHTPYYSYTPPAILENSNHKIYYDRTVLTDHTIYNNRPDITLVDKKNKHTYIIDIAVPNTNNLQSTIVEKNRKYTELQEEIKKIWKMNSVTIVPIVVSTTGVIPKQLFHSLKAIDLPKFTYLTLQKAAILNTCRIVRKFLQLDTDNTLQ

SEQ ID NO: 15343 - protein, 1119 aa, Astraptes hopfferi
MHDMFLQKYQDTNVTQQRLSVQRGVIIRNKLLSDEEISNIRYDVEKEFHIKNNERVTLNTQQNQNTFIPNLDSFNATCDILPDSCLSNHCDSERLTINNTSKEPALVEALKEQLEINLAKYGDIDPILRPSLPRIKPSRYLSYLITLFNKNIIPPKINIINNIADTHTFVYCTSLTIVEHLNIKMQRTSKNVDYKPAWQIRLEQEIENLRKDIGRLTQYKSGNTSKKLEKKIKEILTKSKKHSSYEKDNKKISEHLDTLKQKLLIKSHRLARYKKAKNRKESNRLFTVNEKLFYRKMKETNKQLFNPPDVESITEFWSGIWEGSIEHNTEADWIQRERDRVADRVEEMTFEDVTREELQIVINKSHNWKAPGADGIHNYWLKKLIIFHDCLAKQISDIIKGSSTFPDFLSKGKTFLLAKSTSTQDPSQYRPITCLPTLYKVITSCIANRIYKHLDEFNILSEEQKGCRRHHMGCKEQLIIDSTILKHVQKNRKDLFVTYIDYQKAFDSIPHSWLTQVLEIYKVHPTLVTFLKNVMQTWRTTLYLQTNTRLISTDEIEINRGIFQGDSLSPLWFCLALNPLSQELNDSKLGFDIKNNRQTLFQITHLLYMDDLKLYSNTNLNMNKLLDITTKFTNDIKMSLGLDKCRKLNIKKGKLIHGKYKINEEQYISAMERNELYKYLGYHQARVIDHTVIKENLKKEYFKRLQALFKQQLTSRNLFKAVNTYAIPVLTYSFGIIKWGKTDLQQLEIKTRTFLTQHRYHHPKSAIERVNISRKEGGRGLIEISHLHNRQIEGLKNFFITKNNSLLHRAINKIDNKFTPLNLSDQTIEPVDTIKNNQEKCRRWREKELHGRHIHDLESTHIDKEASNKWLESAGLFPETEGFIIAIQDQVISTKNYRKYIIKDNTLPNDLCRKCFSKPETIQHITGACVKLTQNDYTHRHNQLTKIVHQKLAIKYNLNKNSHTPYYTYIPPPILENTAYKIYYDRTVLTDHTIYNNRPDITLIDKKNKHTYIIDIAVPNTNNLQSTIVEKIRKYTELQEEIKKIWKMNTVTIVPIVVSTTGVIPKQLFHSLKLIDLPKFTYLALQKAAILNTCRIVRKFLQLDTDNNTIYESNNINLN

SEQ ID NO: 15344 - protein, 1234 aa, Epargyreus spanna
MNNTQTQNKYNLRSLSRACRRSSNDVGCRNVGTKTSESSQSPSVDTRELSETPPAETVSRVATVMKPATTKAGKPRVRMKWDKDINIFIMRTYFQTTKLETEFTTFRKHMHDMFLQKYQDTNVTQQRLSVQRGVIIRNKLLSDEEINKIRYEVEKEHNLKNSERLTVNTNQVNTSQFSPNSDTLKATPDILPESLLSNPDFNPEHLTVNNTEKELALIETLKEQFQINLTKYSTIDPILRPSLPRIKPSRYLSYLIMLFNKNILPPKIGIINNITDTHTFVYCTSITIVEHLNIKIHRTSKNTEYKPAWQIRLEQEIEQLRKDIGRLTQFKSGNTSKKLINKIKDILTKSKKHSSYEKDNKKVTEHLDTLKQKLLIKSHRLARYKKAKNRKESNRLFTVNEKQFYRKMREINKKLINPPDIESLKQFWAGVWECNTEHNKEADWIQREKVRAEKVEEMNFETFTREELQTVLNKSHNWKAPGPDGIHNFWLKKLVIFHDCLAKQISDIIQGNSIFPDFLSRGKTFLLPKNTSTQDPSQYRPITCLPTLYKIITSCIANRIYKHLEEYNILSEEQKGCRRHHMGCKEQLIIDSTILKHVQKSKKDLYVAYIDYQKAFDSIPHSWLTQVLEIYKVHPTIVIFLKHVMQTWRTTLNLQTNTTLIETGEIEINRGIFQGDSLSPLWFCLALNPLSRELNNSKLGFNIKNNRQTLFQITHLLYMDDLKLYSNTNSNINKLLDITTKFTNDIKMSLGLDKCRKLNIKNGKLIHGAYKINDEQYISAMENNELYKYLGYSQARVIEYRLIKENLKKEYFKRLQAVCKQQLTSRNLFKAINTYAIPVLTYSFGIIKWGKTELHQLEIKTRTLLTQHRYHHPKSAIERVNTSRKEGGRGLIEITQLHNKQIENLKNFFINKNNNSLHGAINTIDKNFTPLNLSDQTVEPVDTIKNNQDKYRRWREKELHGRHLHDLESTHIDKEASNKWLESAGLFPETEGFIIAIQDQVISTKNYRKYIIKDNTLPNDLCRKCFSKPETIQHITGACVTLTQNDYTHRHNQLTNIIHQKLAMKYNLNKNPHTPYYTYTPPAILENTTHKLYYDRTVLTDHTIYNNRPDITLVDKKNKHTYIIDIAVPNTNNLQSTIVEKIRKYTELQVEIKKLWKMNSVTIVPIVVSTTGVIPKQLFHSLKAIDLSKFTYLALQKAAILNTCRIVRKFLQLDSDNDTLHNITHTTPDTINLN

SEQ ID NO: 15345 - protein, 1213 aa, Cephise aelius
MNEYQKKKHKYQLRSHSKACRKNNTDSVSSQSQHAIPEANISLNNQSIQNTQESSEILPAEDASQAAMAMKPATTKAGKPRVRMTWKKDINIFIMRTYYKVTKLETDFTMYRQQMHQQFLEKYQNTNITEQRISDQRRFIIRNKRLSEEELRKIKGEVEKEIEAENLDTLNTLQNLHIVHENNNRQKIRNRNSETTSSMQLNVDVDLQLAQDLGEITNLTGTDKIKEHFENNLSKYTGTDPTSRPPLPKIKPSRYLTHLISKFNMDILPTKLKVLETITDTHTLIYCAALTIAEQLNIKIASRMFSKVNRKPAWQIRLEANIEDLRKDIGRLTQYKKGNTSKKLYNKVQKIINKTKQHSSHENLNTKLNEHLDTLKQKLAVKSHRLARYKKAKDRRENNRLFTTNEKQFYRKIKQNNSYAMNPPSPISLKEFWSEIWAHNTEHNKSAEWINSEIDRSQCIQDMQFDDINEKELRYIINKTHNWKAAGIDGLHNYWFKKLIVVQETLAKQITSIIKGNSLMPEFLSKGRTFLLPKNNRTEDPSQYRPITCLPTLYKIITSVIANRIYNHLEQFSIISEEQKGCRRNHMGCKEQLLIDAAILKHVQKTRQDLFVTYIDYQKAFDSIPHSWLIQVLEIYKINSMIISFLKNVMSTWRTILNLHTSKEQINIGEIDIKRGIFQGDSLSPLWFCLALNPLSRELNNTKFGFNIKKNRRTLHQLTHLLYMDDLKLYSSTNVNMNKLLDTTVRFTKDINMNFGLDKCRKLNIKKGKVIDGSYKISDEHRIIAMESQEFYKYLGYSQSRRLEHTTIKECLKKEYINRLHSIFKQQLCSKNLFKAINTFAIPVLTYSFGIIKWTKNELKQLEIKTRTTLTQYRYHHPKSAVERVNIPRKEGGRGLIDITLLHYKQINCLKNFFGNKKENSQLHKTIIEIDNKYTPLNLSEEQEIVDIQKLGVEKHRTWKEKELHGRHKHDLEQSHIDKEASNKWLELAGLFPETEGFIIAIQDQVINTKNYKKYILKDNTISNDLCRKCLRKPETIQHITGACITLTQNDYTHRHNQLSNIIHQKLVLKYKLSKDPHTPYYKYSPSPVLENATHKIYYDRTILTDHTIYNNRPDITVVDKQNKHVFLIDIAVPNTNNIQFTITEKIRKYTELQEEVRRIWKMNNVTIVPIVISSTGVIPKQLFQSLNVLKLPKFTYVSLQKAAILNTCRIVR

SEQ ID NO: 15346 - protein, 1215 aa, Udranomia kikkawai
MKSPKLKNKYNLRSLSRACRNPSNTEQQTPESNTSTTIQLNTASVSSSESLETPPAADVSRAATAMKPATTKAGKPRVRMKWDKSVNIFIMRTYYQTTKLETEFTTFRKQMHDLFLQKYHDTNVTQQRLSVQRGVIIRNKLLSDEELSEIRNEVEKEYHIRRDTRIAVSQNPNTLTQSSDFTLDSVCNSWDDDFNTHQISFNDNARNEESLIKILDDQLLNNLRKYKDTDPITRPSLPRIKSSRYLSYILTLFNNHILLSKLNTVHNIVDTHTLIYCTSLTITEHLNIKIHRNLNNTEFKPAWQIRLEKDIEQLRKDIGRLIQYKSGNTSKKLINKIKHILTKTKSHSSYEPNNTKINEHLDTLKQKLSVKSHRLSRYKKAKTRKENNRLFAVNEKQFYRKIRGNNKEIANPPKAEALKEFWANIWERSAKHNRDAEWIQREMNRADIIEEMDFKDVDREELQGIINRTHNWKAPGPDKIYNYWFKRLIALHDILAKQITEVIKSDNIFPKFLSKGKTFLLPKSNSTHDPSQYRPITCLPTLYKIITSCIANRIYKHLDTFSVLAEEQKGCRRQHMGCKEQLVIDSAILKYVQKSRKDLCVAYIDYQKAFDSIPHSWLLQILEIYKIHPTIVKFLDNVMQTWKTTLYLQTNTSIINTEEINIKRGIFQGDSLSPLWFCLALNPLSRELHRSELGFNIKDNKLNLTQLTHLLYMDDLKLYSDNNSNMNKLLDITVKFTNDIKMDLGLDKCRKLNIKKGKLTQNSYKINEEQYISAMENNELYKYLGYKQARVIEHRQIKDNLKKEYFKRINILCKQHLSSKNLFKAINTYAIPVMTYSFGVIKWNKTELQQLEIKTRTLLTQNRYHHPKSAIERINIPRKEGGRGLIEISHLHNRQIENLKKFFISKNNSLLHKAINTIDKNFTPLNLNNQTIETVDSLKNKQEKYKRWREKELHGRHLRDLESIHIDKEASNKWLDSAGLFPETEGFIIAIQDQVITTKNYRKFIIKDTTITNDLCRKCLSKPETIQHITGACVTLTQNDYTHRHNQLAKIIHQKLAMKYNLTKDPHTPYYTYTPLPILENTTHKLYYDRTILTDHTIYNNRPDITLIDKTNKHTYIIDIAVPNTNNIQSTITEKVRKYTELQEEIKKIWKMSNVSIVPVIISTTGIVPKQLFNSLKLLNLPKFTYLTLQKAAILNTCRIVRKFLQLSDDDSTSH

SEQ ID NO: 15347 - protein, 1228 aa, Autochton zarex
MSSQQNKNKYNLRSLSRACRRSLKNEIGSRIVVESKTPEISQSQIVDNREFSETPPAENVSRVATAMKPATTKAGKPRVRMKWDKDVNIFIMRTYYQTTKLETEFTTFRKQMHDMFLLKYQDTSVTQQRLSVQRGVIVRNKLLSDEEISKIRCDVEKEYHITNSNRVTINSPQNQITFSPNPINVHRTCDILPDSWLSNDLDQEQLTLNNTGKEPALIETLKEMLENNLIKYGSIDPILRPSLPRMKPSRYLSYLIMLFNEKILPSKVNVLQNIADTHKFVYCTSLTVAEHLKINIHRTSKNKNYKPAWQIRLEQDIEQLRKDIGRLTQYKSGNTSKKLENKIKTILTKSKKHSSYEKDNKKITEHLDTLKQKLVIKSHRLARYKKAKNRKESNRLFTVNEKQFYRKMRESNEQLLNPPDVESLKQFWSSIWECNVEHNKEADWIQKEKVRMNRIEEMNFEIVTQEELQIVLNKAHNWKAPGPDGIHNYWFKKLIIFHNCLAKQITDIIKGSSTFPEFLSKGRTFLLPKSTSTQDPSQYRPITCLPTLYKIITSCIANRIYKHLDEFNILSEEQKGCRRQHMGCKEQLIIDSTILKHVQKSRKDLFVAYIDYQKAFDSIPHSWLTQVLEIYKVNPAIITFLKNVMQTWRTTLNLQLNTTLITTGEIEIKRGIFQGDSLSPLWFCLALNPLSRELNDSKVGFDIKNNRQTLFQITHLLYMDDLKLYSNTNLNMKKLLDITTKFTNDIKMSLGLDKCRKLNVKKGKLVKDKYKINEEEFISAMENNELYKYLGYNQARVIDHTVIKENLKKEYFKRLQALCKQQLTGKNLFKSINTYAIPVLTYSFGIIKWGKTDLQQLEIKTRTLLTQHRYHHPKSAIERVNISRKEGGRGLIEITHLHNRQIESLKKFFITKNNTPLHGAINTIDTKFTPLNLSDQTIEPVDTIKNNYEKYKRWREKELHGRHLHDLESTHIDKEASNKWLETAGLFPETEGFITAIQDQVICTKNYRKYIIKDNTLPNDLCRKCYSKPETIQHITGACVTLTQNDYTHRHNQLTKIIHQKLAIKYNLNKNSYTPYYTYIPPPILENTNHKIYYDRTVLTDHTIYNNRPDITLVDKKNKHTYIIDIAVPNTNNLQATIVEKIRKYTELQEEIKKIWKMNTVTIVPIVVSTTGVIPKQLFHSLNAIDLPKFTYLQLQKAAILNTCRIVRKFLQLDTDNNILGENNRYLI

SEQ ID NO: 15348 - protein, 1088 aa, Udranomia orcinus
MNSPKLKNKYNLRSLSRACRNPSNTGCSHTEQLAPERNPPVTTQLNIVSVSPMESLETPPAEDVSRAATAMKPATTKAGKPRVRMKWEKSMNIFIMRTYYQTTKLETEFTTFRKQMHDLFIQEYHDTNVTQQRLSVQRGVIIRNKLLSDEELNKIRNEVEREYCIRSTRIAVLQNQDTLTQNSQNSDNINLTTDSDCNSWVDDFNTQQIIVYDNASNEENLIKNLNDQLLINLTKYKDTDPVARPSLPRIKPSRYLSYILTLFNNHILLSKINTIHNIVDTHTLIYCTSLTITEHLNIKIHSNVSNIPFKPAWQIRLENDIEQLRKDIGRLIQYKSGNTSKKLINKIKHILTKTKSHSTYEPNNTKINEHLDTLKQKLSVKSHRLSRYKKAKTRKENNRLFTVNEKQFYRKIRGSNKEIVNPPDAVALKQFWANIWERSTEHNRNAEWIQKETCQADIIEEMDFKDVDREELQYIINRTHNWKAPGADKIYNYWFKKLIVLHDILAKQITDIIKTDSTFPEFLSRGKTFLLPKSNSTHDPSQYRPITCLPTLYKIITSCIANRIYKHLDKFSVLAEEQKGCRRHHMGCKEQLVIDSAILKYVQKSKKDLCVAYIDYQKAFDSIPHSWLLQILKIYKIHPTIVKFLEDVMQTWKTTLYLQTSTSLINTEEININRGIFQGDSLSPLWFCLALNPLSRELDRSKLGFNIKNNKQNLTQLTHLLYMDDLKLYSDNNSNMNKLLEITVKFTYDIKMDLGLDKCRKLSIKNGKLTQNSFKINEEQYISAMESNELYKYLGYKQARVIEHKEIKNNLKNEYFKRISILCKQHLSSKNLFKAINTYAIPVLTYSFGVIKWNKTELQQLEIKTRTLLTQNRYHHPKSAIERINIPRKEGGRGLIEITHLHNRQIENLKKFFISKNNSILHSAINIIDKNFTPLNLNNQTIETVDTLKNKQEKYRRWREKELHGRHLRDLESVHIDKEASNKWLDSAGLFPETEGFIIAIQDQVITTKNYRKYIIKDNTITNDLCRKCLCKPETIQHITGGCVTLTQNDYTHRHNQLAKIIHQKLAMKYNLTKDPHTPYYTYTPSSI

SEQ ID NO: 15349 - protein, 1096 aa, Euriphellus phraxanor
MKSHQSQNKYNLRSLTRACRKPLEEDVGCSPTPRVGISSPSHLHKSTEFPETPPAENVSQVATVMKPATTKAGKTRVRMKWDKEMNTFIMRTYFQTTKLETEFTTFRKQMHELFLQKYHDTNVTQQRISVQKGAIIRNKLLSDDEISTIRHEVGKEYNAKTTERTAINISQNIYTPSQNRDNLNLTQEISHTSWINNDSNPGQLTNPETALIENLQRLLESNLTKYYDTDPTTRPPLPRLKPSRYLTHLIMLFNKYILPAKIDTINNIVDTHILIYCTSLTIIEHLNIKIHNTLRNFDYKPAWQVRLENEVEQLRKDIGRLTQYKAGNTSKKLLNKIKEILKKSTKHSSYEQNNNKINNHLDTLKQKLLIKSHRLARYKKAKNRKESNRLFAVNEKQFYRKMRDTNKEILHPPTAESLKQFWSGIWETNVEHNKNAEWIQKERLRMGELEEMIFDDINREELQNILNRTHNWKAPGADGIHNYWFKKLNVLHDTLAKQITDIIKGDSIFPDFLSKGKTFLLPKSNFTQDPSQYRPITCLPTLYKVITSCIANRIYKHLEQFNILAEEQKGCRRHHMGCKEQLIIDSAILKHVQKSRKDLFVAYIDYQKAFDSVPHSWLLQVLEIYKIHPVMVSFLECIMQTWRTTLNIQVKGTVISSGEIKIKRGIFQGDSLSPFWFCLALNPLSQELNSSKLGFDIKHNRETLAQITHLLYMDDLKLYSNTNANMNRLLDITVGFTNDIKMDLGLNKCRKLNIKKGKLKDDNYKITEEQYISAMESNEVYKYLGYQQARVMQHTKIKEMLKKDFFKRLHAICKQQLNSKNLFKAINTYAIPVLTYSFGIIKWGKIDLHKLEIKTRTLLTQHRYHHPKSAIERVNIPRKEGGRGLIEINHLHSRQIESLKTFFISKNNNALHAAINIIDKKFTPLNLSDSTIEPVDTIKNKQEKYRKWREKELHGRHLHDLELAHVDKEASNKWLESAALFPETEGFIIAIQDQVINTKNYRKYIIKDNTLSNDLCRKCFSKPETIQHITGACVTLTQNDYTHRHNQLSKIIHQKLAMKYNLTKDPHTPYYTYIPSPILENSSHKIYNRHRQQYII

SEQ ID NO: 15350 - protein, 1228 aa, Aguna metophis
MNSKQTQNKYNLRSLSRACRRSLDNDVGSRTLNSMTSEVSQSKTIDNRESSVAPPAENVSRVATVMKPPTTKAGKPRVRMKWDKDVNIFIMRTYYQTTKLETEFTTFRKQMHDMFLQKYQDTNVTQQRLSVQKGVIIRNKLLSDEEINKIRYDVEKEYHIKNSERVAVNTQDNQNEISPNPDTINATSEFLPNSGVSYDFEPEQLTSNNRGKEPALIEALIAQLEINLAKYSGIDPILRPTLPRIKPSGYLTYLLNLFNKNILPPKINTINNIADTHTFVYCTSLTIAEHLNIKIHRISKNGDYKPAWQMRLEQEIEQLRKDIGRLTQYKNGNTSKKLLNKIKDILTKSKKHSSYEHDNKKIIEHLDTLKQKLLIKSHRLARYKKAKNRKESNRLFTANEKQFYRKIRESNKQLLNPPDAESLQQYWSDVWECNTEHNKEADWIHREKVRADEIEKMSFEDITREELQAVLNKSHNWKAPGIDGIHNFWFKKLNIFHESLATQITDILKGNSRFPEFLSRGKTFLLPKNTSTQNPSQYRPITCLPTLYKIITSCIANRIYKHIEEFNILAEEQKGCRRQHMGCKEQLIIDFTVLKHVQKSRKDLFIAYIDYQKAFDSIPHSWLTQVLEIYKVHPTIVTFLKHVMQTWRTTLNLQTNTASIKTGEIQIKRGIFQGDSLSPLLFCLALNPLSRELNNSNLGFDIKINRQILSQITHLLYMDDLKLYSNSNLNMNKLLDITTKYTNDIKMSLGLDKCRKLNIKKGKVIQGKYKINEEQYISAMEKNEFYKYLGYHQGRTIEHALIKQNLKTEYFKRVNAICKQQLTGKNLFKAINTYAIPVLTYSFGLIKWGKTDLHQLEIKTRTLLTQHRYHHPKSAIERVSTSRKEGGRGLIVISHLHDRQIESLKKFFIGKNNSLLHRAISTIDKNFTPLNLSDHTIESADTIKNKQEMYRRWREKELHGRHLHDLESTHIDKEASNKWLESAGLFPETEGFIIAIQDQVISTKNYRKYIIKDNTLPNDLCRKCFSKPETIQHITGACITLTQNDYTHRHNQLAKIIHQKLAIKYNLNKNLHTPYYTYMPPAILENTTHKLYYDRTVLTDHTIYNNRPDITLVDKKNKHTYIIDIAVPNTNNLQSTIVEKIRKYTELQEEIKKIWNMNIVTIVPIVVSTTGVIPKQLFHSLRTLDLPKFTYLTLQKAAILNTCRIVRKFLQLDTDNNTVHEINIMNLN

SEQ ID NO: 15351 - protein, 1227 aa, Astraptes enotrus
MYSKQTQNKYNLRSLSKACRRSSNNEVGRRTLDSKTPETSQSQTVNTEECSETPPAENVSQVATVMRPATTKAGKPRVRMKWDKEVNIFIMRTYYQTTRLETEFTTFRKQMHEMFLQKYQDTNVTQQRLSVQRGVIVRNKLLSDEEISNIRHEVEIEYCTKNNKRVTANTTQNEHTFNLNSDNLNLTSDTLHNSCISNNLDSQLLTLSNTSNETALIEALKDQLEVNLTKYGEIDPLLRPPLPRIKPSRYLSHLIMLFNKHILPPTINTIKTIEDTHTFIYCTSFTIIEHLNIKIHRTLKNSNYKPAWQIRLEREIEQLRKDIGRLTQYKAGNTSKKLLNKIKDILTKSKKHSSYEQNNKKLTEHLDTLKQKLVIKSHRLARYKKARSRQESNKLFTVNEKQFYRKMKESSTQLINPPDVESLKQFWSSIWECNTEHNKEAEWIQREKVRAGLIDEMKFDDVTQEELLTVLNKSHNWKAPGADAIHNYWFKKLSIFHDSLSKQITDIIKGHSTFPEFLSRGKTFLIPKNNSTQDPSQYRPITCLPTLYKVITSCIANRIYKHLDQFDILSEEQKGCRRHHMGCKEQLIIDSTILKYVQKRRKDLFVSYIDYQKAFDSVPHSWLIEVLEIYKVHPLIVNFLKHVMQTWKTTLNLQTSTSLINTGEIEINRGIFQGDSLSPLWFCLALNPLSRELNDSKLGFDIKNNRQTLFQITHLLYMDDLKLYSNTNSNMNKLLDITTKFTNDIKMNFGLDKCRKLNIKKGKLIQGKYKITEEQYISEMENNELYKYLGYNQARVIDHSVIKENLKIEYFKRCQLLCKQQLISKHLFKAINTYAIPVLTYSFGIIKWSKTDLHKLEIKTRTLLTQHRFHHPKSAIERVNISRKEGGRGLIEISHLHNRQIKSLKNFFITKNNNSLHAAINKIDDNFTPLNLSNQTIEAVDTIKNNQEKYRRWREKELHGRHPQDLESIHTDKEASNKWLESAGLFPETEGFIVAIQDQVISTKNYRKYIIKDNTLPNDLCRKCFSKPETIQHITGACVTLTQNDYTHRHNQLTKIIHQKLAMKYNLNKNPYTPYYTYIPPPILENSTHKLYYDRTVLTDHTIYNNRPDITLVDKKNKHTYIIDIAVPNTNNLQSTIVEKIRKYTELQEEIKKIWKMDNVTIVPIVVSSTGVIPKQLFHSLKIIDLPKFTYLTLQKAAILNTCRIVRKFLQLDPDNYTLHNTNTILN

SEQ ID NO: 15352 - protein, 1196 aa, Nicephellus nicephorus
MNSHHNQNKYNLRSLSRACRLPSYDKVGCNGLTNKTPKAIASTQAQVNIATELEETPPAENVSQVATVMKPATTKAGKPRVRMKWDKDINTFIMRTYYQTTKLETEFSTFRKQMHEMFLLKYKDTNVTQQRLLVQKGAIIRNKLLTDEEISNIRCEVIKEYHKKNSEHRLTNITQNQNNSSQNTDNSNLTSDILCNSWSNSYCTTQLSKLNGNIDDETTLIDALKKKLQTNLTKYSDTDPTSRPALPRIKPSRYLSYLIMLFNKYILPPKINSINNISDTHTFVYCTSLAIIEHLNIKLHYASRKLDNKPAWQIRLEQDIEQLRKHIGRLTQYIAGNTSKKLLNKIQDILTKSKKHSSYEQNNKKLKEHLDTLKQKLLVKSHRLARYKKAKNRKERNRLFTVNEKQFYRNMKETNKQLLNPPDAESIKQFWSGIWECKTEHNKEADWIQREKLQADGIEEMSFDDVNQEELQNILNKTHNWKAAGADGIHNFWFKKLNSLHGSLAKQITELIKGDSIFPDFLSKGKTFLLPKSNNTQDPSQYRPITCLPTLYKVITSCIANRIYKHLDQNNILAEEQKGCRRFHMGCKEQLIIDSTILKHAQKCRKDLFVTYIDYQKAFDSIPHSWLLQVLEIYKIHPVIVTFLKHVMQTWRTTLNLQVNTTSINISGIKINRGIFQGDSLSPLWFCLALNPLSRELNNSKLGFDIKNSRKTLFQITHLLYMDDLKLYSNTNSNMDKQLDITVKFTDDIRMNLGLDKCRKLNIKKGKLTHNNYKINEEQYILAMDNNELYKYLGYHQARVIDHTTIKEILKKEYFRRLHALCKQQLISKNLFKAINTYAIPVLTYSFGIIKWSKTDLHQLEIKTRTLLTQHRFHHPKSAIERVNISRKEGGRGLIEITHLHNRQIESLKKFFISKNSNPLHGAINIIDKNFTPLNLNNQTIEPVDSIKNKQEKHRKWREKELHGRHLQDLELTHVDKEASNKWLESAGLFPETEGFIIAIQDQVISTKNYRKYIIKDSILPNDLCRKCLSKPETIQHITGACITLTQNDYTHRHNQLTKIIHQKLALKYNLTKDPHTPYYNYIPSPILENTTHKIYYDRTVLTDHTIYNNRPDITLIDKKHKHTYLIDIAVPNTNNLQSTIVEKIRKYTELQEEIKKVWKMSKVTIVPIVISTTGVVPKQLFHSLKEIDLPKFTYL

SEQ ID NO: 15353 - protein, 1211 aa, Cecropterus albociliatus
MSSQQKQNKYNLRSLSRACRGSLKNEVGSATVEDSRTPETSQTSTGDNREFSETPPAENVSRVATAMKPATTKAGKPRVRMKWDKDVNIFIMRTYYQTTKLETEFTTFRKQMHDMFLLKYQDTNVTQQRLSVQRGVIIRNKLLSDEEINKIRYDVEKEYQMNNRDRMIINTPQNNSMFNSNTNNLNATYDILPNSQLSNDFDPKQITLNNTGKEPALIEALKELLENNLTKYGDIDPLLRPSLPRIKPFRYLSYLIMLFNNNILPSKMNIIHTIADTHKFVYCTSLTIAEHLNIKIHRTSKNENFKPAWQIRLEQDIEQLRKDIGRLTQYKSGNTSKKLENKIKIILTKSRKHSSYEKDNNKITEHLDTLKQKLFIKSHRLARYKKAKNRKESNRLFTVNEKQFYRKMRGSNKQVLNPPDPESLKQFWSNIWEYDVEHNENADWIQREKVRMDRVEEMSLEDVTKDELQIVFNKAHNWKAPGPDGIHNYWFKKLIIFHNCLAKQITDIIQGSSVFPEFLSKGTTFLLPKSNSTQDPSQYRPITCLPTLYKIITSCIANRIYKHLDDFNILSEEQKGCRRQHMGCKEQLIIDSTILKHVQKSRKDLFVAYIDYQKAFDSIPHSWLTQVLDIYKVHPTIITFLKNVMQTWRTTLHLQTNTTLINTEQIEINRGIFQGDSLSPLWFCLALNPLSRELSDSKVGFDIKYNRQTLSQITHLLYMDDLKLYSNTNLNMKKLLDITTKFTTDIKMNLGLDKCRKLNIKKGKLVQGQYKINEEQYILAMENNELYKYLGYNQARVIEHTVIKENLKKEYFKRIQALCKQQLTSKHLFKSINTYAIPVLTYSFGIIKWGKTDLQQLEIKTRTLLTQHRYHHPKSAIERVNISRKEGGRGLIEITHLHDRQIESLKIFFITKSNSSLHGAINTIDKNFTPLNLSDQTIEPVDTLKNKLEKYKRWREKELHGRHLLDLESTHIDKEASNKWLESAGLFPETEGFIIAIQDQVISTKYYRKYIIKDPTLPNDLCRKCFSKPETIQHITGACVTLTQNDYTHRHNQLTKIIHQKLAIKYNLNKYSHTPYYNYTPPAILENSSHKIYYDRTVLTDHTIYNNRPDITLVDKKNKHTYIIDIAVPNTNNLQSTIVEKIRKYTELQEEIKKIWKMNRVTIVPIVVSTTGVIPKQLFHSLKAIDLPKFTYVALQKAAILKTYRIVRKFL

SEQ ID NO: 15354 - protein, 1229 aa, Epargyreus clarus
MNSTQTQNKYNLRSLSRACRISSNNDVGRRNLDTQTSESSQSLSVDTRELSETPPAETVSRVATVMKPATTKAGKPRVRMKWDKDVNIFIMRTYYQTTKLETEFTTFRKQMHDMFLQKYQDTNVTQQRLSVQRGVIIRNKLLSDDEINEIRYEVEKEYHLKNSERLTANTSQNQVNTSQFSSNPAVNFNATSDILLESSLSNPEHLILNNTGKELALLETLKEHFEINLTKYSAVDPILRPSPPRIKPSRYLSYLITLFNKNILPPKVNIINNITDTHTFIYCTSITIAEHLNIKIHRTSKNVDYKPAWQIRLEQEIEQLRKDIGRLTQYKLGNTSKKIINIVKDILSKSKKHSSYEKDNKKITEHLDTLKQKLLIKSHRLARYKKAKNRKESNRLFTVNEKQFYRKMRESNKKVINQPDIQCLKQFWSGIWECNTEHNEEADWIQREKVRVGSVEEMNFEHITREELQTVLNKSHNWKAPGADGIHNFWLKKLSIFHDFLAKQINDIIQGNSIFPEFLSRGKTFLLPKSTSTQDPSQYRPITCLPTLYKVITSCIANRIYKHLEEYNILSEEQKGCRRHHMGCKEQLTIDSTILKHVQKNRKDLYVAYIDYQKAFDSIPHSWLTQVLEIYKVQPTIVTFLKHVMQTWRTTLTLQTNTTLIKTGEIEINRGIFQGDSLSPLWFCLALNPLSRELNDSKLGFDIKNNRQTLFQITHLLYMDDLKLYSNTNSNINKLLDITTKFTDDIKMNLGLDKCRKLNIKKGKLIRGAYKINEQQYISAMENNELYKYLGYNQAQVIDYKLIKDNLKTEYFKRVQTICKQQLTSRNLFKAINTYAIPVLTYSFGVIKWGKTDLHQLEIKTRTLLTQHRYHHPKSAIERVNVSRKEGGRGLIDITHLHNKQIENLKNFFINKSNSSLHGAINTIDKNFTPLNLSDQTVEQVDTIKNNQEKYTRWREKELHGRHLHDLESIQIDKEASNKWLESAGLFPETEGFIIAIQDQVISTKNYRKYIIKDNTLPNDLCRKCFSKPETIQHITGACVTLTQNDYTHRHNQLTNVIHQKLAIKYNLNKNPHTPYYTYTAPPILENTTHKLYYDRTVLTDHTIYNNRPDITLVDKKNKHTYIIDIAVPNTNNLQSTIAEKIRKYTELQEEIKKIWKMNSVTIVPIIVSTTGVIPKQLFHSLKTLDLPKFTYLTLQKAAILNTCRIVRKFLQLDTDNNTLHETNTIILN

SEQ ID NO: 15355 - protein, 1228 aa, Cecropterus bathyllus
MSSQQNQNKYNLRSLSRACRRSLKNEVGSTTVVDSRTPETSQSQTGDNREFSETPPAENVSRVATAMKPATTKAGKPRVRMKWDKEVNIFIMRTYYQTTKLETEFTTFRKQMHDMFILKYKDTNVTQQRLSVQRGVIIRNKLLSDEEISQIRYDVEKEFHKINSERAIINIPQNQNTFSPNPDNLNATCDILPNSWLTNESNPEQITSNNIDKEPALIKALKEQLENNLSKYGEMDPILRPSLPRIKPSRYLTYLIMLFNKNILPSKINKIHNIADTHKFVYCTSLTVIEQLNIKIHRTSTNVNYKPAWQIRLEQEIEQLRKDIGRLTQYKSGNTSKKLENKIKDILTKSKKHSSYEKDNKKITEHLDTLKQKLVIKSHRLARYKKARNRKESNRLFTVNEKQFYRKMKESNKQLLNPPDIDSLKQFWSRIWECNTEHNKETDWIQREKVRMDRIEEMSFEDISQEELQIVLNKSLNWKAPGTDGIHNFWLKKLTIFHKCLAKQITDIIKGNSIFPEFLSRGKTFLLPKSTSTQDPSQYRPITCLPTLYKVITSCIANRIYKHLDDFNILSEEQKGCRRQHMGCKEQLIIDSTILKHVQKRRKDLFVAYIDYQKAFDSIPHSWLTEVLEIYKVHPTIITFLKNVMQTWRTTLNLQTNTTLINAGEIDIKRGIFQGDSLSPLWFCLALNPLSRELNDSKAGFDIKNNRQTLFQITHLLYVDDLKLYSNTNLNMKKLLDITTNFTSDIKMTLGLDKCRKLNIKRGKLIQGKYKISEEQYISAMERDELYKYLGYNQARVIEHTVIKEHLKKEYFKRLQALCKQQLNSKNLFKSINTYAIPVLTYSFGIIKWAKTDLQQIEIKTRTLLTQHRYHHPKSAVERVNISRKEGGRGLIDITHLHNRQIESLRNFFITKNNSSLHVAINTIDNNFTPLNLCNQTIEPVDTLKHNQEKYKRWREKELHGRHLHDLESIHIDKEASNKWLESAGLFPETEGFIIAIQDQVISTKNYRKYIIKDITLPNDLCRKCFSKPETIQHITGACVTLTQNDYTHRHNQLTKIIHQKLAIKYSLNKNPHTPYYTYTPPPILENTSHKIYYDRTVLTDHTIYNNRPDITLVDKNNKHTYIIDIAVPNTNNLQSTIVEKIRKYTELQEEIKKIWKMKTVTIVPIVVSTTGVIPKQLFHSLKAIDLPKFTYLALQKAAILNTCRIVRKFLQLDSDNTVYENNIIKLN

SEQ ID NO: 15356 - protein, 1234 aa, Epargyreus clarus
MNNTQTQNKYNLRSLSRACPKSSNDVGCRNVGTKTSESSQSPSVDTRELSETPPAETVSRVATVMKPATTKAGKPRVRMKWDKDVNIFIMRTYFQTTKLETEFTTFRKHMHDMFLQKYQDTNVTQQRLSVQRGVIIRNKLLSDEEINKIRYEVEKEYNLKNSERLTVNTNQVNTSQFSPNSDTFNATPDILPDSLLSNPDFNPEHLTINNTEKELALIETLKQQFQINLTKYSTIDPILRPSLPRIKPSRYLSYLIMLFNKNILPPKISIINNITDTHTFIYCTSITIVEHLNIKIHRTSKNTEYKPAWQIRLEQEIEQLRKDIGRLTQFKSGNTSKKLINKIKDILTKSKKHSSYEKDNKKVTEHLDTLKQKLLIKSHRLARYKKAKNRKESNRLFTVNEKQFYRKMRESNKKLINPPDIESLKQFWAGVWECNTEHNKEADWIQREKVRAEKVEEMNFETFTREELQTVLNKSHNWKAPGPDGIHNFWLKKLGIFHDCLAEQISDIIQGNSIFPDFLSRGKTFLLPKNTSTQDPSQYRPITCLPTLYKIITSCIANRIYKHLEEYNILSEEQKGCRRHHMGCKEQLIIDSTILKHVQKSKKDLYVAYIDYQKAFDSIPHSWLTQVLEIYKVHPTIVIFLKHVMQTWRTTLNLQTNTTLIETGEIEINRGIFQGDSLSPLWFCLALNPLSRELNNSKLGFNIKNNRQTLFQITHLLYMDDLKLYSNTNSNINKLLDITTKFTNDIKMSLGLDKCRKLNIKNGKLIHGAYKINDEQYISAMENNELYKYLGYSQARVIEYRLIKENLKKEYFKRLQAVCKQQLTSRNLFKAINTYAIPVLTYSFGIIKWGKTELHQLEIKTRTLLTQHRYHHPKSAIERVNTSRKEGGRGLIEITQLHNKQIENLKNFFINKNNNSLHGAINTIDKNFTPLNLSDQTVEPVDTIKNNQDKYRRWREKELHGRHLHDLESTHIDKEASNKWLESAGLFPETEGFIIAIQDQVISTKNYRKYIIKDNTLPNDLCRKCFSKPETIQHITGACVTLTQNDYTHRHNQLTNIIHQKLVMKYNLNKNPHTPYYTYTPPAILENTTHKLYYDRTVLTDHTIYNNRPDITLVDKKNKHTYIIDIAVPNTNNLQSTIVEKIRKYTELQVEIKKLWKMNSVTIVPIVVSTTGVIPKQLFHSLKAIDLPKFTYLALQKAAILNTCRIVRKFLQLDSDNDTLHNITHTTPDTINLN

SEQ ID NO: 15357 - protein, 909 aa, Cecropterus evenus
MKDKENLRKDIGRLTQFKSGNNSKKLYKNVEKILNKAKQHSSHEQLNIKINEYLDTLKQKLAVKSHRLARYKKAKDRKDNNILFTTSEKQFYRKIKQTSKNEIKTPPIISLKKFWSDIWAQNTEHNRDAKWIQSEINRSQYIQDMQFNDIDDKELQTIINKTHNWKAAGIDGIHNYWFKKLFVLHNKLAKQITDIIKGLSLLPEFLSKGRTFLLPKNNDNTEDPSQYRPITCLPTLYKIITSVIANRIYSHLEQFNILSEEQKGCRRHHMGCKEQLIIDSTILKHVEKSKQDLFVTYIDYQKAFDSIPHSWLIKVLEIYKINNTIISFLKSIMSTWRTNVNLNINKNRINVGEIQIKRGIFQGDSLSPLWFCLALNPLSQELNNTKFGFKIKNNKQTMCQITHLLYMDDLKLYSNSNINMDRLLDTTVRFTTDIKMDFGLDKCRKLNIKKGKIMSGGYMINEEQQIAAMESHDIYKYLGYNQSRLLQHAAIKDKLKKEYISRLHVVCKQYLSSRNLFKAINTFAIPILTYSFGVIRWSKTELKQLEIKTRTTLTQYRYHHPKSAIERICIPRKEGGRGLIDITQLHDKQINVMKVFFINKKENSHLHKAVIQIDNKYTPLNLNEEHIEIVDTKKLTEEKHSKWKEKELHGRHKHDLEQADVDKEASNKWLELSGLFPETEGFIIAIQDQVITTKNYRKYILKDNTIVNDLCRKCFSKPETIQHITGACIKLTQNDYTHRHNQVSNIIHQKLVIKYKLTNEPHTPYYKYSPSPVLENKTYKIYYDRTILTDHTIYNNRPDITFVDKQNKHTFIIDIAVPNTNNIQTTIIEKIRKYTELQEEIKRVWKMNTVTIVPIVVSSTGVIPKQLFQALKTLDLPKFTYVTIQKAAILNTCRLVRKFLQLNAENDTG

SEQ ID NO: 15358 - protein, 1276 aa, Idaea aversata
METRNKSKRLTPLPGGYRRGTPGADAGCSSMRTIGGGRISRRSPAGTPEEATSSQLSLETIVPESSETPPAEDVSRAASAMRPATTKAGKPRVRMKWDADINTFIMRTYYKITKLETDLTTYRQLLHQEFSKKYPDSNISEQRLSDQRRVIMRNKLLSDEILENIKIEIAKELEEETQDSQSTQQLITHSQASSSQHTNITTQSTAVTDLNVNALSCDSILYSDTYHSLTTQNTQVNLTQDLVIDDRTDLLIEQLKEHLETNLAKYNGTDPSVRPLLPRTKTNKKLSYIINLFNRSILPNKLSLLENITETHTLIYCSALTIVEHLKIRIPSPPIITNNVKQNKPAWQIRLINDIEKLRRNIARLIQYKAGNRGRKLTKNIIEIMKQYKIHSSYENDNSKLNEFIDTLKQKLAVKSHRLSRYKKAQNRKENNKLFTNNEKQFYRKLRCTTNTNISTTPSKTELTDFWSNIWSQTVEHNKEAIWIDKERLRMDSIPEMEFDRVEVEELILVIKKTHNWKATGADKVHNFWIKRFTSLFITLAEQITDLIRGNATIPNFLTKGVTYMLPKSARTEDPSQYRPITCLPTLYKIITACITSQINRHINTNNILAEEQKGCRKFHMGCKEQLTIDSTILKQVQSSKKDLYVSYIDYKKAFDSIPHSWLLQILEIYKINPILINFLKTVMANWRTTLNLRTDLNNIETEELAINRGIFQGDSLSPLWFCLALNPLSHELVDSKLGFDIKCNRRVLTQLTHLLYMDDLKLYAKNNSDMTGLLNITKDFSADIKMDLGLDKCRRLNIHKGKVVPGSFNIDEGQEIVAMDSSEVYKYLGYNQARSIDHAEIRNRLKQEYFHRLFTLCKSNLSSKNLIKSINTYAIPVLTYSFGVIKWPKYELQKLEIKTRTTLTQYRHHHPKSAIERVTLSRKEGGRGLIDVTLLHNKQVYALKHFFIEKQLASPLHHAVVEIDKNFTPLNLSDHNLEVIDINKHNQDKYNSWKRKELHGRHIHDLEQTHVDKEASNKWLDCAGLFPETEGFIIAIQDQVINTKNYRKYIIKDRNLQSDLCRKCHNKPETIQHITGACITLTQNDYTHRHNQLVNIIHQKLAYKHSLIKEPPIPYYKYTAQHVLENPSYKLYYDRTILTDHTIYNNRPDITLVDKINKHTFIIDIAVPNTNNLQTTITEKIRKYTELQEEIKRVWKMNRVTIVPIVVSTTGVIPKYLFNSLQVLDLPKNTFLTLQKASILNTCRTVRKFLQLDSDNSINVSLTHQPQSVSPTTQT

SEQ ID NO: 15359 - protein, 1275 aa, Idaea aversata
METRNKSKRLTPLPGGYRRGTPGADAGCSSMRTIGGGRISRRSPAGTPEEATSSQLSLETIVPESSETPPAEDVLRAASAMRPATTKAGKPRVRMKWDADINTFIMRTYYKITKLETDLTTYRQLLHQEFSKKYPDSNISEQRLSDQRRVIMRNKLLSDKILGNIKIEIAKELEEETQESQSTQQLITHSQASSSQHTNITTQSTAVTDLNVNALSCDSILYSDTYHCLTTQNTQVNLTQDLVIDDRTDLLIEQLKEHLETNLAKYNGTDPSVRPLLPRIKTNKKLSYIINLFNRSILPNKLSLLENLTETHTLIYCSALTIVEHLKIRIPSPPIITNNVKQNKPAWQIRLINDIEKLRRNIARLIQYKAGNRGRKLTKNIIEIMKQYKIHSSYENDNSKLNEFIDTLKQKLAVKSHRLSRYKKAQNRKENNKLFTNNEKQFYRKLRCTTNTNISTTPSKTELTDFWSNIWSQTVEHNKEAIWIDKERLRMDSIPEMEFDRVEVEELILVIKKTHNWKATGADKVHNFWIKRFTSLFITLAEQITDLIRGNATIPNFLTKGVTYMLPKSARTEDPSQYRPITCLPTLYKIITACITSQINRHINTNNILAEEQKGCRKFHMGCKEQLTIDATILKQVQSSKKDLYVSYIDYKKAFDSIPHSWLLQILEIYKINPILINFLKTVMASWRTTLNLRTDLNNIESEELAINRGIFQGDSLSPLWFCLALNPLSHELVDSKLGFDIKCNRRVLTQLTHLLYMDDLKLYAKNNSDMTGLLNITKDFSADIKMDLGLDKCRRLNIHKGKVVPGSFKIDEGQEIVAMDSSEVYKYLGYNQARSIDHAEIRNRLKQEYFHRLFSLCKSNLSSKNLIKSINTYAIPVLTYSFGVIKWPKYELQKLEIKTRTTLTQYRHHHPKSAIERVTLSRKEGGRGLIDVTLLHNKQVYALKHFFIEKQLASPLHHAVVEIDKNFTPLNLSDHNLEVIDINKNNQDKYNSWKRKELHGRHIHDLEQTHVDKEASNKWLDCAGLFPETEGFIIAIQDQVINTKNYRKYIIKDRNLQSDLCRKCHNKPETIQHITGACITLTQNDYTHRHNQLANIVHQKLAYKHSLIKEPPIPYYKYTAQHVLENPSYKLYYDRTILTDHTIYNNRPDITLVDKINKHTFIIDIAVPNTNNLQTTITEKIRKYTELQEEIKRVWKMNRVTIVPIVVSTTGVIPKYLFNSLQVLDLPKNTFLTLQKASILNTCRIVRKFLQLDSDNSINVSLTHQPQSVSTTQT

SEQ ID NO: 15360 - protein, 1275 aa, Idaea aversata
METRNKSKRLTPLPGGYRRGTPGADAGCSSMRTIGGGRISRRSPAGTPEEATSSQLSLETIVPESSETPPAEDVSRAASAMRPATTKAGKPRVRMKWDADINTFIMRTYYKITKLETDLTTYRQLLHQEFSKKYPDSNISEQRLSDQRRVIMRNKLLSDKILENIKIEIAKELEEETQESQSTQQLITHSQALSSQHTNITTQSTAVTDLNVNALSCDSILYSDTYHSLTTQNTQVNLTQDLVIDDRTDLLIEQLKEHLETNLAKYNGTDPSVRPLLPRIKTNKKLSYIINLFNRSILPNKLSLLENITETHTLIYCSALTIVEHLKIRIPSPPIIANNVKQNKPAWQIRLINDIEKLRRNIARLIQYKAGNRGRKLTKNIIEIMKQYKIHSSYENDNSKLNEFIDTLKQKLAVKSHRLSRYKKAQNRKENNKLFTNNEKQFYRKLRCTTNTNISTTPSKTELTDFWSNIWSQTVEHNKEAIWIDKERLKMDSIPEMEFDRVEVEELILVIKKTHNWKATGADKVHNFWIKRFTSLFITLAEQITDLIRGNATIPNFLTKGVTYMLPKSARTEDPSQYRPITCLPTLYKIITACITSQINRHINTNNILAEEQKGCRKFHMGCKEQLTIDATILKQVQSSKKDLYVSYIDYKKAFDSIPHSWLLQILEIYKINPILINFLKTVMASWRTTLNLRTDLNNIESEELAINRGIFQGDSLSPLWFCLALNPLSHELVDSKLGFDIKCNRRVLTQLTHLLYMDDLKLYAKNNSDMTGLLNITKDFSADIKMDLGLDKCRRLNIHKGKVVPGSFNIDEGQEIVAMDSSEVYKYLGYNQARSIDHAEIRNRLKQEYFHRLFTLCKSNLSSKNLIKSINTYAIPVLTYSFGVIKWPKYDLQKLEIKTRTTLTQYRHHHPKSAIERVTLSRKEGGRGLIDVTLLHNKQVYALKHFFIEKQLASPLHHAVVEIDKNFTPLNLSDHNLEVIDINKNNQDKYNSWKRKELHGRHIHDLEQTHVDKEASNKWLDCAGLFPETEGFIIAIQDQVINTKNYRKYIIKDRNLQSDLCRKCHNKPETIQHITGACITLTQNDYTHRHNQLANIVHQKLAYKHSLIKEPPIPYYKYTAQHVLENPSYKLYYDRTILTDHTIYNNRPDITLVDKINKHTFIIDIAVPNTNNLQTTITEKIRKYTELQEEIKRVWKMNRVTIVPIVVSTTGVIPKYLFNSLQVLDLPKNTFLTLQKASILNTCRIVIKFLQLDSDNSINVSLTHQPQSVSTTQT

SEQ ID NO: 15361 - protein, 1275 aa, Idaea aversata
METRNKSKRLTPLPGGYRRGTPGADAGCSSMRTIGGGRISRRSPAGTPEEATSSQLSLETIVPESSETPPAEDVSRAASAMRPATTKAGKPRVRMKWDADINTFIMRTYYKITKLETDLTTYRQLLHQEFSKKYPDSNISEQRLSDQRRVIMRNKLLSDKILENIKIEIAKELEEETQESQSTQQLITHSQALSSQHTNITTQSTAVTDLNVNALSCDSILYSDTYHSLTTQNTQVNLTQDLVIDDRTDLLIEQLKEHLETNLAKYNGTDPSVRPLLPRIKTNKKLSYIINLFNRSILPNKLSLLENITETHTLIYCSALTIVEHLKIRIPSPPIIANNVKQNKPAWQIRLINDIEKLRRNIARLIQYKAGNRGRKLTKNIIEIMKQYKIHSSYENDNSKLNEFIDTLKQKLAVKSHRLSRYKKAQNRKENNKLFTNNEKQFYRKLRCTTNTNISTTPSKTELTDFWSNIWSQTVEHNKEAIWIDKERLRMDSIPEMEFDRVEVEELILVIKKTHNWKATGADKVHNFWIKRFTSLFITLAEQITDLIRGNATIPNFLTKGVTYMLPKSARTEDPSQYRPITCLPTLYKIITACITSQINRHINTNNILAEEQKGCRKFHMGCKEQLTIDATILKQVQSSKKDLYVSYIDYKKAFDSIPHSWLLQILEIYKINPILINFLKTVMASWRTTLNLRTDLNNIESEELAINRGIFQGDSLSPLWFCLALNPLSHELVDSKLGFDIKCNRRVLTQLTHLLYMDDLKLYAKNNSDMTGLLNITKDFSADIKMDLGLDKCRRLNIHKGKVVPGSFNIDEGQEIVAMDSSEVYKYLGYNQARSIDHAEIRNRLKQEYFHRLFTLCKSNLSSKNLIKSINTYAIPVLTYSFGVIKWPKYDLQKLEIKTRTTLTQYRHHHPKSAIERVTLSRKEGGRGLIDVTLLHNKQVYALKHFFIEKQLASPLHHAVVEIDKNFTPLNLSDHNLEVIDINKNNQDKYNSWKRKELHGRHIHDLEQTHVDKEASNKWLDCAGLFPETEGFIIAIQDQVINTKNYRKYIIKDRNLQSDLCRKCHNKPETIQHITGACITLTQNDYTHRHNQLANIVHQKLAYKHSLIKEPPIPYYKYTAQHVLENPSYKLYYDRTILTDHTIYNNRPDITLVDKINKHTFIIDIAVPNTNNLQTTITEKIRKYTELQEEIKRVWKMNRVTIVPIVVSTTGVIPKYLFNSLQVLDLPKNTFLTLQKASILNTCRIVRKFLQLDSDNSINVSLTHQPQSVSTTQT

SEQ ID NO: 15362 - protein, 896 aa, Apodemia virgulti
MKHVNELLKSNKVHGAHGDINKKIKEYLDTLKQKLAVKSHRLARYKKSQERKENNRLFSKNEKMFYRKLKESTIDIKQCPSKTDLTNFWSNIWSKSVEHNRNSAWIDRENERMKYMEEMEFENITLEELQDIIKKTHNWKAAGIDGIHNYWIKKFSNLHIILGQHISNILKGTATIPEFLTKGITFMLPKTTRTDDPSQYRPITCLPTLYKIITSCITNLINRHINKNNILAEEQKGCRKFHMGCKEQLTIDAVVLKYIQSKRKDLFVTYIDYKKLFDSIPHSLLIQILEVYKIHPLIIRFLKNAMANWRTTLILQSADNKIVTDEIPIKRGIFQGDSLSPLWFCLALNPLSHDLINSKLGLDIKINRYNSFQLTHLLYMDDLKLYSNTDKNMIELLNITTQYSKDISMDLGLDKCKKLNIKKGKIVPGNYHIDENQSIKAMECNDLYKYLGYNQARQIEHTKIKTHLKEEYINRVYSLCKKSINSKNLFKSINTYAIPILTYSFGIIKWSKTELQNLQIKTRTILTQYRYHHPKSAIERITLHRKHGGRGLIDVMILHKKQVFKLKQFFNSKKTSSMLHEAICNIDKNYTPLNLSDHNLEIVDEKQYYKDKYNRWNSKELHGRHPSDLNQNFIDIEASNKWLDCAGLFPETEGFIIAIQDQVINTRNYRKFIIKDKSIQSDLCRKCNNKPETIQHIIGGCITLTQNDYTHRHNQLANILHQKLAYKYSLIQGPPAPYYNYIPQHVLDSSTHKLYFDRTIITDHTIYNNRPDITLVDKQNRHTYIIDVAVPNTNNIQATITEKIRKYTELQEEIRNVWKMDRVTIVPIVVSNTGVIPTLLHNALKILNLPKNTYITLQKAAILNTCRTVRKFLQLSSGNEIVPHQNSLNVNDPNLG

SEQ ID NO: 15363 - protein, 1275 aa, Idaea aversata
METRNKSKRLTPLPGGYRRGTPGADAGCSSMRTIGGGRISRRSPAGTPEEATSSQLSLETIVPESSETPPAEDVSRAASAMRPATTKAGKPRVRMKWDADINTFIMRTYYKITKLETDLTTYRQLLHQEFSKKYPDSNISEQRLSDQRRVIMRNKLLSDKILENIKIEIAKELEEETQESQSTQQLITHSQALSSQHTNITTQSTAVTDLNVNALSCDSILYSDTYHSLTTQNTQVNLTQDLVIDDRTDLLIEQLKEHLETNLAKYNGTDPSVRPLLPRIKTNKKLSYIINLFNRSILPNKLSLLENITETHTLIYCSALTIVEHLKIRIPSPPIIANNVKQNKPAWQIRLINDIEKLRRNIARLIQYKAGNRGRKLTKNIIEIMKQYKIHSSYENDNSKLNEFIDTLKQKLAVKSHRLSRYKKAQNRKENNKLFTNNEKQFYRKLRCTTNTNISTTPSKTELTDFWSNIWSQTVEHNKEAIWIDKERLRMDSIPEMEFDRVEVEELILVIKKTHNWKATGADKVHNFWIKRFTSLFITLAEQITDLIRGNATIPNFLTKGVTYMLPKSARTEDPSQYRPITCLPTLYKIITACITSQINRHINTNNILAEEQKGCRKFHMGCKEQLTIDATILKQVQSSKKDLYVSYIDYKKAFDSIPHSWLLQILEIYKINPILINFLKTVMASWRTTLNLRTDLNNIESEELAINRGIFQGDSLSPLWFCLALNPLSHELVDSKLGFDIKCNRRVLTQLTHLLYMDDLKLYAKNNSDMTGLLNITKDFSADIKMDLGLDKCRRLNIHKGKVVPGSFNIDEGQEIVAMDSSEVYKYLGYNQARSIDHAEIRNRLKQEYFHRLFTLCKSNLSSKNLIKSINTYAIPVLTYSFGVIKWPKYDLQKLEIKTRTTLTQYRHHHPKSAIERVTLSRKEGGRGLIDVTLLHNKQVYALKHFFIEKQLASPLHHAVVEIDKNFTPLNLSDHNLEVIDINKNNQDKYNSWKRKELHGRHIHDLEQTHVDKEASNKWLDCAGLFPETEGFIIAIQDQVINTKNYRKYINKDRNLQSDLCRKCHNKPETIQHITGACITLTQNDYTHRHNQLANIVHQKLAYKHSLIKEPPIPYYKYTAQHVLENPSYKLYYDRTILTDHTIYNNRPDITLVDKINKHTFIIDIAVPNTNNLQTTITEKIRKYTELQEEIKRVWKMNRVTIVPIVVSTTGVIPKYLFNSLQVLDLPKNTFLTLQKASILNTCRIVRKFLQLDSDNSINVSLTHQPQSVSTTQT

SEQ ID NO: 15364 - protein, 1280 aa, Idaea aversata
METRNKSKRLTPLPGGYRRGTPGADAGCSSMRTIGGGRISRRSPAGTPEEATSSQLNLEAIVPESPETPPVEDVSRAASAMRPATTKAGKPRVRMKWDADINTFIMRTYYKITKLETDLTTYRQLLHLEFSKKYPDSNISEQRLSDQRRVIIRNKLLSDDILENIKIEIAKELEEEPKDLQTTQQFITHSQASPTQHTNITNTQSTAVTDYNVNTQSSILPCDSILYSDTYHSLTTQHTQVNLTQNLGIDDRTDLLIEQLKEHLETNLTKYNGTDPSVRPFLPRIKTNKKLSYIINLYNRSILPNKLSSLENIADTHTLIYCSALTIIEHLKIRIPSSPLTTNNVKLNKPAWQIRLINDVEKLRRNIARLIQYKAGNRGRKLTKNIIEIMKQYKIHSSYETDNSKLNEFIDTLKQKLAVKSHRLSRYKKAQDRKENNKLFTNNEKQFYRKLRCTTNTNISTTPSKTELTDFWSKIWSQTVEHNKEAIWIDKERLRMDSIPEMEFDRVEVEELIFVIKKTHNWKATGADKVHNFWIKRFTSLFITLAEQITDLIRGNATIPNFLTKGVTYMLPKSARTEDPSQYRPITCLPTLYKIITACITSQINRHINTNNILAEEQKGCRKFHMGCKEQLTIDSTILKQVQSSKKDLYVSYVDYKKAFDSIPHSWLLQILEIYKINPLLINFLKTVMASWRTTLNLRSDLNNIESEELAINRGIFQGDSLSPLWFCLALNPLSHELVDSKLGFDIKCNRRVLTQLTHLLYMDDLKLYAKNNSDMTGLLNITKDFSADIKMDLGLDKCRRLNIHKGKVVPGSFNIDEGQEIVAMNSSEVYKYLGYNQARSIDHAEIRNRLKQEYFHRLFTLCKSNLSSKNLIKSINTYAIPVLTYSFGVIKWPKYELQKLEIKTRTTLTQYRHHHPKSAIERVTLSRKEGGRGLIDVNLLHNKQVYALKHFFIEKQLASPLHNAVVEIDKNFTPLNLSDNNLEVIDINKHNQDKYNSWKRKELHGRHIHDLEQTNVDKEASNKWLDCAGLFPETEGFIIAIQDQVINTKNYRKYIIKDRNLQSDLCRKCHNKPETIQHITGACITLTQNDYTHRHNQLANIVHQKLAYKHSLIKEPPIPYYKYTAQNVLENPSYKLYYDRTILTDHTIYNNRPDITLVDKINKHTFIIDIAVPNTNNLQTTITEKIRKYTELQEEIKRVWKMNRVTIVPIVVSTTGVIPKYLFNSLQVLDLPKNTFLTLQKASILNTCRIVRKFLQLDSDNSINVSLTHQPQSLSSIQI

SEQ ID NO: 15365 - protein, 1262 aa, Phalera bucephala
METRSNRKRLMPLPGGDRRGTPGAGAGRSSMQATGGESITGRSLAGIPEEATSSTSNPTIAQEFQTQPAADASQAASAMRPATTKAGKPRVRMKWDKDVNIFIIRTYLQITNLETDLTEYRQKLHQEFIQQYPNANVTEQRLSDQRRAIIRNRFLSEETLQQIRDEVQYSIRSSNKFDNTSQVIPSPLIGNNVPRHCDYINSQEDTGILTQDISNIQSFENIPQYNTQTQPITQTNLQLEESQTHLDDTDLKYILTENLETYLTKYTGTNPADRPSLPKIRSSRTLTKIINSFNNTIIPKKITNLETITDTHTLIYCSALTIVAHLKIKIRNKCNKIIKTKPAWQIRLEKDIEQLRKDIGRLTQHKNGNTSKKLSAKIKQILIKSNKHSSYEDPNRRIDDHLDTLKQKLAVKSHRLARYIKAENRKRHNKLFFHNQKGFYRQLKDKHTPITALPDEEAMTHFWSNIWSNNAEHNPEAEWINREITRTSTIDEMKFEEIKLEELKRIINKTKNWKAAGLDGIHNFWIKRLHAVHETLAKQINELIKGKGNVPEFLTKGITYMLPKSNQTQDPSQYRPITCLPTLYKIITSCIANRINAHIEQFSILAEEQKGCRRHHMGCKEQLTIDSAILKSVQKSRKNLFVAYIDYKKAFDSIPHSWLLQVLKIYKINPVIINFIQTVMTSWRTTLHIRTDSKNFTSNDIAIKRGIFQGDSLSPLWFCLALNPLSRELIDSKLGFNIKNNRQTLFQLTHLLYMDDLKLYANRSTDLDNLLSITTKFSHDIKMDFGLDKCRKLNIKKGKMIEGDFMITETECIQAMNNEELYKYLGYNQARLIDHSNIKKKLKEEYFNRLHNLCKMQLISKNLFKSINAYAIPVLTYSFGLIKWSKTELNSLETKTRTILTQHRYHHPKSAKERINIPRLEGGRGLIEITQLYHGQIANLKQFFIRKKENSLLHKAIVEIDKQFTPLNLCDEVVQPIDKIEHHRNRHRIWRQKELHGRHPHDLDQSHINKEASNKWLDLGELFPETEGFLISIQDQVINTKNYRKYILKDPTLRNDLCRKCNKKPETIQHITGACSTLTQNDYMHRHNQLANIIHQKLATKHKLTNKPHSPYYKYSPPPVLENHSVKLYYDRTIITDHTVYNNRPDITFVDKENKHTYLIDIAVPNTNNLQTTIAEKIRKYTELQEEIKRVWKMNTVTIVPIIVSTTGIIPKQLFNGLQLLKLSPYTYLTLQKAAILNTCRIVRKFLQLDSDSQFTTAEQPT

SEQ ID NO: 15366 - protein, 1069 aa, Dyscophellus porcius
MKPATTKAGKLRVRMKWDKEINIFIMRTYYRVTKLETDFTTYRQQMHQKFIEKYQNIEITEQRIADQKRFIIRNKRLSDDELKKIRDEVGKEIETESLNTDQIVTQNISQNLHTIHTNQSLLNNSLNINEEIHLTQEENETTNITEIDTLTKQLEANINKYTGTDPTARPVLPKIKPSRYVTNLISKFNKEILPTKFHFIQNITDTHTLIYCTAITIAEHLNIKISNGAYRKNYRKPFWLVRLENNIEELRKDIGRLTQYKSGNTSIKLHKKVKEILNKTKQHSSHEHHNTKLNEHLDTLKQKLAVKSHRLARYKKAKNRKENNTLFATSEKQFYRKIKLNENYSINPPPNNSVKEFWSGIWTQNTEHNRDAEWINTEINRSQSIQNMQFDDVSDGELHCIINKTHNWKAAGIDGIHNFWYKKLFILHNILAQQITDIVKGITLLPEFLSKGRTFLLPKNNHTDDPSQYRPITCLPTLYKIITSIIANRIYQHLEEFNILSEEQKGCRRRHLGCKEQLVIDSTILKHVQKTKQDLFVTYIDYQKAFDSVPHSWLIQILEIYKININVINFLKNVMSIWKTTLNLHTNKELLNIGEIEIKRGIFQGDSLSPLWFCLALNPLSRELNNTEFGLNIKNKRRTLCQLTHLLYMDDLKLYSGTNINMNRLLDTTVRFTQDIKMDFGFDKCRRLNIKKGKIIEGNYKINEEHRIIAMEDHELYKYLGYNQSDLLDHTTIKDNLKKEYISRLHTICKQQLSSKNLFKAINTFIIPVLTYSFGVIKWTKTELKQLEITTRTTLTHHRHHHPKSAVERISIPRKEGGRGLIDITQLHNKQINSMKQFFINKKENSILHKAIVEIDNKYTPLNLANDHIDIVDMKKLREEKHTKWKEKELHGRHKNDLELAHIDREASNKWLELAGLFPETEGFIIAIQDQVITTKNYRKYILKDNTIVNDLCRKCFSKPETIQHITGACVTLTQNDYTHRHNQLANIIHQKLVIKYKLLNEPHTPYYKYSPSSVLENATHKIYYDRTILTDHSIYNNRPDITLVDKQNKQVFIIDIAVPNTNNIQSTI

SEQ ID NO: 15367 - protein, 1223 aa, Euriphellus phraxanor
MNGYQIKSKYNLRSLSRACRTHDTDSVYSHTQHETPQTNSSISTQSTQKLNESSNTLPAEDVSQAAKAMKPVTTKAGKLRVRMKWDKEINIFIMRTYYRITKLETDFTTYRQQMHQKFIDKYQNTEITEQRIADQNRFIIRNKRLSDDELQKIKDEVAAEIEMEGLSIDQHSTQNTSHSLCTEYNNQQITSTPLNINDDLQRMQEENEITNIKDIDTLSKQLDANINKYTETDPTARPVLPKIKPSRYVTYLIRKFNKEILPTKLNLIKNITDTHTLIYCTAITIAEHLNIKIYNGAYRKSNTKPVWQIRLENDIEELRKNIGRLIQYKSGNTSTKLLKKIKQILNKSKLHSSHEHLNTKLNEHLDTLKQKLAVKSHRLARYKKAKDRKENNRLFHTSEKQFYRKIKQNKNYTIKPPPKNSIKEFWSEIWSQNVEHNRDAEWIKTEINRSQYIQSMQFDDMCEEELRCIINKTHNWKAAGIDGIHNYWFKKLTVIHDILAKQITNIIKGITFLPEFLSNGRTFLIPKNNNTDNRSQYRPITCLPTLYKIVTSVIANRIYEHLEQVNILSEEQKGCRRRHMGCKEQLIIDSTILKHVQKTKQDLFVTYIDYQKAFDSVPHSWLIQILEIYKVNSNIINFLKNTTSTWRTTLNLHANKDLINIGEIEIKRGIFQGDSLSPLWFCLALNPLSRELNNTNSGFNIKNNRRTLHQLTHLLYMDDLKLYSNTNINMNRLLDTTVKFTQDIKMDFGFDKCRKLNIKKGKIIDSSYNINEEDRIIAMENHELYKYLGYNQSRLLDHTAIKESLRKEYISRLHTICKQQLSSKNLFKAINTYIIPVLTYSFGVIKWTKTQLKQLEIKTRTVLTHHRHHHPKSAIERISIPRKEGGRGLIEITQLHNKLINSIKVFFLNKKENSTLHRPITEIDNKYTPLNLADEHIEIVDTKKLREEKHRKWKEKELHGRHKKDLEQTQIDKEASNKWLELAGLFPETEGFIIAIQDQVITTKNYRKYILKDNTIVNDLCRKCLSKPETIQHITGACITLTQNDYTHRHNQLTNIIHQKLIKKIKLLKGPHTPYYKYSPASILENATHKIYYDRTILTDHTIYNNRPDITLVDKQNKHAFIIDIAVPNTNNIQSTIAEKIRKYTELQEEVKRVWKMNIVTIVPFVISTTGVVPKQMFQALKILDLPKFAYVTLQKAAILNTCRIIGKYVQLNEDNDDNLDTH

SEQ ID NO: 15368 - protein, 1280 aa, Duroca duroca
MRLRSNKKLPQAGTSNGESRPGPSGLGSPAYSGGGTVSLQLAQSKTVARRESIISSSDSSSISSNNSRTQSPSSSPHLFESPSTSRSTTISPMSVAVEQEANANDLAPTIGTTMKPATTKAGKPRVRMKWDKEINIFIMRTYYLVTKLETDFTTYRQQMHEKFIEKYKNTDVSEQRISDQRRVIVKNKRLSDDELNRIKEEVAKELENLSITQNLITHSHQNTQAICTEHYRSRLISNSTVLDNRNVGEVSININSEQENQQNKSCDNSQVIQALHLRFEENFNKYNQTDPISRPLLPKIRPGTYVTHLIKEFNTHILPSKLNNVKNITDTHTLIYCTALTIIEHLSLRTYNRIRTYKNKLKPAWQIRLEKDIEELRRDIGRLTQYKLGNNSKKLLKKVDEILSRTKQHSTHEQLNKKIEEHLDTLKQKLALKSHRLARYNKSNDRKDNNKLFVTAEKQFYRRLKKHSDVIKPPDRNLLKDFWSDIWTKSTEHNKNAEWISTELHRGNMIDGMNFEDVSEIELRNVINKTHNWKAAGEDGVHNYWFKKLLVVHKTLAKQINDIFIGNCMLPDFLTKGKTFLISKSNDTQDPSQYRPITCLPTLYKIITSIIANRINKHIEQYNILTEEQKGCRRYHLGCKEQLIIDSSILKHVQKTKKDLYVTYIDYKKAFDSVPHSWLIQILEIYKINNNLINFLKQSMSTWRTTLYLNTAKQELNIGELAINQGIFQGDSLSPLWFCLALNPLSRELNNSKLGFNLKNNRKNLCELTHLLYMDDLKLYSDTNTNMNRLLDLTVRFTDDIKMEFGLDKCRKLNIKKGKIIQGSYKIDEECQINAMEVEELYKYLGYSQSRLLEHTIVKENLKKEYTNRLISLCKQQLSSKHLFKAINTYAVPVLTYSFGVIKWTKTDLNRLEIKTRTTLTQFRYHHPKSAIERINLPRKEGGRGLIEITQLHYRQINSMKAFFNRKKESSTIHKAIVEIDRKFTPLNLNNADVEVIDLKKLNEEKHKKWKEKELHGRHKKDIEQVNIDGEASNKWLEVAGLFPETEGFIIAIQDQVIATKNYRKYILKDNSLNNDLCRKCSNKPETIQHITGACIKLTQNDYTHRHNQLTNIIHQKLVLKYRLSKNPHTPYYKYTPTPVLENSTHKIYYDRTILTDHTIYNNRPDITLVDKQNKHAFIIDIAVPNTNNLQTTIVEKVRKYTELQEEIRKVWKMHKVTIVPIVISTTGVIPRQLFQSLKILDLPKFSYISLQKAAILNTCRIVRKFLQLDSDNSTYNNIT

SEQ ID NO: 15369 - protein, 1277 aa, Hesperia comma
MRLRSNKRLPQAGTSNGESRPGPSGTGSPAYSGGGTVSLQLAQSKTVARRESIISSPDSSIISSNNSIVQSPNTSSHSLENPSTSRSTTESPMLVAVEQEATANDLAPTAGTTMKPATTKAGKLRVRMKWDKETNIFIMRTYYLVTKLETDFTMYRQQMHQKFIEKYRETEVSEQRISDQRRVIVRNKRLSDEELNRIKEEVAKELENKSLNIPLVSTSHSPQNTHTPQAICTERYRNGRNRSEVPLNIYLQQENQQINNSDHSQTLQTLRTKFEENFNKYNNTDPLSRPLLPKIRPGTHITHLIKEFNTNILPHKLNSLENITDTHTLIYCTALTIIEHLNIKIYNRIRTYKNKLKPAWQMRLEKDVEDLRKDIGRLTQYKLGNNSKKLLKKVDEILSRTKQHSTHEQLNKRIDEHLDTLKQKLALKSHRLARYNKSNSRKDNNKLFVTAEKQFYRKLKKHSSEIVNLPDKNILKGFWSDIWTKYTEHEKSAEWINTELHRCNMIEDMNFEELSEIELRGVINKTHSWKAAGEDGIHNYWFKKLLVVHKTLAKQINDIFKGNCLLPDFLTKGKTFLLPKSNSTQDPSQYRPITCLPNLYKIITSIIANRITNHIEQNNILTEEQKGCRRYHLGCKEQLIIDSSVLKHVQKTKKDLYVTYIDYRKAFDSVPHSWLIKILEIYKININLINFLKQTMSTWRTTLYLNTTKQELNIGEIDIKRGIFQGDSLSPLWFCLALNPLSRELNNSKLGFNLKSNRQNLCQLTHLLYMDDLKLYSNTNTNMNKLLDLTVRFTADIKMEFGLDKCRKLNIKKGKIIRGSYKIDEECQIDAMNAQELYKYLGYNQSRLLEHTKIKEGLKKEYTNRLISLCKQQLSSKNLFKAINTYAIPILTYSFGVIKWTKTELNSLEIKTRTTLTQFRYHHPKSAIERISLPRKEGGRGLIEISQLHHRQIISMKAFFDRKKESSQIHKAIVEIDNKFTPLNLCQENVEMLDPKKYREGKHRKWKEKELHGRHKKDLEQINIDGEASNKWLEVAGLFPETEGFMIAIQDQVIATKNYRKYILKDNSLNNDLCRKCSNKPETIQHITGACIKLTQNDYTHRHNQLANIIHQKLVLKYKLSKDPHTPYYRYSPPPVLENDTHKIYYDRTILTDHTIYNNRPDITLVDKQNKHVFIIDIAVPNTNNLQTTIVEKIRKYTELQEEIKKVWKMDKVTIVPIAISTTGVIPKQLFQSLNILELPKYSYITLQKAAILNTCRIVRKFLQLDSDNSTPINVTS

SEQ ID NO: 15370 - protein, 1288 aa, Ctenoptilum multiguttatum
MRLRSNKVLPQAGTWMKHSGESRPEPTGSGSPTYSGGGNASSQLAQSSTVASQENIISSSQSSPISSTHSLFQSPSSSSYTFDHPSISRSTTLSPMPLTVEQEANANHLAPNSGTIMRPATTKAGKPRVRMKWNKEINTFIMRTYYLVTKLETDFTTYRKQMYNSFIQKYHNTDVSEQRIADQRRVIIRNKRLTDEELKKIREEVAEELNKQSSNNQHAHRLHTSQNSHTLTIHERGDRSYSPEKCANIEINNCSNVILTVSDTNIPQRLQQNISKENNDLVQILNEKIDQNITKFTKTDPSFRPLLPKIKTGKYLSYLIKILNTHILPPKLNAIRDIEDTHTLIYCSALTIVQHLNIKIYNSTQTQKTFKKPEWQIRLEKNIEQLRQDIGRLTQYTLGNTSKKLLRKVENILDRTKQHSTHEIFNKKISEHLDTLKQQLAVKSHRLSRYNKARERMENNKLFKTAEKQFYRKLKQNKSNDNTVSPDKKMLNEFWSETWSESIEHNKKAEWINKELRRSGKISEMSFEDISEIELGCIINKTHNWKASGPDGIHNYWFKKLNVLHGILASQISSILRGDSPLPMFLTKGRTFLLPKSENTQDPSKYRPITCLPTMYKIITSLITNRIYKHIEQYKIITEEQKGCRRYHLGCKEQLIIDSAVLKYSQKMNKDLYLTYIDYRKAFDSVPHSWLIQILEIYKINPYYVNFLKQAMASWRTTLYLNTNKHKLNIGEIDIRRGIFQGDSLSPLWFCLALNPLSRELSNSKFGFNIKSNKLSLYQISHLLYMDDLKLYSSTNANMEKLLDLTVRFTEDIKMEFGLDKCRKLNINKGKVTEGGYKINEEYQIKSMETQELYKYLGYSQSRLLQHTTIKEKLKKEYANRLISICKRQLSSKNLFKAVNTFAIPVLTYSFGVIKWTKSELKQLEIKTRTTLTQFRQHHPKSAIERVTLPRKEGGRGLIEITQLHNRQINSMKIFFNGKKENSQLHKTIVEIDSKFTPLNLSNENVEPIDIKKQKEEKHRIWKEKELHGRHKKDLEQAHIDIEASNKWLESAGLFPETEGFMVAIQDQVITTKNYRKYIMKDSSIANDLCRKCLIKPETIQHITGACVKLTQNDYTHRHNQVTNIIHQKLAIKYKLSKDKHLPYYKYIPDSVLENATHKIYYDRTILTDHTIYNNRPDITLIDKYNKHVVIIDIAVPNTNNLQSTITEKIRKYTELQEEIRKVWKMNKVTIVPIVISTTGVIPKHLLQSLNILELPKHTYITLQKAAILNTCRIVRKFLQLDAENTIQ

SEQ ID NO: 15371 - protein, 1180 aa, Ampittia dioscorides
MKPATTKAGKPRVRMQWDKEVNIFIMRTYYQVTKLETDFTTYRKQMHYKFIQRYQNQNISEQRVSDQRRVIIRNKRLTDEELEKIKEEVAKELESGALNNTHNLTSHTFYNNETRPIMDSNLHLNSSQEVTITSRNADNSKSREELTFVESDLLHNTPNNRTNENLILTLNKSLDKNLSKYTEIDPTHRPVLPKIRPVKYVNFLVKIFNTEILPLKINTLDNIVDTHLLVYCTALTLIEHLNIKVYSRTLGLKTNHKPAWQLRLELDIQNLRKDIGRLTQYQLGNKTKKLDRKIQEILRKTKLHSTYEQHNKKVNEHLDTLKQKLAVKSHRLARYNKAKQRKDNDKLFVTCEKQFYRKIRQNSSITKASPPINLLKDFWNNVWNKSKEHNKTAEWIKIEESRSDNIQNMPLNDVDEIELQNLLRRTHNWKAAGPDGIHNYWFKKLYVLHNILAKQINLILNGVNSLPEFLSMGKTYLLPKSNSVQDPSQYRPITCLPTLYKLITSIIANRIYNHVENNKILTEEQKGCRRYNLGCKEQLIIDSTVLKHVQKNKKDLFVTYIDYKKAFDSVPHSWLIKILEIYKINQNIVNFLKNTMSAWKTNVYCNSSKQQIHVGEINIKQGIFQGDSLSPLWFCLAINPLSRLLNHSHYGFNIMKRKQISYQLTHLLYMDDIKLYSSTDNNMNRLLDITLKFTNDIQMEFGLSKCRKLNIKKGKVVEGSYRINKEKQIQSMDSQELYKYLGYNQSRLLDHTTIKENLKKEFTNRLISLCKQQLNSKHLFKAINTYAISILTYSFGIIKWTKSELNQLEIKTRTILTKFRHHHPKSAIERINLPRKEGGRGLIDITHLHNRQINSIKLYFNSKKDGSQLHKTIIQLDNKFTPLNLLNENIEAIHTDRQKEEKHRKWREKELHGRHKQDIEQSHIDREASNKWLEIAGLFPETEGFIIAIQDQVISTKNYRKYILKDKSLTNDFCRKCLNKPETIQHITGACVTLTQNDYTHRHNQITNIVHQKLVSKYNLSKDRHIPYYKYNALPFLENTTHKIYYDRTILTDHTIYNNRPDITLVDKINKHTFIIDVAVPNTHNLQATYTEKIRKYTELQEEIKKVWKMNKVTIVPIVISTTGVIPKRLFQSLQILDLPKFTYVSLQKASILNTCRLVRKFLQLDTDLNDQTQTSSLTE

SEQ ID NO: 15372 - protein, 1241 aa, Cecropterus takuta
MALSRPIMMMNEKQIKNIYNLRSKSKNTHNSESINTQTQHKIPETNACMINQSTQNLTESSEILQVEDVSQVASAMKPATTKAGKPRVRMKWDKEINIFIMRTYYHITKLETDFTTYRQQMHQKFIEKYKNTEITEQRISDQKRFIIRNKRLSDEELKVIKDEVAKEIEKEERNIKQHITPSTLQNLNTTHTNYKRHNRRSPKSNLTLCTPMNNVDIDLQRLQDKEETRNEVSTDSLIKKLEANISKYTGTDSTSRPVLPKIKSSRYVTYLIRKFNQDILPTKLNLIETVTDTHTLVYCTALTIAEHLNIKVCNRTHIYNYTKSAWQIRLEKDIEDLRKDIGRLTQYKAGNNSKKLYKHVKKILNKTKQHSSHEQLNIKINEYLDTLKQKLAVKSHRLARYKKAKDRKDNNRLFNTSEKQFYRKIKNTSNNIIKTPSISSLKEFWSEIWAHSTEHNRDAEWIHSEINRSQYIQDMQFEDVDDKELQTIINKTHNWKAAGIDGIHNYWFKKLVVIHNKLAEQITEIIKGVSLLPDFLSKGRTFLLPKNNNTEDPSQYRPITCLPTLYKIITAVIANRIYTHLEQFNILSEEQKGCRRHHMGCKEQLIIDSTILKHVEKSKQNLYVTYIDYQKAFDSIPHSWLKQVLKIYKINNTIISFLENIMSTWRTTIHLNTNKNRINVGEIQIKRGIFQGDSLSPLWFCLALNPLSQELNNTKFGLKIKNNKDTICQITHLLYMDDLKLYASSNINMDRLLDTTVRFTKDIKMDFGLDKCRKLNIKKGKVIDGSYNINEENQIKAMESCEFYKYLGYNQSRLLQHSTIKENLKKEYINLIYRLHVVCKQYLSSKNLFKAINTYAIPILTYSFGVVKWSKTELKLLEIKTRTTLTQHRHHHPKSAIERISIPRREGGRGLIDITQLHNKQINNMKAFFNSKKEKSDLHKAIIQIDNKYTPLNLNAEYIEKVNTQKLTEDKHRKWKEKELHGRHKYDLEQAHIDKEASNKWLELAGLFPETEGFIIAIQDQVITTKNYRKYILKDNTIVNDLCRKCLSKPETIQHITGACIKLTQNDYTHRHNQVSNIIHQKLVIKHKLIKEPHTPYYLYSPSPVLENTTHKIYYDRTILTDHTIYNNRPDITLVDKQNKHAFIIDIAVPNTNNIQTTIVEKIRKYTELQEEIKKVWKMKTVTIVPIVISSTGVIPKQLFQALKILDLPKFTYVTLQKAAILNTCRLVRKFLQLNIENDNS

SEQ ID NO: 15373 - protein, 1262 aa, Phalera bucephala
METRSNRKRLMPLPGGDRRGTPGAGAGRSSMQATGGESITGRSLAGIPEEATSSTSNPTIAQEFQTQPAADASQAASAMRPATTKAGKPRVRMKWDKDVNIFIIRTYLQITNLETDLTEYRQKLHQEFIQQYPNANVTEQRLSDQRRAIIRNRFLSEETLQQIRDEVQYSIRSSNKFDNTSQVIPSPLIGNNVPRHCDYINSQEDTGILTQDISNIQSFENIPQYNTQTQPITQTNLQLEESQTHLDDTDLKYILTENLETYLTKYTGTNPADRPSLPKIRSSRTLTKIINSFNNTIIPKKITNLETITDTHTLIYCSALTIVTHLKIKIRNKCNKIIKTKPAWQIRLEKDIEQLRKDIGRLTQHKNGNTSKKLSAKIKQILIKSNKHSSYEDPNRRIDDHLDTLKQILAVKSHRLARYIKAENRKRHNKLFFHNQKGFYRQLKDKHTPITALPDEEAMTHFWSNIWSNNAEHNPEAEWINREITRTSTIDEMKFEEIKLEELKRIINKTKNWKAAGLDGIHNFWIKRLHAVHETLTKQINELIKGKGNVPEFLTKGITYMLPKSNQTQDPSQYRPITCLPTLYKIITSCIANRINAHIEQFSILAEEQKGCRRHHMGCKEQLTIDSAILKSVQKSRKNLFVAYIDYKKAFDSIPHSWLLQVLKIYKINPVIINFIQTVMTSWRTTLHIRTDSKNFTSNDIAIKRGIFQGDSLSPLWFCLALNPLSRELIDFKLGFNIKNNRQTLFQLTHLLYMDDLKLYANRSTDLDNLLSITTKFSHDIKMDFGLDKCRKLNIKKGKMIEGDFMITETECIQAMNNEELYKYLGYNQARLIDHSNIKKKLKEEYFNRLHNLCKMQLISKNLFKSINAYAIPVLTYSFGLIKWSKTELNSLETKTRTILTQHRYHHPKSAKERINIPRLEGGRGLIEITQLYHGQIANLKQFFIRKKENSLLHKAIVEIDKQFTPLNLCDEVVQPIDKIEHHRNRHRIWRQKELHGRHPHDLDQSHINKEASNKWLDLGELFPETEGFLISIQDQVIKTKNYRKYILKDPTLRNDLCRKCNKKPETIQHITGACSTLTQNDYMHRHNQLANIIHQKLATKHKLTNKPHSPYYKYSPPPVLENHSVKLYYDRTIITDHTVYNNRPDITFVDKENKHTYLIDIAVPNTNNLQTTIAEKIRKYTELQEEIKRVWKMNTVTIVPIIVSTTGIIPKQLFNGLQLLKLSPYTYLTLQKAAILNTCRIVRKFLQLDSDSQFTTAEQPT

SEQ ID NO: 15374 - protein, 1146 aa, Parnara guttata
MKWDKEINKFIMRTYYLVTKLETDFTMYRQLMHEKFTQKYENIFVSEQRLADQRRVIVRNKRLSDEELQGIKDDVAKEIAIENQNSTEIQTLDSCQNNYELQIDYTSSTSPQGSNTDNIPSNITENLQHGSQNDNFSRDIIQLINKSLEENLEKYTGTDPLSRPVLPKIKPTKYLTNLITIFNTDILPPKLDKVQNITDTHTLIYCTAITIIEYLNFKTYSKTQTERKNRKPAWQIRLEKDIEELRKDIGRLTQYKLGNNSSKLLKKVREILNRTKQHSTHDHLNKKVNEYLDTLKQQLAVKSHRLARYNKSNERKKNNRLFTTAEKLFYRKLKHNIETEVTQPDQNSVKDFWEQVWTKNTEHNRNAEWISKEVSRTNLIDEMDFPDINESELGAIINKTHNWKAAGHDGIHNYWFKKITAVHGTLAIQISNILKGISYLPEFLTKGKTFLLPKSNMTQDPSQYRPITCLPTLYKIITSVITNRIYSHIEQYNLLTEEQKGCRRNHQGCKEQLIIDSTVLKHTQKSKKDLFVTYIDYQKAFDSVPHSWLLQILDIYKINPNIINFLKNAMQSWSTTLYLNTNEQQIKIGDILIRRGIFQGDSLSPLWFCLALNPLSRELNNSKLGFRIKNKKHLLYQLSHLLYMDDLKLYSNTQDNMKKLIDVTFGFTNDIKMQFGFDKCRKLNIKKGKIIGGSYEVNKEFQINAMESDELYKYLGYNQSTLLEHSTIKDNLKKEYHSRLISLCKRQLSGKNLFKAINTFAVPILTYSFGVIKWTKNELKQLEIKTRSTLTLFRYHHPKSAIERVTLPRKEGGRGLIDITQLHNKQINSLKIFFNHKKENSQLHKTIVEIDDKFTPLDLHKENIVRINTKEQKEEKHSKWKEKELHGRHKNDIKQMHIDEEASNKWLELSNLFPETEGFILAIQDQVIATKNYRKHIFKEKINDLCRKCLSKPETIQHITGACIKLTQNDYVHRHNQVTNIIHQKLVLKHKISKDPYLPYYKYTPNSILESTTHKIYYDRTILTDHTIYNNRPDITLVDKMNKHAFIIDIAVPNTNNLQSTIVEKTRKYTELQEEIRKVWKMKKVTIVPIVISTTGVIPKQLFQSLKILDLPKYSYVTLQKAAILNTCRIVRKFLQLDSENSHLPM

SEQ ID NO: 15375 - protein, 1290 aa, Thymelicus sylvestris
MRLRSNKRLPQAGTSNGESRPGPSGTGSPAYSGGGTESLQLVQSKTVASPQGTSLSSVSSTISSNNSVAQSPSSSPHLSNNPSTSRSTTMSVAVEQQAKANNLAPTIGTTLKPATTKAGKLRVRMKWDKEINIFIMRTYYKVTNLETDFTTYRQQMHEKFIQKYENTDVSEQRLSDQRRVIVRNKRLSDEELNKIKEEVAKEIEIENLNTNQHIITCHVNENTSKTKTTSIKQRRNGPRDQLNCTVPEKRIEDTHLNTESQQQKQQNETHENKQIIEEMNKKLEENLSKYIGTDPMSRPLLPKIRPGTYLTQLIKEFNSYILPPKLNTLQNITDTHTLIYCTALTIIEHLKMKTYNRIRTHRNKPKPAWQIRLEREIEELRKDIGRLTQYKLGNNSKKLLKKVNEILNKTKQHSIHEPPNKKINEHLDTLKQKLALKSHRLARYNKSNDRKENNKLFATAEKQFYRRLNLKKQNSDITNPPDKNTLKEFWSCIWNKDTEHNKNAEWINTESNRAKIINEMEFKDVSETELGIVINKTHNWKAAGDDGIHNFWFKKLLVVHKTLATQINDIFLGDCQLPEFLTKGKTFLLPKSNETQDPSQYRPITCLPTLYKIITSIIANRIYKHIDQYNILTEEQKGCRRYHLGCKEQLTIDASVLKYVQKTKKDLYVTYIDYQKAFDSVPHSWLIQILEIYKININLINFLKQTMSIWRTTLYLNIAKYELNIGEIDIRRGIFQGDSLSPLWFCLALNPLSRELNSSKLGFNLKNNRQTLCQLTHLLYMDDLKLYANTNTAMNMLLELTVKFTNDIKMKFGIDKCRKLNIQKGKITKGNYKIDEEYQINAMESQELYKYLGYSQSRLLEHKIVKEKLKKEYFNRLNSLCKRQLSSKHLFKAINTYAIPVLTYSFGIIKWTKTELTHLERKTRTTLTQFRYHHPKSAIERINLPRKEGGRGLIELTQLHDRQTYSMKTFFNKKKDSSQIHKTIVELDNKLTPLNLCNQDMEIIDLKKNKEEKHIKWNEKELHGRHKKDLKQANTDEEASNKWLELAGLFPETEGFIIAIQDQVIATKNYRKYILKDNSLSNDLCRKCLNKPETIQHITGACIKLTQNDYTHRHNQLANIIHQKLMLKHKLSTDPHTPYYKYTPRPVLENTTHKIYYDRSILTDHTIYNNRPDITLVDKLKKYVFIIDIAVPNTNNLQSTIVEKIRKYTELQEEITRVWKMKKVIIVPIVISTTGVIPKQLFHSLKILDLPKFSYISLQKAAILNTCRIVRKFLQLDSNNNDVEHVTAEC

SEQ ID NO: 15376 - protein, 1290 aa, Thymelicus sylvestris
MRLRSNKRLPQAGTSNGESRPGPSGTGSPAYSGGGTESLQLVQSKTVASPQGTSLSSVSSTISSNNSVAQSPSSSPHLSNNPSTSRSTTMSVAVEQQAKANNLAPTIGTTLKPATTKAGKLRVRMKWDKEINIFIMRTYYKVTNLETDFTTYRQQMHEKFIQKYENTDVSEQRLSDQRRVIVRNKRLSDEELNKIKEEVAKEIEIENLNTNQHIITCHVNENTSKTKTTSIKQRRNGPRDQLNCTVPEKRTEDTHLNTESQQQKQQNETHENKQIIEEMNKKLEENLSKYIGTDPMSRPLLPKIRPGTYLTQLIKEFNSYILPPKLNTLQNITDTHTLIYCTALTIIEHLKMKTYNRIRTHRNKPKPAWQIRLEREIEELRKDIGRLTQYKLGNNSKKLLKKVNEILNKTKQHSIHEPPNKKINEHLDTLKQKLALKSHRLARYNKSNDRKENNKLFATAEKQFYRRLNLKKQNSDITNPPDKNTLKEFWSCIWNKDTEHNKNAEWINTESNRAKIINEMEFKDVSETELGIVINKTHNWKAAGDDGIHNFWFKKLLVVHKTLATQINDIFLGDCQLPEFLTKGETFLLPKSNETQDPSQYRPITCLPTLYKIITSIIANRIYKHIDQYNILTEEQKGCRRYHLGCKEQLTIDASVLKYVQKTKKDLYVTYIDYQKAFDSVPHSWLIQILEIYKININLINFLKQTMSIWRTTLYLNTAKYELNIGEIDIRRGIFQGDSLSPLWFCLALNPLSRELNSSKLGFNLKNNRQTLCQLTHLLYMDDLKLYANTNTAMNMLLELTVKFTNDIKMKFGIDKCRKLNIQKGKITKGNYKIDEEYQINAMESQELYKYLGYSQSRLLEHKIVKEKLKKEYFNRLNSLCKRQLSSKHLFKAINTYAIPVLTYSFGIIKWTKTELTHLERKTRTTLTQFRYHHPKSAIERINLPRKEGGRGLIELTQLHDRQIYSMKTFFNKKKDSSQIHKTIVELDNKLTPLNLCNQDMEIIDLKKNKEEKHIKWNEKELHGRHKKDLKQANTDEEASNKWLELAGLFPETEGFIIAIQDQVIATKNYRKYILKDNSLSNDLCRKCLNKPETIQHITGACIKLTQNDYTHRHNQLANIIHQKLMLKHKLSTDPHTPYYKYTPRPVLENTTHKIYYDRSILTDHTIYNNRPDITLVDKLKKYVFIIDIAVPNTNNLQSTIVEKIRKYTELQEEITRVWKMKKVIIVPIVISTTGVIPKQLFHSLKILDLPKFSYISLQKAAILNTCRIVRKFLQLDSNNNDVEHVTAEC

SEQ ID NO: 15377 - protein, 1013 aa, Orses cynisca
MQQNQVNENGQTMQSLNEKFEKNFNKYINSDPISRPLLPKIKPGKYVTYLIREFNTHILSPKLKAVNNILDTHYLVYCTALTIIEHLNIKPYDRIRIYRTDRKPAWKIRLEKDIEELRKDIGRLTQYKLGNNSKKLFNKVSEILRRTKEHSTHENHNNKVNEHLDTLKQKLAVKSHRLARYNKSNDRKENNKLFATSEKQFYRRLKEKNNNIVTPPDKNSLKEFWSDIWTKSTEHNKSAEWINTELHRTNMIDEMQFEDISEIELCSVINKTHNWKAAGEDGIHNYWFKKLYVVHGTLAKQINDILKGNCSLPEFLTRGKTFLLPKSKETQDPSQYRPITCLPTLYKIITSLIANRIYKHVEQYNILTEEQKGCRRDHLGCKEQLIIDSSVLKYVQKKKKDIYITYIDYQKAFDSVPHSWLIQILEIYKINPNLINFLKLIMSTWKTTLYLNTNKHELNIGEIDIKRGIFQGDSLSPLWFCLALNPLSQELANSKFGFNLKNNRQTLCQLTHLLYMDDLKLYANTNLNMNRLLDLTVRFTQDIKMQFGLDKCRKLNIKNGKITEGSYNISEECQINSMETHELYKYLGYGQSRLLEHAIVKENLKTEYKKRLNSLCKRQLSSKHLFKAINTYAVPVLTYSFGVIKWTKGELKQLDVKTRTTLTQFRYHHPKSAIERVTLPRKEGGRGLIDITQLHNRQITSMKIFFNKKKDSSQIHNAVTQIDNNFTPLNLYKENVEIVDRKKQKEEKHRKWKEKELHGRYKNYIEQEQIEEEASYKWLELAGLFPETEGFIIAIQDQVIATKNYRKYILKDNSLINDLCRKCSNKPETIQHITGACVKLTQNDYTHRHNQLTNIIHQKLVLKYKLSKEPHTPYYKYTPPPVLENTSHKIYYDRTILTDHTIYNNRPDITLVDKHNKHVFIIDIAVPNTHNIQSTIVEKIRKYTELQEEIRKVWKMNKVTIVPIVISTTGVIPKQLFQSLKIIDLPKFTYVTLQKAAILNTCRIVRKFLQLDS

SEQ ID NO: 15378 - protein, 1289 aa, Thymelicus lineola
MRLRSNKRLPQAGTSNGESRPGPSGTGSPTYSGGGTESLQLVQSKTVASPQGTSLSSVSSTISSTNSAIQSPSSSPHSFDNPSTSYSTTMSVAVEQEAKANDLAPTVGTTMKPATTKAGKPRVRMKWDKEINIFIMRTYYKVTKLETDLTTYRQQMHEKFIQKYENTDVSEQRLSDQRRVIVRNKRLTDEELNKIKEEVAKEIEIENLNTNQHTIISHANQNTYKTKTTSTKQQRNGPRAQLNFTVPEKRTEDTLLNIDLQQDIQQNETHENKQIIEELNKKLEENLSKYSGTDPMSRPLLPKIRPGTYLTQLIKEFNTYILPPKLNTLENITDTHTLIYCTALTIVEHLKMKTYNRIRTHRNKPKPAWQIRLEREIEELRKDIGRLTQYKLGNNSKRLLKKVNEILNKTKQHSTHEQPNKKINEHLDTLKQKLALKSHRLARYNKSNDRKESNKLFATAEKQFYRKLKLKEKNNDITNPPDKNTIKEFWSGIWTKDTEHNKNAEWINTESNRAKVINDMEFKDVSETELGIVINKTHNWKAAGDDGIHNFWFKKLLVVHKTLAKQINDIFLGDYQLPEFLTKGKTFLLPKSNQTQDPSQYRPITCLPTLYKIITSVIANRIYKHIEQYNILTEEQKGCRRYHLGCKEQLTIDASVLKYVQKTKKDLYVTYIDYQKAFDSVPHSWLIQILEIYKININLINFLKQTMSIWRTTLYLNTTKYELNIGEIDIKRGIFQGDSLSPLWFCLALNPLSRELNSSESGFNLKNNKQTLCQLTHLLYMDDLKLYANTNTAMNRLLELTVQFTDDIKMKFGIDKCRKLNIKKGKVTEGNYKIDEEYQINAMESQELYKYLGYSQSRLLEHKIVKEKLKKEYTNRLNSLCKRQLSSKHLFKAINTYAIPVLTYSFGIIKWTKTELKYLERKTRTTLTQFRYHHPKSAIERINLPRKEGGRGLIELTQLHDRQIHSMKAFFNMKKDISQIHKTIVELDNKLTPLNLCNQDMEIIDMKKNKEEKHIKWKEKELHGRHKKDLKQANTDEDASNKWLELAGLFPETEGFIIAIQDQVIATKNYRKYILKDNSVSNDLCRKCLNKPETIQHITGACIKLTQNDYTHRHNQLANIIHQKLMLKHKLSTDPHTPYYKYIPHPVLENTTHKMYYDRAILTDRTIYNNRPDITLVDKLKKHAFIIDIAVPNTNNLQSTIVEKIRKYTELQEEIRKVWKMQKVTIVPIVISTTGVIPKQLSQSLRLLDLPKFTYISLQKAAILNTCRIVRKFLQLETDNSSAIENITA

SEQ ID NO: 15379 - protein, 1285 aa, Carystus phorcus
MRLRNNKILPQAGTSNGESRPEPSGSGCPTYSGEGKVSLRLAQSKTVASPENIIHSSDTLPISSTNSLSQPATSSHYSFDNPSTSSSTTISPMSVAVEQEAKANDLAPTIGTTMKPATTKAGKPRVRMKWDKEINTFIMRTYYLVTKLETDFTTYRQQMHEQFIQKYKNTDVSVQRISDQRRVIVRNKRLSDEELIKIKEEVAKEIGVENFNINQQSIPQFHQIVHTTQTTTTKLHMTVNTTQSTDRVLDYNNDELCSNFESQHNETNPNNHAIQAITLSQKFEENLKKYYKTDPMSRPLLPKIRPGMYLTHLIREFNTQILPSKLSSLVNITDTHTIIYCTALTIIEHLNIKTYNRIRTHKHKLKPAWQIRLENEVVALRKDIGRLTQHKLGNNSKKLVNKVNEILNRTKQHSTHEQLNKKIEEHLDTLKQKLALKSHRLARYNKSNDRKENNKLFATSEKQFYRRLRKRSNNIENPPNRNSVKEFWSDIWTKSTEHNRNAEWINTEFHRANMINDMKFEDVTEIELRNVINKTHNWKAAGEDGIHNYWFKNLPILHLTLSRQINDILKGDYLLPNFLTKGKTFLLPKSNETQDPSQYRPITCLPTLYKIITSIIANRIYKHVEQYNILTEEQKGCRRLHLGCKEQLTIDSIVLKYAQKTNKDLYVTYIDYQKAFDSVPHSWLIQVLEIYKINSKLINFLKQTMSIWRTTLYLNTNKHELNIGDLQIKRGIFQGDSLSPLWFCLALNPLSRELNSSKSGFDLRNNKQTLCQLTHLLYMDDLKLYSNTNTNMNRLLDLTVKFSGDIKMEFGFDKCRKLNIKKGKITEGSYKIDEERQINAMETQELYKYLGYSQSRLLEHKIVKENLKKEYTNRLISLCKQQLSSKNLFKAINTYGIPVLTYSFGVIKWTKIELKRLETKTRTILTQFRYHHPKSAIERISLPRKEGGRGCIEITQLHHRQVYSMKVFFYKKKDNSELHKAIIEIDNKFTPLNLSNQTIEIIDSKKHKEEKHRKWKDKELHGRHKTDIEQVNIDEEASNKWLELANLFPETEGFIIAIQDQVIATKNYRKYILKDKGLINDLCRKCSNKPETIQHITGACIKLTQNDYTHRHNQLANIIHQKLVLKYKLSKDPHTPYYKYVPNPVLENATHKIYYDRTILTDHTIYNNRPDITLVDKNKKHAFIIDIAVPNTNNLQSTIVEKIRKYTELQEEIRKVWKMQKVTIVPIVISATGVVPKQLFHSLQILDLPKFSYVSLQKAAILNTCRIVRKFLQLDTDNCTSYNVQ

SEQ ID NO: 15380 - protein, 1234 aa, Urbanus sp.
MNEYQIKNKYNLRSKSKYTNNADSDNTQIQQEVPLVEINTCLINQPSSSEKCSDIIAAEDVSQAAVAMRPATTKAGKPRVRMKWDKEINIFIMRTYYRVTKLETDFTTYRQQMHQKFIEKYNNTEISEQRISDQKRFIIRNKQLSDEELKMIKDEVAKEIQSEELQINQSKTPNISQNIKRTHANSKRRNRNNKNNDSSTSTLVNGDVDLQQIPDVEHTTIEVNTEALIENLEANLNKYTGTDPTSRPVLPKIKTSRYLTYLIRTFNKDILPKQINSIQTITDTHTLIYCTALTIAEHLNIKIFNKAHSNNYKKPAWQLRLEKDIEDLRKDIGRLTQYKSGNNSKKLYKKVKDILDKAKQHSSHEQTNVKMNEYLDTLKQKLAVKSHRLARYKKAKDRKDNNRLFTSSEKQFYRKIKQSNNYVIKPPSTESLKEFWTKIWTHNAEHNKDAEWIHSEIVRSEFIQEMEFNNIEDKELQYIINKTHNWKAAGIDGIHNYWLKKLFVVHNILAKQITDIIKGVSLLPEFLSKGRTFLLPKNNNTEDPSQYRPITCLPTLYKIITSVIANRIYTHLEQFNILSEEQKGCRRHHMGCKEQLIIDSAILKHIQKSKKDLFITYIDYQKAFDSIPHSWLIQVLEIYKINNTLIQFLKNVMTTWTTTINLNTKKDQINIGEIKIKRGIFQGDSLSPLWFCLALNPLSQELNNTKFGLNIKNNSRNMCQLTHLLYMDDLKLYSSLNTNMDKLLDITVKFTEDIKMDFGLDKCRKLNIKNGKVTDGSYNINEEHQITAMESHELYKYLGYNQSRLLEHAEIKETLKKEYIKRIHTVCKQQLSSRNLFKAINTYAIPILTYSFGVVKWTKTEIKQLEIKARTILTQHRHHHPKSAIERVCLPRKDGGRGLIDITQLHNKQINAMKIFFYSKKENSPLHKAVVQIDNKYTPLNLSEEHIEIVDTRKFTEEKHNKWREKELHGRHKHDLEQAHIDLEASNKWLELAGLFPETEGFIIAIQDQVITTKNYRKYILKDSTIVNDLCRKCLSKPETIQHITGSCITLTQNDYTHRHNQVSNIIHQKLVLKYKLIREPHTPYYKYSPSPVLENGTHKIYYDRTILTDHTIYNNRPDITFIDKRNKHAFIIDIAVPNTHNIQSTIVEKNRKYTELQEEIKKVWKMNTVTIVPIVISSTGVVPKQLFHALKILDLPKFTYVTLQKAAILNTCRLVRKFLQLNTDNDDDRLRVP

SEQ ID NO: 15381 - protein, 1232 aa, Urbanus evona
MNEPQINKKYNLRSKSKHTDKINSVNEVTQQQQIPVAETNTCLSNQPTHIVNESLDILPVEDVSQAAVAMRPATTKTGKPRVRMKWDKEINIFIMRTYYRITRLETDFTTYRQQMHQKFIEKYKNTEITEQRISDQKRFIIRNKRLTDEELKKIKDEVAKEIEREEVPINQHMTLNTFQNLNTAYNNSRIRNRSNRNNTSIPCTSSEDVDLQQIQDKEPNTSEVNTEALIEQLETNLNKYSGTDPTSRPVLPKIKTSRYVTYLISKFNNDILPSKLNSIETITDTHTLIYCTALTIAEHLKIKICYGVYSNNYKKPAWQIRIEKNIEDLRKDIGRLTQYKSGNSSKKLFKKVKEILNRTKQHSTHDQLNVKVNECLDTLKQKLAVKSHRLARYKKAKDRKDNNRLFINSEKQFYRKMNNTNSYVINPPSVESLRDFWSKIWTHNAEHNRDAEWIHSEIIRSQFIEDMGFDDIEDEELQCIINKTQNWKAAGTDGIHNYWFKKLFVVHKKLAKQITDIIKGVNLLPEFLSEGRTFLLPKNNNTEDPSQYRPITCLPTLYKIITSVIANRIYKHLEQFNILSEEQKGCRRQHMGCKEQLVIDSTILKHIQKSKKDLFTTYIDYQKAFDSIPHSWLIQILEIYKINNTLINFLKNIMASWRTTININTNKEQRNIGVIQIKRGIFQGDSLSPLWFCLALNPLSQELNNTKFGLNITNNKTNICQLTHLLYMDDLKLYSSSNINMDRLLDITVRFTKDINMNFGLDKCRKLNIKKGKVAGGSYNINEELQITAMESHELYKYLGYNQSRLLEHAKIKESLKKEYIKRLHAVCKQQLSSKKIFKAINTYVIPILTYSFGVIKWTKTELRQLEIKARTILTHHRHHHPKSAIERVCLPRKEGGRGFIDITQLHNKQINVMKVFFYSKKENSQLHKAVVQIDKKYTPLNLSQEHIEIVDTKKIIEEKHRKWKEKELHGRHKHDLEQAHIDAEASNKWLELAGLFPETEGFIIAIQDQVITTKNYRKYILKDNTIVNDLCRKCLSKPETIQHITGACITLTQNDYTHRHNQVSNIIHQKLVLKYKLVREPHTPYYKYSPSPVLENKSHKIYYDRTILTDHTIYNNRPDITFVDKRNKHAFIIDIAVPNTNNIQSTIIEKIRKYTELQEEIKKVWRMNTVTIVPIVISSTGVIPKQLFQSLKILDLPKFTYVTLQKAVILNTCRLVRKFLQLNTDNEDRAP

SEQ ID NO: 15382 - protein, 1231 aa, Cecropterus bathyllus
MNEFQIKNVYNLRSKAKNTLTHSESINTQIQHETPQTNAGLINRSTQNLTVSSEILKAEDVSQAALAMKPATTKAGKLRVRMKWDKEINIFIMRTYYRITKLETDFTTYRQQMHQKFIEKYKNTEITEQRISDQKRFIVRNKRLSDEELKVIRDEVAIELEKEELGIKEYITPNTSQKLNTTHKKYKRQNRKSNLTPTPINNTPINNVDIDFPLLQDKEETTNEVSTDALIKQLEANISKYTGTDPTSRPVLPKIKSSRYITYLIRRFNQDILPTKLNSLETITDTHTLVYCTALTIAEHLNIKVYNRVHSHNYRKPAWQIRLEKDIEDLRKDIGRLTQYKSGNNSKKLYKNVEKILNKTKQHSSHEQLNTKINEYLDTLKQKLAVKSHRLARYKKAKDRKDNNRLFTTSEKQFYRKIRNNNNNIIKTPSIISLKEFWSEIWAHSTEHNKDAEWIHSEINRSQYIQDMQFQDIDDKELQCIINKTHNWKAAGIDGIHNYWFKQLFVVHKKLAKQITDIIKGVSLLPDFLSKGRTFLLPKNNNTEDPSQYRPITCLPTLYKIITSVIANRIYTHLEQFNILSEEQKGCRRHHMGCKEQLIIDSTILKHVEKSKQDLFVTYIDYQKAFDSIPHSWLIQVLEIYKINSTIISFLENIMSSWRTTINLNTNKDQINVGEIQIKRGIFQGDSLSPLWFCLALNPLSQELNNTKFGFKIKNNKETICQITHLLYMDDLKLYSSSNINMDKLLDTTVRFTKDIKMDFGLDKCRKLNIKKGKIMKGSYNINEEHQIKAMESHEFYKYLGYNQSRLLQHSTIKENLKKEYINRLHVICKQYLSSKNLFKAINTYAIPILTYSFGVVKWSKTELKLLEIKTRTTLTQHRYHHPKSAIERICIPRKEGGRGLIDITQLHNKQINSMKVFFYSKKDNSHLHKAVIQIDHKYTPLNLSVEHIEKVDTQRLTEDKHRKWKEKELHGRHKHDLEQAHIDKEASNKWLELAGLFPETEGFITAIQDQVITTKNYRKHILKDNTIVNDLCRKCLSKPETIQHITGACIKLTQNDYTHRHNQVSNIIHQKLVIKYKLTKEPHTPYYKYSPSPVLENTTHKIYYDRTILTDHTIYNNRPDITFVDKQNKHAFIIDIAVPNTNNIETTIVEKIRKYTELQEEIKKVWKMKTVTIVPIVISSTGVIPKQLFQALKMLDLPKFTYVTLQKAAILNTCRLVRKFLQLNTENDNS

SEQ ID NO: 15383 - protein, 1227 aa, Chioides albofasciatus
MNENKNINKYNLRSKTKHLNDVDSMSPQIQHEIPETNTCLTNQSTQHIKESSVLHPAEDASQAAAAMKPATTKAGKPRVRMKWDKEINMFIMRTYYRVTKLETDFTTYRQQMHQKFIEKYKNTEITEQRISDQKRFIIRNKRLSEEELKKIRDEVAKELEKEEVNINQHIASNTFRNIYTSQANLKIQNTSNRNKDLIPSTHLNLDLDSQVIQNKEVTSEVNTEALIEQLESNITKYTGTDPSSRPVLPKIKTSRYLTYLIRKFNTDILPTKLNLIKTITDTHTLIYCTALTIAEHLKMKIYCRTNSNNYKKPAWQVRLEKSIEDLRKDIGRLTQYKAGNNSKKLYKNVEEILNNTKQHSSHDQLNRKITEHLDTLKQKLAIKSHRLARYKKAKVRKDNNRLFTTNEKQFYRKIRNTNNIATKPPSTISLKEFWSNIWMHNTEHNRNAEWIHSETIRSQFIENMQFDDIDEEELRCIINKSHNWKAAGIDSIHNYWFKKLFVLHNKLAQQITDIIKGSCLLPEFLSKGRTFLLPKNSNTEDPSQYRPITCLPTLYKIITSVIANRIYKHLDKYNILSEEQKGCRRHHMGCKEQLIIDTTILKHVEKSKHDLFVTYIDYQKAFDSIPHSWLIQVLEIYKINSTLISFLKNVMTTWRTSIYLNTNKDQINIGEIKIKRGIFQGDSLSPLWFCLALNPLSQELNNTKLGYNIKYNRHTLCQLSHLLYMDDLKLYSSSNINMDRLLDTTVRFTKDINMDFGLDKCRKLNIKKGKINGGNYKIDEENQILAMESHELYKYLGYNQSRLLEHTSIKERLKKEYINRLHVVCKQQLSSKNLFKAINTFAIPILTYSFGVVKWSKTELKQLEIKTRTILTQHRHHHPKSAIERISIPRKEGGRGLIDITQLHNKQINSMKVFFNNKKENSELHKAVMRIDNKYTPLNLSEEHIEVVDTQKLVEEKHRKWREKELHGRHKHDLEQAHIDKEASNKWLELAGLFPETEGFIIAIQDQVITTKNYRKYILKDNTIVNDLCRKCLSKPETIQHITGACITLTQNDYTHRHNQVSNIIHQKLVIKYKLSKEPHTPYYKYSPSPVLENNTHKIYYDRTILTDHTIYNNRPDITFIDKQNKHAFIIDIAVPNTNNIESTIVEKIRKYTELQEEIKRVWKMNTVTIVPIVISSTGVIPKQLSQALKILDLPKFTYVTLQKAAILNTCRLVRKFLQLNTDNEDN

SEQ ID NO: 15384 - protein, 1229 aa, Cecropterus dorantes
MNEYQIKNKYNLRSKSKYAYNSESIDTQSQHEIPGTNTCLINQSTQNLTESSEILQAEDVSQAASAMKPATTKAGKTRVRMKWDKEINIFIMRTYYRITKLETDFTTYRQQMHQKFIEKYKNIDITEQRISDQKRFIVRNKRLSDEELKVIRDEVAKEIEKEELNIKQCITPNTSQNLTHTNYKRQNRRNTKSNLTPSILTNDVDGDADLLQLQDKEEPTNEVSSDALLKQLEANISKYTGTDPTSRPVLPKIKSSKYITYLIRIFNNDILPTKLDSIKTITDTHTLVYCTALTIIEHLNIKVYNRIHSYNYAKPAWQIRLEKDIEDLRKDIGRLTQYKSGNNSKKLYRNVKEILNRTKQHSSHEQLNIKINEYLDTLKQKLAVKSHRLARYKKAKDRKDNNRLFIKSEKQFYRKIKNNSNNIIKTPSKISLKEFWSEIWENSTEHNRDAAWIHSEIKRSQYIQDMEFEDIDDKELQYIINKTHNWKAAGIDGIHNYWFKKLFVVHNKLAEQITDIIKGVNQLPEFLSTGRTFLLPKNNKTEDPSQYRPITCLPTLYKIITSVISNRIYTHLEQFNILSEEQKGCRRHHMGCKEQLIIDSTILKHVEKSKQDLFVTYIDYQKAFDSIPHSWLVQVLEIYKINSTIISFLENIMSTWRTTINLNTNKNRINIGEIKIKRGIFQGDSLSPLWFCLALNPLSHELNNTKFGFKIKSNRETLCQITHLLYMDDLKLYSSSNINMDRLLDITVRFTNDIKMDFGLDKCRKLNIKKGKIIKGGYKINEEHQITAMESHEFYKYLGYNQLRFLQHANIKENLKKEYISRLHTVCKQYLSSKNLFKAINTYAIPILTYSFGVIKWSKTELKLLEIKTRTTLTQHRHHHPKSAIERISIPRKEGGRGLIDITQLHNKQINNMKGFFYNKKENSKLHKAVVQIDNKYTPLNLNEEHIEIVDMQNLTEDKHRKWKEKELHGRHKYDLEQAHIDKEASNKWLELAGLFPETEGFIAAIQDQVITTKNYRKYILKDNTIVNDLCRKCLSKPETIQHITGACIKLTQNDYTHRHNQVSNIIHQKLVIKYKLITEPHTPYYKYSPSPVIENATYKIYYDRTILTDHTIYNNRPDITFVDKQNKHAFIIDIAVPNTNNIQTTIVEKIRKYTELQEEIKKVWKMNTVTIVPIVISSTGVIPKQLFQALKILDLPKFTYVMLQKAVILNTCRLVRKFLQLNEENDIG

SEQ ID NO: 15385 - protein, 1232 aa, Spathilepia clonius
MNEYQIKNKYNLRSKTKQTNDANLVSNCQTHHEIPEPNVCLINQFTQKITESLEKPSAEDVSQAAAAMKPATTKAGKPRVRMKWDKEINIFIMRTYYRITKLETDFTTYRQQMHQKFIEKYKNTEITEQRISDQKRFIIRNKRLSDEELKIIRDEVAKEIEKEELNINQYTTPNSFQNLKTTHTNFKLQDTHNRNRGSNHITPRNKDVELQLMQNKDEIINEANTEVLSEKLETNISKYSRMDPTSRPVIPKIKSSRYVTQLIQKFNTDILPKKLNLIKTITDTHTLIYCTALTIAEHLNIKIYNRIHCSNYKKPAWQIRLEKNIEDLRKDIGRLTQYKLGNKSKNLYKNVKEILNKTKQHSSHEKLNVKINEYLDTLKQKLAIKSHRLARYKKAKERKDNNRLFTTSERQFYRKIKHTNNVIIKPPSITSLKEFWSNIWTHSPEHNRNAEWIQSEIIRSQYVQNMQFDNIDEKEVRSIINKTHNWKATGIDGIHNFWFKKLYVVHNNLAQQITDIIKGVSILPEFLSKGRTFLLPKNNNTEDPSQYRPITCLPTLYKIITSVIANRIYKHLEKFNILTEEQKGCRRHHMGCKEQLIIDTTILKHVEKTKQDLFVTYIDYQKAFDSIPHSWLIQVLEIYKIDNTLINFLKNVMSTWRTTINLNTNKHQINIGEIKIRRGIFQGDSLSPLWFCLALNPLSQELNNTKFGFNIKNNRRTLSQLTHLLYMDDLKLYSSSNINMDRLLDTTVRFTRDIKMDFGLDKCRKLNIRKGKVSDGNYKINEEDQIIAMESHDLYKYLGYNQSRLLEHTAIKVNLKKEYINRLHVVCKQQLSSKNLFKAINTYVIPILTYSFGVVKWSKTELKQLEIKTRTILTQHRYHHPKSAIERVCIPRKEGGRGLIDITQLHNKQINAMKNFFYSKKENSELHKAVIQIDNKYTPLNLREEHIEIIDTQKLMEEKHRKWKEKELHGRHKHDLEQAHIDKEASNKWLELAGLFPETEGFILAIQDQVITTKNYRKYILKDNTIVNDLCRKCLSKPETIQHITGACITLTQNDYTHRHNQVSNIIHQKLVMKYKLLKEPHTPYYKYLPSPVVENSTHKIYYDRTILTDHTIYNNRPDITFVDKKKKHAFIIDIAVPNTNNIQSTIVEKTRKYTELQEEIKKVWKMNSVTIVPIVISSTGVIPKQLFQALKILDLPKYTYVTLQKAAILNTCRLVRKFLQLSTDNEDNLRV

SEQ ID NO: 15386 - protein, 1232 aa, Astraptes hopfferi
MNEHQIKNKYNLRSKSKHTHNTDSLNTQTQQETPLVEINTCLINQPTQNISESLDIFPAEDVSQAAVAMKPATTKAGKPRVRMKWDKEINMFIMRTYYSVTKLETDFTTYRQQMHQKFIEKYKNTEITEQRISDQKRFIIRNKRLSDEELKIIRDEVAKEIEREELQISRGITRNTQYLNRAHTNIRRQNRSNRDNDLISSTIINTNVDLQVVQDKQPINEINTEALIASFEANLSKYNGTDPTSRPALPKIKTSRYLTYLIRIFNKDILPIRLNSIETITDTHTLIYCTALTIAEHLNIKIYNRSNSNSYKKPAWQIRLEKDIEDLRKDIGRLTQYKSGNNSKKLCKKVKEILNKTKQHSSREQSNIKINEYLDTLKQKLAVKSHRLARYKKAKDRKDNNRLFTTSEKQFYRKMKNTNNYVIKPPSTESLKEFWSKVWTYNAEHNREAEWIHSEIARSQFVQDMEFDDIDDKELQCIINKTHNWKAAGIDGIHNYWLKKLVVVHNKLAKQITDIIKGVSSLPEFLSKGRTFLLPKNNNTEDPSQYRPITCLPTLYKIITSVIANRIYKHLEQFNILSEEQKGCRRHHMGCKEQLIIDSTILKHIQKSKKDLFITYIDYQKAFDSIPHSWLIQVLEIYKINNTLINFLKNVMATWKTSINLNTNRDQINIGEIEIKRGIFQGDSLSPLWFCLALNPLSQQLNNTKFGLNIKNDKRSICQLTHLLYMDDLKLYSGSNINMDRLLDITVRFTKDIKMDFGLNKCRKLNIKKGTVMGGSYNINEEQQIPAMESNELYKYLGYNQSQLLEHAEIKDSLKKEYIKRIHTVCKQQLSSKNLFKAINTYAVPILTYSFGVIKWTKTELKQLEIKTRTILTQNRHHHPKSAIERVCLSRKEGGRGLIDITQLHNKQVNAMKVFFYSKKEKSQLHKAVIQIDKKYTPLNLSEEHVEIVDTKKITEEKHSKWKGKELHGRHKHDLDQAHIDSEASNKWLELAGLFPETEGFIIAIQDQVITTKNYRKYILKDSTMANDLCRKCLSKPETIQHITGACIKLTQNDYTHRHNQVSNIIHQKLVLKYKLIREPHTPYYKYSPSPVLENSTHKIYYDRTILTDHTIYNNRPDITFVDKLNKHTFIIDIAVPNTNNIQSTIVEKTRKYTELQEEIKKVWKMNTVTIVPIVISSTGVVPKQLSQALKILDLPKFTYITLQKAAILNTCRIVRKFLQINKDNEDSLQVQ

SEQ ID NO: 15387 - protein, 1231 aa, Epargyreus clarus
MNENKIKNKYNLRSKTKHTNNADSSSSQTQNETQETNTSVTNQSTKYKGKSPELYPAEDVSQAAAAMKPATTKAGKPRVRMKWDKEINIFIMRTYYRITKLETDFTTYRQQMHQKFIEKYNYTEITEQRISDQKRFIIRNKRLSDEELKIIRDEVAKEIEKEDINVNQQVAPNTLPNLHKSQTNFRRQNRSNRNKDLISNTRLDGDLDSQNKEEITNEVNTEALMQQLEANISKYTGTDPTCRPILPKIKTSRYLTHLIKKFNTDILPTKLNIIKTITDSHTLIYCTALTIAEHLNIKLYCRTNRHNYKKPAWQIRLENSIEDLRKDIGRLTQYKAGNNSKKLYKNVIEILNKAKQHSSHEQLNRKINEYLDTLKQKLAVKSHRLARYKKAKDRKDNNRLFTTSEKQFYRKIRNTSNNNISIKPPSITSVREFWSNIWTHNTEHNRNAEWIHSETSRSQFIQDMQLDDIDEEELQSIINKTHNWKAAGIDGIHNYWFKKLFVLHNKLAKQITDIIKGSSLFPEFLSKGRTFLLPKNNKTEDPSQYRPITCLPTLYKIITSVIANRIYKHLEKYSILSEEQKGCRRQHMGCKEQLIIDTTILKHVEKSKQDLFVTYIDYQKAFDSIPHSWLIQVLEIYKINNNLISFLKNIMTTWKTTINLNTNKDQINIGEIKIKRGIFQGDSLSPLWFCLALNPLSQQLNNTKFGYNIKYNRHTLYQLTHLLYMVDLKLYSSSNIGMDWLLDTTVRFTKDINMDFGLDKCRKLNIKKGKIKGGNYKINEENQIIAMDIHELYKYLGYNQSRSLEHTAIKESLKKEYINRLHVVCKQQLSSKNLFKAINTFAIPILTYSFGVVKWSKTELKQLEIKTRTILTQHRHHHPKSAIERVSIPRREGGRGLIDITQLHNKQINSMKVFFNNKKETSELHKAVMLVDNKYTPLNLSEENIEAVDTQNLTEEKHRKWKEKELHGRHKHDLEQAHIDKEASNKWLELAGLFPETEGFIIAIQDQVITTKNYRKYILKDNTIVNDLCKKCLSKPETIQHITGACITLTQNDYTHRHNQVTNIIHQKLVIKYKLLKEPHTPYYKYLPSSVLENTTHKIYYDRTILTDHTIYNNRPDITLIDKQNKHAYIIDIAVPNTNNIQSTIVEKIRKYTELQEEIKRVWKMNTVTIVPIVISSTGVIPKQLSQALKILDLPKFTYITFQKAAILNTCRLVRKFLQLDTDNKDNNYVA

SEQ ID NO: 15388 - protein, 1188 aa, Telegonus cellus
MNEYQIKNKYNLRSKSKHTNSTDSVNTQTQQEIPLVEINTCLINQPTQNISESLDISPAEDVLQAAVAMKPATTKAGKPRVRMKWDKEINMFIMRTYYHVTKLETDFTTYRQQMHQKFIEKYKNTEITEQRISDQKRFIIRNKRLSDEELKTMRDEVAKEIEREELQISQCILTRNTQYLNRAHTNIRRQNRSNRNNDSISSSLINVDVDSEIMQDKEPINEVNTEALIKQLEVNLSKYTGTDPTTRPVLPKIKTSRYVTYLIRKFNKDILPIKLNSIETITDTHTLIYCTALTIAEHLNMKIYNRVNSYNYKKPVWQIRLEKNIEDLRKDIGRLTQYKSGNNSKKLYKNIKEILNKTKQHSSREQSNIKINEYLDTLKQKLAVKSHRLARYKKAKDRKDNNRLFTTSEKQFYRKIKNTNNCVIKPPSTESLKEFWSKIWTYNAEHNREAGWIHSEIVRSQFIRDMEFDDIDDKELQCIINKTHNWKAAGIDGIHNYWLKKLFVVHNKLAKQITEIIKGVSLLPEFLSKGRTFLLPKNNNTEDPSQYRPITCLPTLYKIVTSVIANRIYKHLEQYNILSEEQKGCRRHHMGCKEQLIIDSTILKHVQKSKKDLFITYIDYQKAFDSIPHSWLIQVLEIYKINNTLINFLKNVMSTWRTSINLYTNRDQINIGEIEIKRGIFQGDSLSPLWFCLALNPLSQELNNTKFGLNIKNDKRSICQLTHLLYMDDLKLYSGSNINMERLLDITVRFTKDIKMDFGLDKCRKLNIKKGTVTGGSYNINVEHQIMAMESHELYKYLGYNQSRLLEHAEIKGSLKKEYIKRIHTVSKQQLSSKNLFKAINTYAIPILTYSFGVVKWTKTELRQLEIKARTILTQHRHHHPKSAIERVCLPRNEGGRGLIDITQLHNKQINAMKVFFYNKKENSQLHKAVVQIDKKYTPLNLSEEHIEIIDTKKLTEEKHRKWKEKELHGRHKHDLEQAHIDAEASNKWLELAGLFPETEGFIIAIQDQVITTKNYRKYILKDNTIVTDLCRKCLSKPETIQHITGACIKLTQNDYTHRQVSNIIHQKLVLKYKLIREPHTPYYKYSPSPVLENTTHKIYYDRTILTDHTIYNNRPDITFVDKLNKHAFIIDIAVPNTNNIQSTIVEKTRKYTELQEEIKKIWKLNTVTIVPIVISSTGVVPKQLLQA

SEQ ID NO: 15389 - protein, 1434 aa, Chamunda chamunda
MQLRSGNKLPQAGTGATRDGESRLEPSSSSCPKYSGGDNVSQSSAQLVTVADNRQYHSPSIHSLPSSNIFSSIPSTNSFLPSPSCSTSTDNRLPEDVVHETVSVNYHASTPGLSKRRKWTTQMNKFILRTYLQLTLMETDTKGYLPPLHIKFVEKFPEMHMISRNRVGDQRRAIVNKKLLTQHDIDCIYMEVQEEMNSMQTNTHIQNTLLSSSLLDKTQIKQKDNVTQIKPTNSQHTQSTKCNFYQKMSWSNALNESIIKCYYRVTKLQTDLTLYRKLLHEAFINMHPDLAHLSEQRIADQRRAIIKHKYISENRLKTLQEEVALELNLHTGDTTYQNSAIQRDCTEHNILTHYIPHISNDHAPQTHTLHHTQSISRSENNQCLEQNTSQIRITATTNTHNESDFTTLDSQMSWHQDEVLENMNMKKILTEKFENNLNKFTSTDPTTRPILPKIKPTRYLMKLIKIFNIDILPTKLNVIENITDTHTLIYCTALTIIEHLKIKTHNITPNINKKPSWQIRLEQNIEQLRKDIGRLTQYMSGNNSKKLFTKVQEILNKTEKHSSHENTNKKIEEHLDTLKQKLAVKSHRLSRYKTAKYRKENNKLFIRNEKQFYRKIKQNSGSNNTINIPSESSLKEFWSDIWTLNIEHNKDAEWIKAEMNQSDSIQCMQFEDIDVIELRNIINRTHNWKAAGVDRVHNFWFKKLFVIQEVLAQQINDIIKGISLPPDFLSIGRTFLIPKSSQTQDPSQYRPITCLPTLYKIITSVIANRIYQHVEHFKILSEEQKGCRRNCLGCKEQLVIDSTILKHVQKTKKDLFVAYIDYQKAFDSVPHSWLIHILEIYKINPILINFLKNMMSKWRTTLSVHTNISEIKVGEIEIKRGIFQGDSLSPLWFCLALNPLSRLLNNSKFGFNIKSNRQTLYQFTHLLYMDDLKLYSSTNTNIDKLLDITVKFTEDIKMDFGLNKCRKLNIRKGKIVEGNYEIDEDRQITAMELQELYKYLGYNQGRLLEHTRIKENLRKEYIGRVHSVCKQQLSSKHLFKAINTYAIPVLTYSFGIIKWTNTDLNNLNIKTRTILTQHRYHHPKSAIERVTLPRKEGGRGLIDIKILHNKQINSMKIFFNSKKDNSELHKAIIKIDDKYTPLNLNDKNIEVVDVEKDRGEKHRNWKGKELHGRHKHDLEQPHVDKEASNKWLDFAALFPETEGFMLAIQDQVITTKNYRKFILNDSSLSNDLCRKCLCKSETIQHITGACIKLTQNDYTHRHNQVTNIIHQKLAIKYRLTKHSYTPYYKYTPSPVLENKTHKIYYDRTILTDHTIYSNRPDITLIDKQNKHAFIIDIAIPNTNNLQSTIVEKIRKYTELQEEIKRIWKMNNVTIVPLVISSTGVIPKQLFKSLRLLDLPNLSYITMQKAAILNTCRIVRKFLQLNSDNSFNIPH

SEQ ID NO: 15390 - protein, 723 aa, Cecropterus toxeus
MQFEDVDDKKLQTIINRTHNWKAAGIDGIHNYWFKKLVVVHNKLAKQITEIIKGVSLLPDFLSKGRTFLLPKNNNTEDPSQYRPITCLPTLYKIITAVIANRIYTHLEQFNILSEEQKGCRRHHMGCKEQLIIDSTILKHVEKSKQNLFVTYIDYQKAFDSIPHSWLIQVLEIYKINNTIISFLKNIMSTWRTTIHLNTNKNRINAGEIQIKRGIFQGDSLSPLWFCLALNSLSQELNNTKFGFKIKNNKETICQITHLLYMDDLKLYASSNINMDKLLDTTVRFTKDIKMDFGFDKCRKLNIKKGKVIDGSYNVNEENQIKAMESYEFYKYLGYNQSRLLHHSTIKENLKKEYINRLHVVCKQYLSSKNLFKAINTYAIPILTYSFGVVKWSKTELKLLEIKTRTTLTQHRHHHPKSAIERICIPRREGGRGLIDITQLHNKQINNMKVFFNSKKENSDLHKAIIQIDNKYTPLNLNNEYIEKVDTQKLTEDKHRKWKEKELHGRHKYDLEQAHIDKEASNKWLELAGLFPETEGFLIAIQDQVITTKNYRKYILKDNTIVNDLCRKCLSKPETIQHITGACIKLTQNDYTHRHNQVSNIIHQKLVIKYKLIKEPHTPYYQYSPSPVLENTTHKIYYDRTILTDHTIYNNRPDITLVDKQNKHAFIIDIAVPNTNNIETTLVEKIRKYTELQEEIMKVWKMSTVTIVPIVISSTGVIPKQLF

SEQ ID NO: 15391 - protein, 1202 aa, Narcosius parisi
MNEYQLKNKYNLRSKSKYTNIAVSMHTQTQHDIPDTSTCVIGQTTQYVSESPELLPAEDVSQAAVAMKPATTKAGKPRVRMKWDKEINIFIMRTYYRITKLETDFTTYRQQMHQKFIEKYKNTEITEQRISDQKRFIIRNKRLSDEELKIIRDEVAKEIEKEAVNISQQLTPNTFQNSNTAQTHFKRQNRSNRNKDSISCTPININVDLQVMGSEEGITSEVNTEALIGKLEANINKYTGTDPTSRPVLPKIKNTRYLTYLVKKFNTDILPKKLDLIKTITDTHTLIYCTALTIAEHLNIKIYNRFNSENRVNSNNYRKPAWQIRLERNIEDLRKDIGRLTQYKSGNNSKKLYKNVQKILNKTKQHSSHQQLNVKVNEYLDTLKQKLAVKSHRLARYKKAKDRKDNNKLFTTNEKQFYRKITHTNNNVTKPPSITSLKEFWSNIWAHNINHNRNAEWIRSEINRSQFIQDMQFDNIDDEELRYIINKTHNWKAAGIDGIHNYWFKKLSVVHHKLAIQITDILKGVSLLPEFLSKGRTFLLPKNNNTEDPSQYRPITCLPTLYKLITSIIANRIYKHLDKFNVLSEEQKGCRRHHMGCKEQLIIDTTILKYVEKSKQDLFVTYIDYQKAFDSIPHSWLIQVLEIYKINNTLINFLKKVMSTWRTTINFNTNKDQINVGEIKIKRGIFQGDSLSPLWFCLALNPLSQELNSTKFGFNIKNNRRTLCQLTHLLYMDDLKLYSSSNINMDKLLDITARFTRDIKMDFGLDKCRKLNIKKGKITSGNYRINEEQQITAMESHELYKYLGYNQSRLLEHTAIKENLKKEYTNRLHIVCRQQLSSKNLFKAINTYVIPILTYSFGVVKWSKTELKKIEIKTRTILTQHRYHHPKSAIERVCIPRKEGGRGLIDITQLHNKQINVMKVFFYSKKENSKLHKVVIQIDNKYTPLNLNEEHIELVDRQKLIDEKHRKWKEKELHGRHKHDLEQTHIDKEASNKWLDLAGLFPETEGFIIAIQDQVITTKNYRKYILKDNTLVNDLCRKCLSKPETIQHITGACITLTQNDYTHRHNQVSNIIHQKLVIKYKLLKDPHTPYYKYSPSPVLENTTHKIYYDRTILTDHTIYNNRPDITFVDKKNKHAFLIDIAIPNTNNIQNTIVEKIRKYTELQEEIKKVWKMKTVTIVPIVISSTGVVPKQLSQALKILDLP

SEQ ID NO: 15392 - protein, 1262 aa, Phalera bucephala
METRSNRKRLMPLPGGDRRGTPGAGAGRSSMQATGGESITGRSLAGIPEEATSSSSNPTIAQEFQTQPAADASQAASAMRPATTKAGKPRVRMKWDKDVNIFIIRTYLQITNLETDLTEYRQKLHQEFIQQYPNANVTEQRLSDQRRAIIRNRFLSEETLQQIRDEVQYSIRRSNNFDNTSQVIPSPLIGNNVPRHCDYINSQEDTGILTQDISNIQSFENIPQYNTQTQPITQTNLQLEESQTHLDDTDLKYILTENLETYLTKYTGTNPADRPSLPKIRSSRTLTKIINSFNNTIIPKKITNLETITDTHTLIYCSALTIVTHLKIKIRNKCNKIIKTKPAWQIRLEKDIEQLRKDIGRLTQHKNGNTSKKLSAKIKQILIKSNKHSSYEDPNRRIDDHLDTLKQKLAVKSHRLARYIKAENRKWHNKLFFHNQKGFYRQLKDKHTPITALPDEEAMTHFWSNIWSNNAEHNPEAEWINREITRTSTIDEMKFEEIKLEELKRIINKTKNWKAAGLDGIHNFWIKRLHAVHETLTKQINELIKGKGNVPEFLTKGITYMLPKSNQTQDPSQYRPITCLPTLYKIITSCIANRINAHIEQFSILAEEQKGCRRHHMGCKEQLTIDSAILKSVQKSRKNLFVAYIDYKKAFDSIPHSWLLQVLKIYKINPVIINFIQTVMTSWRTTLHIRTDSKNFTSNDIAIKRGIFQGDSLSPLWFCLALNPLSRELIDSKLGFNIKNNRQTLFQLTHLLYMDDLKLYANRSTDLDNLLSITTKFSHDIKMDVGLDKCRKLNIKKGKMIEGDFMITETECIQAMNNEELYKYLGYNQARLIDHCNIKKKLKQEYFNRLHNLCKMQLISKNLFKSINAYAIPVLTYSFGLIKWSKTELNSLETKTRTILTQHRYHHPKSAKERINIPRLEGGRGLIEITQLYHGQIANLKQFFIRKKENILLNKVIVEIDKQFTPLNLCDEVVQPIDKIEHHRNRHRIWRQKELHGRHPHDLDQSHINKEASNKWLDLGELFPETEGFLISIQDQVINTKNYRKYILKDPTLRNDLCRKCNKKPETIQHITGACSTLTQNDYMHRHNQLANIIHQKLATKHKLTNKPHSPYYKYSPPPVLENHSVKLYYDRTIITDHTVYNNRPDITFVDKENKHTYLIDIAVPNTNNLQTTIAEKIRKYTELQEEIKRVWKMNTVTIVPIIVSTTGIIPKQLFNGLQLLKLSPCTYLTLQKAAILNTCRIVRKFLQLDSDSQFTTAEQPT

SEQ ID NO: 15393 - protein, 1262 aa, Phalera bucephala
METRSNRKRLMPLPGGDRRGTPGAGAGRSSMQATGGESITGRSLAGIPEEATSSSSNPTIAQEFQTQPAADASQAASAMRPATTKAGKPRVRMKCDKDVNIFIIRTYLQITNLETDLTEYRQKLHQEFIQQYPNANVTEQRLSDQRRAIIRNRFLSEETLQQIRDEVQYSIRRSNNFDNTSQVIPSPLIGNNVPRHCDYINSQEDTGILTQDISNIQSFENIPQYNTQTQTITQTNLQLEESQTHLDDTDLKYILTENLETYLTKYTGTNPADRPSLPKIRSSRTLTKIINSFNNTIIPKKITNLETITDTHTLIYCSALTIVTHLKIKIRNKCNKIIKTKPAWQIRLEKDIEQLRKDIGRLTQHKNGNTSKKLSAKIKQILIKSNKHSSYEDPNRRIDDHLDTLKQKLAVKSHRLARYIKAENRKWHNKLFFHNQKGFYRQLKDKHTPITALPDEEAMTHFWSNIWSNNAEHNPEAEWINREITRTSTIDEMKFEEIKLEELKRIINKTKNWKAAGLDGIHNFWIKRLHAVHETLTKQINELIKGKGNVPEFLTKGITYMLPKSNQTQDPSQYRPITCLPTLYKIITSCIANRINAHIEQFSILAEEQKGCRRHHMGCKEQLRIDSAILKSVQKSRKNLFVAYIDYKKAFDSIPHSWLLQVLKIYKINPVIINFIQTVMTSWRTTLHIRTDSKNFTSNDIAIKRGIFQGDSLSPLWFCLALNPLSRELIDSKLGFNIKNNRQTLFQLTHLLYMDDLKLYANRSTDLDHLLSITTKFSHDIKMDFGLDKCRKLNIKKGKMIEGDFMITETECIQAMNNEELYKYLGYNQARLIDHCNIKKKLKQEYFNRLHNLCKMQLLSKNLFKSINAYAIPVLTYSFGLIKWSKTELNSLETKTRTILTQHRYHHPKSAKERINIPRLEGGRGLIEITQLYHGQIANLKQFFIRKKENSLLHKAIVEIDKQFTPLNLCDEVVQPIDKIEHHRNRHRIWRQKELHGRHPHDLDQSHINKEASNKWLDLGELFPETEGFLISIQDQVINTKNYRKYILKDPTLRNDLCRKCNKKPETIQHITGACSTLTQNDYMHRHNQLANIIHQKLATKHKLTNKPHSPYYKYSPPPVLENHSVKLYYDRTIITDHTVYNNRPDITFVDKENKHTYLIDIAVPNTNNLQTTIAEKIRKYTELQEEIKRVWKMNTVTIVPIIVSTTGIIPKQLFNGLQLLKLSPYTYLTLQKAAILNTCRIVRKFLQLDSDSQFTTAEQPT

SEQ ID NO: 15394 - protein, 1400 aa, Atarnes sallei
MMEAVRNRKVPQAGTSVNNEGESRPELTSLGSSTYSGGSNVTQSSEIRPYGLRPRTTSGKVFHKNQTTLTSSSTQSLFSSLPSTNSFDRPNSSVSFNSSILQDDVVLEADLLASSRPTTSSSRTRYKWSSEMNEFILRTYLHLTLMEYDTKSYLLPLHTKFIERFPERQSISRQRIGDQRRAIVRKKLLPQITIDRIYKEVQAEIRNFHDTPGAIPRTDNNLLFPKTSKHLPKNPHQRMSWSNELNESIIKCYYIVTKLETDITSYRKTLHDTFIHKHPHLAHLSEQRIADQRRAIITRNFLSKERLKALKEEVAEEIKNTEIDNVHQNPVIADRLDADLYPIDELSSCRISPRSTHVETNSELQSTKTNLPSNLIRNKMNTKIPQHYEIQQNNLTIKTLTEKLRKYLNTHNGTDPTKRPILPKIKQTRDVINLLKLFNDEILPPMLKNIENITDTHTLVYCTALTIIEHIKINIKNIPVRYVNKKPAWQIRLEKNIGDLRRDIGRLTQYKSGNNSRKLYNKILKILNKTNKHSAHDNNNKKLEEYIDTLKQKLAVKSHRLSRYIAAKARNDNNRLFKTNERQFYRKIKESHNVIDKNQNLPSISSLSEYWADIWTHKIEHNKEAAWIKAEIRELDSVQEMEFAELDTVELRNIINKTHSWKAAGLDRIQNYWFKKLFVVQQVLAKQINDILKGGSLLPEFLTTGRTYLLPKGTHTQDPSQYRPITCLPTLYKIITSVIANRIYQHVESSKLLFEEQKGCRRNHLGCKEQLIIDSAILKQVQKGKKNLFVAYIDYKKAFDSVPHSWLIQILEIYKVNSNLINLLKRCMSSWKTILSLNTNNSEMNTAELQIKRGIFQGDSLSPLWFCLALNPLSRILNNSTLGFQIKNNKQSLYNLTHLLYMDDLKLYSSNEKNINMLLDITIQFTEDIKMDLGLNKCRKLNIKNGKIVEGSYNIDKERCITSMETMDLYKYLGYNQARLLEHTAIKENLRKEYSSRLHSICKQKLSSKNLFKAINTYAIPVLTYSFGIIKWTKTELNNLEIKTRTILTQHRYHHPKSAIERVNIQRREGGRGLIQITSLHNRQLYSIKVFFKTKKDSSPLHKAITLIDDKFTPLNLRNSQNIIEIDTEKEKEEKHRRWREKELHGRHKTDLEQTYIDKGASNKWLELAELFPETEGFIIAIQDQVVATKNYRKFILKDNSLTNDICRKCLSKPETIQHITGACLKLTQNDYTHRHNQVTNIVHQKLVYKYKLLKDPTLPYYKYTPSPVLENKNYKIYYDRTILTDHTIYNNRPDITFIDKGKKHAFIIDIAVPNTNNLQSTITEKIRKYTELQEEIKRLWKMKKVTIVPLIISTTGVVPKHLLQNLKLLDLPVLTYLTMQKAAILNTCRIVRKFLQNND

SEQ ID NO: 15395 - protein, 1399 aa, Haemactis sanguinalis
MMEAVRNRKVPQAGTSVNNEGESRPELTNLGSSTYSGGSNVTQSSEIRPYRLRPRTTSGKVWHKDQTTLTSSSTQSLFSSLPSSNSFARPNSSASVNSTLQDDVALEANLLASSRPTTSSSCTRYKWSSEMNEFILRTYLHLTLMETDTKSYLLPLHTKFIEQFPERQHISRQRLGDQRRAIIRNKLLPQITIDLIYKEVQTEIQNFHGTPVTFARTKNKLIKSKTVQHLLTNPHQKMSWSNELNESIITCYYTVTKLETDLTSYRKTLHDTFIHKHPHLAHLSEQRIADQRRAIIKHNFLSKDRLKALREKVAEELNSTDIDQTTHQNLQTSDNEAIEHIDELSNMHDTPCSSPHYYRFHIECNSTLNLSNNNIKSKNFKKTISYTFNSLETKTFTENLEKNINTHARTDPTKRPILPKIKATSQVVNLLKIFNSVILPPMLKKIENITDTHTLVYCAALTIIEHLNIRIKNTQNKYLNKKPAWQIRLEQDIDNLRKDIGRLTQFKAGNNSKKLYKKVLIILNKANFHSARERTNNKLEEYIDTLKQKLAVKSHRLSRYIAAKIRNDNNRLFVTNEKQFYRKIKQNSTNNNNSGNQNLPSVSSLNDYWSDIWTQRIEHNEKAEWIKAEIKELVSIKNMSYIELDAVELRDVINKTHSWKAAGLDRIQNYWYKKLYVVHQMLAKQINDILKGVSSLPEFLTKGKTFLLAKSDQKQDPSQYRPITCLPTLYKIITSIIANRIYQHLENSKLLFEEQKGCRRNHLGCKEQLIIDSTILKHVQKKKINLFVAYIDYKKAFDSVPHSWLIQILEIYKINPNLINFLKGSMLSWKTILSLNTNNSEINIGEIDIKRGIFQGDSLSPLWFCLALNPLSRMLNSSKLGFHIKNSKQSLYNFTHLLYMDDLKLYSNKEKNLNKLLDITVQFTEDIKMELGLNKCRKLNIKSGKIVEGKYEIDEERCIKSMEILELYKYLGYNQAQMLEHSAIKENLKKEYSNRLHTICKQKLSSKHLFKAVNTYAIPILTYAFGVIKWSKTELNKLEIKTRTILTQHRYHHPKSAIERVSLPRKEGGRGLIQITSLHSRQLYSMKIFFKTKKDTSPLHKAITLIDDRFTPLNLINENIIELDTEKEKQEKHRIWREKELHGRHKSDLEQSYIDKGASNKWLELAELFPETEGFIVAIQDQVIATKNYRKHILKDNSLTNDLCRKCLSKPETIQHITGACLKLTQNDYTHRHNQVSNIVHQKLVNKYKLSKDPTTPYYKYIPSPVLENKNYKIYYDRTILTDHTIYNNRPDITFIDKNKKHVFIIDIAVPNTNNLQSTITEKVRKYTELQVEIKRLWKMRNVTIVPLVISTTGVVPKHLLESLKLLDLPVFTYVTMQKAAILNTCRIVRKFLQLNNYE

SEQ ID NO: 15396 - protein, 1334 aa, Paramimus stigma
MMEAVRNRKVPQAGTSVINEGESRPEFTSLGSSTYSGGSNVTQSSEIKYRLRPRTTSGKVFHKTQTTLTSSSPQSLFSSLPSTNSFVRPNSSVSLNSSILQEDVALEANLVASTRPTTSSSRTRYKWSSEMNEFILRTYLHLTLMESDTKSYLLPLHTKFIERFPERQYISRQRIGDQRRAIVRKKLLPQVTIDRIYKEVQTEIHNIHGTPVAITGADNNLPKTLKHFQTNPQQRMSWTNELNESVIKCYYTVTKLETDITSYRKILHEAFINKHPNLAHLSEQRIADQRRAIIKHNFLSKDRLKILKEEVAEEINNTKIENVHQNSLTTNNLATEYIDEIGPDTYSSNPQHSMHIELNLDLYEASPIPKNLKNNILDTSFSNKYEIQDNSLIIKTLTEKLKKNLKTHDGTDPTNRPILPKIKATRHVVNLLKIFNNIILPPMLMNLENITETHTLIYCTALTILEYINVNTKNLALNYDIKKPAWQIRLEKNIDDLRKDIGRLTQYKGGNNSGKLYNKVLKILNKANRHSARENTNEKLEEYIDTLKQKLAVKSHRLSRYITAKTRNDNNRLFKTNEKQFYRKIKESNNNNKNQSLPSISSLNEYWSDIWTRKAEHNKGAQWIKAEIKELDSVHDMKFVDLDALELRNIINKTHSWKAAGLDRIQNYWFKKLFVVQQVLAKQINDILKGDSLLPEFLTRGRTFLLPKATHTQDPSQYRPITCLPTLYKIITSVLANRIYQHIESSKLLLEEQKGCRRNHLGCKEQLIIDSAILKQVERGKKNLFVAYIDYKKAFDSVPHSWLIQILEIYKINPYIVNFLKRCMSSWKTTLSLNTNNSEMKIGDIDIKRGIFQGDSLSPLWFCLALNPLSRMLNNSTSGFHIKNNKQSLYKLTHLLYMDDLKLYSSNEKNINRLLDITVQFTQDIKMDLGLNKCRKLNIKCGKIVEGSYNIDTEHNITSMETLDLYKYLGYHQARLLEHKAIKENLVKEYTNRLHNICKQKLSSKNLFKAVNTYAIPVLTYSFGIIKWTKTELNNLEIKTRTILTQHRYHHPKSAIERVNIPRKEGGRGLIQITLLHNRQLYSIKTFFKLKKDSSPLHKAITLIDDKFTPLNLINENILVIDTEKEKQDKHRRWREKELHGRHKSDLEQTYIDKGASNKWLELAELFPETEGFIIAIQDQVIATKNYRKYILKDSSLTNDICRKCLSKPETIQHITGACLKLTQNDYTHRHNQVSNIVHQKLVNKYKLLKGPTLPYYKYAPSPILENKNYKIYYDRTILTDHTIYNNRPDITFIDKGKKHAFIIDIAVPNTNNLQSTITEKIRKYTELQEEIKR

SEQ ID NO: 15397 - protein, 1330 aa, Charidia lucaria
MMEAVRNRKVPQAGTSVNDEGESRPEFTSLGSSTYSGGSNVTQSSEIRPYRLRPRTTSGKVFHKNQTTLTSSSTQSLFSSLPSSNSFVRPNSSASFHSSILQEDVALDANLLASSRPTTSSSRTRYNWSSEMNEFILRTYLHLTLMESDTKSYLLPLHTKFIERFPERQNISRQRIGDQRRAIVRKKLLPQTTIDRIYKEVQTEIQNIHGTPVAVSVTDNNPLFTKTLKLFQTNSQQRMSWSNELNESVIKCYYAVTKLETNITSYRKTLHETFINKHPHLAHLSEQRIADQRRAIIKHNFLSKDRLKTLKEEVAEEITNTELDNIHQNSQKTNNVVPEYIDEFSPDTHHIYPQYNTHKESNSDLHETSSIPNKLNSNTLDTATSEKCEIQDNNLIIKTITEKLRKNLNTYDGTDPTNRPILPKIRVTRHVVNLLKMFNTIILPPMLKNLENITETHTLVYCTALTILEYINMNTKNLSLKYVNKKPVWQIRLEKNIDDLRRDIGRLTQYKGGNNSRKLYNKVLKIINKTNKHSAHENTNETLEEHIDTLKQKLAVKSHRLSRYITAKTRNDNNRLFKTNEKKFYRKIKENNNINETQNLPSISSLNEYWSDIWTRKAEHNKDAQWIKAEIKEIDSIQDMKFAELDAVELRNIINKTHSWKAAGLDRIQNYWFKKLFVVHQVLAKQINDILKGYSLLPEFLTKGRTFLLAKGNHTQDPSQYRPITCLPTLYKIITSVIANRIYQHVESSKLLLEEQKGCRRNHLGCKEQLIIDSAILKQVQRGKKNLFVAYIDYKKAFDSVPHSWLIQILEIYKIEPNIINFLKHCMSSWKTILNLNTNNSEINIGEIDIKRGIFQGDSLSPLWFCLALNPLSRMLNNSTLGFHIKNKKQSLYKLTHLLYMDDLKLYSSNEKNINRLLDLTVQFTEDIKMDLGLNKCRKLNIKSGKIVEGSYDIDKERSITSMETLDLYKYLGYNQARLLEHKAIKDSLKKEYTSRLHNICKQKLSSKNLFKAINTYAIPVLTYSFGIIKWSKTELNKLEIKTRTILTQHRYHHPKSAIERLNMPRKEGGRGLIQITSLHNRQLYTIKLFFKMKKDSSPLHKAITLIDDKFTPLNLINENIIEIDAEKEKQEKHRRWREKELHGRHKSDLEQTYIDKGASNKWLELADLFPETEGFIIAIQDQVIATKNYRKYILKDSSLTNDICRKCLSKPETIQHITGACLKLTQNDYTHRHNQVSNIVHQKLANKHKLLKDPISPYYKYTPSPILENKNYKIYYDRTILTDHTIYNNRPDITFVDKSKKHAFIIDIAVPNTNNLQSTITEKIRKYTE

SEQ ID NO: 15398 - protein, 1398 aa, Eburuncus unifasciata
MMEAVRNRKVPQAGTSVNNEGESRPELNSLGSSTYSGGSNVTQSSEIRSYKLRPRTTSGKVFHRNQATLTSSSTQSLFSSLPSTNSFDRPNSSVSYNSSILQDDVALEADLLACSRPTTSSSRTRYKWSSEMNEFILRTYLHLTLMEYDTKSYLLPLHTKFIERFPERQNISRQRIGDQRRAIVKKKLLPQITIDRIYKEVLAEIQNIHDTTVAISRTDNNLQSPKTSKHFPKNPHQRMSWSNELNESVIKCYYIVTKLETDITSYRKTLYDTFIHKHPHLAHLSEQRIADQRRAIITRNFLSKDRLIALKEEVAEEIKNTEINNVQQNPSITNTLDTEYIDELSTCHIYPHHSTHVEANSDLQSTKTNSPNNLKRNKLDTTISEHYEIQNNSLTIKTLTEKLSKYLNTHNGTDPTKRPILPKIKPTIHVVNLLKLFNNNILPPMLKNLKNITDTHTLVYCTALTIIEHINMKIKNVPMRYVNKKPAWQIRLEKNIDDLRKDIGRLTQYKRGNNSRKLYYKILKILNKTNKHSAHENTNENFEQYIDTLKQKLAVKSHRLSRYIAAKTRNDNNRLFKTNERQFYHKIKKSHNIINKNQNVPSISSLSGYWSDIWTHKIEHNKEAEWIKAEIRELHSVQDMEFAELDAVELRNIINKTHSWKAAGLDRIHNYWFKKLFVVQQVLAKQINDILKGVSLLPKFLTKGRTFLLPKGTHTQDPSQYRPITCLPTLYKIITSVIANRIYQHVESSKLLFEEQKGCRRNHLGCKEQLIIDSAILKQVQKGKKNLFVAYIDYKKAFDSVPHSWLIQILEIYKVNPNIINFLKRCMSSWKTILSLNTNNSEMNVAELDIKRGIFQGDSLSPLWFCLALNPLSRILNNSTLGFHIKNNKQSLYNLTHLLYMDDLKLYSSNDKNLNGLLDITVQFTEDIKMDLGLSKCRKLNIKNGKIIEGSYNIDKERCITSMETMDLYKYLGYDQARLLEHAAIKENLRKEYSNRLHSICKQKLSSKNLFKAVNTYAIPVLTYSFGIIKWTKTELNNLEIKTRTILTQHRYHHPKSAIERVNFQRKEGGRGLIQITSLHNRQLYSIKVFFKTKKDSSPLHKAITLIDDKFTPLNLRNENIVEIDAEKEKEEKHRRWREKELHGRHKTDLEQTYIDKEASNKWLELAELFPETEGFIIAIQDQVIATKNYRKFILKDSSLTNDICRKCLSKPETIQHITGACLKLTQNDYTHRHNQVSNIVHQKLVNKYKLSKNLKLPYYKYTPSPILENKNYKIYYDRTILTDHTIYNNRPDITFIDKGKKHAFIIDIAVPNTNNLQSTITEKIRKYTELQEEIKRLWKMRKVTIVPLIISTTGVVPKNLLHNLKLLDLPALTYLTMQKAAILNTCRIVRKFLQNNN

SEQ ID NO: 15399 - protein, 1230 aa, Ectomis octomaculata
MSEYQIKSNYNLRSHSSACRTQNTDSVFSPSQDISKINTPPTKQSILSISQSSGTPPAADVSQAATAMKPATTKAGKTRVRMKWDKEINIFIMRTYYQITKLETDLTTYRQQMHKKFIEKYQNTEVTEQRIADQRRFIIRNKRLSDEELKRIRDEVANDLEAEGLHISTHQTLNTFTNSHTVQDLNRHSSSLDNVAITNTCLSDNIDLKITQDEDDSLNLSYIQTLIEKFDSNLCKFKGTDPTTRPILPKIKASRYLTQVIRTFNEDILPTRINSLETITDTHTLIYCTVITIAEYLNIKIYDSRISRNHYKKPAWQIRLETNIEDLRKDIGRLTQYKAGNKSKKLYNKVKEIINKTLQHSSHDQFNKKINEHLDTLKQKLAVKSHRLARYKKAKDRKENNRLFATNEKQFYRKIKQVNSHDIKIPSTNMVKEFWSGIWTQESEHNKAADWINSEIKRTQFIQDMQFTDIDAEELRRVVNKTHNWKAAGVDSIHNFWFKKLFVLHDILARQITDIIKGLSKLPEFLTKGRTFLMPKNNHTEDPSQYRPITCLPTLYKIITSVISNRIYTHLEQYNILAEEQKGCRRFHMGCKEQLIIDTTILRHVHKTKQNLFVTYIDYQKAFDSVPHSWLLQVLEIYKINSNLIKFLKSVMSTWRTTLNLSINKDQINLGEIKIKRGIFQGDSLSPLWFCMALNPLSQELNNTKFGFHIRSNRRPIYRLTHLLYMDDLKLYSNTNNNMDKLLDITVAFTRDINMDFGLDKCRKLNIKKGMVIGGDYEINEDNRIISMESDECYKYLGYNQARILEHKIIKDKLIKEYINRVHSVCKQQLSSKNLFKAINTYAIPILTFSFGIIKWTKNDLKLLEMKTRTTLTQHRHHHPKSAIERVSIPRKEGGRGLVDITHLHNKQVHTMKTFFYTKKESSQLHKAIIEIDNKYTPLNLSDEHTELLVTQKLRDEKHQRWKEKELHGRHKHDLEQAHVDQEASNKWLELAGLFPETEGFIIAIQDQVVTTKNYRKHILKDRTINSDLCRKCFSKPETIQHITGACVTLTQNDYTHRHNQLTNIIHQKLVIKYKLLKDPHTPYYKYSPSSVLENMTHKIYYDRSILTDHTIYNNRPDITLVDKRKKHAFLIDIAVPNTNNIQSTIAEKIRKYTELQEEIKKVWKLNNVTIVPIVVSSTGVIPKQLIQGLKILQLPKYTYVTLQKAAILNTCRIVRKFLQLDKDNEDNTL

SEQ ID NO: 15400 - protein, 1229 aa, Telemiades fides
MNGYQIKNKYNLRSQTKVNIQNTASVYSQSLQEISNTCTPIIDQSVPNTIVSPEILPAEDVSWAATAMKPATTKAGKPRVRMKWDKEVNIFIMRTYYYVTKLETDLTTYRQQMHQKFIEKYQNAEVSEQRISDQRRFIIRNSRLSDEELQKIKDEVAKELEEVYLNVNEHLTPNILQNSDKLDKNPNRQERINSNNFSVTNTPSTDNSDIHLTLEEEENANTQTLLEKLQANLNKYTRTDPTNRPVLPKIKPSRYLTYIIKKFNEDVLPTKFSLIQSITDTHTLIYCAALTISEHLNVKIYNSSIDRNINKKPAWQIRLETNIEDLRKDIGRLTQYKFGNTSKKLYNKIKIIMNRTKQHSSHEHFNTKLNEHLDTLKQKLAVKSHRLARYKKAKQRKENNRLFVTCEKQFYRRIKQDNSRVVRPPSTNTLKEFWASIWTNKTEHNRSAEWINTEMKRSEFIEDMQFSDIDDKELRCVINKTHNWKAAGPDGIHNFWFKKLFVLHGILAKQITDIIKGINQLPEFLSKGRTFLLPKNNNTEDPSQYRPITCLPTLYKIITSVISNRIYSHLDKFNILSEEQKGCRRYHMGCKEQLIIDTALLKHVHKSKQNLFVTYIDYQKAFDSVPHSWLLQVLEIYKINSNLINFLKNVMSTWRTTLNLHINRNKINVGEIDIKRGIFQGDSLSPLWFCMALNPLSRELNSTRFGFNIKNNRRSLYKLTHLLYMDDLKLYSNNKSNMDRLLDTTVRFTTDVKMDFGLDKCRRLNIKKGEVIDGNYKINEENQIVAMGSYESYKYLGYNQSRLLEHKTIKENLKKEYINRLHLVCKQQLSSKNLFKAINTYAIPVLTYSFGVVKWAKNELKQLEIKTRTTLTQHRHHHPKSAIERVNIPRKEGGRGLIEITLLHNKQIYSMKTFFHSKKESSQLHKAVIEIDNKYTPLNLNDEHIETIDTQKLREQKHNRWKEKELHGRHKQDLEQSHVDQEASNKWLEQAGLFPETEGFIIAIQDQVITTKNYRKYILKDRKISNDLCRKCSNKPETIQHITGACVTLTQNDYTHRHNQVTNIIHQKLVIKYKLFKEPHTPYYKYSPSSVLENTTHKIYYDRTILTDRTIYNNRPDITLIDKRKKHAFLIDIAVPNTNNIQPTIAEKIRKYTELQEEVKKVWKMNTVTIVPIVISTTGVIPKQLIQSLKILDLPKFTYITLQKAAILNTCRIVRKFLQLNNDNEDNIL

SEQ ID NO: 15401 - protein, 1225 aa, Oechydrus chersis
MNNLNKTTKYNLRSLSRACRTPDSESVYCQTQHNLQEARTSTLMHSQQNRTAESSEVVPAEDASRAATAMKPATTKAGKPRVRMKWDKEINIFIMRTYYRTTKLETDFTTYRQQMHQAFVEKYQSAEITEQRIADQRRFIIRNKRLSDEELKEIRNEVAKETENEDMNIEQQSTQNTCTNQNRHINNEEVTNSSILLNLDVLPQTYDTTLHNKNTTALLVERLETNLGKYTGFDPTCRPLLPKPTRDVTYLIKKFNTEILPAKLNSLETITDIHTLIYCTALTIVEHLNIKIHDRIKNKRNKTKPAWQIRLEKDIEELRKDIGRLTQFISGNKSKRLCKKVNEILVKTKTHTSHELLNKKVNEHLDTLKQKLAVKSHRLARYKKAKSRKENNTLFMKNERQFYRNIKQSNRNIEKAPTAQSLKEFWSEIWTHQTEHNRDSAWINTEIERSQYIQEMKFEDIDEKELRGILSNTHNWKAAGIDGIHNYWLKKLFVLHEILAKQINDVIKGTQVLPEFLSKGRTFLLPKSNRTEDPSEYRPITCLPTIYKLITSIIANRIHKHLQQFNILTEEQKGCRRYHMGCKEQLIIDSAILTQTQKTKKDLFVTYIDYQKAFDSIPHSWLIQVLKIYKINNTLINFLKNTSTTWKTMLNLYTNSGQLDIGEIQIKRGIFQGDSLSPLWFCLALNPLSRALNNSNFGFNIKNNRRTLCQLTHLLYMDDLKLYSNTRINMDKLLDITVKFTNDIKMNFGYDKCRKLNIVKGKVTAGSYKISEENEIKAMEDNELYKYLGYNQSRQLTHKIIKENLKKEYSIRLQAICKKQLSSKNLFKAINTYAIPVLTYSFGIIKWTNTELRQLEIKTRTTLTQHRYHHPKSAIERVTLPRKEGGRGLIDITHLRNRQINSMKVFFQSKKEHSEIHKAIIEIDNKFTPLNLKCNENTDIIDKQKTKEEKHRRWKEKELHGRHKHDLDQAHIDNEASNKWLELASFFPETEGFTIAIQDQVITTKNYRKYILKDNKYPNDLCRKCYSKPETIQHITGACVTLTQNDYTHRHNQLSNIIHQKLVQKYKLSKDPHTPYYKYIPSPVLENKTHKIYYDRTILTDHTIYNNRPDITLIDKYNKHVLIIDIAVPNTNNLQSTISEKIRKYTELQEEIKRVWKMNTVEIVPIVLSTTGVIPKQLFQSLKTLDLPKFSYVTLQKAAILNTCRIVRKFLQLNDDGDTQCFQTC

SEQ ID NO: 15402 - protein, 1394 aa, Dalla costala
MMEAVRNRKIPQAGTSANNEGESRPESTGLGSSTYSGGSNVTRSSDLRPYRLRPRTTSGKVLHKNQTTSSSSSAQSLFPSLPSTNSFVRPNSPASLNSSILQEDVALEASLLANSMPTTSSSRTRNKWSSEMNEFILRTYLHLTLMETDITAYLPPLHTKFIERFPERQNVSRQRIGDQRRAIINKKLLEQEVIDRIYREVQTEIQHIHTTPQRINTQTHNLNTQITHSKNTQSTQRNPPHQRMSWSNKLNESLIKCYYRVTKIQTDLTSYRKTLHEAFINNHPDLAHLSEQRLADQRRLIIKHKYISEHRLKVLQKEVAVEMDNFTEDTIHQNSIDHIDNSQTPQTCPTHNESASITLNMNMVNTPINEDLDLQMSYQHDIHKNINSTRILAEKFAQNLSKYIGTDPTNRPPLPKIKPTRNVTHLINLFNTDILPPKLNLTENITHTHTLVYCTALTIIEHLNIKTHNIPLKNSNRRPAWQIRLEKNIEDLRKDIGRLTQYISGNNSKKLHKNVIEILNKTEKHSSYENNNKRPEEYLDTLKQKLAVKSHRLARYNTAKNRKENNKLFITNEKQFYRKIKQSNNNNNSINTPSETALKEYWSDIWTDNTEHNRDAKWIKAEIKQSDSIQCMSLEDIDAVELRNIINKTHNWKAPGVDRVHNYWFKKLCVLHEVLAKQINDILKGVSLPPEFLSKGRTFLLSKSSQTQDPSQYRPITCLPTLYKIITSVIANRIYQHLEQFNILAEEQKGCRRNHLGCKEQLTIDSTILKHVQKTKKNLFVAYIDYQKAFDSVPHSWLIQILEIYKINPELINFLKRTMSSWRTTLSLHSNNSKMNIGDIEIKRGIFQGDSLSPLWFCLALNPLSRLLNKNKFGFHIKNNRQTLYRLTHLLYMDDLKLYSSNETHIDRLLDITVKFTGDIKMDFGLNKCRKLNIKKGKVMEGSYVIDEERQIAAMDTQELYKYLGYNQARLIEHTTIKNNLRIEYTHRLHSLCKQKLSSKNLFKAINTFAIPVLTYSFGLIKWSKTDLSKLETKTRTILTKHRYHHPKSAIERVTIPRKEGGRGLIEITLLHNRQINSMKTFFNNKKENSQLHKAIVDIDNKYTPLNLSDENIEAVDMEKERQEKHNRWRVKELHGRHKHDLEQAHVDKEASNKWLELAALFPETEGFILAIQDQVITTKNYRKFIMKDSSINTDLCRKCFNKPETIQHITGGCIKLTQNDYTHRHNQVCNIIHQKLVIKYKLSKDPHAPYYKYTPSPVLENKSYKIYYDRTILTDHTIYNNRPDITFIDKRRKHAFIIDIAIPNTNNLQSTIVEKNRKYTELQEEIKRIWKMNSVTIVPIVISTTGVIPKQLFQSFKLLDLPKLSYVTMQKAAILNTCRIVRKFLQLDSDNNF

SEQ ID NO: 15403 - protein, 1148 aa, Anisynta dominula
MRTYYLVTKLETDFTTYRQQMHERFIQKYHNTHITEQRISDQRRFILRNKRLTDEELREIREEVAKEIEEDDLNNSQCSTSNTPCNYHPTHTFSTNLNMTGQNIETMPTGSDNRCNTSLNLDSQQPTHQDELNDNINMIQILCEKFQNNINKYTGTDPTSRPLLPKIKPASYVTYLIRKFNTEILPSKLNTITNITDTHTLIYCTAITIIEHLNIRTHNRIQVHKNNNKPAWQIRLETDIEQLRKDIGRLTQYKIGNKSKKILNNIQDILQKTMEHSSHEQFNRKINEHLDTLKQKLAVKSHRLARYKAAKNRRENNKLFTSNEKQFYRRIKETNNNINNLPSSNSLKEFWSEIWTNNSEHNKSAQWIKTEISRSEIIQDMNFEVIDETELRNVINKTHNWKAAGLDGIHNYWFKKLYVMHEILAKQISDIIKGNSLLPKFLSKGRTILLPKSKHTEDPSQYRPITCLPTLYKIITSIIANRIYSHLEQNNILAEEQKGCRRSHLGCKEQLIIDSTILKHVQKTKKDLYVTYIDYQKAFDSIPHSWLIQVLEIYKINCNIIDFLNQTMSTWRTTLKLYTNNCELNIGEINIKRGIFQGDSLSPLWFCLALNPLSRALNNSKFGFNISKNRQNLSQLTHLLYMDDLKLYSNTNAGMNKLLDLTVEFSNNIKMDFGLNKCRKLNIKKGKISEGNYQISEERQITAMETQDLYKYLGYNQARLLQHKAIKNSLKNEYTKRLNSLCKQQLSSKNLFKAINTYAIPVLTYSFGVIKWSKTELEKLEINTRKTLTHHRHHHPKSAIERVTLPRKEGGRGLIEITQLYNRQIYSMKIFFNNKKKESQLHKAITLIDNKFTPLNLCDENTEEVDMRKQKEEKHRKWREKELHGRHKYDLEQMHIDKDASNKWLELAGLFPETEGFMLAIQDQVINTKNYRKYILKDNSVTNDLCRKCLKRPETIQHITGACVTLTQNDYTHRHNQLSNIIHQKLVLKHKLSKDPHTPYYKYVPSPVLENTTHKIYYDRTILTDHTIYNNRPDITLIDKHNKHAFLIDIAVPNTNNLQSTIVEKMRKYTELQEEVRKVWKMNTVTIVPIVISTTGVIPKQLFNSFKILHLPKFTYVTLQKAAILNTCRIVRKFLQLKTDNDFQPSTS

SEQ ID NO: 15404 - protein, 1361 aa, Dalla cyprius
MMEAVRNRKVPQAGTSVNNEGESRPESTGLGSSTYSGGSNVTRSSVLRPYRLRPRTTSGKVLHKNQTTSSSSSAQSLFSSLPSTNSFARSNSPTSLHSSILQEDVALEANLLANSMPTTYSSSTRNKWSPEMNEFILRTYLYLTLMETDTKSYLPPLHTKFIERFPERQNVSRQRIGDQRRAIINRKLLAQEVIDRIYLEVQTKIQNIHTTPQGNNTQTHNLSTQITNFKNTQSTQTNRHQRMSWSQKLNESLIKCYYRVTKNQTDLTSYRKTLHEAFINNHPDLAYLSEQRIADQRRLIIQHKYISEDRLKTLQKEVAVEINNFTEDNIHLNSIDNIDHHQQSSLSLCIPQTSKDNEAHIPTHRNILRTENIRQNTSQTGSRTHLTTHNMNTSINEYEIQMSNEHDIHKNYFTQILSEKFANNLSKYTGTDPTNRPPLPKIKPTRHVTNLIEQFNTIILPSELNLTENILDTHTLIYCTALTILEHLNIKIHNIPPRNSNRKPAWQIRLEKNIADLRKDIGRLTQYISGNNSIKLYKKVNTILNKTEKHSSYENKNKKIEEYLDTLKQKLAVKTHRLARYITAKNRKENNKLFSTNEKQFYRKMKQGNNNNNSINTPSGSALKEFWSGIWADNTEHNRDAEWIKTEIKQSDSIQGMALEDIDAIELRNIINKTHNWKAPGVDGLHNYWYKKLLVVHEVLAKQINDIVKGISVPPEFLNKGRTFLLPKGSQTQDPSQYRPITCLPTLYKIITSVIANRIYLHLEQFNILSEEQKGCRRNHLGCKEQLTIDSIILKHVQKTKTNLFVAYIDYQKAFDSVPHSWLIQILEIYKINPTLINFLKRTMSSWRTTLSLHSNNSKINIGDIEIKRGIFQGDSLSPLWFCLALNPLSKLLNNNKFGFHIKNNRQTLYRLTHLLYMDDLKLYSSNKTYIDRLLDITVQFTKDIKMEFGLNKCRKLNIKKGKVVEGSYEIGEEQQIAAMETQELYKYLGYNQARLIEHTTIKEELRNEYTNRLHSLCKQKLSSKHLFKAMNTFAIPVLTYSFGLIKWTKTELNKLDTKTRTILTKHRYHHPKSAIERVSLPRKEGGRGLIDISSLHNKQINSMKTFFRNKKESSQLHKAIVDIDNKYTPLNLSNENIEAVDMVKERQEKHNRWRVKELHGRHKHDLEQAHVDKEASNKWLELAALFPETEGFILAIQDQVIATKNYRKFIMKDSSVNNDLCRKCFNKPETIQHITGACIKLTQNDYSHRHNQVCNIIHQKLVIKYKLSKDPHTPYYKYTPSPVIENKSYKIYYDRTILTDHTIYNNRPDITFIDKCRKHAFIIDIAIPNTNNLQSTIAEKIRKYTELQEEIKRIWKMNSV

SEQ ID NO: 15405 - protein, 1408 aa, Piruna pirus
MMEAVRNRKLPQAGTSVNNEGESRPESTGLGSSTYSGGSNVTRSSTQVPYRLRPRTTTGKVSQKNQTTSSSSSEQSLFSSLPSTNSFNRPNSSPSLNSSILQEDVALEANLLANSVPTTSSSRTRNKWSSEMNEFILRTYLHLTLMETDIKAYLPPLHIKFIERFPERQTVSRQRIGDQRRAIINKKLLPQEVIHRIYTEVQAEIQNIHTCTQNTTTQTHKTQTSIISITDTQNTQSTHKNLNQRMSWSNELNESLIKCYYEATKLQTDLTSYRKSLHELFITKHPHLAHLSEQRLADQRRVIIKHKYISDGRLKTLQEEVATEISNILEDTHQNATNPSDHTRHSSPHHYNLLTLQDNDHVAQINTSMNSQPPVANVKNCQHSAHITQMSPQQDDTLENTNITKLLKDKLESYICKYNSTDPTTRPILPKIKPTRYLTHIIKRFNTDILPSKMSVTKNITDTHTLVYCTALTIIEYLNIKIQNKTHTNNISKPAWQIRLEINIEDLRKDIGRLTQYISGNNSKKLFIKVQDILNKTKKHSSHENTNEKLEEHLDTLKQKLAVKSHRLARYKNAKQRRDNNKLFSANEKQFYRKMKQSNNNNYINVPSESSIKEFWSGIWTDSTEHNKDAKWIKAEIKRSQSIDQMSFEDVDVTELRYIINKTHNWKAAGVDRIQNFWFKKLVAVHEILAQQINDVLKGVCLFPEFLSRGRTFLLPKGDSTQDPSQYRPITCLPTLYKIITSVIANRINHHLEQFNILSEEQKGCRRNHFGCKEQLAIDSTVLKHVQKTKKDLFVAYIDYQKAFDSVPHSWLIQVLEIYKINPILIRFLQSTMSTWRSTLNLYANNNVMNIGEIKIRRGIFQGDSLSPLWFCLALNPLSQLLNRSKFGFSIKNNRQELYKIAHLLYMDDLKLYASTNTNINKLLDITVKFTKDIKMDFGLSKCRKLNIKKGKVAEGSYEIDTERQITAMNTEEFYKYLGYNQARLLEHTAIKDKLIKEYTSRLHCICKQHLSGKHLFKAINTYAIPLLTYSFGIIKWSKTELNKIEIKTRTLLTHHRYHHPKSAIERVTIPRKEGGRGLIDITLLHNRQIYSMKSFFIGKKENSQLHKAIIEIDKKYTPLDLSNEMVEVVNVDKHRSEKHKRWKDKELHGRHKHDLEQAHVEKDASNKWLELASLFPETEGFILAIQDQVINTKNYRKYILKDSSISSDLCRKCFAKPETIQHITGACIKLTQNDYTHRHNQVTNIIHQKLAIKYKLSQDFHTPYYKYTPSTVLENNTHKIYYDRTILTDHTIYNNRPDITFIDKRSKHAFIIDIAVPNTHNLQSTIVEKIRKYTELQEEMKKLWKMNSVTIVPIVISSTGVIPTQLLQSLKLLNLPKLSYVTMQKAAILNTCRIVRKFLQLTTESNY

SEQ ID NO: 15406 - protein, 1409 aa, Agara michaeli
MEAVRKRNIPQAGTSANNEGESRPEPTGSGSSSYSGGSNVTRSLKHIPYRLRPRTTSGRVLHTTQTTSSASSAPSLFSSLPFKKSFNPSESSGSVDSSILQEDVALEVKLLTNPRPTTSGSCTRNKWSSEMNEFILRTYLHLTLMETDIKAYLPSLHTKFIERFPERQNVSRQRIGDQRRAIINKKLLSQEVINRIYTEVQTEIQSVHSTPILNHTQRSRTQISQRKNLQATQLKSQQRMSWSKELNESLMQCYYRVTKLETELTSYRKTLHETFITKHPELAHLSEQRIADQRRIIINHKYIHEHRLKIIQEEVAMEFTNSTESIIHQKSIDQIDHSLHISLEHLLSNTQKEILYTDNITQNTPQNRYDTISTIRKKPASARLNKAPINNDADLELSKVHEDKLTQILSNKFEYNLRKYTGTDPTTRPPLAKLKPARYVTHLIRKFNTEILPPKLNTIQNITDTHTLIYCTAVTITEYLNLNIKSTIHKNNDKRPAWQIRLEKSIQDLRKDIGRLTQYKSGNNSEKVFKKVQLILNKTEKHSSHEGINKTLEEHLDTLKQKLAVKSHRLSRYIIAKNRKENNKLFSTNEKQFYRKIKQNENNKNIIKIASPTSLKEFWSDIWAHNTVHNKEAEWIKTEIKQAEMVQCMSFEEIDELELRNVISRTQNWKAPGVDRVHNYWYKKLAVTHEVLAQQINNIMKGVNSLPEFLTIGRTFLLPKNNQTEDPSQYRPITCLPTLYKIITSVIANRIYQHLEQCKILFEEQKGCRRNHLGCKEQLVIDSTILKHVHKTKKDLFVAYIDYQKAYDSIPHSWLIQILEIYKINPLIIDFLKSTMTMWKTTLILQTNDNIMNIGNIEINRGIFQGDSLSPLWFCLALNPLSRLLNNAKLGFNIKSNGQTLHQITHLLYMDDLKLYSRNSTNIDRLLDITVNFTGDINMNLGLNKCRKLNVKGGKIVEGNYEIDEVNQIVAMENFELYKYLGYNQAKLIEHTVIKEKLRKEYNNRLLSLCKQKLSSKHLFKAINAYAIPILTYSFGIIKWSKTDLKRLEIKTRTILTQHRHHHPKGAVERVTLPRKDGGRGLIDIKLLHDKQINSIKTFFKSKSNNSQLHKAIIQIDDKYTPLNLFDNNIEMIDMEKEREEKHRRWRRKELHGRHKQDLEQAHVDIVASNKWLELAALFPETEGFMLAIQDQVITTKNYRKFILKDTSLTNDLCRKCFSKPETIQHITGACIKLTQNDYTHRHNQVANIIHQKLILKYKLSKDPQTPYYKYTPSAVLENQTHKIYYDRTILTDRTIYNNRPDITFIDKHNKHAFIIDVAVPNTNNVQSTIVEKIRKYTELQEEIKRVWKMNNVTIVPLVISATGVIPKQIFQSLKLLNLPKLTYITMQKAVLLNTCRIVRKFLQLNTNN

SEQ ID NO: 15407 - protein, 1408 aa, Myscelus epimachia
MEAVRNRNIPQAGTSANNEGESRPEPTGSGSSSYSGGSNVTRSLKHIPYRLRPRTTSGRVLHTTQTISSASSAQSLFSSLPFKKSFNPSESSGSVDSSILQEDVAREVKLLTNPRPTTSGSCTRNKWSSEMNEFILRTYLHLTLMETDIKAYLPSLHTKFIERFPERQNVSRQRIGDQRRAIINKKLLTQEVINRIYTEVQTEIQSVHSTPILNHTQRLSTPISQRKNLQATQLKSQQRMSWSKELNESLMQCYYRVTKLETELTSYRKTLHETFITKHPDLAHLSEQRIADQRRIIINHKYIHEHRLKIIQEEVAMEFTNSTESIIHQKSIDQIDHAQHISLEHLLSNTQKEILYTDNLTQNTPQNRCDTISTIRRKSASARLNKAPINNDVDLELSKVHEDKLTQILSNKFEYNLGKYTGTDPTTRPPLAKLKPARYVTHLIRKFNTEILPPKLNIIQNITDTHTLIYCTALTITEHLNLNIKSTIHKNNDKRPAWQIRLEKSIQDLRKDIGRLTQYKSGNNSEKVLKKVQLILNKTEKHSSHEGINKTLEEHLDTLKQKLAVKSHRLSRYITAKNRKENNKLFSTNEKQFYRKIKQNENNKNMIKIASPTSLKEFWSDIWAHNTEHNKEADWIKTEIKQAEVVQCMSFEEIDELELRNVISRTHNWKAPGVDRVHNYWYKKLAVTHEILAQQISNIMKGVNSLPEFLTIGRTFLLPKNNQTEDPSQYRPITCLPTLYKIITSVIANRIYQHLEQCKILFEEQKGCRRNHLGCKEQLVIDSTILKHVHKTKKDLFVAYIDYQKAYDSIPHSWLIQILEIYKINPLIIDFLKSTMTRWKTTLILQTNDNIMNIGNIEINRGIFQGDSLSPLWFCLALNPLSRLLNNAKLGFNIKSNGQTLHQITHLLYMDDLKLYSRSSTNIDRLLDITVKFTGDINMNLGLNKCRKLNVKRGKIVEGNYEIDEVNQIVAMENLELYKYLGYYQAKLIEHKVIKEKLSKEYNNRLISLCKQKLSSKNLFKAINAYAIPILTYSFGIIKWSKTDLKRLEIKTRTILTQHRHHHPKGAVERVTLPRKEGGRGLIDIKLLHDKQINSIKTFFKSKSNNSQLHKAIIQIDDKYTPLNLTDNNIEMVDIEKERDEKHKRWRRKELHGRHKQDLEQAHVDIAASNKWLELAALFPETEGFMLAIQDQVITTKNYRKFILKDTSLTNDLCRKCFSKPETIQHITGACIKLTQNDYTHRHNQVANIIHQKLILKYKLSKDPQTPYYKYTPSAVLENQTHKIYYDRTILTDRTIYNNRPDITFIDKQNKHAFIIDVAVPNTNNVQSTIVEKIRKYTELQEEIKRVWKMNNVTIVPLVISATGVIPKQIFQSLKLLDLPKLTYITMQKAVILNTCRIVRKFLQLHTN

SEQ ID NO: 15408 - protein, 1136 aa, Myscelus amystis
MNEFILRTYLHLTLMETDIKAYLPSLHTKFIERFPERQNVSRQRIGDQRRAIVNKKLLPQEVITRIYEEVQTEIHSAHSTPILTQFQTSSTPTTQRKNTQATRPNPHQKMSWSKELNESVMKCYYTVTKLETELTSYRKTLHETFITKHPELAHLSEQRIADQRRIIVKHKYIHEHRLKIIQEEVAKEITNCTENNIHQKSIHQIDHIQHSSLQHLLPNTHTNNLMQNTSQNPCDTTFTIHNKLTSLILNQTPINNSVDLQLSSVQEDELIKIIDDKFEFNLRKYTGTDPTSRPPLTKVKPARYVSHLINKFNTDILPPKLSKIQNITDTHTLIYCTALTISEYLNINMKSRIYKNNDKRPAWQVRLEKSIQDLRKDIGRLTQYMSGNNSKRVYKKVLLILNKTEKHSSHEGTNKKLEEHLDTLKQKLAVKSHRLSRYITAKNRKESNKLFSTNEKQFYRKIKQNNNNNIINTAPSTSLKEFWSDIWGQNTEHNKGAEWITSEIKQSHEIQCMSFEEIDEQELRNVINRTHNWKAPGVDRLQNYWFKKLSVTHKVLAQQVNDIIKGVNSLPEFLTIGRTFLLPKNNQIQDPSQYRPITCLPTLYKIITSVIANRIYNHVEQFSILFEEQKGCRRNHLGCKEQLVIDSTILKHVQKTKKDLFVAYIDYQKAYDSIPHSWLIQVLEIYKINPLIIDFLKSTMLKWKTTLMLHTNNNKINIGDIKINRGIFQGDSLSPLWFCLALNPLSRLLNNSKLGLNIINNRQTLHQITHLLYMDDLKLYSRSGINIDKLLEITVRFTKDINMNLGLNKCRKLNIKRGKIVEGNYEIDEENQIVAMEAVELYKYLGYNQTKLIEHTVIKEKLSKEYSNRLYSLCKQKLSSKHLFKAINTYAIPVLTYSFGIIKWSKTDLKRLEIKTRTILTQHRYHHPKGAIERITLPRKEGGRGLIDIKLLHDRQINSIKTFFQNKRHNSQLHKAIIEIDDKYTPLNLTNSIIEIVDIEKEKSEKHRRWRGKELHGRHKQDLEQTHVDIAASNKWLELAALFPETEGFMLAIQDQIIATKNYRKFILKDSSLINDLCRKCLSKPETIQHITGACIKLTQNDYTHRHNQVANIIHQKLVLKHKLSKDPLTPYYKYT

SEQ ID NO: 15409 - protein, 1399 aa, Dalla eburones
MMEAVRKRKIPQAGTSANNDGESRPEPTGLGSSTYSGGSNVTRTSELNPYRLRPRNTSGKVLHKSQLSSSSSAQSLFSSLPSTNSFLRPKSLTSDHSSILQEDVALEANLLANSMPTTSSARTRNKWSSEMNEFIIRTYLHLTLLETDLKAYLLPLHSKFVERFPERQNVSRQRIGDQRRAIINKKLLAQEEIDRIYREVQNEIQSIHSNPQNIITQTQTHNTQTSITQIRHMQNTQSVNLNTHQRMSWSTILNESLIKCYYRVTKLETDLTSYRQTLHEAFINIHPYLAHLSEQRIADQRRVIITHKFISSDRLKTLQEEVATEINNTLEDTTHQDSINSSPHTYSTRTSQDNDQIAQIHNTANTQRQVAQTNNYQNILSKQNDETLENVNTIQFLNDKLENNLIKHTGTDPTTRPFLPKIKPTRHLSFLIQKFNTKILPPKLSLIKNITDTHTLIYCTALTIIEHLNIKTPNTSHKNSNRKPAWQIRLEKKIEELRKDIGRLTQYISGNRSRKILKNVQDILNKTEKHSSRENPNNKLEEHLDTLKQKLAVKSHRLARYKKAKNRKENNKLFNTNEKQFYRKIKQSNNNSKVINIPSERSLKEFWSDIWTQKTEHNIDAEWIQTEIKQTESMQCMDFEDVDVIELRNTINRTHNWKAAGVDRIHNYWFKKLMVVHEILAQQINDIIKGISLPPKFLNKGRTFLLPKSHQTQDPSQYRPITCLPTLYKIITSIIANRIYHHLEQFKILAEEQKGCRRNHLGCKEQITIDSTILKHVQKTKKDLFVAYIDYQKAFDSVPHSWLIQVLQIYKINPILINYLQNTMSTWRTTLELHTNKNELQIGEIEIKRGIFQGDSLSPLWFCLALNPLSRLLNSSKYGFDIKNNRQTLCQITHLLYMDDLKLFSSTNTNIKKLLDITHNFTQDIKMDFGLNKCRKLNIKKGKIVEGSYKLDEERQITAMETQELYRYLGYNQARLLEHKVIKEKLKQDYNKRLHLICKQQLSSKHLFKAINTYAIPVLTYSFGLIKWSKTELNKLEIKTRTILTQHRYHHPKSAIERVTIPRKEGGRGLIDITLLHNRQVNSMKTFFKGKKENSQLHQAIMHIDNNYTPLNLTDENITIVDMEKQKQEKHRRWKEKELHGRHKNDLEQAHVDKEASNKWLDLAALFPETEGFMLAIQDQVINTKNYRKYILKDSSLNNDLCRKCLTKPETIQHITGACIKLTQNDYTHRHNQLTNIIHQKLVAKYKLSEAPHTPYYKYTPSPILENKTHKIYYDRTILTDHTIYNNRPDITLIDKRKKHAFIIDIAVPNTHNLQSTIVEKIRKYTELQEEIKRLWKMNSVTVVPIVISSTGVIPKQLFQSLKLLELPKLSYVTMQKAAILNTCRIVRKFLQLHTDNHF

SEQ ID NO: 15410 - protein, 1417 aa, Oxynetra semihyalina
MMEAMRNRKLPQVGTIANNDGESRPESTDLGSSTYSGGSNVTRSSQQRPYRLRPRTTSGKVLHKSLTSSSSAQSLFSSLPSTNSFIRPNSSASLDSSLLQEDVALEENLLSKSGPTTSSSCKRNKWSSEMNEFILRTYLHLTLLESDMKAYLPALHIKFIERFPERQNVSKQRIGDQRRAIINKKLLAQEVIDRIYREVTIEIQNTHNTPNITETKNFRAQIRHTRCTEPSRSNSNQRMSWSSDLNESLIKCYYRVTKLQTDLTAYRKALHEAFITQHPNLQHLSEQRIADQRRVIINNRYISEDRLKVLQEEVATEISFCTEDTTLTKSIDPIDYTKHNTSQHETLQTLQNHETQTYKSPSTQRNMLSTGNMKHLEERSKSISTNLNINMVGAAINEDLDLQVSSQQEIDKYKITKILSKSFEDNINKHTGTDPTTRPILHKLKQTRHLTYLIKIFNTDILPHKLRGIKNITETHTLIYSTALTITEYLNIKTKNSIPKNYSRKPAWQIRLEKNIENLRKDIGRLTQYTLGNNSTKLYKKVQAILNKTEKHSSYENSNKKINEYLDTLKQKLAVKSHRLARYTAAKNRRENNKLFSSNERQFYRKMKQNEDYNDKISMPSKSALKQFWSDIWTNNAEHNKDAEWIKKEIKQSESIQKMEFKEIDAVELGKIINKTHNWKAAGIDRLHNYWFKKLDVLHEVLAQQINNILKGVSLLPKYLSIGRTFLLPKGKQSEDPSQYRPITCLPTLYKIITSVIANKIYQHLEQFKILSEEQKGCRRNHFGCKEQLIIDSIILKHVQKTKKDLFMAYIDYQKAYDSIPHSWLIQILEIYKINPIYVDFLKRTMSTWRTTLSLHTHNNSMNIGDIDIKRGIFQGDSLSPLWFCLALNPLSRLLNNSHHGFNIKINKHILHKHSHLLYMDDLKLYASKDKNIDRLLDITVKFTGDIKMDFGLNKCRKLNIKKGKVVEGGYEIDTERKIAAMETQDLYKYLGYYQARLINHTKIKECLRKEYNNRLYSLCKQKLSSKNLFKAINTYAIPVLTYSFGFIKWSKTELKQLEIKTRTRLTQHRYHHPKAAVERITLSRKEGGRGLVDIKLLHDRQINRMKTFFESKKDDSQLHKAIVNIDNKYTPLNLTNGSIEAIDMIKEKQEKHIRWKSKELHGRHKQDLEQEHIDKDASNRWLQTAALFPETEGFMVAIQDQVIITKNYRKFILKDSSLSNDLCRKCLHKPETIQHITGACITLTQNDYTHRHNQVCNIVHQELVRKYKLSTDPRTPYYKYTPSAILESKTHKIYYDRTILTDHTIYNNRPDITLIDKRNKHAFIIDIAIPNTHNLQSTIVEKIRKYTELQEEIKRMWKLKNVTIVPIVISTTGVIPKQIFHSLKTLNLPKFTYVTMQKAVILNTCRIVRKFLQLNL

SEQ ID NO: 15411 - protein, 933 aa, Telicota sp.
MKKLKTLKNIAESHTLIYCTAITIIEHLNIKTYDRIQTNKNTINIKPAWKIRLEKEVDRNPLRKDIGRLTQYKLGNISKKLLKKVENILNKTKQHSTHENFNKEIDEYLDTLKQKLAVKSHRLARYNKSNIRRENNRLFVTAEKQFYRKLKQNNSNTTIIPDKNMLKEFWSQIWTKSSDHNRSAEWINTEINRSNIINEMTFGDISEMEIENVINKTHNWKAAGIDGVHNFWIKKLFVLHGTLAKQINNLLLGTSSLPEFLTTGKTFLLPKHSETQDPSKYRPITCLPTLYKIITSIIANRIYGHIEQNNIFTEEQKGCRRFHLGCKEQLIIDSTVLKYTQKAKRDLYVTYIDYQKAFDSVPHSWLIQILEIYKVNQLIIDFLKQTMSTWRTTLYLNSNRQQLNIGEIDIKRGIFQGDSLSPLWFCLALNPLSRELNNTKFGVHLKHNRQTLYQLTHLLYMDDLKLYSSTNTNMNKLLDLTTKFTGDIQMQFGLDKCRKLNIKKGKIIEGGYKIDEDYQINAMETQEFYKYLGYDQSRLLEHSKIKEQLKKEYNNRLISLCKQQLSSKNLFKSINTYAIPVLTYSFGVVKWTKSDLTQFEIKTRTILSRFRNHHPKSAIERITLPRKEGGRGLIEITQLHNRQVNLMKTFFNNKKENSQLHKAIIKIDNKFTPLNLNSENIENLDSKKQKEEKHKKWKEKELHGRYKNSIKETHIDEEASNKWLEVAGLFPETEGFMIAIQDQVIATKNYRKYILKDNTLTNDLCRKCLNKPETIQHITGACIKLTQNDYTHRHNQLTNIIHQKLAIKYKLSQDTHIPYYKYTPLSVLENSTHKIYYDRTILTDHTIYNNRPDITLVDKHNKHVFIIDIAVPNTNNLQSTIVEKIRKYTELQEEIRKVWKMNTVTIVPIVISTTGVIPKQLSHSIQILDLPKF

SEQ ID NO: 15412 - protein, 1274 aa, Apostictopterus fuliginosus
MRLRSSNKLPQAGTSNGESRPELLRSGSPTYSGEGTVSLQFAQPKAVASCRNITSSSSSQLSPISSIRSLIDSPSLSSNITSSYRSSTTAPVSVTVEQVAKANDLAPTIDNTLKPATTQAGKTRVRMRWDKDVNTFIMRTYYYVTRLETDFTTYRKQMHDIFIQKYQNTNVTEQRISDQRRVIVRNKRLTDGELRQIKEEVAKNFEMEDFNISQDLHSNSSQHNTTTHPISNSKRDRNNESMQTVIESSRYNTPLNNNSESLNYNNNIIQTLQEIFERNLSIYCIDTDPTSRPHLPKVKQASYVTYIINIFNTHILPNKLDKISYITDTHNLIYCTALTIIEHLNIKTTKTQQHINKLPWQIRLENDIKDLRKDIGRLTQFKQGNNSKKLFNKVKIILYKTKQHNCHEQLNKKLNEHLDTLKQKLAVKSHRLSRYNKAKLRNDNNKIFTTNEKQFYRKIKQNNSDDVKSPTVTSLKQFWSGVWTRNTEHNNEAEWIKKEINRSEILQDMKFENIEETELRNVINRTHNWKAAGVDGIHNFWYKKLFVFHGILAVQINDILNGINPLPRFFTKGRTFLLPKSQHTQDPSQYRPITCLPTLYKFITSIIANRIYKHLEQYNILSEEQKGCKRRHMGCKEQLLIDSTILKHVQKTKKDLYVTYIDYQKAFDTVPHSWLIKILEIYKINRKLINFLKQIMLTWKTTLTLHTQKYKLNIGEIDIKRGIFQGDSLSPLWFCLALNPLSRELNNSKFGFNIQNNRRALCQLTHLLYMDDLKLYSSTNINMNKLLDLTVRFTNDIKMDFGLEKCRKLNIKKGKIIEGSYNINDDRQITAMETHELYKYLGYNQSRLLDHKVIKDSLKKEYVTRLHSICKQKLSSRNLFKAINTYAIPILTYSFSIIKWTNTELTHLEIKTRTILTHHRYHHPKSAIERVNIPRREGGRGLINITQLHNRQIYSMKLFFNNKKKESLIHNAITVIDNRFTPLNLSDENVEVVDRKKQNEEKHRKWKEKELHGRHKNDLEQPHIDKEASNKWLEMAGLFPETEGFLLAIQDQVIATKNYRKYILKETSLHNDMCRKCLNKPETIQHITGGCITLTQNDYTHRHNQLTNIIHQKLVLKYKLSKDLHIPYYKYTPLPVLENSSHKIYYDRTILTDHTVYNNRPDITLIDKYKKHAFIIDIAVPNTNNIQSTIVEKIRKYTELQAEIKNVWKMNTVTIVPIVISTTGVIPKQLFHSLKMLDLPKFTYVTLQKAAILNTCRLVRKFLQLNTDNEIQSN

SEQ ID NO: 15413 - protein, 1288 aa, Taractrocera maevius
MRLRSNKIVPQAGTSNGESRLEPIGLGSPTYSGEGTASLQLAQFQIVASHESIISSSQSSSFSSTHSLFPSPISSPHSFEKPSSSRSTTASPVSVDVEQVAKANELVPTTDTTLKPATTKAGKPRVRMKWDKDINTFIMRTYYRVTKLETDFTTYRQQLHETFIQKYKNIEVSEQRISDQRRVIVRNKRLTDEELKIIREEVAKELAIENTHSSQLSTQNTLENTDTTRIIYNKHYRNSLKPQSTPTVLESNKEYDTPLTDESYICQETQHNVINENRQIINSLNTKLKENLNKYIGIDPISRPLLPKIKPGKHVTHLIKIFNSVILPSKLNTLENISDTHTLIYCTALTIIDHLNIKTYSRTQINKHNKTPEWKIRLEKDIQQLRKDIGRLTQYKLGNNSKRLYLKIKEIFDKTKQHNKHDHINTEIDEFLDTLKQKLAVKSHRLARYNKSNLRKENNRLFAVAEKQFYRKLKQNNNGPGNSKIMPDRNSINEFWSEIWTKSTEHNTSAEWINAEISRCNTINEMSFEDVSEIEINNVINKTHNWKAAGPDGIHNFWIKKLFVVHKTLAKQISDILKGVSLLPEFLTKGKTFLLPKNSNPQDPSQYRPITCLPTLYKIITSIVSNRIYNHVDQNNILTEEQKGCRRFHLGCKEQLIIDSSVLKYIQKSKSDLYVTYIDYQKAFDSVPHTWLIQILEIYRVNHNIISFLKQTMSTWRTTLYVNTNKQQFNTGEIDIRRGIFQGDSLSPLWFCLALNPLSRELNSTKFGIDIKHNRQTIYKLNHLLYMDDLKLYASTNNDMNKLLNLTCTFTDDIKMKFGLDKCRKLNIKKGKIVEGLYKIDEENQINALETQDLYKYLGYSQSRLLEHALIKEQLKKEYTNRLNALCKKQLSSKNLFKAINTYAIPVLIYSFGVIKWNKRELKLLETKTRTTLTRFRHHHPKSATERINLPRKEGGRGLIEITQLHDRQINLMKKFFNLKKQNSLIHKAIIEIDNKLTPLNLNNENIENIDSKKQKEEKHKRWKEKELHGRHKKAIKEVHIDEEASNKWLELAGLFPETEGFMIAIQDQVIATKNYRKYILKDKTLTNDLCRKCLIKPETIQHITGACIKLTQNDYTHRHNQLTNIIHQKLAIKYKLSENYVPYYKYTPPPVLENATHKIYYDRTILTDHTIYNNRPDITLVDKHNKHAYIIDIAVPNTNNLQSTIIEKERKYTELQEEIRKVWKMNRVTIIPIVISTTGVVPKQFFYSIQKLDLPKFTYITLQKAAILNTCRIVRKFLQLESENTGQ

SEQ ID NO: 15414 - protein, 1280 aa, Toxidia parvulus
MRLRSSNRLPQAGTSNGESRSEQASSGSPTYSGEGTVSLQPAQFITVASHGNITSQSSPISSTHSLFQSPSSSPCSFENSSLSRSTTATPMSVTVEQEAKAVDLAPTAGTTMKPATTKAGKPRVRMKWDKEINIFIMRTYYLVTRLETDFTTYRQQMHERFIQKYHSTHITEQRISDQRRFIIRNKRLTDEELREIREEVAKDIEQDDLRNSQCSTSDTSYSYNPTHTLSINCNIESIPTSSDHRCNNSLNIDLESQPQTCQNELNENIDITHILSEKLQNNIIKYTGTDPTSRPLLPKIKPSSYITYLIRKFNTEILPSKLNILGNITDTHTLIYCTAITIIEHLNIQTHNRTRVYKEHNKPAWQIRLEKDIEQLRKDIGRLTQYKLGNTSKKLFKNVNEILKKTIQHSSYDQFNRKISEHLDTLKQKLAVKSHRLARYNAAKKRRENNTLFSTNEKQFYRKMKQNSDSIINPPSTNSLKEFWSEIWTSNSEHNKGAEWIETEISRSQIIQDMSFEDISDVELRNVINKTHNWKATGLDGIHNYWFKKLFVVHETLAKQISDIIKGISLLPKFLSKGRTFLLPKSNHTEDPSQYRPITCLPTLYKIITSIIANRIYKHLEQNNILTEEQKGCRRSHLGCKEQLIIDSTILKHVHKNKKDLYISYIDYQKAFDSVPHSWLIQVLEIYKINDNIIDFLKQTMSTWRTTLNLHINNCKLNIGEINIKRGIFQGDSLSPLWFCLALNPLSRELNNSKLGFNISKNRRNLSQLTHLLYMDDLKLYASTDANMNRLLNLTVEFTNDIKMDFGLDKCRKLNIKKGKVSEGNYKINEDRQITAMDPRDVYKYLGYNQARLLEHKSIKENLKNEYIKRLNSICKQQLSSRNLFKAINTYAIPILTYSFGVIKWTKTELEKLEISTRTTLTHHRYHHPKSAIERVTLPRKEGGRGLIEITQLYNRQINSMKIFFNNKKKESQLHEAITVIDNKFTPLNLSDENIEEIDIRKQKEEKHRKWREKELHGRHKHDLEQEHIDKEASNKWLELAGLFPETEGFLLAIQDQVIATKNYRKYILKDNSVTNDLCRKCLKKPETIQHITGACITLTQNDYTHRHTQLSNIIHQKLVLKYKLSKDPHTPYYQYVPSPVLENSTHKIYFDRTILTDHTIYNNRPDITLVDKRKKHAFLIDIAVPNTNNLQTTIVEKTRKYTELQEEIRKVWKMNTVTIVPIVLSTTGVIPKQLFNSLKILNLPKFTYVTLQKAAILNTCRLVRKFLQLKTDNDFQPTS

SEQ ID NO: 15415 - protein, 1191 aa, Signeta flammeata
MSVTVEQEAKAMDLAPTADNTMKPATTKAGKPRVRMKWDKEINIFIMRTYYFVTKLETDFTTYRQQMHERFIQKYQNTHITEQRISDQRRFIIKNKRLTDEELKEIREEVAKDIEQDDLRNNQCSTSNTSHSYHPTHTFTTNCNNESIPIRSDYTCNTSLNLDLDSQQQIHQDALNENRDIIQILREKFENNIIKYTGTDPTSRPLLPKIKPASYVTYLIRKFNTEILPAKLNIIENISETHTIIYCTAITIIEYLNIQTHNRTRVHKKYNKPAWQIRLEKDIEQLRKDIGRLTQYKLGNKSKKLFKNVHEILKKTIQHSSYEQCNRKISEHLDTLKQKLAVKSHRLARYNAAKNRRENNKLFTTNEKQFYRKIKQNNNSIINPPSRNSLKDFWSEIWTSNSEHNVGAEWIKTEINRSEIIEDMNFEDINEIELRNVINKTHNWKATGLDGIHNYWFKKLFVVHEILAKQISDIIKGISLLPKFLSKGRTFLLPKSNHTEDPSQYRPITCLPTLYKIITSIIANRIYKHLEQNNILTEEQKGCRRSHLGCKEQLIIDSTILKHVQKTRKDLYVTYIDYQKAFDSVPHSWLIQVLEIYKINCNIIDFLKQTMSTWRTTLNLYTNNSELNIGEINIKRGIFQGDSLSPLWFCLALNPLSRELNNSKLGFNISKNRRNLSQLTHLLYMDDLKLYASTNANMNRLLNLTVEFTNDIRMDFGLNKCRKLNIKKGKILEGNYKINEDRQITAMETQDLYKYLGYNQARLLEHTAIKESLKNEYTRRLNSICKQQLSSRNLFKAINTYAIPVLTYSFGVIKWTKTDLEKLEISTRTTLTHHRYHHPKSAIERVTLPRKEGGRGLIQITQLYNRQINSMKIFFNNKKEESQLHKAITVIDNKFTPLNLCDENIEEVDMRKQKEEKHRKWREKELHGRHKHDLEQVHIDKEASNKWLELAGLFPETEGFMLAIQDQVITTKNYRKYILKDSSVTNDLCRKCLKKPETIQHVTGACITLTQNDYTHRHNQLSNIIHQKLVLKLKLSKDPHTPYYQYVPSPVLENSSHKIYYDRTILTDHTIYNNRPDITLIDKRNKHAFLIDIAVPNTNNLQTTIVEKIRKYTELQEEIKKVWKMNTVTIVPIVISTTGVIPKQLFNSLKILHLPKFTYVTLQKAAILNTCRLVRKFLQLNADNDFQPSPS

SEQ ID NO: 15416 - protein, 939 aa, Notocrypta feisthamelii
MKTFSRNQTPKKHNKPAWQIRLENEIEEIRKDIGRLTQYKLGNNSKKLMKNVTKIITKTKQHSTHEQLNDKINEHLDTLKQKLAVKSHRLSRYNKSNTRKENNKLFTTAEKQFYRKLKQNNSNTEKPPTASALKEFWSEIWTKKTEHNKNADWINRELDRSKTIEEMNLEDVSDTELRNVVNKTHNWKAAGADGIHNFWFKKLLVLHGTLAKQISDILKGNCLLPKFLTKGRTFLLPKSNAKQDPTQYRPITCLPNLYKIITSIIANRIYRHVEKYNVLTEEQKGCRRSHLGCKEQLIIDSTILKYVQKSRKDLYVTYIDYQKAFDSVPHSWLIQVLEIYKINHKLVNFLKHVMSTWSTSLYLNSNKYQLSIGEIDINRGIFQGDSLSPLWFCLALNPLSRELNNSETGFNIKRNRQTLCQFTHLLYMDDLKLYSDTSANMNQLLDLTVKFTDDIKMQFGLNKCRKLNIKRGRITEGSYKIDEENQIDAMETQEFYKYLGYSQSKLLEHTVVKEKLKEEYANRLSSLCKQQLSSKHLFKAINTYAIPVLTYSFGVIKWTKSELKQLETKTRSTLTQFRYHHPKSAVERITLPRIEGGRGLIEISQLHHRQINSMRRFFNNKKENSQIHKVIAELDHKFTPLNLANTANMEIPDSKKQREEKHRKWKEKELHGRHKNDIIQTHIDEEASNKWLISAGLFPETEGFMIAIQDQIIATKNYRRYILKDSALTNDLCRKCLNKPETIQHITGACVKLTQNDYTHRHNQLTNIIHQKLVLKYKITKDPHTPYYKYRPSPVLENNKFKIYYDRSILTDHTIYNNRPDITLVDKHNKHAFIIDIAVPNTNNLQSTIVEKIRKYTELQEEIKKVWKMKNVTIVPIVISTTGVIPKQLFHSLKALDLPKFTYITLQKAAILNTCRIVRKFLNLDSETNGLHLPLNTEN

SEQ ID NO: 15417 - protein, 1264 aa, Atrytonopsis hianna
MENPAPGHQARAALRILGGGTVSLQLAQSKTVARRESIISSSDSSIISSNNSIVQSPCTSPHLFESPSTSRSTTISPMAVAVEQEAKANDLAPTTATIMKPATTKAGKPRVRMKWDKETNIFIMRTYYYVTKLETDFTMYRQQMHDKFIEKYRDTQVSEQRISDQRRVIVRNKRLTDEELNRIKEEVAKELEKENLNKTQETTSHTPQNINTPQAIFSKRNRDNRNRGEVSLNKYPRQDNQQTHSSDHNDQVIQILCTKFEENLNKYNIKTEPFTRPLLPKIRPGTYVSHLIREFNTNILPNKLNSLETITDTHTLIYCTALTIIEHLNIKTYDRTKIYKYKLKPAWQMRLEKDVEELRKDIARLTQYKLGNRSKKLLNKVDEIFNRTKQHSTHEQVNKRIDEYLDTLKQKLALKSHRLSRYNKSNKRKDNNKLFVTAEKQFYRRLKNQNSEVINPPDGNLVKNFWDDIWTKNTEHNKNAEWINTELLRCNMIDDMSYEELSEIELRNVINKTHNWKAAGEDGIHNFWLKKLLVVHRVLAKQINNILKGNCLLPEFLTKGKTFLLPKNNITQDPSQYRPITCLPTLYKIITSVIANRINDHIEHFNILSEEQKGCRRYHLGCKEQLIIDSSLLKHVQKTKKDLYVTYIDYKKAFDSVPHSWLIQILEIYKINNNLINFLKQTMSTWRTTLYLNTTKQELKIGELDIKRGIFQGDSLSPLWFCLALNPLSRELNNSNLGFNLKSNRLNSCQLTHLLYMDDLKLYANTDTNMDKLLNLTVRFTDDIKMDFGLDKCRKLNIKKGKVIQGSYKIDDNSKIEAMNAQELYKYLGYNQSRLLEHTTIKESLKKEYTNRVISLCKQKLSSKYLFKAINTYAISILTYSFGVIKWTKSELNALEIKTRTTLTQFRYHHPKSAIERITLPRKEGGRGLIQITQLHYRQITSMKAFFYRKKESSQIHKAIVEIDNKFTPLNLRNENIEIIDSKKHREDKHRKWKEKELHGRHKKDLEQIYIDDEASNKWLEVAGLFPETEGFMIAIQDQVIATKNYRKYILKDNSLNNDLCRKCLNKPETIQHITGACIKLTQNDYTHRHNQLANIIHQKLALKYKLSRDPHTPYYKYNPPPVLENATYKIYYDRAILTDHTIHNNRPDITFVDKHSKHVFIIDIAVPNTNNIQTTIVEKIRKYTELQEEIKKIWKMDKVTIVPIVVSTTGIIPKQLLQSLNILDLPKFTYITLQKAAILNTCRIVRKFLQLDADNSTSVNISS

SEQ ID NO: 15418 - protein, 764 aa, Cnaphalocrocis medinalis
MTLDDIEEDELRKIINKTHNWKTAGIDKIHNFWFKKLYKLHAILATQITDILNGNSTLPEFLTKGITFLLPKSDKTDDPSQFRPITCLPTLYKIITSCITNRITRHIELNNILTEAQKGCRKFHRGCKEQLIIDSTILNHVQKNKKDIFISYIDYKKAFDSVPHSWLLDILDIYKINPKIIQFLRAAMTTWRTTLNLRTDTDNISTGEIHINRGIYQGDSLSPLWFCLALNPLSNELNNSKLGFDIKINRRTEHQLTHLLYMDDLKLYANTDKNMTSLLDITTVVSRDIKMDLGLDKCKKLNIKKGKVSEGDYSIGEQDCIEAMKEGELYKYLGYNQARFLEYKSIKEKLKIEYFQRLHSLCNKQLSSKNLFKAINTFAIPVLTYSFGIIKWTKTELLQLETKTRTILTQHRHHHPKSAIERIFLPRKEGGRGLIEISQLYKGQIVNLKKFFMHKKLESSLHNIITAIDKQLTPLNLAEDILEPVDRSKNNEAKQRRWREKELHGRHPHDLDQSHIDREASNRWLEAGMLFPESEGFMVAIQDQVINTKNYRKYILKDTSLRSDLCRKCNNKPETIQHITGACITLTQNDYTHRHNQLANIIHQKLVHKYHLANDPHTPYYKYTPQHVIENENYKLYYDRTILTDNTIYNNRPDITFVDKLNKHTYIIDIAVPNTNNIQSTTTDKIRKYTELQDQIKRVWKMDRVTIVPIIVSTTGVVPNQLFLSLNILNLPKFTYLTLQKAAILNTCRIVRKFLQLESDSDMN

SEQ ID NO: 15419 - protein, 1091 aa, Eufriesea mexicana
MDDTPTIGGHQSGASTGDAAPVFDERGPGPEDPRRVEFPCEFPGCGRVFTTKTGRGVHCQRTHKDWYDERQNVAQVKARWSAEESALLARQEARLTIQGVRFMNQALLATLPQRTLESIKGQRRKADYKAMVVQALESMQPEAVAAALNTEPPKDNDHIIPAPQTDQPSYEAVRERVVEHLRNLPPCTSNQFNVQRLNNIIESLCGWSRAHVFEELSLYLRETFQKRQVVRGVRPPAGNTANQSRRKTRRAAYARVQKAWKRNRTTCIRDILRIFEELSLYLRETFQKRQVVHGVRPPAGNTANQSRRKTRRAVYARVQKAWKRNRTTCIRDILRNKRTDSAPCQEVMAPFWESVMTAGGTTTPGVANNSVVIGELWDVITIDEVKNALPPLGTAPGPDSLTVEEFRKVPLGIWTRIFNILMLCGKLPEHLWESRTTLIPKMNGAAEPGSFRPITVSSVIVRAFHKALANRMSKHIRHDPRQKAFQSIDGCSENIFLIDFILKYARQNNHPLFMASLDVAKAFDSVSHETILDILRSSGVPVPMIEYVAEVYKSATTRLQCGGWTSHTIHPTCGVKQGDPLSPVLFNMVIDRLFSMLPSEVGIRIGSTVVNAMGYADDLVLFATTKVGLQQLLDITAEYLQKCGLRVNASKCFTVSLKTVPKEKKTVVDPKEKFQCLGRPIPALKRSDEWRYLGVPFTPEGRLIGNPLDRLTTEVEQLRAAPLKPQQRLHALRTVVIPGVYHLLVLGSTNISLLNKLDVTVRNTVRKWLNLPHDVPNAYFHADVKDGGLSIPSFRWIAPLQRYHRLKRLAVVEDGKAPESMKRFVELEIKRAHLRLKDHGVHITTRAACKARFAKLLYDSNDGRPLKGSRRVEQQHTWITDGNLFVSGRDFIHMNKLRINAVPLRSRMARGRVRDKLCRAGCNDAETLHHVLQQCHRTHSARIQRHNACLKYLLDLHRTQALVDEEPQFRTVRGLLKPDAVIKRDNCAIVVDAIIAGESANLDREHQAKIDKYVVLADQIRSRYSVTEVTFTSLTLSARGVWSKKSFQHLTRLKLLRTSDAKIISTRALVGGLHAINIFHRRTDMGRHARI

SEQ ID NO: 15420 - protein, 1031 aa, Lasioglossum morio
MDDAPMLGGHQNSGASTGDAAPVPEGSSESARSLGIGYACECPGCDRIFPSKSGRGVHQQRAHKDWYDAQQDTTRVKARWSPEDIAILARQEARLTLQGVRFINQELLKIIPDRTLEAIKGQRKRADYKAIVEQLITSMRSLEVAASPPTMPPMVDDTSDQHPPDEVPNGISDQTTRNLVIEYLQSLPPCENRSFNNIRMNNIIGSLNIWNPAQIYEEICIYLRDTFPSRRKVARHRIPATSPPKSRRKLRRAEYARVQEAWKRNRTSCMRDLLRDKRTSSAPPKEVMVPFWEKIMTSSSSNTPGAAYGKEVLMELWAPVIPNEVKAALPPLGTAPGPDGFSAKQFRDVPIGIWTRIFNIFVLCGKLPQHLLESRTTLIPKKDGASEPGDFRPITVSSTITRAFHKVLANRMSRYIRLDPRQKAFRPIDGCSENIFLMDFILKYSRQNHQPLFMASLDVAKAFDSVTHQTILDTLRSSGVPNLMIEYIAEAYGRSVTRLQCEEWESHAIHPTCGVKQGDPLSPIIFNLVIDRLFSKLPKEIGVRVGNSIVNSMGYADDLVLFALSANGLQQLLDISADYLQECGLNVNASKCFTVSLKSVPKQKKSVVDASQSFSCLGRPMPALKRSDEWRYLGVPFTPEGRLMNNPLNRVKQEINILATAPLKPQQRLFTLRTVVIPALYHLLVLGSTNISLLNKLDVIIRKAVRKWLDLPHDVPNAYFHADVKDGGLSLPSLRWTIPLQRYNRLRALKIMENDEVPRLMRLFVESEIKRAQLRLNDHGQFIGSLTQCKERFAKLLHASNDGCPLEKSRDVMQQHAWLTDGTLFVSGHDFIHMNKVRINAVPLRSRMARGKVRDRHCRAGCNATETLQHVLQQCHRTHDARIKRHNACLDHLLRRQKAPRLVEKEPNFKTPNGLLKPDAIIKMDTNAIVVDAQIVGERVNLEQAHQAKIDKYTALEGAIKARYAVEQVIFTSLTLSSRGVWSRVSFEHLIQLGLLKKSDAKIMSTRALIGGLHALNIFNRRTTVRRRLAA

SEQ ID NO: 15421 - protein, 1071 aa, Andrena haemorrhoa
MLGPATSSSFGSETESCLCETPATRAANPFSCEQTGPKRNKQPRMEGAPMLGGPQQSGSSTGDAAPVPVGEPGPMHPGPEIFECEFPGCGRVFSTKTGRGVHHQKGHKDWYDAQQDTTRTKARWTQEEEAILARQEARLTLLGTRFINQELSKVLPERTLEAIKAQRRKKEYKTLVEQLVTSMRSLESVSVPDDSNNNPSSPAGSSSNLHQHVEAPDADEPTRNLMIEYLQGLPIGDNKKFDTLNRIVLSLNIWSREQVFEEISILLRQMFSCRRKAPSHRPQINPPSQSHRKLRRAEYSRVQRAWKRNRTTCIRDLLRDKRTSSVPPKDVMVPFWERIMTSEDSNSPGVTSDREVLKALWTPITSNEVKAALPPLGTSSGPDGFSAKEFRNVPIGVWTKIFNIFILCGRIPQHLLESRTTLIPKKDEASEPGDFRPITVSSTIVRSFHKVLANRMTKHIRLDPRQKAFRPIDGCSENIFMMDFILRFSRQNHHPLFLASLDVAKAFDSVTHRAILDTLRSSGVPRPMIEYIKETYEHSTTRLQCGGWESHAIHPTCGVKQGDPLSPIIFNLVMDQLFSKLPQEIGVRVGNSIVNAVGYADDIVLFALTPTGLQSLLDVSAEFLQECGLRVNESKCFSVALKTVARQKKTVVDASQTFRCLGRRIPALCRTDEWRYLGVPFTPEGHLLSNRLDRVKRELSTLTSAPLKPQQRLFTTRTVVLPALYHLLVLGSTNISLLNKLDATIRQAVRKWLDLPHDVPNAYFHADVKDGGLSLPSFRWTMPLQRLNRLKCLKIIENEQVPAPMKHFVGTEMKRAQLRLNDHGLLIDTQAACKDRFAKLLHKSNDGEPLQRSRDVTRQHVWITDGNLFVSGRDFIHLNKLRINAVPLRTRMARGRVRDRHCRAGCKAAETLQHVLQQCHRTHDARIRRHNACLEYLLKQQRAPVLVEQEPHFRTPRGLLKPDAVVLRDKVAIVVDAQIVGERANLDRAHHDKIDKYKTLNYDIRTRYSVSEVIFTSLTLSSRGIWSKESYDHLVLLQLLRPSDAKIMSTRALIGGLHALNIFNRRTTMKS

SEQ ID NO: 15422 - protein, 1071 aa, Andrena haemorrhoa
MLGPATSSSFGSETESCLCETPATRAANPFSCEQTGPKRNKQPRMEGAPMLGGPQQSGSSTGDAAPVPVGEPGPMHPGPEIFECEFPGCGRVFSTKTGRGVHHQKGHKDWYDAQQDTTRTKARWTQEEEAILARQEARLTLLGTRFINQELSKVLPERTLEAIKAQRRKKEYKTLVEQLVTSMRSLESVSVSDDSNNNPSSPAGSSSNLHQHVEAPDADEPTRNLMIEYLQGLPIGDNKKFDTLNRIVLSLNIWSREQVFEEISILLRQMFSCRRKAPSHRPQINPPSQSHRKLRRAEYSRVQRAWKRNRTTCIRDLLRDKRTSSVPPKDVMVPFWERIMTSEDSNSPGVTSDREVLKALWTPITSNEVKAALPPLGTSSGPDGFSAKEFRNVPIGVWTKIFNIFILCGRIPQHLLESRTTLIPKKDEASEPGDFRPITVSSTIVRSFHKVLANRMTKHIRLDPRQKAFRPIDGCSENIFMMDFILRFSRQNHHPLFLASLDVAKAFDSVTHRAILDTLRSSGVPRPMIEYIKETYEHSTTRLQCGGWESHAIHPTCGVKQGDPLSPIIFNLVMDQLFSKLPQEIGVRVGNSIVNAVGYADDIVLFALTPTGLQSLLDVSAEFLQECGLRVNESKCFSVALKTVARQKKTVVDASQTFRCLGRRIPALCRTDEWRYLGVPFTPEGRLLSNPLDRVKRELSTLTSAPLKPQQRLFTTRTVVLPALYHLLVLGSTNISLLNKLDATIRQAVRKWLDLPHDVPNAYFHADVKDGGLSLPSFRWTMPLQRLNRLKCLKIIENEQVPAPMKHFVGTEMKRAQLRLNDHGLLIDTQAACKDRFAKLLHKSNDGEPLQRSRDVTRQHVWITDGNLFVSGRDFIHLNKLRINAVPLRTRMARGRVRDRHCRAGCKAAETLQHVLQQCHRTHDARIRRHNACLEYLLKQQRAPVLVEQEPHFRTPRGLLKPDAVVLRDKVAIVVDAQIVGERANLDRAHHDKIDKYKTLNYDIRTRYSVSEVIFTSLTLSSRGIWSKESYDHLVLLQLLRPSDAKIMSTRALIGGLHALNIFNRRTTMKS

SEQ ID NO: 15423 - protein, 1071 aa, Andrena haemorrhoa
MLGPATSSSFGSETESCLCETPATRAANPFSCEQTGPKRNKQPRMEGAPMLGGPQQSGSSTGDAAPVPVGEPGPMHPGPEIFECEFPGCGRVFSTKTGRGVHHQKGHKDWYDAQQDTTRTKARWTQEEEAILARQEARLTLLGTRFINQELSKVLPERTLEAIKAQRRKKEYKTLVEQLVTSMRSLESVSVPDDSNNNPSSPAGSSSNLHQHVEAPDADEPTRNLMIEYLQGLPIGDNKKFDTLNRIVLSLNIWSREQVFEEISILLRQMFSCRRKAPSHRPQINPPSQSHRKLRRAEYSRVQRAWKRNRTTCIRDLLRDKRTSSVPPKDVMVPFWERIMTSEDSNSPGVTSDREVLKALWTPITSNEVKAALPPLGTSSGPDGFSAKEFRNVPIGVWTKIFNIFILCGRIPQHLLESRTTLIPKKDEASEPGDFRPITVSSTIVRSFHKVLANRMTKHIRLDPRQKAFRPIDGCSENIFMMDFILRFSRQNHHPLFLASLDVAKAFDSVTHRAILDTLRSSGVPRPMIEYIKETYEHSTTRLQCGGWESHAIHPTCGVKQGDPLSPIIFNLVMDQLFSKLPQEIGVRVGNSIVNAVGYADDIVLFALTPTGLQSLLDVSAEFLQECGLRVNESKCFSVALKTVARQKKTVVDASQTFRCLGRRIPALCRTDEWRYLGVPFTPEGHLLSNPLDRVKRELSTLTSAPLKPQQRLFTTRTVVLPALYHLLVLGSTNISLLNKLDATIRQAVRKWLDLPHDVPNAYFHADVKDGGLSLPSFRWTMPLQRLNRLKCLKIIENEQVPAPMKHFVGTEMKRAQLRLNDHGLLIDTQAACKDRFAKLLHKSNDGEPLQRSRDVTRQHVWITDGNLFVSGRDFIHLNKLRINAVPLRTRMARGRVRDRHCRAGCKAAETLQHVLQQCHRTHDARIRRHNACLEYLLKQQRAPVLVEQEPHFRTPRGLLKPDAVVLRDKVAIVVDAQIVGERANLDRAHHDKIDKYKTLNYDIRTRYSVSEVIFTSLTLSSRGIWSKESYDHLVLLQLLRPSDAKIMSTRALIGGLHALNIFNRRTTMKS

SEQ ID NO: 15424 - protein, 1071 aa, Andrena haemorrhoa
MLGPATSSSFGSETESCLCETPATRAANPFSCEQTGPKRNKQPRMEGAPMLGGPQQSGSSTGDAAPVPVGEPGPMHPSPEIFECEFPGCGRVFSTKTGRGVHHQKGHKDWYDAQQDTTRTKARWTQEEEAILARQEARLTLLGTRFINQELSKVLPERTLEAIKAQRRKKEYKTLVEQLVTSMRSLESVSVSDDSNNNPSSPAGSSSNLHQHVEAPDADEPTRNLMIEYLQGLPIGDNKKFDTLNRIVLSLNIWSREQVFEEISILLRQMFSCRRKAPSHRPQINPPSQSHRKLRRAEYSRVQRAWKRNRTTCIRDLLRDKRTSSVPPKDVMVPFWERIMTSEDSNSPGVTSDREVLKALWTPITSNEVKAALPPLGTSSGPDGFSAKEFRNVPIGVWTKIFNIFILCGRIPQHLLESRTTLIPKKDEASEPGDFRPITVSSTIVRSFHKVLANRMTKHIRLDPRQKAFRPIDGCSENIFMMDFILRFSRQNHHPLFLASLDVAKAFDSVTHRAILDTLRSSGVPRPMIEYIKETYEHSTTRLQCGGWESHAIHPTCGVKQGDPLSPIIFNLVMDQLFSKLPQEIGVRVGNSIVNAVGYADDIVLFALTPTGLQSLLDVSAEFLQECGLRVNESKCFSVALKTVARQKKTVVDASQTFRCLGRRIPALCRTDEWRYLGVPFTPEGHLLSNPLDRVKRELSTLTSAPLKPQQRLFTTRTVVLPALYHLLVLGSTNISLLNKLDATIRQAVRKWLDLPHDVPNAYFHADVKDGGLSLPSFRWTMPLQRLNRLKCLKIIENEQVPAPMKHFVGTEMKRAQLRLNDHGLLIDTQAACKDRFAKLLHKSNDGEPLQRSRDVTRQHVWITDGNLFVSGRDFIHLNKLRINAVPLRTRMARGRVRDRHCRAGCKAAETLQHVLQQCNRTHDARIRRHNACLEYLLKQQRAPVLVEQEPHFRTPRGLLKPDAVVLRDKVAIVVDAQIVGERANLDRAHHDKIDKYKTLNYDIRTRYSVSEVIFTSLTLSSRGIWSKESYDHLVLLQLLRPSDAKIMSTRALIGGLHALNIFNRRTTMKS

SEQ ID NO: 15425 - protein, 1031 aa, Lasioglossum morio
MDDAPMLGGHQNSGASTGDAAPVPEGNSESARSLGIGYACECPGCDRIFPSKSGRGVHQQRAHKDWYDAQQDTTRVKARWSPEDIAILARQEARLTLQGVRFINQELLKIIPDRTLEAIKGQRKRADYKAIVEQLITSMRSLEVAASPPTMPPMVDDTSDQHPPDEVPNGISDQTTRNLVIEYLQSLPPCENRSFNNIRMNNIIGSLNIWNPAQIYEEICIYLRETFPSRRKVARHRIPATSPPKSRRKLRRAEYARVQEAWKRNRTSCMRDLLRDKRTSSAPPKEVMVPFWEKIMTSSSSNTPGAAYGKEVLMELWAPVIPNEVKAALPPLGTAPGPDGFSAKQFRDVPIGIWTRIFNIFVLCGKLPQHLLESRTTLIPKKDGASEPGDFRPITVSSTITRAFHKVLANRMSRYIRLDPRQKAFRPIDGCSENIFLMDFILKYSRQNHQPLFMASLDVAKAFDSVTHQTILDTLRSSGVPNMMIEYIAEAYGRSVTRLQCEEWESHAIHPTCGVKQGDPLSPIIFNLVIDRLFSKLPKEIGVRVGNSIVNSMGYADDLVLFALSANGLQQLLDISADYLQECGLNVNASKCFTVSLKSVPKQKKSVVDASQSFSCLGRPMPALKRSDEWRYLGVPFTPEGRLMNNPLNRVKQEINILATAPLKPQQRLFTLRTVVIPALYHLLVLGSTNISLLNKLDVMIRKAVRKWLDLPHDVPNAYFHADVKDGGLSLPSLRWIIPLQRYNRLRALKIMENDEVPRLMRLFVESEIKRAQLRLNDHGQFIGSLTQCKERFAKLLHASNDGCPLEKSRDVMQQHAWLTDGTLFVSGHDFIHMNKVRINAVPLRSRMARGKVRDRHCRAGCNATETLQHVLQQCHRTHDARIKRHNACLDHLLRRQKAPRLVEKEPNFKTPNGLLKPDAIIKMDTNAIVVDAQIVGERVNLEQAHQAKIDKYTVLEGAIKARYAVEQVIFTSLTLSSRGVWSRVSFEHLIQLGLLKKSDAKIMSTRALIGGLHALNIFNRRTTVRRRLAA

SEQ ID NO: 15426 - protein, 1031 aa, Lasioglossum morio
MDDAPMLGGHQNSGASTGDAAPVPEGNSESARSLGIGYACECPGCDRIFPSKSGRGVHQQRAHKDWYDAQQDTTRVKARWSPEDIAILARQEARLTLQGVRFINQELLKIIPDRTLEAIKGQRKRADYKAIVEQLITSMRSLEVAASPPTMPPMVDDTSDQHPPDEVPNGISDQTTRNLVIEYLQSLPPCENRSFNNIRMNNIIGSLNIWNPAQIYEEICIYLRETFPSRRKVARHRIPATSPPKSRRKLRRAEYARVQEAWKRNRTSCMRDLLRDKRTSSAPPEEVMVPFWEKIMTSSSSNTPGAAYGKEVLMELWAPVIPSEVKAALPPLGTAPGPDGFSAKQFRDVPIGIWTRIFNIFVLCGRLPQHLLESRTTLIPKKDGASEPGDFRPITVSSTITRAFHKVLANRMSRYIRLDPRQKAFRPIDGCSENIFLMDFILKYSRQNHQPLFMASLDVAKAFDSVTHQTILDTLRSSGVPNLMIEYIAEAYGRSVTRLQCEEWESHAIHPTCGVKQGDPLSPIIFNLVIDRLFSKLPKEIGVRVGNSIVNSMGYADDLVLFALSANGLQQLLDISADYLQECGLNVNASKCFTVSLKSVPKQKKSVVDASQSFSCLGRPMPALKRSDEWRYLGVPFTPEGRLMNNPLNRVKQEINILATAPLKPQQRLFTLRTVVIPALYHLLVLGSTNISLLNKLDVMIRKAVRKWLDLPHDVPNAYFHADVKDGGLSLPSLRWIIPLQRYNRLRALKIMENDEVPRLMRLFVESEIKRAQLRLNDHGQFIGSLTQCKERFAKLLHASNDGCPLEKSRDVMQQHAWLTDGTLFVSGHDFIHMNKVRINAVPLRSRMARGKVRDRHCRAGCNATETLQHVLQQCHRTHDARIKRHNACLDHLLRRQKAPRLVEKEPNFKTPNGLLKPDAIIKMDTNAIVVDAQIVGERVNLEQAHQAKIDKYTALEGAIKARYAVEQVIFTSLTLSSRGVWSRVSFEHLIQLGLLKKSDAKIMSTRALIGGLHALNIFNRRTTVRRRLAA

SEQ ID NO: 15427 - protein, 1035 aa, Lasioglossum morio
MDDTPMFGGHHNSGASTGDAAPVTEGGSGSMRSAGEVYACEYPGCTREFPCKSGRGVHQQRAHKDWYDARQDTTRVKARWSPEDTAILAREEARLTLQGVKFVNQELLKVIPDRTLEAIKGQRRKAGHKAMVEQLLISMRSLEPTAAPPTIENNMPAQIDNISDHDQPNEVPDNLSDETVRGLVIEHLQSLPPCNNRNFNGGLLNKIIESLNIWTLAQTCEELSIYLRKTFPGRRRTPGRAMSSVSPPQSRRALRRAEYARIQKAWKRNRTSCMRDLLRDKRTSSAPPKEVMVPFWETIMTSGSSSTPGATSGKEVLKELWAPITPIEVNAALPPLGTAPGPDGFSVREFRDVPTGIWTRIFNIFILCGRLPQHLLESRTTLIPKKDGASQPGDFRPITVSSTISRAFHKVLANRMSLHIQLDTRQKAFRPIDGCSENIFLMDFILKYSRQNHQPLFMASLDVAKAFDSVTHRTILDTLRSSGVPNLMVEYIAETYKRSVTRLQCEGWESHAIHPTCGVKQGDPLSPIIFNLVIDRLFSELPKEIGVRVGDSIVNGIGYADDLVLFALSSNGLQRLLDVSAGYLHECGLHVNASKCFTVSLKTVPKQKKTVVDASQSFSCLGRPVPALKRTDEWRYLGVPFTPEGRLTSNPLDRINQEINILTAAPLKPQQRLFTLRTVVLPALYHLLVLGSTNISLLNKLDAVTRKAVRKWLDLPHDVPNAYFHADVKDGGLSLPSLRWITPLQRYNRLRALKIMENEEVPMLMRQFVESEIKRAQLRLNDHGLSTDSLIKCKERFAKLLHNSNDGRPLEKSRDVMQQHAWLTDGSLFVSGRDFIHMNKVRINAIPLRSRMARGRIRDRGCRAGCNATETLQHVLQQCHRTHDARLKRHNACLEYLLRRHRVPTLVEEEPKFKTPSGLLKPDAIIKKGKSAIVVDAQIVGERVNLDQAHQAKIDKYAVLERDVKTRYAVEQVIFTSLTLSSRGIWSGKSYEHLIQLNLLKRSDAKIMSTRALVGGLHALNIFHRRTAVRHRSGA

SEQ ID NO: 15428 - protein, 903 aa, Lasioglossum lativentre
MTLLISMRSLEAVASLPTTDCNTSALTDNTSDQHPPDEVPSDLTYETIRSLVVDHLQKLPPCDNRNFNSDLLNKIIRSLNNWNPAQIFEEISIFLRDTFPSRRKATAPRIPAASQPQSRRKLRRAEYARVQKMWKRNRTSCMRDLLKDKRTSSAPPKEVMVPFWETIMTSGGTSSPGAASGREVLMGLWAPVDPDEVKAALPPLGTAPGPDGFSVKEFRSVPIGIWTRIFNIFILCGRLPQHLLESRTTLIPKKDGASEPGDFRPITVSSTITRAFHKVLANRMSQHIRLDPRQKAFRPIDGCSENIFMMDFILKFSRQNHQPLFMASLDVAKAFDSVTHQTILDTLRSSGVPNLMVEYIAGTYGRSSTRLQCQGWESHAIHPTCGVKQGDPLSPIIFNLVIDRLFSKLPKEIGVRVGNSIVSGVGYADDLVLFALSSNGLQQLLDVSADYLHECGLHVNASKCFTVSLKTVPKQKKSVVDASQSFSCLGRPIPALKRTDEWKYLGVPFTPEGRLMSKPLDRVKRELNILATAPLKPQQRLFTLRTVVLPALYHLLVLGSTNISLLNKLDATIRKAARKWLDLPHDAPNAYFHADVKDGGLSLPSLRWIIPLQRYNRLRALRVIENEEVPRVMEQFVESEIKRAQLRLNDHGQFIGSLIQCKDRFAKLLHNSNDGRPLEKSRDVMRQHAWLTDGNLFVSGHDFIHMNKVRINAVPLRSRMARGQVRDRHCRAGCNATETLQHVLQQCHRTHDARIKRHDACLEFLLRRQRAPILVEKEPKFKTPNGLLKPDAVIKRDQSAIVVDAQIVGERVNLDQAHQAKIDKYAVLESDIKTRYAVKEVIFTSLTLSSRGIWSGTSFGHLTQLDLLKRSDAKIMSTRVLIGGLHALNIFSHRTTVKRRKVA

SEQ ID NO: 15429 - protein, 951 aa, Eufriesea mexicana
MARQEARLTLEGAKFINKELLSVLPDRTLEAIKGQRRKGEYKAMVGRLIESMSSSQVLAAAPSPTDITPVHLDNTSDQHPSEETPVDPADLTFEALRGSVVEYLKSLPPCKYDGFDCVRLNAIVDSLETWDCTRLSEEISIYLRESFPIRRRAAGPKPLPTSTPQSRRKIRRAEYARVQKAWKRNRTTCIRGLLRDRTTSSAPPKEVMVPFWETLMTSGSANSPGVATGRDVRIELWAPVSPDEVRDALPPMGTAPGPDGFSPKEFRDVPIGIWTRVFNIFLVSGGLPQHLLESRTTLIPKKDGASQPGDFRPISVPSTITRAFHKILASRMSKHIPIDKRQKAFRPIDGCSENIFLMDFILKYSRQHHQPLYMASLDVAKAFDSVSHKAILDTLRTSGVPGLMAEYIAGTYRDSSTRLQCEGWISHAIHPTCGVKQGDPLSPVIFNLVIDRLLAGLPKEVGLRIGSSIINAMGYADDIVLFALTPAGLQRTLDAAAAYLQECGLCVNATKCFTVSLKTVAGQKKTVVDAGQSFTCFGSQIPALKRTDEWKYLGVPFNPEGRLISDPLDRIKRELDILSTAPLKPQQRLFTLRTVIVPALYHLLVLGSTNISLLNKLDATVRKAVRKWLDLPHDVPNAYFHADVGEGGLSIPSLRWAVPLQRYNRLRALKLLEETEVPSAMQRFLDLELKRAHLRLKDHDRPIDTLAKCKDRFAGLLHTSNDGRPLEGSRDVKRQHQWIVDGNLFVSGHDFIHMNKVRINAVPLRSRMARGQVRDRHCRAGCSATETLQHVLQQCHRTHDARIKRHDACLEYLLRHRPAHENVEVEPKFKTPSGLLKPDAIVCDDSKVVVIDAQIVGERVDLDRAHQAKIAKYAVLEDDIKARYHVRRVVFTSLTLSSRGVWSKQSYGSLHGNNFIKSSDAKIISTRALIGGLNALNKFSRRTCVRRRVAA

SEQ ID NO: 15430 - protein, 1031 aa, Lasioglossum morio
MDDAPMLGGHQNSGASTGDAAPVPEGNSESARSLGIGYACECPGCDRIFPSKSGRGVHQQRAHKDWYDAQQDTTRVKARWSPEDIAILARQEARLTLQGVRFINQELLKIIPDRTLEAIKGQRKRADYKAIVEQLITSMRSLEVAASPPTMPPMVDDTSDQHPPDEVPNGISDQTTRNLVIEYLQSLPPCENRSFNNIRMNNIIGSLNIWNPAQIYEEICIYLRETFPSRRKVARHRIPATSPPKSRRKLRRAEYARVQEAWKRNRTSCMRDLLRDKRTSSAPPEEVMVPFWEKIMTSSSSNTPGAAYGKEVLMELWAPVIPSEVKAALPPLGTAPGPDGFSAKQFRDVPIGIWTRIFNIFVLCGRLPQHLLESRTTLIPKKDGASEPGDFRPITVSSTITRAFHKVLANRMSRYIRLDPRQKAFRPIDGCSENIFLMDFILKYSRQNHQPLFMASLDVAKAFDSVTHQTILDTLRSSGVPNLMIEYIAEAYGRSVTRLQCEEWESHAIHPTCGVKQGDPLSPIIFNLVIDRLFSKLPKEIGVRVGNSIVNSMGYADDLVLFALSANGLQQLLDISADYLQECGLNVNASKCFTVSLKSVPKQKKSVVDASQSFSCLGRPMPALKRSDEWRYLGVPFTPEGRLMNNPLNRVKQEINILATAPLKPQQRLFTLRTVVIPALYHLLVLGSTNISLLNKLDVMIRKAVRKWLDLPHDVPNAYFHADVKDGGLSLPSLRWIIPLQRYNRLRALKIMENDEVPRLMRLFVESEIKRAQLRLNDHGQFIGSLTQCKERFAKLLHASNDGCPLEKSRDVMQQHAWLTDGTLFVSGHDFIHMNKVRINAVPLRSRMARGKVRDRHCHAGCNATETLQHVLQQCHRTHDARIKRHNACLDHLLRRQKAPRLVEKEPNFKTPNGLLKPDAIIKMDTNAIVVDAQIVGERVNLEQAHQAKIDKYTALEGAIKARYAVEQVIFTSLTLSSRGVWSRVSFEHLIQLGLLKKSDAKIMSTRALIGGLHALNIFNRRTTVRRRLAA

SEQ ID NO: 15431 - protein, 1071 aa, Andrena haemorrhoa
MLGPATSSSFGSETESCLCETPATRAANPFSCEQTGPKRNKQPRMEGAPMLGGPQQSGSSTGDAAPVPVGEPGPMHPSPEIFECEFPGCGRVFSTKTGRGVHHQKGHKDWYDAQQDTTRTKARWTQEEEAILARQEARLTLLGTRFINQELSKVLPERTLEAIKAQRRKKEYKTLVEQLVTSMRSLESVSVPDDSNNNPSSPAGSSSNLHQHVEAPDADEPTRNLVIEDLQGLPIGDNKKFDTLNRIVLSLNIWSREQVFEEISILLRQMFSCRRKAPSHRPQINPPSQSHRKLRRAEYSRVQRAWKRNRTTCIRDLLRDKRTSSVPPKDVMVPFWERIMTSEDSNSPGVTSDREVLKALWTPITSNEVKAALPPLGTSSGPDGFSAKEFRNVPIGVWTKIFNIFILCGRIPQHLLESRTTLIPKKDEASEPGDFRPITVSSTIVRSFHKVLANRMTKHIRLDPRQKAFRPIDGCSENIFMMDFILRFSRQNHHPLFLASLDVAKAFDSVTHRAILDTLRSSGVPRPMIEYIKETYEHSTTRLQCGGWESHAIHPTCGVKQGDPLSPIIFNLVMDQLFSKLPQEIGVRVGNSIVNAVGYADDIVLFALTPTGLQSLLDVSAEFLQECGLRVNESKCFSVALKTVARQKKTVVDASQTFRCLGRRIPALCRTDEWRYLGVPFTPEGRLLSNPLDRVKRELSTLTSAPLKPQQRLFTTRTVVLPALYHLLVLGSTNISLLNKLDATIRQAVRKWLDLPHDVPNAYFHADVKDGGLSLPSFRWTMPLQRLNRLKCLKIIENEQVPAPMKHFVGTEMKRAQLRLNDHGLLIDTQAACKDRFAKLLHKSNDGEPLQRSRDVTRQHVWITDGNLFVSGRDFIHLNKLRINAVPLRTRMARGRVRDRHCRAGCKAAETLQHVLQQCNRTHDARIRRHNACLEYLLKQQRAPVLVEQEPHFRTPRGLLKPDAVVLRDKVAIVVDAQIVGERANLDRAHHDKIDKYKTLNYDIRTRYSVSEVIFTSLTLSSRGIWSKESYDHLVLLQLLRPSDAKIMSTRALIGGLHALNIFNRRTTMKS

SEQ ID NO: 15432 - protein, 1035 aa, Mesochorus sp.
MTLLRNKPRMDGAPMFGGHHRGTPTGEAVPVLDELGAGPAAQANDGFACEFPGCTRTFATKTGRGVHHQRTHKDWYDQRQNTNYFKAHWSIEESDLLARKEAQLTVQGVKFINQALLSTVPDRTLEAIKGQRRKVDYKERVRRAIEELQAPLAVEDHPVDASIQLDESLDRQTPVRQGVSSEQARERIFLHLRGLPPCETNDDSGGRLDTIIQSLNIWSTAHIFEELSIFLRETFFKEPKKRGIRPSTNNRVAQSRRKTRRLVYARVQKAWKRNRMSCIRDILRDKRTDSAPDQDVMVPFWERIMTSGADSSPGVLANDKVIDELWAPVTSDEVRAALPPAGTAPGPDSLTVEEYRRTSLGMWARIYNIFIICGKLPKYLLESKTTLIPKKDGASEPGEFRPITVSSVIVRGFHKVLANRMSKHIRLDERQKAFQPIDGCSENIFLIDLALKFARQHHRPLFMASLDVAKAFDSVTHETIIDVLRSAGVPDSMVSYIKEVYVGSSTRLQCREWISHAIHPTCGVKQGDPLSPVLFNMVIDRLFSLLPRETGLRIGGTVLNAMGYADDLVLLATTSVGLQQQLDITAEYLQKCGLNVNASKCFTVAIKTVPKQKKTVVDASHIFRCRGRPIPALRRSDDWKYLGVPFTPEGRLMSKPLDRLKVEIKQLGAAPLKPQQRLFALRTVTLPGLYHMLVLGATNISLLNKLDSSVRGIIRKWLALPHDTPNAYFHADVKDGGLSFPSFRWTIPLQRYHRLKRLVAANDAEASADVKTFVESEIRRTHLRLKDHGTDLVTRAAYKARMAKRLYESNDGCPLKGSRGVEQQHAWITDGNLFVSGSDFIRMNRLRINAIPLRTRMARGRFRDTHCRAGCNHPETLHHVLQQCHRTHDARLKRHDECLRYVLDKQRAHASVELEPHFRDDRGLLKPDAVVVSGDCAIVIDAIIAGERADLDREHRRKIEKYASLADQVKHRFSVRKTIFSSLTLSSRGVWSKQSFKHLLTLKLINKADAKILSTRVLIGGLHELNIFFYGITSF

SEQ ID NO: 15433 - protein, 1408 aa, Hemaris fuciformis
MERKRYNLRPLPGGRRGASGADAGCYSSGNVGDTGLTRRVPVDKYTTAEMPLPEVRRGTSSAGARCSSRENTGDEGSSRQALVRKYITAGTLEEGDGTDSNISLFSVETSSDPLFHPKSSTSTSASSLTLEGVARETISVNSPTPTSNVPKTRRKWNSDMNEFILRTYLHLTSMETDTKSYLEPLHTKFLEKFPFMTVSRQRLGDQRRAIMRTKLLPQETIDAIYKEVKEDLENTHKHIHNQSQLYTHTGQRMKWSKEHNEHIIRTYYKVTNLETDKTGYRKLLHEQVVATFPHLAHVSEQRVSDQRRVIINNCLVSPERIAEIKKQVAQELNSANHVITTDNIVNDTVPGTPQPTTNIDSFDSINLEDHPLTHSDQREHTDQERNQEIDNIFHKAYEHFKPTEPTERPFIPKQRCSKKLYSAISYINSQIIPQKVSENTEFLDLQTLLYCSAWTAAKVNGTRLELTTPSHNICNRGTKPRPQWQKRLERRILDLRAKIAKLTHYMRGTRSNYLNKQVEIICKEYKIHSTHEEPNSQLPHFVDTLKQKLTITSSRLSRYTKCTFRKIQNNNFYHNEKKFYRTLSSSTNNQISRATPEISHPNPKQLENYWADIWSKSVQHNSQAEWIRTEKENHCNIPCMAFESIPIEIFHNVIKNLHNWKSPGSDHIHNYWFKKFTYLHPYIYNHINNFIKNPEIMPSYITTGITYMLSKDENDTSNPEKYRPITCLQTIYKIITSCLSELIYSHLEQNKLLTEEQKGCRKFSQGCKEQITIDSIILNQIRKTKTDLYTAYIDYRKAYDSVPHSWLFSVLNIYKIHPQLISFLERTATNWSTRLRFNTSNGLHVTDSIKIKRGIFQGDALSPLWFCLALNPLSKRLNSIDRGYSLLYKEADDPSDQCYKLNHLLYMDDIKLYAESPTDIEFLLKTTEQFSKDIQMEFGIDKCRTNTIKAGRSHEHPYALQTGQIMQPLNEYETYKYLGFHQARQILVKETKTKLTQIFKHRINSILNTQLNSKNTFKAINTYAIPVLTYSFGIVRWTKSDLKNLQRNINTALTKHRKHHPRACVQRQTLPRKEGGRGLIDIQNLHNKQISSLRHYFHSKQKESKLHKAIVFNDNKFTPLNLQDFTNQQNELLVNNVAKIGEWTQKSLHGRHRLDLSQSNVDKDASNEWLVRGELFPETEGFMIAIQDQIIETRNYQKYIIKAPNLVTDLCRRCNSCTETIQHITGACKSIVQTDYKYRHDQVAQIIHQMLAVKYHLIPSSKPYYKYTPEVILENSTHKLYFDRAVLTDRTIHYNRPDIIIVNKIDKTAHIIDIAIPNTHNLQSTIAEKLAKYVELREEVTRIWRLQKVLIVPIVLSTTGVIPKQLHHSLQILSLPKYTYTALQKAVILNTCRIVRKFLQTNQDTVTF

SEQ ID NO: 15434 - protein, 1408 aa, Hemaris fuciformis
MERKRYNLRPLPGGRRGASGADAGCYSSGNVGDTGLTRRVPVDKYTTAEMPLPEVRRGASSAGARCSSRENTGDEGSSRQALVRKYITAGSLEEGDGTDSNISLFSVETSSDPLFHPKSSTSTSASSLTLEGVARETISVNSPTPTSNVPKTRRKWNSDMNEFILRTYLHLTSMETDTKSYLEPLHTKFLEKFPFMTVSRQRLGDQRRAIMRTKLLPQETIDAIYKEVKEDLENTHKHIHNQSQLYTHTEQRMKWSKEHNEHIIRTYYKVTNLETDKTGYRKLLHEHFVATFPHLAHVSEQRVSDQRRVIINNCLVSPERIAEIKKQVAQELNSANHVITTDNIVNDTVPGTPQPTTNIDSFDSINLEDHPLTHSDQREHTDQERNQEIDNIFHKAYEHFKTTEPTDRPFIPKQRCSKKLYSAISYINSQIIPQKVSENTEFLDLQTLLYCSAWTAAKVNGTRLELTTPSHNICNRGTKPRPQWQKRLERRILDLRAKIAKLTHYMRGTRSNYLNKQVEIICKEYKIHSTHEEPNSQLPHFVDTLKQKLTITSSRLSRYTKCTFRKIQNNNFYHNEKKFYRNLSSSTNNQISRATPEISHPDPKQLENYWADIWSKSVQHNSQAEWIRTEKENHCNIPCMAFESIPIEIFHNVIKNLHNWKSPGSDHIHNYWFKKFTYLHPYIYNHINNFIKNPEIVPSYITTGITYMLSKDENDTSNPEKYRPITCLQTIYKIITSCLSELIYSHLEQNKLLTEEQKGCRKFSQGCKEQITIDSIILNQIRKTKTDLYTAYIDYRKAYDSVPHSWLFSVLNIYKIHPQLISFLERTATNWSTRLRFNTSNGLHVTDSIKIKRGIFQGDALSPLWFCLALNPLSKRLNSIDRGYSLLYKEADDPSDQCYKLNHLLYMDDIKLYAESPTDIEFLLKTTEQFSKDIQMEFGIDKCRTNTIKAGRSHEHPYALQTGQIMQPLNEYETYKYLGFHQARQILVKETKTKLTQIFKHRINSILNTQLNSKNTFKAINTYAIPVLTYSFGIVRWTKSDLKNLQRNINTALTKHRKHHPRACVQRQTLPRKEGGRGLIDIQNLHNKQISSLRHYFHSKQKESKLHKAIVFNDNKFTPLNLQDFTNQQNELLVNNVAKIGEWTQKSLHGRHRLDLSQSNVDKDASNEWLVRGELFPETEGFMIAIQDQIIETRNYQKYIIKAPNLVTDLCRRCNSCTETIQHITGACKSIVQTDYKYRHDQVAQIIHQMLAVKYHLIPSSKPYYKYTPEVILENSTHKLYFDRAVLTDRTIHYNRPDIIIVNKIDKTAHIIDIAIPNTHNLQSTIAEKLAKYVELREEVTRIWRLQKVLIVPIVLSTTGVIPKQLHHSLQILSLPKYTYTALQKAVILNTCRIVRKFLQTNQDTVTF

SEQ ID NO: 15435 - protein, 903 aa, Hemaris fuciformis
MRGTRSNYLNKQVEIICKEYKIHSTHEEPNSQLPHFVDTLKQKLTITSSRLSRYTKCTFRKIQNNNFYHNEKKFYRNLSSSTNNQISRATPEISHPDPKQLENYWADIWSKSVQHNSQAEWIRTEKENHCNIPCMAFESIPIEIFHNVIKNLHNWKSPGSDHIHNYWFKKFTYLHPYIYNHINNFIKNPEIMPSYITTGITYMLSKDENDTSNPEKYRPITCLQTIYKIITSCLSELIYSHLEQNKLLTEEQKGCRKFSQGCKEQITIDSIILNQIRKTKTDLYTAYIDYRKAYDSVPHSWLFSVLNIYKIHPQLISFLERTATNWSTRLRFNTSNGLHVTDSIKIKRGIFQGDALSPLWFCLALNPLSKRLNSIDRGYSLLYKEADDPSDQCYKLNHLLYMDDIKLYAESPTDIEFLLKTTEQFSKDIQIEFGIDKCRTNTIKAGRSHEHPYALQTGQIMQPLNEYETYKYLGFHQARQILVKETKTKLTQIFKHRINSILNTQLNSKNTFKAINTYAIPVLTYSFGIVRWTKSDLKNLQRNINTALTKHRKHHPRACVQRQTLPRKEGGRGLIDIQNLHNKQISSLRHYFHSKQKESKLHKAIVFNDNKFTPLNLQDFTNQQNELLVNNVAKIGEWTQKSLHGRHRLDLSQSNVDKDASNEWLVRGELFPETEGFMIAIQDQIIETRNYQKYIIKAPNLVTDLCRRCNSCTETIQHITGACKSIVQTDYKYRHDQVAQIIHQMLAVKYHLIPSSKPYYKYTPEVILENSTHKLYFDRAVLTDRTIHYNRPDIIIVNKIDKTAHIIDIAIPNTHNLQSTIAEKLAKYVELREEVTRIWRLQKVLIVPIVLSTTGIIPKQLHHSLQILSLPKYTYTALQKAVILNTCRIVRKFLQTNQDTVTF

SEQ ID NO: 15436 - protein, 1444 aa, Deilephila porcellus
MMETRKYNLRPLPGGRRGAPGADARCYSSGNVGDAGLNRRVPVDKYTTADEPLPRGRWGASSTGAGCSSNAKTGGESLSRRALVRKYTTAVDGSDNDVELTPSLHSEVTISDQSFRPTSPTPSTVSSITSRGAALETISVSSPVPTTSTTRTRMKWSSDMNEFVIRTYLYLTTMETDTKSYLEPLHVKFLERFPSMKVSRQRLGDQRRAIMRRKLLPQQTIDTIYREVRENLEKIHEHSSQNHTLHAQTQSPLIQSTQQNTQTGQRMRWTREYNEHIISTYYKITKLERDKTAYRKLLHEQFVTKFPHLAHVSEQRVSDQRRVIINNHLISPDRIEEIKHQAALELQITEQEPLFNSTVTLDVEQHTLETANTAEQISETDSLNNIQTNCNIQIEPDNINAYPAEQNNHEIDDVFNKVYEHFKDTDPVNRQFIPKQKSSKKLFKIVNYINTQIIPNKINENTDFLVLQTVLYCSAWTAARMNGSKLNLSKSINFIGSRAERLKPHWQKRLENKILDLRAKIGKLTQYIRGTRSDYLNQQIESILQQYKIHSIHEEPNSKLSHFLDTLKQKLAISSNRLSRYKKCTLRKTQNNDFNSNEKKFYRNLSSLASNQTTQVDNLTPDPKQLRDYWAEIWANPVEHNAEASWIHTEQEKNNNIPTMQYEVIPTETFHKVLRNLHNWKTPGSDHIHNYWYKKFTYIHPYIYKHINSFIKNPEKLPSYVTTGTTYMLPKDQDNMVNPAKYRPITCLQTIYKIITACLSDLIYNHLDQYKLLTEQQKGCRKFSQGCKEQITIDSVILKQVLKTKVDLYTTYIDYKKAFDSVPHSWLFSVLHLYKIHPQLISFLKTTSAQWSTRLQLNSSKGLVVTDPIEIKRGIFQGDALSPLWFCLALNPLSNLLNSIDCGYTLKYRSTNEQTDQNYKLNHLLYMDDIKLYAQNSVDIDLLMDTTQQFSEDIKMEFGIDKCKTNSIKAGKIHQHPYQLETGQTIQPLNEYETYKYLGFQQARQILVKETKIKLTEVFQHRLNSILNTQLNSKNSFKAINTYAIPVLTYSFGVVGWTKSNLKNLQRKINVSLTKHRKHHPRACVQRQTLPRKEGGRGLIDIHNLHNKQITSLRQYFHSKQKDSKLHEAIVLNDNKLTPLNLLDTNTQPNESLTDYSTKIAEWTRKSLHGRHRLDLSQPNVDKYASNEWLVRGELFPETEGFMIAIQDQTIETRNYQRYIIKAPNLPTDICRRCNSSSETIQHITGACKSIVQTDYKYRHDQVAQIIHQKLATKYHLVSSSVPYYKYIPDIILENSTHKLYYDRAILTDRTIHYNRPDIILINKIQKSAYIIDIAIPNTHNLQSTIAEKISKYTELKEEVIRMWRLQKVTIVPIVLSTTGVIPVQLHHSLESLNLPKFTYNALQKSVILNTCRIVRKFLQCDQEITTVNRIPDNHQSNVAADLA

SEQ ID NO: 15437 - protein, 1086 aa, Deilephila porcellus
MRWTREYNEHIISTYYKITKLERDKTAYRKLLHEQFVTKFPHLAHVSEQRVSDQRRVIINNHLISPDRIEEIKHQAALELQITEQEPLFNSTVTLDVEQHTLETANTAEQISETDSLNNIQTNCNIQIEPDNINAYPAEQNNHEIDDVFNKVYEHFKDTDPVNRQFIPKQKSSKKLFKIVNYINTQIIPNKINENTDFLVLQTVLYCSAWTAARMNGSKLNLSKSINFIGSRAERPKPHWQKRLENKILDLRAKIGKLTQYIRGTRSDYLNQQIESILQQYKIHSIHEEPNSKLSHFLDTLKQKLAISSNRLSRYKKCTLRKTQNNDFNSNEKKFYRNLSSLASNQTTQVDNLTPDPKQLRDYWAEIWANPVEHNAEASWIHSEQKKNNNIPTMKYEVIPTETFHKVLRNLHNWKTPGSDHIHNYWYKKFTYIHPYIYKHINSFIKNPEKLPSYVTTGTTYMLPKDQDDMVNPAKYRPITCLQTIYKIITACLSDLIYNHLDQYKLLTEQQKGCRKFSQGCKEQITIDSVILKQVLKTKVDLYTTYIDYKKAFDSVPHSWLFSVLHLYKIHPQLISFLKTTSAQWSTRLQLNSSKGLVVTDPIEIKRGIFQGDALSPLWFCLALNPLSNLLNSIDCGYTLKYRSTNEQTDQNYKLNHLLYMDDIKLYAQNSVDIDLLMDTTQQFSEDIKMEFGIDKCKTNSIKAGKIHQHPYQLETGQTIQPLNEYETYKYLGFQQARQILVKETKIKLTEVFQHRLNSILNTQLNSKNSFKAINTYAIPVLTYSFGVVGWTKSNLKNLQRKINVSLTKHRKHHPRACVQRQTLPRKEGGRGLIDIHNLHNKQITSLRQYFHSKQKDSKLHEAIVLNDNKLTPLNLLDTNTQPNEILTDYSTKIAEWTRKSLHGRHRLDLSQPNVDKYASNEWLVRGELFPETEGFMIAIQDQTIETRNYQRYIIKAPNLPTDICRRCNSSSETIQHITGACKSIVQTDYKYRHDQVAQIIHQKLATKYHLVSSSVPYYKYIPDIILENSTHKLYYDRAILTDRTIHYNRPDIILINKIQKSAYIIDIAIPNTHNLQSTIAEKNNF

SEQ ID NO: 15438 - protein, 1444 aa, Deilephila porcellus
MMEPRKYNLRPLPGGRRGAPGADAGCYSSGNVGDAGLNRRVPVDKYTTADEPLPRGRWGASSAGSGCSSNAKTGGESLNRRALVRKYITAVDGSDNDVDSTPSLYSEVTISDQSFRPTSPTPSTVSSVTSRGAALETISVSSPVPTTSTSRTRMKWSSDMNEFVIRTYLYLTSMETDTKSYLEPLHVKFLERFPSMTVSRQRLGDQRRAIMRRKLLPQQTIDTIYREVREDLEKIHEHSLQNHTLHTQTQSPLIQSTQQTTQTGQRMRWTREYNEHIISTYYKITKLERDKTAYRKLLHEQFVTKFPHLAHVSEQRVSDQRRVIINNHLISPDRIEEIKHQAALELQITEHEPSFNSTVTLDVEQHTLEPANTATQISETNTLNNIQTNCNIQIEPDNINAYPAEQNNHEIDDVFNKAYEHFKDTDPVNRQFIPKQKSSKKLFKIVNYINTQIIPNKINENTDFLVLQTVLYCSAWTAARMNGSKLNLSKSINFTGNRAERPKPQWQKRLENKILDLRSKIGKLTQYIRGTRSDYLNQQIESILQQYKIHSIHEEPNSKLSHFLDTLKQKLAISSNRLSRYKKCTLRKTQNNDFNSNEKKFYRNLSSLANNQTTQADNLTPDPKQLRDYWAEIWSNPVQHNAEASWIHTEQEKNNNIPPMQYEVIPTETFHKVIRNLHNWKTPGSDHIHNYWYKKFTYIHPYIYKHINSFIKNPEKLPSYVTTGTTYMLPKDQDDMVNPAKYRPITCLQTIYKIITACLSDLIYNHLDQYKLLTEQQKGCRKFSQGCKEQITIDSVILKQVLKTKVDLYTTYIDYKKAFDSVPHSWLFSVLHLYKIHPQLISFLRTTAAQWSTRLQLNSSKGLVVTDPIEIKRGIFQGDALSPLWFCLALNPLSNLLNSIDCGYTLKYRGTNEQTDQNYTLNHLLYMDDIKLYAQNSEDIDSLLDTTQQFSKDIKMEFGIDKCKTNSIKAGKIHHHPYQLETGQTIQPLNEYETYKYLGFQQARQILVKETKIKLTEVFQHRLNSILNTQLNSKNSFKAINTYAIPVLTYSFGVVGWTKSNLKNLQRKINVSLTKHRKHHPRACVQRQTLPRKEGGRGLIDIHNLHNKQITSLRQYFHSKQKDSKLHEAIVLNDNKLTPLNLHDTSTQPNEILTDYSTKIAEWTRKSLHGRHRLDLSQPNVDKYASNEWLVRGELFPETEGFMIAIQDQTIETRNYQRYIIKAPNLPTDICRRCNSSSETIQHITGACKSIVQTDYKYRHDQVAQIIHQKLATKYHLVSSSVPYYKYIPDIILENSTHKLYYDRAILTDRTIHYNRPDIILINKTQKSAYIIDIAIPNTHNLQSTIAEKISKYTELKEEVIRMWRLQKVTIVPIVLSTTGVIPVQLHHSLESLNLPKFTYNALQKSVILNTCRIVRKFLQCEQEITTVNRIPDNHQSNVAADLA

SEQ ID NO: 15439 - protein, 1178 aa, Deilephila porcellus
MRWTREYNEHIISTYYKITKLERDKTAYRKLLHEQFVTKFPHLAHVSEQRVSDQRRVIINNHLISPDRIEEIKHQAALELQITEQEPLFNSTVTLDVEQHTLETANTAEQISETDSLNNIQTNCNIQIEPDNINAYPAEQNNHEIDDVFNKVYEHFKDTDPVNRQFIPKQKSSKKLFKIVNYINTQIIPNKINENTDFLVLQTVLYCSAWTAARMNGSKLNLSKSINFIGSRAERPKPHWQKRLENKILDLRAKIGKLTQFIRGTRSDYLNQQIESILQQYKIHSIHEEPNSKLSHFLDTLKQKLAISSNRLSRYKKCTLRKTQNNDFNSNEKKFYRNLSSLASNQTTQVDNLTPDPKQLRDYWAEIWANPVEHNAEASWIHTEQEKNNNIPTMQYEVIPTETFHKVLRNLHNWKTPGSDHIHNYWYKKFTYIHPYIYKHINSFIKNPEKLPSYVTTGTTYMLPKDQDDMVNPAKYRPITCLQTIYKIITACLSDLIYNHLDQYKLLTEQQKGCRKFSQGCKEQITIDSVILKQVLKTKVDLYTTYIDYKKAFDSVPHSWLFSVLHLYKIHPQLISFLKTTSAQWSTRLQLNSSKGLVVTDPIEIKRGIFQGDALSPLWFCLALNPLSNLLNSIDCGYTLKYRSTNEQTDQNYKLNHLLYMDDIKLYAQNSVDIDLLMDTTQQFSEDIKMEFGIDKCKTNSIKAGKIHQHPYQLETGQTIQPLNEYETYKYLGFQQARQILVKETKIKLTEVFQHRLNSILNTQLNSKNSFKAINTYAIPVLTYSFGLVGWTKSNLKNLQRKINVSLTKHRKHHPRACVQRQTLPRKEGGRGLIDIHNLHNKQITSLRQYFHSKQKDSKLHEAIVLNDNKLTPLNLLDTNTQPNEILTDYSTKIAEWTRKSLHGRHRLDLSQPNVDKYASNEWLVRGELFPETEGFMIAIQDQTIETRNYQRYIIKAPNLPTDICRRCNSSSETIQHITGACKSIVQTDYKYRHDQVAQIIHQKLATKYHLVSSSVPYYKYIPDIILENSTHKLYYDRAILTDRTIHYNRPDIILINKIQKSAYIIDIAIPNTHNLQSTIAEKISKYTELKEEVIRMWRLQKVTIVPIVLSTTGVIPVQLHHSLESLNLPKFTYNALQKSVILNTCRIVRKFLQCDQEITFVNRIPDNHQSNVAADLA

SEQ ID NO: 15440 - protein, 1408 aa, Manduca sexta
MENKRYNLRSLPGGRRGASGADAGCYSSGNVGDAGLNRRVLIDKYITAEVPLPEGRRGASSAGAGRGSNANTGREGLRNRAFIRKPSNLTTYTGSDPSFIPSSTPSSASSQMSGGVAQETLTVDNPAPTTTTTMTRRKWSSEMNEFILRTYLYLTSMGTDTKTYLEPLHSKFQEKYPHMTVSRQRLGDQRRAIVRNNLLPQKTIDSIYREVKEDLEKTHTQIQQTQQIQSHLYIQGTQQLGQRMRWTTEYNETIIAAYYKITKLETDKTSYRTLLHQNFITAFPHLAHISEQRVSDQRRVIINNRLLSPERIAAIKEQVAQELQINDLELQTNTPEQNTPQQTPLSTTDDLAVSESDFLSNIQPNCLTQTESILVTIQEQDERNPEIDDTFCHAFECFIDTDPTNRPFIPKQKSSKKFLQIVNYINNKIIPQKVNNDTDYKHLQTVLYCSAWTAAKVNGSKLSPANCNNPDGNRILMVSRPKPHWQKRLERKIADLRAKISRLTHYMNGIRSEYLNQQVQNILTQYRIHTIHEEPNSQLSHFLDTLKQKLTIASNRLNRYKQCTLRKTQNNNFNNNERKFYRTLGLVTNSQTTHSTTAARNLLTPDPIQLQEYWANIWSNPVEHNADADWIKIETDKHNYTPPMQYERIPLRTYQNVINRLHNWKTTGSDHIHNFWYKKFTHIQPYIYNHINRFIESPEEMPSYITAGNTYMLPKDQNDTANPAKYRPITCLQTIYKIITACLSDLIYNHLSNHKILTEQQKGCRKFSQGCKEQVTIDSVIVNRAQKAKEDLYTTYIDYKKAFDSVPHSWLFTVLRIYKIHPQLITFLRTTAAHWSTRLQLNLPNTSLVTDPIKIKRGIFQGDALSPLWFCLALNPLSNMLNSIDTGYALDYKETDGQTNFTFRLNHLLYMDDIKLYAQSPSEIDKLIDQTQKFSSDIHMEFGIDKCRNNSIKGGHFYDYSYQLPTGQTILSLTEYETYKYLGFHQARQILQKETKTKLLETFKYRLNSVLKTHLNSKHIFKAINTYAIPVLTYSFGIIRWSKSDLKNLQRVINVTLTKHRKHHPRACVQRQTVPRREGGRGLIDINNLHSKQITSLRHYFYNKQTDSDLHTAIIFNDTKFTPLNLHNKCTQPNETQVDNTTKIREWTRKALHGRHRFDLSQPNVDKDASNEWLVRGELFPETEGFMIAIQDQVIETRNYQKYIIKATNLPTDMCRRCNSSSETIQHITGACKSIVQTDYKYRHDQVAQIIHQTLALKYKLIASSTPYYKYSPAVILENLTHKLYYDRAILTDRTIHYNRPDIILIDKIQKSAYIIDIAIPNTHNIQSTIAEKLSKYIELKDEVIRMWRLQKAVIVPIVLSTTGVIPTQLHNSLQTLHLHKFIYITLQKAVILNTCRIVRKFLQIDHD

SEQ ID NO: 15441 - protein, 902 aa, Manduca sexta
MNGIRSDYLNQQVQNILTQYRIHTIHEEPNSQLSHFLDTLKQKLTIACNRLNRYKQCTLRKTQNNDFNNNERKFYRTLGPVTNTQTTQTTAAARNLLTPDPIQLQQYWANIWSNPVEHNAEADWIKIEQDKHNCTPPMLYERIPLRTYQNVINRLHNWKTTGSDHIHNFWYKKFTHIQPYIYNYINRFIESPEEMPSYITAGNTYMLPKDQNDTANPAKYRPITCLQTIYKIITACLSDLIYTHLANHNILTEQQKGCRKFSQGCKEQVTIDSVIVNRAHKYKEDLYTTYIDYKKAFDSVPHSWLFSVLRIYKIHPQLITFLRTTAAHWSTRLQLKIPDGSLVTDPIKIKRGIFQGDALSPLWFCLALNPLSNMLNSIETGYTLDYKETDGQANLTFKLNHLLYMDDIKLYAQSSADIDELIEQTQKFSSDIHMEFGIDKCRNNSIKAGHFYDYSYQMQTGQTILSLTEYEAYKYLGFHQARQILQKETKTKLLEAFRYRLNSVLKTHLNSKHIFKAINTYAIPVLTYSFGIIRWSKSDLKNLQRVINVALTKHRKHHPRACVQRQTVPRREGGRGLIDINNLHSKQITTLRYYFHNKQIDSQLHSAIVFNDTKFTPLNLRSKCTQPNETQVDNPTKIREWTRKALHGRHRLDLNQPNVDKDASNEWLVRGELFPETEGFMIAIQDQVIETRNYQKYIIKATNLPTDMCRRCNSSSETIQHITGACKSIVQTDYKYRHDQVAHIIHQTLALKYKLIDSSTPYYKYSPAIISENSTHKLYFDRAILTDRTIHYNRPDIILIDKIQKSAYIIDIAIPNTHNIQSTIAEKLSKYIELKDEVTRMWRLQKAVIVPIVLSTTGVIPTQLHNSLQTLHLPKFLYINLQKAVILNTCRIVRKFLQLDHD

SEQ ID NO: 15442 - protein, 1427 aa, Deilephila porcellus
MEKMEPKRYNLRSLPGGRRGAPGADAGCYSSGNVGDMGLSRRVPVDKYTTADEPLPRGRWGASSAGAGCSSSANTGGRSSNRRALVHKYVTAEAQNDDNDIESSPSLFSEVTISDQSFRPTSPTPSSVSSVTSSGVALETISVSNPAPTTTNSRTRRKWSSDMNKFILRTYLYLTSMETDTKSYLEPLHTKFLEKFPNMSVSRQRLGDQRRAILRSKLLSQETIDTIYKEVRDDLENTHNQIQNQSSQNLSQSHIQTTKQSGQRMRWTKEHNEHIIRTYFKVTKLDSDKTSYRKFLHEQFLIAFPHLTHISEQRISDQRRVIINNSLISPNRIAEIKDQVAQELQVCNHEPQVNSTVEVGQDSLELASNTLNTESNFLNDIDVNSVIRGHPNNIIDQPGEERNQKTYETFHRAYDDFKDTEPTNRPFIPKQKPSKKLSEVINYINTFILPQQVHENTEFRDLQTVLYCSAWSAAKINGSKLDITNSATLSSNRTERDKPRWQKRLERRIADLRSKIGKLTHYMKGTRSKYLNQQVENICRQYKIHSIHEQPNSQLTHFLDTLKQKLTIASNRLSRYTKCTLRKKQNSLFHNNEKKFYRNLGSITNNQIAKPHTEVLTPDPSDLREYWANIWSNPANHNSETYWIHTEREKHVNTPAMQYEGIPIEIFHTVIKNLHNWKAPGSDHIHNYWYMKFTYIHPYIYNHINNFIKNPETMPPYITSGITYMLPKDQNDLTNPAKYRPITCLQTIYKIITACLSELIYNHLDEHKLLSEQQKGCRKFSQGCKEQITIDTVILKQVQKNKSDLFTTYIDYKKAFDLVPHSWLLLVLQIYKINPKLISFLEKTSTHWSTRLQMNSSNGTLVTDPIKIKRGIFQGDALSPLWFCLALNPLSNLLNAIDRGYVLNYKEVDGQTDLRFTLNHLLYMDDIKLYAQSPVDLDLLIDTTEQFSKDINMEFGIDKCKTNSIRAGQNHNHPYQLQTGQIIQPLNENETYKYLGFHQARQILVKETNTKLTQIFKHRINSILNTQLNSKHSFKAINTYAVPVLTYSFGLIGWSKSELKNLQRNVNVALTKHRKHHPRACVQRQTLPRKEGGRGLIDISNLHSKQITTLRSYFHSKQNDSPLHQAIVFNDNKFTPLNLRDITLQPNETQTENSLKIREWTLKSLHGRHRLDLSQPNVDKDASNEWLVRGELFPETEGFMIAIQDQTIETRNYQKYIIKNRNLISDTCRRCNSSSETIQHITGACKSIVQTDYKYRHDQVAKIIHQKLALKYQLISSSTPYYKYSPEIILENSSHKLYFDRAILTDRTIHFNRPDIILVNKTQKSAHIIDIAVPNTHNLQSTIAEKMSKYIELKEEVTRMWRLQKVTIVPIVLSTTGVIPIQLHNSLLTLNLPKFTYLALQKAVILNTCRIVRKFLQTDQETLPTPM

SEQ ID NO: 15443 - protein, 1409 aa, Hemaris fuciformis
MERKRYNLRPLPGGRRGASGANAGCYSLDDVGDAGLTRRVPIDKNTTADMPLPGGRRGASGAGAGCSSNENTGDESSNRQALVSKYVTAGSVGEDNTTDSNSSLFSAETLSDPLFLPKSPTPTSVSSITLEGVAMETESVKSPEPTTNIPKTRSKWSLDMNEFILRTYLYLTSMETDTKSYLDPLHTKFMEKFPLMTVSRQRLGDQRRAIMRNKLLPQKTIDAIYKEVREDLHKTHTHIQNQSQLHKQTGKRMRWSKEHNEAIIRIYYKVTNLETDKTGYRKLLHEHFIATFPHLEHINEQRLSDQRRVIINNSLITPDRVAEIKRQVAQEFNYYSHETNTDNIVNLNKEPEIPQLTANISSPDGIIVQDLPPTQQLHEHTDEERNQEIDNTFHQAYEHFSATDPTDRPFIPKQRCSRKLSKTIFYINSHIMPQKIRENTEFLELQTVLYCAAWTSAKINGTRLELSNLPKKTSSRSVESRPRWQKRLERKILDLRSKIAKLTQYIRGVRSNYLNKQVEIICEKYKIHTTHEEPNSQLPHFLDTLKQKLAITSNRLSRYKRCTFRKTQNNNFYNNEKKFYRTLNSSTNNHTAKMTPDISQPDPKQLENYWADIWSKPVQHNSQAEWLRTEQEKHNNIPPMHFEVIPIQIFHNVIKNLHNWKSPGSDHIHNYWYKKFTYIHPYIYNHINSFIKNPDTMPSYITNGVTYMLSKDEHDTSNPAKYRPITCLQTIYKVITACISELIYSHIDEHKLLTEEQKGCRKFSQGCKEQITIDSIILNRVRKMKADLYTTYIDYKKAYDSVPHSWLFSVLDMYKIHPLLISFLGTTSSNWSTRLQLNTSEGLLVTDSIKIKRGIFQGDALSPLWFCLALNPLSNLLNSLETGYLLQYKESNDHTEESFKLNHLLYMDDIKLYAQNPADLDLLLDTTEQFSNDIRMDFGIDKCRTNSIKLGLSHEHPYTLQTGQIIQPLNEHDTYKYLGFHQARQILVKEAKTKLTKVFKHRVNSLLNTQLNSKHTFKAINTYAIPVLTYSFGIIGWNKSDLKNLQRNINIALTKHRKHHPRACVQRQTLPRNEGGRGLIDIQNLHNKQITSLRHYFHHKQKESRLHKAIVFNDIKLTPLNLHDFNIQRNEEQLDDRTKIGEWTQKSLHGRHRLDLSQPNVDKDASNEWLVRGELFPETEGFMIAIQDQIIETRNYQKYIIKAPNLVTDLCRRCNSSTETIQHITGACKSIVQTDYKYRHDQVAQIIHQMLAVKYNLIQSSKPYYKYTPEVILENSTHKLYFDRAVLTDRTIHYNRPDIIIVNKIDKTAHIIDIAIPNTHNLQSTIAEKLSKYVELKEEVTRIWRLQKVSIVPIVLSTTGVIPKQLHHSLQILNLPKFTYIALQKAVILNTCRLVRKFLQTNQDTFSVG

SEQ ID NO: 15444 - protein, 1408 aa, Hemaris fuciformis
MERKRYNLRPLPGGRRGASGANAGCYSLDDVGDAGLTRRVPIDKNTTADMPLPGGRRGASGAGAGCSSNENTGDESSNRQALVSKYVTAGSVGEDNTTDSNSSLFSAETLSDPLFLPKSPTPTSVSSITLEGVAMETESVKSPEPTTNIPKTRRKWSLDMNEFILRTYLYLTSMETDTKSYLDPLHTKFMEKFPLMTVSRQRLGDQRRAIMRNKLLPQKTIDAIYKEVREDLHKTHTHIQNQSQLHKQTGKRMRWSKEHNEAIIRIYYKVTNLETDKTGYRKLLHEHFIATFPHLEHINEQRLSDQRRVIINNSLITPDRVAEIKRQVAQEFNYYSHETNTDNIVNLNKEPEIPQLTANISPDGIIVQDLPPTQQLHEHTDEERNQEIDNTFHQAYEHFSATDPTDRPFIPKQRCSRKLSKTIFYINSHIMPQKIRENTEFLELQTVLYCAAWTSAKINGTRLELSNLPKKTSSRSVESRPRWQKRLERKILDLRSKIAKLTQYIRGVRSNYLNKQVEIICEKYKIHTTHEEPNSQLPHFLDTLKQKLVITSNRLSRYKRCTFRKTQNNNFYNNEKKFYRTLNSSTNNHTAKMTPDISQPDPKQLENYWADIWSKPVQHNSQAEWLRTEQEKHNNIPPMHFEVIPIQIFHNVIKNLHNWKSPGSDHIHNYWYKKFTYIHPYIYNHINSFIKNPDTMPSYITNGVTYMLSKDEHDTSNPAKYRPITCLQTIYKVITACISELIYSHIDEHKLLTEEQKGCRKFSQGCKEQITIDSIILNRVRKMKADLYTAYIDYKKAYDSVPHSWLFSVLDMYKIHPLLISFLGTTSSNWSTRLQLNTSEGLLVTDSIKIKRGIFQGDALSPLWFCLALNPLSNLLNSLETGYLLQYKESNDHTEESFKLNHLLYMDDIKLYAQNPADLDLLLDTTEQFSNDIRMDFGIDKCRTNSIKLGLSHEHPYTLQTGQIIQPLNEHDTYKYLGFHQARQILVKEAKTKLTKVFKHRVNSLLNTQLNSKHTFKAINTYAIPVLTYSFGIIGWNKSDLKNLQRNINIALTKHRKHHPRACVQRQTLPRNEGGRGLIDIQNLHNKQITSLRHYFHHKQKESRLHKAIVFNDIKLTPLNLHDFNIQRNEEQLDDRTKIGEWTQKSLHGRHRLDLSQPNVDKDASNEWLVRGELFPETEGFMIAIQDQIIETRNYQKYIIKAPNLVTDLCRRCNSSTETIQHITGACKSIVQTDYKYRHDQVAQIIHQMLAVKYNLIQSSKPYYKYTPEVILENSTHKLYFDRAVLTDRTIHYNRPDIIIVNKIDKTAHIIDIAIPNTHNLQSTIAEKLSKYVELKEEVTRIWRLQKVSIVPIVLSTTGVIPKQLHHSLQILNLPKFTYIALQKAVILNTCRLVRKFLQTNQDTFSVG

SEQ ID NO: 15445 - protein, 789 aa, Blastobasis adustella
METKVSDGDLKGAARLLFSSDVLSPDTPATLAALRSKHPPAPNVLPAIDPPTAPEACLRVTVKDILSAIGSFKTGSAAGLDGISPQHLKDLTSNFIGDSGHRLSQSITHLVNFMLAGKVNSLITPILYGANLIALSKKDGGVRPIAVGSTFRRLVSKVCVRHSYKILKPIFEPIQLGFGTKGGCEAAVHALRTFLNGPDHSDVIVKIDVKNAFNSVNRDTLLKEIKTNLPEIYNYLHQCYSSTSKLMYKNNEISSAVGCQQGDPLGPAIFSLAINPVIQSLVSKFNVWYLDDGTLGGSADCVLADLANVIQKFQAIGLELNLDKCELFISDNIPSGDVITITNNFNILAPNIKIISKTSLSLLGSPIFDDSITPLVQNSIFKFNSYSDRLIKINTHSAIFILKLCLFVPKFTYLVRCCPLWKFKNLTDSIDNLVKSQLESILNVNLSEQAWTQASLPIRFGGLGVRKISNVSLPAFLSSIYSTSNLIEKILNPSVPNFEVACLGEATNVWLTAVPSPNLPLCPNSQRSWDENQSKFIRSTLFSNCTDSTRARLEAVSRWESGQWLQAYPSTNTGTFLDNSTFRLAVALRLGAEVCTPHKCPCGVDVDHLGHHGLSCQKSAGRFSRHAALNDILRRSLATVNVPAILEPNGIARDDGKRPDGMSLIPWKMGRALVWDATCVDTLAPSHLPFTSKKVAAAAETAERQKIVKYRGIGTQYNFVAFGVETLGPWGPGALALYREIAKKLVDTTGDRRAGSYLAQRISIAIQRGNAASILGTLPHGPNFLHILS

SEQ ID NO: 15446 - protein, 961 aa, Blastobasis lacticolella
MQASPSLDRASLEHACDLCGRSFKTIRGLHIHHSKLHRESSSIPLSIPQSALLAPTNSQQDSTHLADSSPLYIVLSQLKNSTPLVKRIPRGARISVANSLSEIISKCISSNSFDDWKKLLTFSFVTLHAKSDNSGTSLTQKIKNNCSFTNLNHSSACNSKRNNPNSFNVYRKVETKVSDGDLKSAARLLFSSDVLSPDTPATLAALRSKHPPAPNVLPAIDPPTAPEACLRVTEKDILSAIGSFKTGSAAGLDGISPQHLKDLTSNSLGDLGLRLSQSITTLVNFMLAGKVNPLITPILYGANLIALSKKDGGVRPIAVGSTFRRLVSKVCVRHSFKKLKPIFEPIQLGFGTKGGCEAAVHALRTFLNGPDHSDVIVKIDVKNAFNSVNRETLLKEIKTNLPEIYNYLHQCYSSSTILMHKNNEISSAIGCQQGDPLGPAIFSLAINPVVQSLVSKFNVWYLDDGTLGGSADSVLADLANVIQKFQTIGLELNLDKCELFISDNIPSRDIITITNNFNILAPNIKIISKTSLSLLGSPIFDDSITPLVQHSISKFNSYSNRLTKINTHSAIFILKFCLFLPKFTYLIRCCPLWKFKNLTDSIDNLVKCQLESILNVNLSEQSWTQASLPIRFGGLGIRKISNVSLPAFLSSIHSTSNLIERILNPSVPNFEVAYLGEATNVWLTAVPSPCSPLCPKSQKSWDDIQSKFIRSTLFGNCTDSTRARLEAVSRWESGQWLQAYPSANTGTFLDNSTFRLAVALRVGAEVCTPHKCPCGVDVDHLGHHGLSCQKSAGRFSRHAALNDILRRSLATVNVPAILEPNGIARDDGKRPDGMSLIPWKMGRALVWDATCVDTLAPSHLPFTSKKVAAAAETAERQKIIKYRGIGTQYNFVAFGVETLGPWGPGALSLYREITKKLVDTTGDRRAGSYLAQRISIAIQRGNAASILGTLPHGPNFLHILS

SEQ ID NO: 15447 - protein, 961 aa, Blastobasis lacticolella
MQASPSLDRASLEHACDLCGRSFKSIRGLHIHHSKLHRESSSIPLSIPQSALLAPTNSQQDSTHLADSSPLYIVLSQLKNSTPLVKRIPRGARISVANSLSEIISKCISSNSFDDWKKLLTFSFVTLHAKSDNSGTSLTQKIKNNCSFTNLNHSSACNSKRNNPNSFNVYRKVETKVSDGDLKSAARLLFSSDVLSPDTPATLAALRSKHPPAPNVLPAIDPPTAPEACLRVTEKDILSAIGSFKTGSAAGLDGISPQHLKDLTSNSIGDLGLRLSQSITTLVNFMLAGKVNPLITPILYGANLIALSKKDGGVRPIAVGSTFRRLVSKVCVRHSFKKLKPIFEPIQLGFGTKGGCEAAVHALRTFLNGPDHSDVIVKIDVKNAFNSVNRETLLKEIKTNLPEIYNYLHQCYSSSTILMHKNNEISSAIGCQQGDPLGPAIFSLAINPVVQSLVSKFNVWYLDDGTLGGSADSVLADLANVIQKFQTIGLELNLDKCELFISDNIPSRDIITITNNFNILAPNIKIISKTSLSLLGSPIFDDSITPLVQHSISKFNSYSNRLTKINTHSAIFILKFCLFLPKFTYLIRCCPLWKFKNLTDSIDNLVKCQLESILNVNLSEQSWTQASLPIRFGGLGIRKISNVSLPAFLSSIHSTSNLIERILNPSVPNFEVAYLGEATNVWLTAVPSPCSPLCPKSQKSWDDIQSKFIRSTLFGNCTDSTRARLEAVSRWESGQWLQAYPSANTGTFLDNSTFRLAVALRLGAEVCTPHKCPCGVDVDHLGHHGLSCQKSAGRFSRHAALNDILRRSLATVNVPAILEPNGIARDDGKRPDGMSLIPWKMGRALVWDATCVDTLAPSHLPFTSKKVAAAAETAERQKIMKYRGIGTQYNFVAFGVETLGPWGPGALSLYREITKKLVDTTGDRRAGSYLAQRISIAIQRGNAASILGTLPHGPNFLHILS

SEQ ID NO: 15448 - protein, 927 aa, Blastobasis adustella
MQASSSLDSASLEHACDLCGRSFKTIRGLHIHHSKLHRESSSVPPSISQSALLAPTNSQHVPTQLADSSPLHIVLSQLKNTTPLVKRIPRGARISVANSLSDIISKCISSKCSFTNSNHSSSVNSNRNNPNSFNVYRKVETKVSDGDLKGAARLLFSSDVLSPDTPATLAALRSKHPPAPNVLPAIDPPTAPEACLRVTEKDILSAIGSFKTGSAAGLDGISPQHLKDLTSNFIGDSGHRLSQSITHLVNFMLAGKVNSLITPILYGANLIAFSKKDGGVRPIAVGSTFRRLVSKVCVRHSYKILKPIFEPIQLGFGTKGGCEAAVHALRTFLNGPDHSDVIVKIDVKNAFNSVNRDTLLKEIKTNLPEIYNYLHQCYSSTSKLMHKNNEISSAIGCQQGDPLGPAIISLAINPVIQSLVSKFNVWYLDDGTLGGSANSVLADLANVIQKFQAIGLELNLDKCELFISENVPSGDVITITNNFNILAPNIKIISKTSLSLLGSPIFDDSITPLVQHSISKFNSYSDRLIKINTHSAIFILKFCLFVPKFTYLVRCCPLWKFKNFTDSVDNLVKSQLESILNVNLSEQAWTQASLPIRFGGLGIRKISDVSLPAFLSSIHSTSKLIEKILNPSVPNFEVAWLGEATNVWLTAVPSPNLPLCPNSQKSWDKIQSKFIRSTLFSNCTDSIRARLEAVSRWESGQWLQAYPSANTGTFLDNSTFRLAVALRLGAEVCTPHKCPCGVDVDHLGHHGLSCQKSAGRLSRYAALNDILRRSLATVNVPAILEPNGIARDDGKRPDGMSLIPWKMGRALVWDATCVDTLAPSHLPFTSKKVAAAAETAERQKMVKYRGIGTQYNFVAFGVETLGPWGPGALALYREIAMKLVDTTGDRRARSYLAQRISIAIQRGNAASILGTLPHGPNFLHILS

SEQ ID NO: 15449 - protein, 678 aa, Blastobasis adustella
MLAGKVNSLITPILYGANLIALSKKDGGVRPIAVGSTFRRLVSKVCVRHSYKILKPIFEPIQLGFGTKGGCEAAVHALRTFLNGPDHSDVIVKIDVKNAFNSVNRDTLLIEIKTNLPEMYNYLHQCYSSTSKLMHKNNEISSAIGCQQGDPLGPAIFSLAINPVIQSLVSKFNVWYLDDGTLGGSADSVLADLANVIQKFQAIGLELNLDKCELFISDNVPSGDVITITNNFNILASNIKIISKTSLSLLGSPIFDDSITPLVQHSISKFNSYSDRLIKINTHSAIFILKFCLFVPKFTYLVRCCPLWKFKNSTDSIDNLVKSQLESILNVNLSEQAWAQASLPIRFGGLGIRKISNVSLPAFLSSIHSTSNLIEKILNPSVPNFEVACLGEATNVWLTAIPSPNLPLCPNSMPQQKSWDEIQSKFIRSTLFSNCTESTRARLEAVSRWESGQWLQAYPSANTGTFLDNSTFRLAVALRLGAEVCTPHKCPCGVDVDHLGHHGLSCQKSAGRFSRHAALNDILRRSLATVNVPAILEPNGIARDDDKRPDGMSLIPWKMGRALVWDATCVDTLAPSHLPFTSKKVAAAAETAERQKIVKYRGIGTQYNFVAFGVETLGPRGPGALALYREIAKKLVDTTGDRRAGSYLAQRISIAIQRGNAASLGTLPHGPNFLHIFN

SEQ ID NO: 15450 - protein, 1387 aa, Blastobasis adustella
MSLASRGNNMITRSKTKQNSIQAREPIKVDEVVANKSGASDVGEKAVGDTVDGTESLFSSIPSTRPSYMTRPISSISSLTPEDVVQDVLHEDVNTAPTKGNPRKRFRWTSEMNEFLVRTYHQLTSLETDTKNYLEPLHTKFIERFPDMDVSRQRVGDQRRAIERKKMVPQHTIEKIRKEVTEELQKLQSIRSQLQQTDTQQASNSQSLSTLNSASQVPTTQNRQTRMRWTNEQNESIIRSYFLITHLEKNRTAYRKPLHQHFIAKFPSLANLSEQRIADQRRTIVHNKYISEQRMKEIKQEVAEELLLSEQVDSGGLTPDIHIPDNNVTLINSTQPDTEIVHTERSTPANETQANEPMHLEINKYFTETLAHFINTDATNRPYIPKQKSSNKLSKVIHYLNNVILFKNVNKDTDFHTLQTIIYCCAWTAAKVNGARLSMATRESTRKPLRQQKPNWQKRLERKLDALRAKIGRLTHYIKGNRSRNLSNHVEKIKKQYQIHSSHEGTNTDLTQFLDTLKQKLAVVTGRLNRYKACTIRKKQNEKFLNSEKQFYRDIKTASSNTQERNLNNSDSDNGPDMDSLHKFWANIWEKPIVHNTEAGWIEQETLAMSKVQDMEFEFIPIETFKDVLNNLHNWKAPGSDHIHSFWYKKLTSIHPHLHNYINEFLLHPETIPTFINAGTTYMLLKDPEDPKNPAKYRPITCLQTLYKIMTSCISKLIYSHLQNHNILAEQQKGCRKWSQGCKEQLIIDSVILKQVLKTKADLHTMYIDYQKAYDSVPHSWLVKVLDVYKIHPKIVQFLQTTMQNWTTRLRLNTPAGTIETAQIKVQRGIFQGDALSPLWFCLALNPLSNLLNNTGLGYPLKYKSNPNDRHTDETQLNHLLYMDDIQLYADKETELNQLAKLTEVFSQDIKMEFGIDKCKTSSMKSGKIYKHTYTLEDGEKIDPLDENSGYKYLGYVQSQQIHHKETKNKLKVQFKHRLNTLLKTELNSRNTIKAINTFAIPILTYSFGILNWTKTEIKALQRTTNTSMTKFRKHHPRSCIQRLTLPRKEGGRGIIDIANLHNKQITTLRSYFHQKCNSSPIHKAIVQNDSHSTPLNLIDQSTQSTDVLTDQKTKMAAWSAKSLHGRHYQDLSQSNVDKIASNAWLNRGELFPETEGFMVAIQDQVIETRNYQKFIMRNRSTDTCRKCNSLPETIQHITGACRAIVQTDYKHRHDQVANIIHQKLALKYNLITQPAKPYYKYIPDNVLESQTYKMYFDRAILTDKTIHFNRPDITVVDKTNKTAILIDIAIPNTHNVQSTIAEKLTKYTDLRDEITRIWKLQSVIIVPIVLSTTGVVPTQLHTSIKTLSLPPSSFVLMQKAVILNTCRIVRKFLQAPTKDHHETHLA

SEQ ID NO: 15451 - protein, 810 aa, Blastobasis adustella
MDSLHKFWANIWEKPIVHNTEAGWIEQETLAMSKVQDMEFEFIPIETFKDVLNNLHNWKAPGSDHIHSFWYKKLTSIHPHLHNYINEFLLHPETIPTFINAGTTYMLLKDPEDPKNPAKYRPITCLQTLYKIMTSCISKLIYSHLQNHNILAEQQKSCRKWSQGCKEQLIIDSVILKLVLKTKADLHTMYIDYQKAYDSVPHSWLVKVLDVYKIHPKIVQFLQTTMQNWTTRLRLNTPAGTIETDQIKVQRGIFQGDALSPLWFCLALNPLSNLLNNTGLGYQLKFKSNPNDRHTDATQLNHLLYMDDIKLYADKETELNQLAKLTEVFSQDIKKEFGIDKCKTSSMKSGKIYKHTYTLEDGEKIDPLDENSGYKYLGYVQSQQIHHRETKNKLKVQFKHRLNTILKTELNSRNTIKAINTFAIPILTYSFGILNWTKTEIKALQRTTNTSMTKFRKHHPRSCIQRLTLPRKEGGRGIIDIANLHNKQITTLRSYFHQKCNSSPIHKAIVQNDSHSTPLNLIDQSTQSTEVLTDQKTKMAAWSAKSLHGRHYQDLSQSNVDKIASNAWLNRGELFPETEGFMVAIQDQVIETRNYQKFIMRNRSTDTCGKCNSLPETIQHITGACRAIVQTDYKHRHDQVANIIHQKLALKYNLITQPAKPYYKYIPDNVLESQTYKMYFDRAILTDKTIHFNRPDITVVDKTNKTAILIDIAIPNTHNVQSTIAEKLTKYTDLRDEITRIWKLQSVIIVPIVLSTTGVVPTQLHTSIKTLSLPPSSFVLMQKAVILNTCRIVRKFLQAPTKDHHETHLA

SEQ ID NO: 15452 - protein, 1382 aa, Blastobasis adustella
MSLASRGNNMITRSKTKQNSIQAREPIKVDEVVANKSGASDVGEEAVGDTVDGTESLFSSIPSTRPSYMTRPISSISSLTPEDVVQDVLHEDVNTAPTKGNPRKRFRWTSEMNEFLVRTYHQLTSLETDTKNYLEPLHTKFIERFPDMDVSRQRVGDQRRAIERKKMVPQHTIEKIRKEVTEELKKLQSIRSQLQQTDTQQASNSQSLSTLNSASQVPTTQNRQTRMRWTNEQNESIIRSYFLITHLETNRTAYRKPLHQHFIAKFPSLANLSEQRIADQRRTIVHNKYISEQRMKEIKQEVAEELLLSEQVDSGGLIPDNNVTLINSTQPDTEIVHTEKSTPANETQANEPMHLEINKYFTETLAHFINTDATNRPYIPKQKSSKKLSKVIHYLNNVILFKNVNKDTDFHTLQTIIYCCAWTAAKVNGARLSMATSESTRKPLRQQKPNWQKRLERKLDALRAKIGRLTHYIKGNRSRNLSNHVEKIKKQYQIHSSHEGTNTDLTQFLDTLKQKLAVVTGRLNRYKACTIRKKQNEKFLNSEKQFYRDIKTASSNTQERNLNNSDSDNGPDMDSLHKFWANIWEKPIVHNTEAGWIEQETLAMSKVQDMEFEFIPIETFKDVLNNLHNWKAPGSDHIHSFWYKKLTSIHPHLHNYINEFLLHPETIPTFINAGTTYMLLKDPEDPKNPAKYRPITCLQTLYKIMTSCISKLIYSHLQNHNILAEQQKGCRKWSQGCKEQLIIDSVILKQVLKTKADLHTMYIDYQKAYDSVPHSWLVKVLDVYKIHPKIVQFLQTTMQNWTTRLRLNTPAGTIETAQIKVQRGIFQGDALSPLWFCLALNPLSNLLNNTGLGYPLKYKSNPNDRHTDETQLNHLLYMDDIKLYADKETELNQLAKLTEVFSQDIKMEFGIDKCKTSSMKSGKIYKHTYTLEDGEKIDPLDENSGYKYLGYVQSQQIHHKETKNKLKVLFKHRLNTILKTELNSRNTIKAINTFAIPILTYSFGILNWTKTEIKALQRTTNTSMTKFRKHHPRSCIQRLTLPRKEGGRGIIDIANLHNKQIITLRSYFHQKCNSSPIHKAIVQNDSHSTPLNLIDQSTQSTDVLTDQKTKMAAWSAKSLHGRHYQDLSQSNVDKIASNAWLNRGELFPETEGFMVAIQDQVIETRNYQKFIMRNRSTDTCRKCNSLPETIQHITGACRAIVQTDYKHRHDQVANIIHQKLALKYNLITQPAKPYYKYIPDNVLESQTYKMYFDRAILTDKTIHFNRPDITVVDKTNKTAILIDIAIPNTHNVQSTIAEKLTKYTDLRDEITRIWKLQSVIIVPIVLSTTGVVPTQLHTSIKTLSLPPSSFVLMQKAVILNTCRIVRKFLQAPTKDHHETHLA

SEQ ID NO: 15453 - protein, 1380 aa, Blastobasis lacticolella
MSLAPRGNKMITRSTTKKKNSIQAREPTKEDEVAANKAGTSNAEAEATGDTDGTESLFSSIPSTRASYMTRPVSSMSSFTPEDVVQDGLHIDIDTAPAKGNPPKRFKWTSVMNEFLIRTYLQVTSLETDNRNYLEPLHTKFIEKFPNMTVSRQRIGDQRRAIVRKKMLPQTTMDKIHKDVEEELQNLKFNIETQSQTSHTESHDNIRPQIQCPASRTATQNIKTRMRWSNEQNETIIRSYFMITCLETNRTAYRKPLHQQFITKYPALDHVSEQRIADQRRTIIQNKYISEQRLNEIKQEVAEALSLVAQIVSEVNDTPDTQIPDNDLQPLNIIETNTDTNHSHTQLPQTQAKIQKKTEIHETFEEAFTHFIDINPTNRPYIPKQKTSRKFTSIVTYLNEEILPKYINKDKDFHTLQTTIYCGAWTAAKINGAKLSMLPRESDRPIHRHQTPNWQKRLETKLEDLRTKIGRSTHYIKGNRDRKLSKHIDKIKEQYQVHSSHEGTNIHLPQFLDTLKQKLAVITGRLQRYKACTIRKKQNQKFLNNEKQFYRDIKTASTNTQERNPNSSNCNNQPDPESLHRFWANIWENPTEHNTEAEWINKESLTMSNLQDMEFDHIPIDTFKEVIHNLHNWKAPGTDHIHSYWYKKFTSIHPYLHNYINDFMLHPESIPQYITAGTTYMLSKDPQDPKNPAKYRPITCLQTFYKIISCCISKLIYKHLENYNILAEQQKGCRNLSQGCKEQLIIDSVVLKQVIKTKSDLHTMYIDYQKAYDSVPHSWLIKVLELYKIHPKIVIFLQTTMQNWTTRLKLSTPTDTIETNQIKIQRGIFQGDALSPLWFCLALNPLSNLLNNTDIGYRLKYIPPTHNDTQTHAEETQLNHLLYMDDIKLYASNETDLNKLANLTEVFSRDIKMQFGIDKCKINSMKAGKVYKHSYTLESGEIIDPLDEKSGYKYLGYQQSQQIHYRETKNKLKLQFKHRLNTILKTQLNSRNTIKAINTFAIPILTYSFGILNWTKSDIKAFQRTVNTTLTKFRKHHPRSCLQRLTLPRKEGGRGIIDIANLHNKQIATLRSYFHQKSNLSIIHKAIEQNDLHFTPLNLVDRSTQNNVAITDHKTKIADWSAKSLHGRHRQDLSLPNVDKMASNAWLNRGELFPETEGFMVAIQDQVIETRNYQKYIMKNRPTDICSKCNKAPETIQHITGACSAIVQTDYKHRHDQVANIIHQKLALQYSLISQPAKPYYKYIADSVLENQTHKMYYDRAILTDKTTHFNRPDITVVDKINKTAFLIDIAIPNTHNLQSTIAEKLSKYTDLKDEITRIWKLKTVTIVPVVLSSTGVIPKQLHTSIKTLSLSSSSYVLMQKAVILNTCRIVRKVLQATVD

SEQ ID NO: 15454 - protein, 1312 aa, Paramimus stigma
MKSSEKKCRYNLRSLPGGRRGASGAGTGCHSMRTAGDAELSRRTRVSQNTTAGHRELSRRASDVEATADSSRDTETLFSSIPSTRRSYMTRSRTAASCSTLEDVVQDPIQEDIDIAPTESEPPKRMKWTPEMNEFILRTYLYITSLGTDTKNYLETLHIKFTEEYPNINVSRQRIGDQRRAIERLKMLPQSTIDSIYAEVNSNLQRLEADIQMQSNTTTQPTQSRSTNSNSQTRMSWSTQHNEEIIRSYMYITQLETNKTAYRRPLHRQFINKFPSLSHLSEQRIADQRRIIIKNNYISKQRLNTIREEVATELTINRQTNEYVELDSNFNNRNKETRNQNQIQPSTISTNDIHLLHTTETTHNVCINDIENLYLEAFNNFKNSDPTCRPFIPRQKPSRKLFTIIAHLNKEILPNIINENTDFNTVQTVMYCAAWAAAKANGSKVLLTPSNKTSKFRQDKKPNWQKRLERKIRDLRIKIGRLTQYLNGNRSRKIIREVNKIKLNYRIHSTHEETNTQIPQFLDTLKQKLIVISSRLNRYIACTQRKTQNLQFMNNEKQFYRNIKITSTNIQNKNQNCSSSNDSGPDMESLRTFWASIWEEPVEHNVNAEWIPTEIASSNKIQDMEFQHISVETFQKVVNNLQNWKTPGSDNIHSFWYKKLTSIHPCLLNHINNFLLRPHIIPTYVTVGTTYMLPKDCQDLKNPEKYRPITCLQTLYKIITSCISEIIYNHIQRNNILAEQQKGCKKFSQGCKEQLIIDSVILNRVNKAKSNLYSMYIDYKKAYDSVPHSWLIKVLDIYKIHPKITHFLKIVMQRWETRLTINTPTGKIKTDTIKIQRGIFQGDALSPLWFCLALNPLSNLLNNTGKGYSLKYEPDTDSRNNDQNTIYLNHLLYMDDIKLYASDEYDLNYLAALTEKFSKDILMQFGTDKCKINSIKSGKLYKHSYTLEIGDTIDPLDDKIGYKYLGYTQSKGIHHKDTKNELKKQFKHRLTSILKTQLNSRNTIKAINSYAIPILTYSFGIIYWTNTDLKTFQRTINTTLTKFRKHHPRSCIQRLTLPRKQGGRGLIDVINLHNKQVTNLRAYFHKKSDLSKIHKAIEWNDCRLTPLNLKDRSAQKTETLKDNSTKIAEWNSKSLHGRYCQDVNQPFVDKEASYAWLNHGELFPETEGFMMAIQDEVIETRNYQKHIMKTKISDNCRKCNTVSETIQHITGACKAIVQTDYKYRHDQVANIIHQKLALKYHLIPHPPLPYYKYQPDNVLENRTHKIYFDRAILTDRTVHFNRPDITILDKINQTAFILDIAIPNTHNLQKNS

SEQ ID NO: 15455 - protein, 1410 aa, Haemactis sanguinalis
MESADKICRYNLRSLPGGRRGASGAGTGCHSMRTTGGAELSRRTRVYQNTTAGHRGLNRRASDVEATADCSGDAVSLFSSVASARPSYMTRSKTAASYSTLEDVVQDTLQEDIEIAPTESEPSKRKKWTPEINEFILRTYLYITSLGTDTKNYLETLHLKFTEQYPNINVSRQRIGDQRRAIERLKMLPQTTIDTIYAEVKSNLQRLEADIQLHSNTPTQLTQTMLHHAQLSRSSTTCNTQTRMSWSTQHNEEIIRSYLHITQLETNKTAYRRSLHQQFINKFPSLSHLSEQRIADQRRLIIKNNYISEQRLITIREEVAAELNNNGNTNEYVEIESNCSSKNYEEQTLTLRTSDARLSYRTQSKSNDCNSYDIDKLYLEAFHNFKNSDPTSRPFIPRQKPSRKLIVIIAYLNKEILPKIINKDTDFDTMQTVTYCAAWAAAKANGSKVLTTSCNTTRQLRKNKKPNWQKRLERKLRDLRIKIGRLTQYLNGNRSRKLIQEVNKIKLNYQIHSTHEETNTQIPQFLDTLKQKLTVISCRLNRYNACTLRKTQNIKFINNEKQFYRDMKIASTNVQDINLNDSSSDKNGPDIKSLRTFWGRIWEEPIEHNNQAEWIQEEIANSNVIQDMEFKHISLETFQKVLNNLHNWKTPGSDNIHSFWYKKFTSIHSCLLNHVNKFLLHPEIIPTYLTIGTTYMLPKDYQDLKNPAKYRPITCLQTLYKIITSCISEIIYNHIQVNNILTEQQKGCRKFSQGCKEQLVIDSVILNRVNKAKSNLYSMYIDYKKAYDSVPHSWLVKVLDIYKVHPKITNFLKIVMQRWATRLTINTPTGKTKTDTIKIQRGIFQGDALSPLWFCLALNPLSNLLNNTGLGYSLYYESYKDNRIIDKHDIHLNHLLYMDDIKLYASKESDLKYLVSVTEKFSKDILMQFGIDKCKINSMKSGTLYKHSYTLDMGDTIDSLDDKMGYKYLGYVQSKQIHHKEIKNDLKKQFKHRLTSILKTQLNSRNTVKAINSYAIPILTYSFGIINWTNTDLKALQRTINTTLTKFRKHHPRSCTQRLTLPRKEGGRGLIDIMNLHNKQITNLRAYFHKKSDFSKIHKAIESNDCRLTPLNLKDRSMQKSENLRDNVTKIAEWNAKSLHGRHCQDLNQPHVDKDASNAWLNRGELFPETEGFMMAIQDEVIETRNYQKFIIKAKITDNCRKCNSSSETIKHITGACKAIVQTDYKHRHDQVANIIHQKLAFKYHLIPHQPQAYYKYQPDNILENRTHKMYYDRAILTDRTVHFNRPDITVVDKINRTALIIDIAIPNTHNLQKTITEKLSKYTDLKDEITRMWKLKTVTIVPVVLSTTGVIPAHLHVSLEALSLPHFLYILMQKAVILNTCRIVRKFLHSDLHLSDTQTSTHISHTLVS

SEQ ID NO: 15456 - protein, 1396 aa, Haemactis sanguinalis
MRTTGGAELSRRARAFQNTTAGHRELSRRASDVEATADCSEDTTSLLSSIPSTRPSYMTRSRTAASSNTLEDVVQDTLQEDINTVPTESQSSKRRKWTPEMNEFILRTYLYITSLGTDTKNYLEALHVKFNEKYPNINTSRQRIGDQRRAIERLKMLPQKTIDRIYAEVTANLQKLHKDIHAQSEKATEHSRSTPNHALSSNTTSGTSCNIQNRMSWSIQQNEAIIRSYLYITKLETDKTAYRKFLHREFVSQFPSFIHLNEQRIADQRRSIMKNNYISEERLNAIKEEVAKELESAGTKCSILSSTAISETHNMEIQNENEPFNIRYNDTNLLNTNKNKYDLNNCLEIENIFLDAFNNFNNSDPTNRPFIPRQKPSRKLLAAIAYLNKEILPKIVNEDTNFSTLQTVIYCAAWAAAKANGARIHTETSDTICKRPHTNKKPNWQKRLERKVNDLRTKIGRLTQYLHGNRSSNLVKEVNKIKEHYQIHSTHEDKNTQIPQFIDTLKQKLTLISSRLNRYKACTLRKTQNVQFSNNEKQFYRTINTTSINIQDGNNVSSSNDTGPDLESLHRFWANIWEEPVEHNAEAEWIQTEIAKNSIVPEMEFKYISIETFQKVIHNLHNWKTPGSDNIHSFWYKKLTSIQPYLHKHINNFILQPEIIPRYLTVGTTYMIPKDNKDLQNPAKYRPITCLQTIYKIITSCISEIMYNHIHNNNILTEQQKGCKKLSQGCKEQLLIDSVILNHVNKTKSNLCSMYIDYKKAYDSIPHSWLAKVLHIYKIHPKIINFLKFVMHSWNTKLTVNTPNGKVKTDIIKIQRGIFQGDALSPLWFCLALNPLSNLLNKTGRGYLLNYESETDGSQNNYKIHLNHLLYMDDIKLYASNELDLNHLATLTETFSKDILMQFGIDKCKINSTKLGKLYKHTYILDTGETIDSLDDKIGYKYLGFVQSKRVHQKDIKNNLKREFKHRITTILKTQLNSRNTIKAINSYAIPILTYSFGIINWSKTDLKALQRSINTTLTKYRKHHPRSCIQRLTLPRKEGGRGLIDIMNLHNKQVTNLRTYFHKKSDYSTIHKAIEWNDCKFTPLNLRDRSTQMTENIKDDCTKVAEWCAKSLHGRYRHELDQPHVDKGASNAWLNYGELFPETEGFMMAIQDQVIETRNYLKYIIKNKTADNCRKCNSLSESIQHITGACKAIAQTDYKHRHDQVANIIHQKLALKYHLIPQPAKAYYKYNAETVLENGTHKMYYDRAILTDRTVHFNRPDITILDKINQTAMIIDIAIPNTHNLQKTITEKITKYTDLKEEITRMWKLKKVTIIPVVLSTTGVIPSQLHYSIKSLSLPEHSYVLMQKAVILNTCRIVRKFLQTDLHPSDTQIHTSSHNPTSQTHQTQTQNINPT

SEQ ID NO: 15457 - protein, 1294 aa, Marasmia exigua
MLLNLNPPQIKSVRARDGLQKLIGLSCALTCKSQTWTTNRRNYLDTLFLKFTEKFPNFQVSKQRLGDQRRVIVRNKLLPQHIIDSIYTEVQAELNHSTPHTLTQHIPASSQTQTRLRWTNEQNEAIIRIYYHITQLETNRTAYRKPLHQHFITQFPELAYLSEQRIADQRRTIIYNKYIEDERLNRIKKEVAEELAIDRQINTNEENEETGSTFNTQITDTEIPFAYNIQIDTDVNSQSTPQNTQSHLQRIQEIDDLFMQSLTHFKDTDPLSRPFIPKQKPSRKFASIVKYIDSVILPENTSRETEFLTLQTTIYCAAWTAAKCNGAKLSELHTERIRPRQKTEQKPKWQRRLEGKIEDIRTKISRLTHYKNGYRSTNLIQHVNKIKEQYQIHSIHEGTNTQITEFIDTLKQKLNVYCSRLNRYTACTIRKKQNTQFINNEKLFYRNLKTASNNVQNNSSHRSNGPDLEVLHRFWSDIWENPVQHNTQAPWIQSETENNCGDQMEFESIPTEIFQKVIQKLHNWKCPGSDHIHSYWYKKFTTIQPLIYHHINEFILQPQTLPAYITVGTTYMLPKDNNDPQNPAKYRPITCLQTIYKIITSCISELIYIHLDKYNILTEQQKGCKKFSQGCKEQLTIDSIILKQVYKSKSNLFSTYIDYQKAYDSVPHTWLLKVLELYNIHPSIHSFLHTTMKSWTTRLRINTPTETLETDNIKIQRGIFQGDALSPLWFCLALNPLSNILNNTSTGYLITHTDSHSQTDKDQTYLNHLLYMDDIKLYATTENDLNHLINLTENFSKDIKMQFGIDKCKINSIKARQRYGQQYTLENGEVIDSLDEKSTYKYLGYAQSQLIKYTETKNKLKQQFKHRLNSIFKTQLNSRNTVKAINTFAIPILTYSFGILNWSKSDLKDFQRMINTTMTKFRKHHPRSCVQRMTLPRIEGGRGVIDLINLHNKQIANLRQYFHQKADSSEIHQAIVQADIKLTPLNLNDHCVQAKEKIVERHVKLAEWSGKALHGRHRHDLSQPNVDKEASNAWLTRGELFPETEGFIIAIQDQIIETRNYQKHITKTRTIDTCRKCSSSPETIQHITSACRAIVQTDYKHRHDQVANIIHQKLAIKYRLILPPATAYYKYTPEAVLENQTHKMYFDRAILTDRTVHYNRPDITVVDKISKTALLIDIAIPNTHNIQNTIAEKLTKYIDLKDEIARIWKLKSVSVVPLVLSTTGVIPTQLHNSIAMLSLPQSTYVLMQKAVILNTCRIVRKFLQTDIQSPNTHNPSNPQTNCTPGINPPELHLA

SEQ ID NO: 15458 - protein, 1274 aa, Cnaphalocrocis medinalis
MFILRTYLQITNMDTNRRNYLDTLFLKFTQKFPDFQVSKQRLGDQRRVIVRNKLLPQNIIDNIKAEVQAELDCSLPPTLTQHIPTPSQTQSRLRWTNEQNEAIIRIYYHITELETNRSAYRKPLHQHFITQFPELAYLSEQRIADQRRTIICNKYIDDERLSEIRKEVAEELGIHRQTDTNEVNDETLSTINTQITDTDIEIPFVYNIQTDTDVLQSTPQDSQPQSQRIPEIDNIFTQTLTYFRDTDPLSRPFIPKQKPSRKLAKIVKYIDNVILPENTSRETEFLTLQTIIYCSAWTAAKCNGAKLNELNVDGTRQRQRIGNQKPRWQRRLERKIEDLRTKISRLTHYKNGYRSTNLIQQVNKIKEQYQIHSIHEGTNTEIPEFIDTLKQKLNVYCSRLKRYTACTIRKKQNTQFINNEKIFYRNLKTASSNTQDNNNDTTTGPDLAVLHRFWSDIWENPIQHNTHAPWIETETENNSSTQQMEFESIPTEIFQKVIQKLHNWKCPGSDHIHSYWYKKFTTIQPLIYHHINEFIQNPHTLPAYITVGTTYMLPKDLNDLQNPAKYRPITCLQTIYKIITSCISELIYIHLDKHHILTEQQKGCRKFSQGCKEQLTIDSIILKQVYKSKSNLFSTYIDYQKAYDSVPHTWLLKVLEVYKINPNIHSFLQTSMQNWTTRLKINTPTETLETDQIKIQRGIFQGDALSPLWFCLALNPLSNILNNTSKGYLIRNTDSNRQTDEDLTYLNHLLYMDDIKLYATTENDLNHLISLTENFSKDIQMQFGIDKCKINSIIARQRYGQQYTLETGEVIDSLGEKSTYKYLGYAQSQLIQYTETKNKLKQQFKHRLNSILKSQLNSRNTVKAINTFAIPILTYSFGILNWSKSDLKAFQRMINTTMTKFRKHHPRSCVQRMTLPRIEGGRGITDISNLHNKQIANLRQYFHQKADSSKIHQAIVQNDVNLSPLNLSDHNTLPKEKIIDRQVKIAEWSAKALHGRHRHDLGQPNVDKEASNAWLTRGELFPETEGFIIAIQDQIIETRNYQKHITKTRATDTCRKCNSSPETIQHITSACKAIVQTDYKHRHDQVANIIHQKLAIKYNLIPSPATAYYKYTPESVLENQSYKMYFDRAILTDKTVHYNRPDITVVDKTNKTALLIDIAIPNTHNIQNTIAEKLSKYTDLKNEITRIWKLKNVSIVPLVLSTTGIIPTQLHNSISILSLPEFTYVLMQKAVILNTCRIVRKFLQTDIQSPNTHNSSNTQTSHTSRTNPPELHLA

SEQ ID NO: 15459 - protein, 1389 aa, Cnaphalocrocis medinalis
MSERRYNLRPLPGGRRGTPGAVAGCSSMRTNGDGGLSRRAPLDKNTTAENNPDFSDSSDNQSLFSTLSRSDYIPTPSSDNSNQTVDVVQDIADAIESEPTTNNVCTRKRWSTEINMFILRTYLQITNMDTNRRNYLDTLFFKFTEKFPNFQVSKQRLGDQRRVIVRNKLLPQNIIDNIYTEVQTELNSTNPLIHTQHIPTSSQTQTRLRWTNEQNEAIIRIYYHITQLETNKTAYRKPLHQHFITQFPELAYLSEQRIADQRRTIIHNKYIEEQRLSEIRNEVAGELGIVSQQVSEETSNTFNTQQITDTEIPFLYNTETDPDTTSTLQSTPQHAQQPQPHRLPEIDDLFMQTLTHFKDTDPVSRHFIPKQKPSRKFANIVKYIDSVILPEYTSKDTDFLTLQTIIYCAAWTAAKYNGAKLNELHTERTRQRQRTEQKPNWQRRLERKIEDIRTKISRLIHYSNGYRSTNLMQHVNKIKEQYQIHSTHEGNNTQIIEFIDTLKQKLTVYCSRLNRYTACTLRKKQNTQFIHNEKLFYRNLRTASANTHENNSNNNRASGPELEVLHRFWSDIWENPVQHNTDATWIQSEIEKNTGTQNMEFESVPVEIFQKVIHKLHNWKCPGSDHIHSYWYKKFTTIQPFLFHHINEFILHPETLPSYITVGTTYMLPKDINDPQNPAKYRPITCLQTIYKIITSCIAELIYIHVDKYNILTEQQKGCRKFSQGCKEQLTIDSTILKQVHKSKSNLFSTYIDYQKAYDSVPHTWLLKVLEIYNIHPNIHSFLHTTMKSWTTILRINTPTEVLETDQIKIQRGIFQGDALSPLWFCLALNPLSNILNNTSTGYLFNHTDSNRETPEDLTYLNHLLYMDDIKLYATTETDLNHLINLTENFSKDIKMQFGIDKCKINSIIARQRHGQQYTLETGEVIDSLDERSTYKYLGYAQSQLIQYTETKNKLKQQFKHRLNSIFKTQLNSRNTIKAVNTFAIPILTYSFGIINWSKSDLKAFQRLINTTMTKFRKHHPRSCVQRMTLPRAEGGRGVIDIANLHNKQISNLRKYFHHKAESSKIHQAIVESDIKLTPLNLNDHNTQAAEKIVEQQVKIAEWSAKALHGRHRHDLGQPNVDKEASNAWLTRGELFPETEGFIIAIQDQIIETRNYQKHITKTRAVDTCRKCSSSPETIQHITSACKAIVQTDYKHRHDQVANIIHQKLAIKYRLIPPPATAYYKYTPEAVLENQTHKMYFDRAILTDKTVHYNRPDITVVDKTNKTALLIDIAVPNTHNIQNTIAEKLTKYIDLKDEITRIWKLKSVSIVPLVLSTTGVIPKQLHDSIAILSLPKPTYVLMQKAVILNTCRIVRKFLQTDIQSSNIHNQSNTQTNHTPRTNPPELHLA

SEQ ID NO: 15460 - protein, 1425 aa, Spialia galba
MEPMKKCKYNLRSLPGGRRGASGAGAGCYSMRDTGGVELSRRARVNQDTTAGHQELNRRANDVEVTADLDDGTHSLFSSIPSTCPSYMTRPTPSSSTNTPEDVVQDVLCKDVDTAPTEGEPRKRKRWTQEMNEFILRTYLHLTALNTDTTNYLEAIHLKFTEKYPNMDVSRQRIGDQRRAIERRKLLPQNVIDRIYKEVQTELETLQTNIQQHSQPITKHTRHTDNLNTHQNTTQKPTTTKNTRTRMRWSSEQNEAIIRYYLKITKLETNRTAYRKLLHQQFISRFPSLAHISEQRIADQRRVIIQNKLITDEKFNEIKQEILEELNINTQILRTREEQPDNETHDIQFLTSIQTDTDTISHPTHESQSQVQADKCLEIDKTFSETLSYFKKTDPLRRPYIPKQKSSKKFHNIVTYLNDITLPKHVNADTDFHTLQTVIYCAAWTAAKTNGAKISMTPPDRLTRQRHRDRKPNWQRRLERKIEGYRSKIGRLTQYINGNRSTKLSKQVDKIKEHYQNHSAHEGNNSQLPQFLDTLKQKLAVTSSRLQRYKACTLRKEQNSKFLNNEKQFYREIKTASSNIQESRNDPDITLDVPDPDALRYFWADIWENPVEHNNEAEWVQTETSNNFAIQEMPFEHIPIETFQDVIRRLHNWKAPGSDHIHSFWYKKFTTVHPYLHNHINNFLLNPDTLPTYITSGTTYMIPKDYNDLKNPAKYRPITCLQTLYKIMTSCISELIYQHLDKYNILSEQQKGCRKLSQGCKEQLVIDSVILKQSYKTKSDLYTMYIDYKKAYDSVPHSWLVKVLDIYKINPKIVQFLQTIMQNWTTQLRLNNPCNTIESDSIKIQRGIFQGDALSPLWFCLAINPLSNLLNSTGKGHQLKYKPDDRPTLQDETYINHLLYMDDIKLYAHTEHDLDLLANLTEMFSKDIQMQFGIDKCKINSIKAGKPHKHCYTLESGEKIDPLDEKEGYKYLGYTQSQQIHYKDIKDQLKAQFKHRLNSILKTQLNSRNTTKAINTYAIPILTYSFGIINWTKTDLKALQRTINTTMTKFRKHHPRSCIQRLTLPRKEGGRGLIDITNLHNKQISTLRSYFHQKSISSTIHKAIEQNDNFCTPLNLKDRTKQKTEELLENRIKLDQWSAKSLHGRHRQDLSQSNVDLEASNAWLYRGELFPETEGFMAAIQDQVIETRNYKRHIMKSTANDTCRKCNNSAETIQHITGACKAIVQTDYKHRHDQVAHIIHQKLAIKYQLIKQPATAYYKYSPENVLENQTYKMYFDRAILTDRTIHYNRPDITVVDKINKNAFLIDIDIPNTHNIQNTIAEKISKYTDLKEEIARIWKLNNVTIVPIVLSTTGVIPKHLHTSIKTLSLSPCLYVLLQKAVILNTCRIVRKFLQSDIETPNTQRNTLITRNRSTTNLNTRNEMHLA

SEQ ID NO: 15461 - protein, 1442 aa, Ernsta colotes
MVTNILTTHTYTHLAQHLANPFPNQRSQPLTFVMESVGKRRYNLRPLPGGRRGASGAGAGCHSIRDTGGVELSRRARVNQYTTAGHQELNRRVTDVEVTADVGDGTESLFSSIPSTRPSYMTRPTPSSSSNTPEDVVQDVLYDDINTAPTEGEPRKRKRWTQEMNEFILRTYLHLTSLNTDTTNYLEALHSKFAEKYPDMDVSRQRVGDQRRAIERRKLLQQNVIDRIYTEVTKELETLQTNIQRNSQTPTSQKQQTNTEQSITPKPLTNNRTRMRWSNEHNEAIIRSYLKITEIDTNRTAYRKPLHQEFISIFPSLAHLSEQRIADQRRVIIQNKLITDQRLNEIKEEVIEKLNLNRQIVEMRIERPNENIAQDSIQFLTNIQIDTDINTPPNNSSQHQFHSQISLEADKTFLEALNHFKETHPTHRPYIPKQKSSKKFYHIVTYLNNVVIPRNVNKDTNFHTLQTVIYCAAWTAAKTNGAKIDMSLTDRSQQQQHRKRRPNWQRRLERKIEEYRNKIGKLTQYINGNRSPRLSKEVDKIKEQYKNHSTHEGNNTHLPQFLDTLKQKLTVTTSRLNRYKACTTRKEQNIKFSNNEKQFYRELKTASSNTQENNRSSSDINSITPDPDTIRNYWADIWENPVEHNTEAEWLPTETSNNTQVKEMHFEHIPIETFKEVIHNLHNWKAPGSDHIHSFWYKKFTSIHPFLYKYINDFLINPDTLPPYITMGTTYMLPKDYNDLKNPAKYRPITCLQTLYKIITSCISELIYKHLNNFNILAEQQKGCRKLSQGCKEQLVIDSVILKQIHKTKSDLYTMYIDYKKAYDSVPHSWLIKVLELYKIHPKIVQFLQATMQNWTTRLRLNKSNNAIESNNIKIQRGIFQGDALSPLWFCLALNPLSNILNSTGKGYQLKYKPDDRATVKDVTYINHLLYMDDIKLYGQSEADLHHLASLTETFSKDIQMQFGIDKCKINSIKAGKNFKHFYTLESGQNIDPLDEKEGYKYLGYKQSQQIHYKEIKSQLKIQFRHRLNSILKTQLNSHNTIKAINAYAIPILTYSFGIINWTKSDLKFLQRTINTTMTKFRKHHPRSCIQRLTLPRKEGGRGLIDVTNLHNKQISTLRAYFHQKSISSDIHRAIDQNDNHLTPLNLKDRTKQRTEELTDHKTKIDQWSAKSLHGRHRNDLSQPNVDIVASNAWLNRGELFPETEGFMAAIQDQIIETRNYKKHIMKLAINDTCRKCNSSPETIQHITGACKAIAQTDYKHRHDQVANIVHQKLALKYQLITQQTTAYYKYTPENVLENNTHKMYFDRAILTDKTIHFNRPDITVVDKINKTALLIDIAIPNTHNIQNTIAEKLSKYTDLKEEITRIWKLNNVTIIPIVLSATGVIPKQLHTSLKTLSLSPSSYILMQKAVILNTCRIVRKFLQTDIETPNTLLMNNISGEI

SEQ ID NO: 15462 - protein, 1420 aa, Spialia mafa
MEPEKKCKYNLRSLPGGRRGASGAGAGCHSMRDTGGVELSRRARVNQDTTAGHQELNRRANDVEVTADLDDGTNSLFSSIPSTRPSYMTKPTPSSSSIPEDVVQDVLCEDVNSAPTEGEPRKRKRWTQEMNEFILRTYLHLTALNTDTTNYLEALHLKFTEKYPNMDVSRQRIGDQRRAIERRKLLPQNVIDRIYKEVQTELETLQTNIQQHSQPTTSHTRHTDKDNINTQKNTTQKPTTQNTRTRIRWSSEHNEAIIRWYLKITELERNKTAYRKPLHQQFISMFPSLAHVSEQRIADQRRVIIQNKLITEEKLNEIKQEIIEEINRNTQILRTREEQPDDEIHDIQLISSIQIDTDTISHPTNESQSRLHAEKSIEIDKTFSETLSHFKETDPLRRPYIPKQKSSKKFYNIVTYLNDIILPRHVNADTDFHTLQTVIYCAAWTAAKTNGAKISMTPPDRLTRQQHRDRKPNWQRRLERKIEGIRSKIGRLTQYINGNRSTKLSKQVDKIKEHYQNHSTHEGNNTQLPQFLDTLKQKLAVITSRLQRYKACTLRKEQNLKFLNNEKQFYREIRTTSSNVQESMNDSDITLDGPDPDVLRNFWADIWENPVEHNNEAEWVQTETSNNFATQEMPFEHVPTETFQDVIRRLHNWKAPGSDHIHSFWYKKFTTVHPYLHNHINDFLLNPDTLPTYITSGTTYMLPKDYNDLKNPAKYRPITCLQTFYKIMTSCISELIYQHLHKYNILAEQQKGCRKLSQGCKEQLVIDSVILKQAYKTKSDLYTMYIDYKKAYDSVPHSWLVKVLDIYKIHPKIKHFLQTIMQNWTTQLRLNNPCNTTESDTIKIQRGIFQGDALSPLWFCLALNPLSNLLNSTGKGHQLTYKPDDRPTLQDETYINHLLYMDDIKLYAHTESDLDLFANLTEVFSKDIQMQFGIDKCKINSIKAGKPYKHCYTLESGEKIDPLDEKEGYKYLGYTQSQQIHYKEIKNQLKVQFKHRLNSILKTQLNSRNTTKAINTYAVPILTYSFGVINWTKSELKGLQRTINTTMTKFRKHHPRSCIQRLTLPRKEGGRGLIDITNLHNKQISTLRSYFHQKSNSSTIHKAIEQNDNHCTPLNLKDRTKQKTEELLENKIKLDQWSAKSLHGRHRQDLSQSNVDLEASNAWLYRGELFPETEGFMAAIQDQVIETRNYKRHIIKNTSTDTCRKCNSSPETIQHITGACKAIVQTDYKHRHDQVANIIHQKLAIKYQLINQPATAYYKYSPENVLENQNYKMYFDRAILTDRTIHFNRPDITVVDKINKNAFLIDIAIPNTHNIQNTIAEKISKYTDLKEEITRIWKLNNVTIVPIVLSTTGVIPKHLHIAIKTLSLPPFSYVLMQKAVILNTCRIVRKFLQFDLETPNIQRNTLINSSNSTRNEMHLA

SEQ ID NO: 15463 - protein, 1404 aa, Spialia ferax
MEPEKKCRYNLRSLPGGRRGASGAGAGCHRMRDTGGVELSRRARVNQHTTAGHQELNRRATDVEVTADLEDGTNSLFSTIPSTRPSYMTRPTPSSSSNAPEDVVQDVLCEDVDTVSTNGEPRKRKRWTQEMNEFILRTYLHLTALNTDTTNYLEALHSKFTEKYPNMDVSRQRIGDQRRAIERRRLLPQNVIDRIYIEVQIELETLQTNIQQHSQPITSHTRHTDNLNTHQNTTQKSTTQNTRTRMRWSSEQNEAIIRCYLKITELETNRTAYRKPLHQQFISIFPSLAHVSEQRIADQRRVIIQNKLITDERLNEIKQEIIEELNINTQIQRSREEQPVDEAHNTQLLSSIQIDTDTIPNPTNESQSQLYSKTFLEVDKIFSEALAYFKETDPSRRPYIPKQKSSKKFYNIVTYLNNNTLPRHVTADTDFYTLQTVIYCAAWTAAKTNGAKITMTPPDRLTRQQHRDRRPNWQRRLERKIEDYRCKIGRLTQYLNGNRSAKLSKQVEKIKEHYHNHSTHEGNNTQLPQFLDTLKQKLAVTTSRLDRYKACTLRKEQNSKFLNNEKQFYREIKKASSNTQENRNNPDIPLDGPDPDALRNFWAGIWENPVEHNNEAEWIPKEISNNFEIQEMPFEHIPVEIFQDVIRRLHNWKAPGSDHIHSFWYKKFTTVHPYLHNHINDFLLNPDTLPTYITSGTTYMLPKDYNDLKNPAKYRPITCLQTFYKIMTSCISELIYKHLHKYNILAEQQKGCRKLSQGCKEQLVIDSVILKQVNKTKSDLYTMYIDYKKAYDSVPHSWLVKVLDIYKIHPKIVQFLQKIMQNWSTRLRVNNPCNTTESDKIKIQRGIFQGDALSPLWFCLSLNPLSNLLNSTGKGHQLTYKPDDRPTIQDETYINHLLYMDDIKLYAHTETDLELLANLTETYSKDIQMQFGIDKCKINSIRAGKTHKHYYTLESGEKIDALDEKEGYKYLGYTQSQQIHYKEIKNQLKVQFKHRLNSILKTQLNSRNTTKAINTYAVPVLTYSFGIINWTKSDLKQLQRTINTTMTKFRKHHPRSCIQRLTLPRKEGGRGLMDITNLHNKQISTLRSYFHQKSNYSTIHKAIEENDNNYTPLNLKDRAKQKTEELLENRIKLDQWSAKSLHGRHRQDLCQPNVDLEASNAWLYRGELFPETEGFIAAIQDQVIETRNYKRHIMKITSNDTCRKCNNSPETIQHITGACKAIVQTDYKHRHDQVANIIHQKLALKYQLISQPATAYYKYSPENVLENQTYKMYYDRAILTDKTIHFNRPDITVVDKINKNAFLIDIAIPNTHNIQNTIAEKISKYTDLKEEIARIWKLNNVTIVPIVLSTTGVIPKHLHTSIKTLSLPPFSYVLMQKAVILNTCRIVRKFLQSDIETSNTQRNS

SEQ ID NO: 15464 - protein, 867 aa, Cnaphalocrocis medinalis
MQFYTNEKQFYREIKTETTNIQGSTNNTQSSHNRPDAETLHRFWANIWENHVQHDTQAPWIQTEIDNNLETRQMEFEAIPVDIFQKVINKLHNWKAPGSDHIHSFWYKKFTTVHPYVYNYINSFIAHPDTIPTYITAGTTYMLPKDNNDRLNPAKYRPITCLQTIYKIITSCISELIYDHLDKHNILTEQQKGCRRQSQGCKEQLTIDAVILKQVYKNKADLYTMYIDYQKAYDSVPHTWLLQVLNIYNIHPQLITFLQAVMENWTTKLRITTPTENIETNVIKIKRGIFQGDALSPLWFCLALNPLSNLLNNTEKGYPLNYTTENDRQTDNNIIHLNHLLYMDDIKLYAANESDLNQLANITEKFSQDINMQFGIDKCKINSIRARQSYGHQYTLDSGEVINSLDDRESYKYLGYAQSQQIHYTEIKNKLKLNFKHRLNSILKTQLNSRNTIKAINTFAIPILTYSFGLINWSKSDLKSLQRKINTTMTKFRKHHPRTCVQRLTLPRKEGGRGLVDITNLHSKQITSLREYFHQKAASKSNIHEAIVQNDTKFTPLNLQDYNTQKMENIVDQRTKIAEWSSKSLHGRHRKDLTQPNVDKAASNAWLNRGELFPETEGFIMAIQDQVIETRNYQKYITKTRTIDTCRKCNSTPETIQHITGACRAIVQSDYKHRHDQVANIIHQKLAIKYQLVQPPAIAYYKYTPETVLENQTYKMYFDRAILTDRTTHYNRPDITVVNKTNRTAILIDIAIPNTHNIQSTIAEKLSKYIDLKNEIARIWKLNNVVIVPLVISTTGVIPTQIHSAIETLGLPSSIYLLMQKAVILNTCRIVRKFLQTDITPPIHTQTPSNSDQTTTQSTSNHEIFLA

SEQ ID NO: 15465 - protein, 1182 aa, Notocelia uddmanniana
MSQSHQSTVTQNTQSRMRWSNEQNETIIRLYLQITHLETNRTAYRKPLHQQFITKFPSLAHLSEQRIADQRRTILHNKYITDQRLNEIRQEVERELMTPLPTDNISHLNISLDTPTINAANLNEAQYLINDQTELNTLTPTIHTQQEPPDLDNNAEIDKIFSEALEHFTNTDPTSRPFVPKQKPSKKLSCTVSYINNKILTANINKDTDFQTFQTVVYCAGWTTAKVNGTKFNLTTLDTPHPTRKNKKPNWEHRLEKKKKDLRIKIGRLTQYINGNRSRNLSLHVERIQEQYQIHSTHEGINTNLVQFLDTLKQKLAVTSSRLHRYNACTFRKKQNSQFVNNEKQFYRELKNACTNNQNSQATPNTNNSPDTETLHRFWSDIWQNSAEHNAQAEWIESEIAINSEVPAMDFEFIPVEIFREVIQNLHNWKSPGSDHIYNYWYKKFTAIHPYLHSHINNFISHPHTIPPYITAGTTYMLPKDLDDPRNPAKYRPITCLQTVYKIITSCISKLIYKHIYSHNVLAEQQKGCRKLSQGCKEQLVIDSVVLNRVYKSKSDLYTMYIDYKKAYDSVPHSWLIKVLDIYKIHPRIILFLQTTMQNWTTRLRLSSATGTIETNQIKIQRGIFQGDALSPLWFCLALNPLSNMLNNTKQGHLLKYDPIMNDRQTDKDEIHLNHLLYMDDIKLYASDKTDLDQLANITEVFSRDIQMTFGIDKCKINSMKAGRSYKHNYTLETGETIDPLDEKVGYKYLGYLQSQLIHHKDTKNKLKVQFKHRLNSILKTQLNSRNTIKAVNTYAIPVLTYSFGIIRWSKTDLKTLQRTINTTMTKFRKHHPRSCIERLTLPRKEGGRGLIDLINLHNKQITTLRTYFHQKSCSSIIHKAIEQNDHQFTPLNLKDRTIQKTEELTEYKTKIAQWSAKSLHGRHRQDLSQLNVDKVASNAWLNHGELFPETEGFMMAIQDQVIETRNYQKFIIKNRNLDLCRKCNSPGETIQHITGACRAIVQTDYKHRHDQVANIVHQKLAIKYNLIPQPAIPYYKYTPESVLENQTHKMYFDRAILTDRTTHFNRPDITVVDKTNKTALLIDIAVPNTHNLQSTIADKLTKYTDLKDEITRIWKLKSVTIVPIVLSTTGVIPQQLHTSIQSLSIPPSSYIVMQKAVILNTCRIVRKFLQTDLANSIQTQT

SEQ ID NO: 15466 - protein, 774 aa, Notocelia uddmanniana
MDFEFIPVEIFREVIQNLHNWKSPGSDHIYNYWYKKFTAIHPYLHSHINNFISHPHTIPPYITAGTTYMLPKDLDDPRNPAKYRPITCLQTVYKIITSCISKLIYKHIYSHNVLAEQQKGCRKLSQGCKEQLVIDSVVLNRVYKSKSDLYTMYIDYKKAYDSVPHSWLIKVLDIYKIHPRIILFLQTTMQNWTTRLRLSSATGTIETNQIKIQRGIFQGDALSPLWFCLALNPLSNMLNNTKQGHLLKYDPIMNDRQTDKDEIHLNHLLHMDDIKLYASDKTDLDQLANITEVFSRDIQMTFGIDKCKINSMKAGRSYKHNYTLETGETIDPLDEKVGYKYLGYLQSQLIHHKDTKNKLKVQFKHRLNSILKTQLNSRNTIKAVNTYAIPVLTYSFGIIRWSKTDLKTLQRTINTTMTKFRKHHPRSCIERLTLPRKEGGRGLIDLINLHNKQITTLRTYFHQKSCSSIIHKAIEQNDHQFTPLNLKDRTIQKTEELTEYKTKIAQWSAKSLHGRHRQDLSQLNVDKVASNAWLNHGELFPETEGFMMAIQDQVIETRNYQKFIIKNRNLDLCRKCNSPGETIQHITGACRAIVQTDYKHRHDQVANIVHQKLAIKYNLIPQPAIPYYKYTPESVLENQTHKMYFDRAILTDRTTHFNRPDITVVDKTNKTALLIDIAVPNTHNLQSTIADKLTKYTDLKDEITRIWKLKSVTIVPIVLSTTGVIPQQLHTSIQSLSIPPSSYIVMQKAVILNTCRIVRKFLQTDLANSIQTQT

SEQ ID NO: 15467 - protein, 774 aa, Notocelia uddmanniana
MDFEFIPVEIFREVIQNLHNWKSPGSDHIYNYWYKKFTAIHPYLHSHINNFISHPHTIPPYITAGTTYMLPKDLDDPRNPAKYRPITCLQTVYKIITSCISKLIYKHIYSHNVLAEQQKGCRKLSQGCKEQLVIDSVVLNRVYKSKSDLYTMYIDYKKAYDSVPHSWLIKVLDIYKIHPRIILFLQTTMQNWTTRLRLSSATGTIETNQIKIQRGIFQGDALSPLWFCLALNPLSNMLNNTKQGHLLKYDPIMNDRQTDKDEIHLNHLLYMDDIKLYASDKTDLDQLANITEVFSRDIQMTFGIDKCKINSMKAGRSYKHNYTLETGETIDPLDEKVGYKYLGYLQSQLIHHKDTKNKLKVQFKHRLNSILKTQLNSRNTIKAVNTYAIPVLTYSFGIIRWSKTDLKTLQRTINTTMTKFRKHHPRSCIERLTLPRKEGGRGLIDLINLHNKQITTLRTYFHQKSCSSIIHKAIEQNDHQFTPLNLKDRTIQKTEELTEYKTKIAQWSAKSLHGRHRQDLSQLNVDKVASNAWLNHGELFPETEGFMMAIQDQVIETRNYQKFIIKNRNLDLCRKCNSPGETIQHITGACRAIVQTDYKHRHDQVANIVHQKLAIKYNLIPQPAIPYYKYTPESVLENQTHKMYFDRAILTDRTTHFNRPDITVVDKTNKTALLIDIAVPNTHNLQSTIADKLTKYTDLKDEITRIWKLKSVTIVPIVLSTTGVIPQQLHTSIQSLSIPPSSYIVIQKAVILNTCRIVRKFLQTDLANSIQTQT

SEQ ID NO: 15468 - protein, 1407 aa, Notocelia uddmanniana
MQLRSRSLRSGPLPEGNRRGASGAVAGCHSMRTNGGAELSRRTRVNQDTTADHRELNRRAPDVEVTAESDDDTESLFSSTPSTRPSYMTRSKTTESSINPEDVVQDDLFEDTNTAPTNGESSKRNRWTSEMNEFILRTYLHLTSLDTDKKNYLEALHLKFITKYPSMKVSRQRVGDQRRAIVRLNMIPQTTIDEIYREVKKDLERLQSDIRQHTQDKRNDTQTLNMSQSHQSTVTQNTQSRMRWSNEQNETIIRLYLQITHLETNRTAYRKPLHQQFITKFPSLAHLSEQRIADQRRTILNNKYITDQRLNEIRQEVERELMTPLPTDNISNLNISLDTPTINAANLNEAQYLINDQTELNTLTPTIHTQQEPPDLDNNAEIDKIFSEALEHFTNTDPTSRPFVPKQKPSKKLSCTVSYINNKILTANINKDTDFQTFQTVVYCAGWTTAKVNGTKFNLTTLDTPHPTRKNKKPNWEHRLEKKKKDLRIKIGRLSQYINGNRSRNLSLHVERIQEQYQIHSTHEGINTNLVQFLDTLKQKLAVTSSRLHRYNACTFRKKQNSQFVNNEKQFYRELKNACTNNQNSQATPNTNNSPDTETLHRFWSDIWQNSAEHNAQAEWIESEIAINSEVPAMDFEFIPVEIFREVIQNLHNWKSPGSDHIYNYWYKKFTAIHPYLHSHINNFISHPHTIPPYITAGTTYMLPKDLDDPRNPAKYRPITCLQTVYKIITSCISKLIYKHIYSHNVLAEQQKGCRKLSQGCKEQLVIDSVVLNRVYKSKSDLYTMYIDYKKAYDSVPHSWLIKVLDIYKIHPRIILFLQTTMQNWTTRLRLSSATGTIETNQIKIQRGIFQGDALSPLWFCLALNPLSNMLNNTKQGHLLKYDPIMNDRQTDKDEIHLNHLLYMDDIKLYASEKTDLDQLANITEVFSRDIQMTFGIDKCKINSMKAGRSYKHNYTLETGETIDPLDEKVGYKYLGYLQSQLIHHKDTKNKLKVQFKHRLNSILKTQLNSRNTIKAVNTYAIPVLTYSFGIIRWSKTDLKTLQRTINTTMTKFRKHHPRSCIERLTLPRKEGGRGLIDLINLHNKQITTLRTYFHQKSCSSIIHKAIEQNDHQFTPLNLKDRTIQKTEELTEYKTKIAQWSAKSLHGRHRQDLSHLNVDKVASNAWLNHGELFPETEGFMMAIQDQVIETRNYQKFIIKNRNLDLCRKCNSPGETIQHITGACRAIVQTDYKHRHDQVANIVHQKLAIKYNLIPQPAIPYYKYTPESVLENQTHKMYFDRAILTDRTTHFNRPDITVVDKTNKTALLIDIAVPNTHNLQSTIADKLTKYTDLKDEITRIWKLKNVTIVPIVLSTTGVIPQQLHTSIQSLSIPPSSYIVMQKAVILNTCRIVRKFLQTDLANSIQTQT

SEQ ID NO: 15469 - protein, 1406 aa, Notocelia uddmanniana
MQLRSRSLRSGPLPEGNRRGASGAVAGCHSMRTNGGAELSRRTRVNQDTTADHRELNRRAPDVEVTAESDDDTESLFSSTPSTRPSYMTRSKTTESSINPEDVVQDDLFEDTNTAPNGESSKRNRWTSEMNEFILRTYLHLTSLDTDKKNYLEALHLKFITKYPSMKVSRQRVGDQRRAIVRLNMIPQTTIDEIYREVKKDLERLQSDIRQHTQDKRNDTQTLNMSQSHQSTVTQNTQFRMRWSNEQNETIIRLYLQITHLETNRTAYRKPLHQQFITKFPSLAHLSEQRIADQRRTILHNKYITDQRLNEIRQEVERELMTPLPTDNISNLNISLDTPTINAANLNEAQYLINDQTELNTLTPTIHTQQEPPDLDNNAEIDKIFSEALEHFTNTDPTSRPFVPKQKPSKKLSCTVSYINNKILTANINKDTDFQTFQTVVYCAGWTTAKVNGTKFNLTTLDTPHPTRKNKKPNWEHRLEKKKKDLRIKIGRLTQYINGNRSRNLSLHVERIQEQYQIHSTHEGINTNLVQFLDTLKQKLAVTSSRLHRYNACTFRKKQNSQFVNNEKQFYRELKNACTNNQNSQATPNTNNSPDTETLHRFWSDIWQNSAEHNAQAEWIESEIAINSEVPAMDFEFIPVQIFREVIQNLHNWKSPGSDHIYNYWYKKFTAIHPYLHSHINNFISHPHTIPPYITAGTTYMLPKDLDDPRNPAKYRPITCLQTVYKIITSCISKLIYKHIYSHNVLAEQQKGCRKLSQGCKEQLVIDSVVLNRVYKSKSDLYTMYIDYKKAYDSVPHSWLIKVLDIYKIHPRIILFLQTTMQNWTTRLRLSSATGTIETNQIKIQRGIFQGDALSPLWFCLALNPLSNMLNNTKQGHLLKYDPIMNDRQTDKDEIHLNHLLYMDDIKLYASDKTDLDQLANITEVFSRDIQMTFGIDKCKINSMKAGRSYKHNYTLETGETIDPLDEKVGYKYLGYLQSQLIHHKDTKNKLKVQFKHRLNSILKTQLNSRNTIKAVNTYAIPVLTYSFGIIRWSKTNLKTLQRTINTTMTKFRKHHPRSCIERLTLPRKEGGRGLIDLINLHNKQITTLRTYFHQKSCSSIIHKAIEQNDHQFTPLNLKDRTIQKTEELTEYKTKIAQWSAKSLHGRHRQDLSQLNVDKVASNAWLNHGELFPETEGFMMAIQDQVIETRNYQKFIIKNRNLDLCRKCNSPGETIQHITGACRAIVQTDYKHRHDQVANIVHQKLAIKYNLIPQPAIPYYKYTPESVLENQTHKMYFDRAILTDRTTHFNRPDITVVDKTNKTALLIDIAVPNTHNLQSTIADKLTKYTDLKDEITRIWKLKNVTIVPIVLSTTGVIPQQLHTSIQSLSIPPSSYIVMQKAVILNTCRIVRKFLQTDLANSIQTQT

SEQ ID NO: 15470 - protein, 1389 aa, Pammene fasciana
MQLRSRTLRTGPLPEGDRRGASGAVAGCHSMRSNGDVELSRRAPIEQFVTAGHRELSRRVTDVEVTADSGDDTESLFPSIPSTRPSYMTRSKTTQSSINPEDVVQGDLLDEDIDTVPTEGETSKRNRWTSEMNEFILRTYLQLTALDTDRRNYLEALHLKFIEKYPHMKVGRQRVGDQRRAVERLKMLPQSTIDKVYADVKEELQILQTNILTHSQTSSSNTQQPQPPHNTQTRKRWSNDQNETIIRIYLRITHLETNRTAYRKPLHQQFIAEFPSLAYVSEQRVADQRRTIIHNKYITDQRLKQIREEVERELSDMQETDRIRDFNIMPDTQVFTDNNEVQPPVVNFQTNANTQPILDNNLEINEIFREALEHFLDTDPTRRPHIPKQKPSRKLASIVAYINDKILPEKVSLETDFLTLQTITYCASWTAAKANGTKLNFIQTDTANQPREKKKPNWEHRLDKKIKDLRAKIGRLTQYINGNRSRSLSLQVDRIREQYQMHSTHEGLNTDLAQFLDTLKQKLAVASSRLHRYKVCTLRKEQNLKFVNNEKQFYRDIKSASTNNPENRQRSSNSSNGIDTETFHKFWSDIWQNPVTHNTQAEWIETEMMANSDVNEMEFEAIPVETFTEVIRNLHNWKAPGSDHIHSYWYKKFTTLHPYLHNYINSFILHPETMPIYITTGTTYMLPKDHNDTTNPAKYRPITCLQTLYKIITSCISELIQKHIHSHSILAEQQKGCKKLSQGCKEQLTIDSVILNQVFKTKSNLHTMYIDYQKAYDSVPHSWLVKVLGLYKIHPLIIDFLQTTMQNWTTRLRFTTTTGTTESNLIKIQRGIFQGDALSPIWFCLALNPLSNILNSTNIGYSLNYQPETENRHTNQTEVNLSHLLYMDDIKLYASDETDLDRLANLTEIYSRDIQMNFGIDKCKINSMIAGRSYKHSYTLETGQTIDPLDELTGYKYLGYLQSQRIHYKYTKDKLKLQFKHRLNSILKSQLNSRNTIKAINTFAVPILTYSFGIIRWSKSDLKSLQRTVNTTMTKFRKHHPRSCFQRLTLPRKEGGRGLIDITNLHNKQVTTLRKYFHQKSDISLIHKATEHNDRNFTPLNLIDRTTQKTEFITDHKSKIAEWSAKSLHGRHRHDLCQPVVDKVASNAWLNRGELFPETEGFIMAIQDQVIETRNYQKFIIKNRPDDLCRKCNSAAETIQHITGACRAIVQTDYKHRHDQVANVVHQKLALKYHLIPPPATAYYKYTPVNVLENQTHKMYFDRAILTDRTIHYNRPDITVVDKTNKTALLIDIAIPNTHNVQSTIAEKLSKYTDLKEEITRIWKLNNVTIVPIVLSTTGIIPQQLHASLKSLSLPPFSYIVMQKAVILNTCRIVRKFLQNDIQLPGSQT

SEQ ID NO: 15471 - protein, 1113 aa, Nomada fabriciana
MERLNKRNPRPGSRMARPLRVSESENEAPDHGSDRPLADTGQAQLEHLEGPPARDVMSGAGPAVPDVFICEHCGRDFNTCIGRGVHISKAHPVESNDAINVERVRARWSDEEVRLLARAEARATLAGGIRFMNLHLHDLFPHRSVEGIKGRRKQAAYREMVRGFCQQTSPVSPGDVDDGQGDNTSVPSTSSSHECVPSPSPAPPQDLEERLRIAIRDLIDRTARIESFQAGRLREIAQRALEGNTVTDAIAWWLGDVFPEGVRGSPRISSRRGKRNPDTGRETRKERRKREYAEMQILFRKNMRACLSKILDGDVDGNRPSPVEFERYWRPLFQSVGSAEGDMAGLPKRPPSVRQIRTGGPTPRGIHLEGMGQSTDHEDNPPPPVSSLWWPITSKDVERHAVRAGSAPGLDGVSPRLWNSVPSALRALLYNLLLLAREAPARMTATRTVFIRKAGMSDRPTPADYRPLSVGSVSLRQFHKILASRLSQFNIWDERQRGFRPVDGVCENVTILTTVMREARRKCRSLHVACVDLSKAFDTVSHRAIISAAEEAGLPPCFLEYIRAVYSDAYTILQPSGVDETPIRIGRGVRQGDPLSPLLFNLVVGRAMESLSRDVGFELGGVNIDALAYADDIVLLAQTPMGLQENLNLLESAFGRAGLEINPNKTGILSLVASGRDKKIRVITAPSFHLGGVALPQRSPTDVWRYLGTEYQGTREYVESIPLDLALSHLSRAPLKPQQRLRLLRDCLLPRLYHRWVVGNVSAKTLKAVDVRVRGAARAWLRLPHDVPAGYFHAAVREGGLGLPMFKILIPILKYQRLQRLCRSSFPPARASAESTYVARQLVWCESQMLFRGERVSTTAELRRRCAAALHDSCDGSGLRQSADSSLSSHWVLEGSSGIPGADYVHYHHVRANCLPSRVRVSRGREGREVRCRAGCPEKETPSHCVQRCFRTHGGRILRHNDLRRRVAEFLRQKGWTVEEELAFSTAVGVRRPDLTIAREGAAVVVDAQVVSSEGSLDQAHARKVHKYQTISDMSDRVAAHAGVTRENVCYAAITISWRGVWSPRSESELRSLGLTKSQLRSLTTRVLWGSWLNWKRFNAITSRYDPRRGVPR

SEQ ID NO: 15472 - protein, 839 aa, Nomada fabriciana
MQKLFRKSMRSCLIRILEGNVEDNRPSPVDFDAYWRPLMETVSVVEEDMEVSAFSRRPDSMRQRRSGESTSRGIHLEGVGSGEISGDNNPTVVDKSSLWMPITLQDVEKHAVRAASAPGPDGVSPRLWNSVPPVLRALLFNLVLLAGEAPERIAASRTVFLRKAGMPDRPSPADYRPLSVGSVPLRQLHKILASRLASLDIWDERQRGFRPVDGVCENITVLSAVLREARRKCRSVHMACVDLSKAFDTVSHAAILRVIEEADLPSGFLKYIKAVYSNACTTLQPQGDICGAPIRLGRGVRQGDPLSPLLFNLVVDRALGFLSRDVGFDLGGVRIDALAYADDIVLFASTSQGLQQNLTLLQSAFKRSGLMINAAKTSVLSLVASGREKKVRVITDPIFRLGDVPIRQVTPSHVWRYLGAAYEGARDSVEPVPLDLALTRLTRAPLKPQQRLRLLRECLLPRYYHRWIVGDVSAKVLKSTDVQVRASVRAWLRMPHDTPAGYFHAQIREGGLGLPHLRTLIPMLKWKRLQKLCRSAFPPARAAAETPYVARQLVWCENQMRLRGERVSTASELRRGWAATLHASCDGSGLRESANARMSSHWVSEGSSGIPGADYVHYHHVRANCLPSRVRVSRGRVGRDVRCRAGCPEKETPAHCVQRCFRTHGGRILRHNDLCRRVAGFLRQKGWQVCEELAFSTSVGRRRPDLTIVRDDRAVVVDAQVVSSEGALDLAHRRKVAKYESISDLHDLVGAHAGVPRGNVVFSAITISWRGVWSSQSVRELLQLGMTRAQLCSLTTRVLWGSWMNWRRFNSITSRFNPSRSRTTTPTSVLPVTVSSDYG

SEQ ID NO: 15473 - protein, 1114 aa, Nomada fabriciana
MDSTNKRIPRPGSRMARPLRVIESVTDMPTHSDGSTLAQAGLHSRESSSGVNPAVPGLFICEHCGRGFPTCIGRGVHKTSAHPVEANDAVNVDRVKARWNDEEVRLMARAEANATLAGGIRFINQHLHDRFPHRTVEAIKGKRRQAAYREMVLGFCQQASPGSPGDVEDGAGAQRTAPSTISSPNLCVPPPSPAPQDLDKLRDAIRELIERTARFESFQAGRLREIAQSALDGCAVADAISRWLGDVFPEGVRRRPHRVPRRGQRRPERVENRLEKRRKEFAEVQTLFRRNLRACLSKILDGDVEGNRPSSVEFDGYWRPLIERVSAADGDMTGLPRRPFSVRHRWTGGPTARGIHLEGIGQSTGHEDGSPPPDLSSLWLPITPKDVEKHAVRAGSAPGLDGVSPRLWNTVPAALRALLYNLLLLASKVPARMSTTRTVFLRKAGMPDRPSPADYRPLSVGSVTIRQFHKILASRLSLLNIWDERQRGFRPVDGVCENVTILTTVLREARRLSRPVHIACVDLSKAFDTVSHKAILKAAEEVGLPPAFLGYVRSVYGNAYTVLQSPQGDYGMPMRLGRGVRQGDPLSPLLFNLVVDRALETLSQDVGFELGGVKIDALAYADDIVLLARTPMGLQENLDRLVLAFRRSGLEINAKKTGVLSLAASGRDKKTRVLTAPSFQLDGVTLPQRSPTDVWRYLGTEYEGTREHVESVPLESALARLSRAPLKPQQRLRLLRDCLLPRFFHRWVVGNVTAKTLKAADVRVRDTARAWLRLPHDVPSGYFHAPIREGGLGLPLFKILIPVLKYQRLQRLCRSSFPPARASAESTYVARQLAWCESQMLFRGERVSTTAELRRSCAAALHGSCDGSGLRQSAASSLSTHWVSEGSSGIPGADYVHYHHVRANCLPSRVRVSRGREGREVRCRAGCPEKETPSHCVQRCFRTHGGRILRHNDLCRRAAVFLRQKGWTVDEELGFSTSIGLRRPDLTISKDGVAIVVDAQIVSSEQALDLAHGRKVTKYESIPGLSQLVADHAGVTRENVTFTAITISWRGVWSPQSDRELRFLGLTKSQLRSLTTRVLWGSWMNWRRFNSITSRYHPNRRLTVPGTVATVGVG

SEQ ID NO: 15474 - protein, 1135 aa, Nomada fabriciana
MDPRHIATMDKGKSINDPRPGSRMARPLCVLRERSAEEGDGQSCTSDESVPRIREQTQDIPVAPERFVCELCSGEFLTKIGLGVHKRHAHPVEANNAVDVERVRARWSEEEVRRMARAEANASSAGIRFMNIHLHGLFPHRTVDAIKGKRRQAQYSRMVHSFCQQAAPGSPVAAEDGEGTGAAMMDTAGPSTISSPNRCDPPASLTFPEQLEKLRSAIRELIERSSRVESFQAGRLRQIAQSALVGSVDIEAINGWLGAVFPERVRRYPRRAARRRPSNPSNGENREQKRRGEYAEMQKLFRKSMRSCLIRILEGNVEDNRPSPVDFDAYWRPLMETVSVVEEDMEVSAFSRRPDSMRQRRSGESTSRGIHLEGVGSGEISGDNNPTVVDKSSLWMPITLQDVEKHAVRAASAPGPDGVSPRLWNSVPPVLRALLFNLVLLAGEAPERIAASRTVFLRKAGMPDRPSPADYRPLSVGSVPLRQLHKILASRLASLDIWDERQRGFRPVDGVCENITVLSAVLREARRKCRSVHMACVDLSKAFDTVSHAAILRVIEEADLPSGFLKYIKAVYSNACTTLQPQGDICGAPIRLGRGVRQGDPLSPLLFNLVVDRALGFLSRDVGFDLGGVRIDALAYADDIVLFASTSQGLQQNLTLLQSAFKRSGLMINAAKTSVLSLVASGREKKVRVITDPIFRLGDVPIRQVTPSHVWRYLGAAYEGARDSVEPVPLDLALTRLTRAPLKPQQRLRLLRECLLPRYYHRWIVGDVSAKVLKSTDVQVRASVRAWLRMPHDTPAGYFHAQIREGGLGLPHLRTLIPMLKWKRLQKLCRSAFPPARAAAETPYVARQLVWCENQMRLRGERVSTASELRRGWAATLHASCDGSGLRESANARMSSHWVSEGSSGIPGADYVHYHHVRANCLPSRVRVSRGRVGRDVRCRAGCPEKETPAHCVQRCFRTHGGRILRHNDLCRRVAGFLRQKGWQVCEELAFSTSVGRRRPDLTIVRDDRAVVVDAQVVSSEGALDLAHRRKVAKYESISDLHDLVGAHAGVPRGNVVFSAITISWRGVWSSQSVRELLQLGMTRAQLCSLTTRVLWGSWMNWRRFNSITSRFNPSRSRTTTPTSVLPVTVSSDYG

SEQ ID NO: 15475 - protein, 773 aa, Coccinella septempunctata
MQHKFSQNTRDLAHEILDDSATSANNIRPSSEEIKKHFEDVFSTDSPEDENPIYDFARTPCNIYSPISGRDIELACKSMGKTAGGPDGIDSKRLAKIPVSKLEILCNLVLFSKYIPKALRQSRTILIPKSTGNLERVESWRPITIASILIRLLNGIIAKRLSENIILDECQRGFTSVDGCFANNITLQTIIKERRKQGRPFNILTLDIQKAFDRISHNTIRRALRRFRVDKNTTEYIMATYFDQSTTVSCNGTVVTTIALNRGVKQGDPLAPIIFNMIMDEIIASLKVRKGIQMGNTNISVMGYADDLLILAENTRDAQFLLGLVVKFLEARHLTLSPTKCRSLTMAVVPSKKKLFLHTTAKFYISSVPIPPMKSVADSFKYLGCYFSSTGATPSNTANLSQQLDRVIRSPLKPQQKMEIIRYYLIPRYISALQSPAVSIKVLRKADQLLRYYIKKILKLPTHIIDESLYTPCKLGGLGIFSFTKKIPLIMRGRLMKAKEKSSLFAGFISGAGYWERKINKMIKPQCNSKDAIDRANGARLEESFYGNGVYQASNDSASSAFITSPPPMWSGEDYVRAIKLRTNSLSTKALPYGPRENKMCRGGCGRLESLCHVLQKCHLGKDKRIIRHNFVVRRICSMARQKGWQITEEPHIRDTTGRLNKPDMVCVKDNAVIVADVGVSWEAPRSLSETYDCKKAVYDQPPFIDALKMAHPGKDITVLPFIIGARGFWCRESTELLEALGINTASNRRELVITTIRGSCSIHIDFMRRAWE

SEQ ID NO: 15476 - protein, 1082 aa, Adalia bipunctata
MMPIPCICGKSYATQRNLRDHQRRFCRGIPPPNNEEADAATEAEPKCICGKTYATLRNLRDHQRRFCRGPPTSEDGVCPVCKNDYLTYQSMRQHMRHTHPDEYNADMAAEAEGRSRRPPWTEGELEEMAHLEMEYEGRDLLGHLAERLGRPREGVKKKRQGQQYRETLERIRETGGDEEVIVLAAEMESSSESSESEAEAADGCSDEVGAGDADGSVERSQEESRILEDPVLMHILGLCTEIEDVEAITTCQMVCTGSDGHEREFDRWVETICTTYGKPTTAGGKNKIKKPTIDAGGKRKYRARLYKYMQHQYTHNRRDLADEILDDPADVQVNITPKNEDIRRHFEEIFSTESPEDENPIYDFARTTCEVYSPILKNDIEDGMKRMGKTSGGPDGINSDRLKKIPVHKQEVLSNLMLYSKYIPKPLRKSRTILIPKSSGSLEEVGNWRPITISSILIRLLNGIVAKRLSSNIGLDECQRGFTEVDGCFANNITLQSIIKQRRVQGRPFTILTLDIKKAFDNISHHTIRRALRRFRVDTNTTKYIMATYFEQETTIYCDGKEKATLSLKRGVKQGDPLAPMLFNMIMDELISSLRIRRGIKIGDQNISVLGYADDLLLLAENTKDAQFLLGLTCKFLLARHLSLNPAKCRSLSLAVVPSKKKVYLQTTPKFYIRTEPIPPMRNVGESFKYLGCYYSSSGAIPSNISNLSKQLDRVIRAPLKPQQKMEVIRTYLMPRYIAALQSPSINLKILSKADQICRYYVKKILKLPTHVIDEALYTPTKLGGLGIFSFTRKIPLIMKGRLQKTRLTSSLFDDFLRESDYWLRRIERMVKPQYNTKDAVDRSNGARLEASFYGNGIWQASNDSASSAFIASPPPMWSGEDFIRAIQLRTNTLPTKALPYGPRENKMCRGGCERFESLCHVLQKCHVCKDKRIIRHNYVVKRICAMARKHGWEITEEPHIRDTRGRLNKPDMLCIKDEQVIIADVGVSWEAPRTLSETYECKKATYNQPELIEAIQAAHPGKNIAVLPFIIGARGLWCRESTRLLEALQINTISNRRELVLTTIRGSCSVYIDFMRRAWER

SEQ ID NO: 15477 - protein, 929 aa, Coccinella septempunctata
MNQELLKYFNNRTLESIKSQRKTDKYKKLVENLMTTNDEISEPSSPELPITTSASTSSRLPSRDSEESPKLAICIYLQTLDTPESIDSNDKALLELCRTIHQCSASEVRHKVAEYLSVRFPPKDSTPSANRPKPSVSACPSGRTRRRIQYKTTQRSWQRNPTKCIQSLLGRVISSETLPKNIMEPFWQRIMSRECAASPKDLPSSPIIGSLIVPITLEEVQKNLPKGSSSPGPDGVSVDDLKKMNIHALHRLLNILLLCDKLPERLLEARTIFIPKKINPTDPGDYRPITISSMITRCLHKIIAARFDRDIKIDERQRAFRKIDGCANNVFLLDVALRCAKRKFRPIFLAVIDLAKAFDSLSHTCIEAILRSRGVPTFLIDYLMAYYKHSFSRLRGDGWISDRIFPKCGAKQGDPLSPIIFNIVMDGLLKLLPSSSGADLGDSRVNSALFADDIFLMASSVPGLQQLINITTEYLESCGLLINIVKSHTISWKPIPREKKVVVDASQTFTCGRQTLPPINRETKWRYLGVKFTPDGCCPSDTKIKLSNQLADITKAPLKPQQRLFGLRSVIIPSLQHELALGQTSIGYLNTLDKTVRMAVRKWLALPHDTPIAYYHAAIKDGGLGVQSFRWSIPLMRLRRLQGIDLGGSEICTLKNTEIDTCKRRLNDRGTAYDSAAKIQSRWADHLYNSIDGRALADSAKIPQQHRWIGEATRFLSGRDFLHLIKLRINALPTRSRGGRGRLASRACRAGCNAVETQNHIQQICHRTHEPRIKRHNAVSTLISKRLRAQGYSVLEEPHINTTDGTRKPDVVATKDAKTIVIDAQVVGEQTDLDAAHRAKISYYSKYKEEILQLTGSTDITFSSATITWRGIWSPKSANQMRGLRILSADDLKVMATRVLVGGLNNYHKFMALTSVCRWVSRRPRAGIG

SEQ ID NO: 15478 - protein, 982 aa, Nasonia vitripennis
MCEFPDCDRSFHTVQGRGLHHQKAHKDWYDARQKESKRVRWTKEEESLMALKEAQLNMEGQVYVNAALVEAFPTRTLEGIKGKRKQQGYRSMVEAHKERLRKERSEVETIPPPPGMDDEILEKLKATILGFDALEEDQFNGGQLNRICRLVGATPRDRVLDEITLYLSETFKGSEEKRHRPMGPKKVLKKRQMRRQEYAKTQDLWRKNPNKCLRYLLKDVKNAVTPPKELMVPFWETVMTQVNNVSPGIETRRQVITKLWDPISGLEVKEALPENSTSPGPDGVTAGQLKGVPINILLRVYNILLWCGKLPRYLLKSRTTMIPKKEQAYEPSEFRPITVSSVIARTLNKILATRMFNLVELDDRQKAFRDVDGCAEGTFLMDVILRHHRAKHKPMHMASMDMAKAFDSVTHNTIRDILEGAGVPGVMVEYVMDMYEHSTTALSCGDWTSHEIHPTCGVKQGDPLSPIIFNLVIDRMFKDLPEEVGVEVDGIKTNAFAFADDLVLVASSPSGLQESINKAAEYLLKCGLKVNAGKCMTVSMRTVPREKKTVIDPKMKFRCLGRTLPAVSRSSEWKYLGIPFTPEGKWTGNPLQNLMTSTETLTRAPLRPQQRLFGLRCVVIPSLYHLLVLGSANISLLRKMDKKIRTTIKKWLDLPNDTPSAYFHAAVQDGGIGIPSLRWMVPVQRLKRLKNLPYYRPDQPEYYHLSKEIKTTLNRLKDKNVQLMNKLDVDKRMAELLYKAVDGSALKGSNTVPSQHQWVREGTNFLKGRDFISLCKLRINALPLRCRTARGRPKERLCRAGCHNQETLNHVLQHCPRTHEMRIKRHDAVVNYIAKSLNEQGVEVDCEPHLQGPAGLRKPDIVAKKEDVVIVVDAIIAAEQADLKRVHKEKSKKYEDLKPIIKERYEVEKVEFTSATLSARGLWSKDSASDLLRLGVIKSKDLKVISTRVLVGGIAIFHDFNRRTSRTTGRRRGQEPPRQGDG

SEQ ID NO: 15479 - protein, 1026 aa, Cecidostiba semifascia
MQNYTGSSRNLRNRISGEPTGSRAPVNRPSRVQAQPDPRLGEFRCEFPGCGRSFHTVQGRGLHHQKAHKDWYDSQQKESKRVRWTKEEESLMALKEAQLNLDGKVYVNAALVEAFPTRTLEGIKGKRRQQGYKELVEAQKERLRTERAGEVEEVPPPHSADDGILEKLKANILGFEPLESDQHNGSQLNRICGLVRATPREQVLEELTLYLSETFKGSKQVGQRPIGPKRVLKKRQMRRQEYAKTQDLWRKNPNKCLRYLLKDVKNAVTPEKELMVPFWETVMTQDVNGSPGIGTRKGIIAKLWDPVNFREIKEAMPENSTSPGPDGVTAGQLRGVPMSILLRIYNILLWCGKVPRYLLKSRTTMIPKKEQAYEPGDFRPITVSSVIVRTLNKILATRMLNLVELDDRQKAFRDVDGCADNTFLMDLILRQHRAKHRPMHMASMDMAKAFDSVTHDTIRDILDGAGVPHIMVEYVMDMYANSTTVLACGDWTSHEIHPTCGVKQGDPLSPIIFNLVIDRLFKELPPEVGVEVDGIKTNAFAFADDLVLAASSPSGLQESINKSAEYLLKCGLKVNAGKCLTVSIRTVPKEKKTVIDPKIKFRCLRRTLPAVSRSSEWKYLGIPFTPEGKWTGDPLGKLMESLEILTKAPLRPQQRLFGLRSVVIPSLYHLLVLGSANISLLRKLDKRVRTAAKKWLDLPNDTPSAYFHADVKDGGLGVPSFRWTVPLQRLKRLKNLPYYRPDMPEFYHLSKEVKITLNRLKDRDVQMQKKEDLDKRMADLLYKAVDGKALQGSDKVPSQHRWVREGTNFLKGKDFISLCKLRINALPLRCRTARGRPKDRRCRAGCQNHETLNHVLQHCPRTHEMRIKRHDAVVKYIEKSLRDQGLEVDYEPHLQGPGGLRKPDIIAKREDTAVVVDGIVAAEQADLKRVHRDKSKKYEDLTPAIKEKYGVDKVEFTSATLSARGLWSSDSAADLLRLRVIKVGDLKVISTRVLVGGIAIFHDFNRRTSRSTTRRGTPRLPRQGEG

SEQ ID NO: 15480 - protein, 958 aa, Cecidostiba semifascia
MHHQKAHKDWYDGRQKESKRVRWTEEEESLMALKEAQLNLEGRVYVNALLVEAFPSRTLEGIKGKRRQECYKRLVEAHKERLKREVERGVEETPPPISADGAILEKLKANILGFEPLESDQLNGSQLNRICRLVETEPRDRVLEELTLYLSGTLKGSKKVGQRPIGPKNVLRKRQMRRQEYAKTQDLWRKNPNKCLRYILKDVKNAVTPPKELMVPFWETVMTQDTTGSPGIDTRKEVITKLWDPITPSEIKEALPGNSTSPGPDGVTAAQLRGVPMTILLRVYNILLWCGKAPRYLLKSRTTMIPKKEQAYEPGDFRPITVSSVIIRAFNKILATRMLNLVELDERQKAFRDVDGCAENTFLMDLILRQHRAKHKPMHMASMDMAKAFDSVTHETIRDILDGAGVPGVMVEYIMDLYNGSTTTLSCGDWTSHEIHPTCGVKQGDPLSPIIFNLVIDRLFKELLPEVGVEVDGVKTNAFAFADDLVLAASSPSGLQESINKSAEYLLKCGLKVNAGKCMTVSIRTVPKEKKTVIDPRMKFRCLGRVLPAVSRSSEWKYLGIPFTPEGKWTGNPLERLMTSLDTLTKAPLRPQQRLFGLRSVVIPSLYHLLVLGNANISLLRKLDKKVRTAVKKWLDLPHDTPTAYFHATVGDGGLGIPSFRWMVPVQRLKRLKNLPYYRADMPEFYHLSKEIKATLNRLKDRDVQLVGKDDVDRKMAEMLYRAVDGKALQGSDAVPSQHQWVREGTNFLKGKDFISLCKLRINALPLRSRTARGRPKDRRCRAGCNNQETLNHVLQHCPRTHEMRIKRHDAVVKYIEKSLRDQGLEVDYEPHLQGPGGLRKPDIIAKREDTAILVDGIVAAEQADLKRVHREKSKKYEDLKRLIMERYGVERVEFTAATLSARGLWSKDSATDLMRLGVIKARDVKVISTRVLVGGIAIFHDFNRRTSRSTGRRRTLD

SEQ ID NO: 15481 - protein, 943 aa, Nasonia vitripennis
MCEFPDCDRSFHTVQGRGLHHQKAHKDWYDARQKESKRVRWTKEEESLMALKEAQLNMEGQVYVNAALVEAFPTRTLEGIKGKRKQQGYRSMVEAHKERLRKERSEVETIPPPPGMDDEILEKLKATILGFDALEEDQFNGGQLNRICRLVGVTPRDRVLEEITLYLSETFKGSEEKRHRPMVPKKVLKKRQMRRQEYAKTQDLWRKNPNKCLRYLLKDVKNAVTPPKELMVPFWETVMTQVNNVSPGIETRRQVITKLWDPISGLEVKEALPENSTSPGPDGVTAGQLKGVPINILLRVYNILLWCGKLPRYLLKSRTTMIPKKEQAYEPSEFRPITVSSVVARTLNKILATRMFNLVELDDRQKAFRDVDGCAEGTFLMDVILRHHRAKHKPMHMASMDMAKAFDSVTHNTIRDILEGAGVPGVMVEYVMDMYEHSTTALSCGDWTSHEIHPTCGVKQGDPLSPIIFNLVIDRMFKDLPEEVGVEVDGIKTNAFAFADDLVLVASSPSGLQESINKAAEYLLKCGLKVNAGKCMTVSMRTVPREKKTVIDPKMKFRCLGRTLPAVSRSSEWKYLGIPFTPEGKWTGNPLQNLMTSTEILTRAPLRPQQRLFGLRCVVIPSLYHLLVLGSANISLLRKMDKKIRTTVKKWLDLPNDTPSAYFHAAVQDGGIGIPSLRWMVPVQRLKRLKNLPYYRPDQPEYYHLSKEIKNTLNRLKDKNVQLMNKLDVDKRMAELLYKAVDGSALKGSNTVPSQHQWVREGTNFLKGRDFISLCKLRINALPLRCRTARGRPKERLCRAGCHNQETLNHVLQHCPRTHEMRIKRHDAVVNYIAKSLNEQGVEVDCEPHLQGPAGLRKPDIVAKKEDVVIVVDAIIAAEQADLKRVHKEKSKKYEDLKPIIKERYEVEKVEFTSATLSARGLWSRDSASDLLPGLHDNHSDQA

SEQ ID NO: 15482 - protein, 909 aa, Haliotis rubra
MSKRQKTIWRKLKIQYKTTKEKVLLQIVDSRKAKIKVWTERKKKWEKKNKFIKQNKLFRTNEKDFYRQLKTKGDGEHDKRPPMDANERFWKQLWSVPGNCNLEAPWVRDYDHAMHEKVTRSFVCYISPDCLKSVIKKSKSNTAPGPDGIRNRYWKLFPCVQTPLLHCFNTLVDTGDVPPWFCKGRTILLPKKGDLTDPKNFRPITCLNTQYKIFTGCLTNLVSSYCSSNDIIYREQKGARKGCWGCKDQLLVQKMILEEAKTYHRNLSMCWIDYKKAYDSVPHEWILKSLHCIDLPERLLDLLKSLMSCWSTQLEMYSQGQVQTSESIPIRRGIFQGDSFSPLLFCLSLNPLSFLLNKEEGYHPGPPQHRSPTPLTHLLYMDDIELLAKGDSNLKEQVLLVESFSNDIGMTFGLDKCNTLHLKRGKVTNDGSVRLQGGGVIEHLVEDQAYTYLGMQVRDKLQNAQIQEKLRAEYKSRLKKIWSSELNARNKVKATNTFAVPVLSYSFGVVDWTKQDIQSLDRLTRRIMSDNRAHHPRSSLNRLYMPINSGGRGLINVEALHDRILLCTFAHIYLSDDPLVMHVKTHDESKEFHNYFKRAKVVGQNLKFEVDFVDGDVLLDGTAMGVNQVKFFTKSAQSRSFVEKLSEKPLHRVYMQCVEQNSNPTDSFAWMKSAGLKCETEGFLFAAQDQSLPTRNRLNVILKENINMKCRLCNEFTETVQHLVSGCPSLAQTAYLKRHDGMARCFYYRLRHACGFDSEVHPWYDPEHVQGVMENDAFKLLWNRPIYSLRRIPANKPDLVLFDKANEFIYIIEFSVPFDTNVIGKIKEKHDKYADLAFEMSRLHPKYTVVRLPIVLGALGLVPPDLLAQIRRVPGFSTGSTALLTLWVMQKAAVLGSLHILRKVLGGFD

SEQ ID NO: 15483 - protein, 947 aa, Haliotis rubra
MKLSVDCSLHEVNCCVYSAARTLEELHTVSKENTANTKNNTPKKKRFQVKLTETRKYVSWIELCLKLRSSGNPMSKRQKAIWRKLKLKYKTMKEKILLQIVDSLKAKIKVWTERKKKWEKKNKFIKQNKLFRNNEKHFYRQLKTKGDGEHDKRPPMDANERFWKQLWSVPGNSNLEAPWVRDYGHAMHEKVTRSFVCYISPDCLKSVIKKSKSNTAPGPDGIRNRYWKLFPCDQTPLLHCFNTLVDTGDVPPWFCKGRTILFPKKGDLTDPKNFRPITCLNTQYKIFTGCLTNLVSSYCSSNDIIYREQKGARKGCWGCKDQLLVQKMILEGAKTYHRNLSMCWIDYKKAYDSVPHVWILKSLHCIDLPERLLDLLKSLMSCWSTQLEMYSQGQVQTSESIPIRRGIFQGDSFSPLFFCLSLNPLSFLLNKEEGYHPGPPQHRSLTPLTHLLYMDDIELLAKGDSNLKEQVLFVESFSNDIGMTFGLDKCNTLHLKRGKVTNDGSVKLQGGGVFDHLVEDQAYTYLGMQVRDKLQNAQIQDKLRAEYKSRLKKIWSSELTARNKVKATNTFAVPVFSYSFGVVDWTKQDIQSLDRLTRRIMSDNRAQNPRSSLHRLYMPINSGGRGLINVEALHDRILLCTFAHIYLSDDPLVMYVKTHDESKEFHSYFKRAKVVGQNLRFEVDFVDGDVLLDGTVMGVNQVKSFTKSAQSRSFVEKLSEKPLHRVYMQCVEQNSNPTDSFAWMKSAGLKCETEGFLFAVQDQSLPTHIRLNVILKENINMKCRLCNEFTETVQHLVSGCPSLAQTAYLKRHDGMARCFYYRLRHACDFDSEVHPWYDPEHVQGVMENDAFKLLWNRPIYSLRRIPANKPDLVLFDKANEFIYIIEFSVPFDTNVIGKIQEKNTKYADLAFEMSRLHPKYTVVRLPIVLGALGLVPPDLIVPSLLAL

SEQ ID NO: 15484 - protein, 984 aa, Haliotis rubra
MSLKLSSDCSLHEVNCCVYAAARTLEEIHTVSKEKTSTTKNNTPKKNRFQVKLTETRKYISWIELCLKLRSSGSPMSKRQKSIWRKLKLQYKTTKERVLLQIVDTLKAKIKVWTERKKKWEKKNKFIKQNKLFRNNEKHFYRQLKTKGDGEHDKRPPMDANERFWKQLWSVPGDCNLEAPWVRDYDQAMHEKVTRSFVCYISPDCLKSVIKKSKSNTAPGPDGIRNRYWKLFPCVQTPLLHCFNSLVDTGDVPPWFCKGRTILLPKKGDLTDPKNFRPITCLNTQYKIFTGCLTNLVSSYCSSNDIIYREQKGARKGCWGCKDQLLVQKMILEEAKAYHRNLSICWIDYKKAYDSVPHEWILKSLHCIDLPERLLDLLKSLMSCWSTQLEMYSHGQVQTSESIPIRRGIFQGDSFSPLLFCLSLNPLSFLLNKEEGYHPGPPQHRSPTPLTHLLYMDDIELLAKGDSNLKEQVLLVESFSNDIGMTFGLDKCNTLHMKRGKVVNDGSVRLQGGEVIEHLVEDQAYTYLGMQVRDKLQNAQIQDKLRAEYKSRLKKIWSSELNARNKVKATNTFAVPVLSYSFGVVDWTKQDIQSLDRVTRRIMSDNRAHHPRSSLNRLYMPISSGGRGLINVEALHDRILLCTFAHIYLSDDPLVMHVKTHDESKEFHSYFKRAKVVGQNLKFEVDFADGNVLLDGTAMGVNQVKSFTKSAQSRSFVEKLSEKPLHRVYMQCVEQNSNPTDSFAWMKSAGLKCETEGFLFAAQDQSLPTRNRLNVILKENINMKCRLCNEFTETVQHLVSGCPSLAQTAYLKRHDGMARCVYYRLLNACGFDSEVHPWYDPEHVQGVMENDALKLLWNRPIYSLRRIPANKPDLVLFDRANEFIYIIEFSVPFDTNVIGKIKEKHYKYADLVFEMSRLHPKYTVVRHPIVLGALGLVRPDLLAQIRRVPGFSTGSTALLTLWVMQKAAVLGSLHILRKVLGGFD

SEQ ID NO: 15485 - protein, 1022 aa, Haliotis rubra
MDVRVNLFPLADGNSSGKEPIGPEISDAHSSSSSVADLSENPVYILFHSIYDEIFDIPLEKRRPIQQTNVPFPKHEINLLNDIISMKLSSDCSLHEVNCCVYAAARTLEEIHTVSKEKTSNTKKTTPKKNRFQVKLTETRKYISWIQLCLKLRSSGSPMSKRQKTIWRKLKLQYKTTKEKVLLQIVDSLKAKIKVWTERKKKWENKNKFIKQNKLFRNNEKRFYRQLKTKGDGEHDKRPSMDANERFWKQLWSIPGDCSLEAPWVRDYDHAMHEKVNRSFVCYISPDCLKSVIKKSKSNTAPGPDGIRKRHWKLFPCVQTPLLHCFNSLVDTGDVPPWFCKGRTILLPKKGDLTDPKNFRPITCLNTQYKIFTGCLTNLVSSYCSSNDIIYREQKGARKGCWGCKDQLLVQKMILEEAKAYHRNLSMCWIDYKKAYDSVPHEWILKSLHCIDFPERLLDLLKSLMSCWSTQLEMYSLGQVQTSESIPIRRGIFQGDSFSPLLFRLSLNPLSFLLNGEEGYHPGPPQHRSPTPLTHLLYMDDIELLAKGDSNLKEQVLLVESFSNDIGMTFGLDKCNTLHLKRGKVVNDGSVRLQGGGVIEHLVEDQAYTYLRMQVRDKLQNAQIQEKLRAKYKSRLKKIWSSELNARNKVKATNTFAVPVLSYSFGVVDWTKQDIQSLDRLTRRIMSDNRAHHPRSSLNRLYMPINSGGRGLINVEALHDFILLCTFAHIYLPDDPLVMHVKTHDESKEFHSYFKRAKVVGQNLRFEVDFVDGDVLLDGTAMGVNQVKSFTKSAQSRSFVEKLSFPTRNRLNVILKEDIYMKCRLCNEFTETVQHLISGCPSLAQTAYLKRHDGMARCFYYRLRHASGFDSEVHPWYDPEHVQGVMENDTFKLLWNRPIYSLRRIPANKPDLVLFDKVNEFIYIIEFSVPFDNNVIGKIQEKHTKYADLAFEMSRLHPKYTVVRLPFVLGALGLVPPGLLAQIRRVPGFSTGSTALLTLWVMQKAAVLGSLHILRKVLGGCD

SEQ ID NO: 15486 - protein, 1095 aa, Haliotis rubra
MPMYAYLTEQNLRDQFRRLKNLIRREPVQPTTGARQDPLHEQNAQVAADPKLVMDVRVNLFPLSDGNSSGIEPIGPEMSDPHSSSSSVAELSENPVYILFHSIYDEISAIPLEKRRPIQQTNLSFPKHEIDLLNDIISMKLSTDCSLHEVNCCVYAAARTLEELHTVSKEKTSNTKKTTPKKNRFQVKLTETRKYVSWIELCLKLRSSGSPMSKRQKSIWRKLKLQYKTTKEKVLLQIVDSLKAKIKVWTERKKKWEKKNKFIKQNKLFRNNEKHFYRQLKTKGDGEHDKRPSMDANERFWKQLWSIPGDCNLEAPWVRDYDHAMHEKVNRSFVCYISPDCLKSVIKKSKSNTAPGPDGIRNRYWKLFPCVQTPLLHCFNSLVDTGDVPPWFCKGRTILLPKKGDLTDPKNFRPITCLNTQYKIFTGCLTNLVSSYCSSNDIIYREQKGARKECWGCKDQLLVQKMILEEAKTYHRNLSMCWIDYKKAYDSVPHEWILKSLHCIDLPERLLDLLKSLMSCWSTQLEMYSQGQVQTSESIPIRRGIFQGDSFSPLLFCLSLNPLSFLLNREEGYHPGPPQHRSPTPVTHLLYMDDIELLAKGEFNLKEQVLLVESFSNDIGMTFGLDKCNTLHLKRGKVVNDGSVKLQGGGVIEHLVEDQAYTYLGMQVRDKLQNAQIQDKLRAEYKSRLKKIWSSELNARNKVKATNTFAVPVLSYSFGVVDWTKQDIQSLDRLTRRIMSDNRAHHPRSSLNRLYMPINSGGRGLINVEALHDRILLCTFAHIYLSDDPLVMHVKTHDESKEFHSYFKRAKVVGQNLRFQVDFVDGDLLLDGTAMGVNQVKSFTKSAQSRSFVEKLSEKPLHRVYMQCVEQNSNPTDSFAWMKSAGLKCETEGFLFAAQDQSLPTRNRLNVILKENINMKCRLCNEFTETVQHLVSGCPSLAQTAYLKRHDGMARCFYYRLRHACGFDSEVHPWYNPEHVQGVMENDAFKLLWNRPIYSLRRIPANKPDLVLFDKANEFIYILEFSVPFDTNVIGKIKEKHDKYADLAFEMSLACIPSTLSSGSPLFSVPLVWYLLISWRRSGGCLGSPPGVQPF

SEQ ID NO: 15487 - protein, 1112 aa, Craspedacusta sowerbii
MSHKLVQSETDFRASTPLVCNTIATSHIRELQIVNVPYPQDMDEAIGVTTADHIVVQYPENAEWLCPICRDVSSAPSALLKHLLMKHQVKQSRVAFSCVCGYQAQTSRAVGTHRRYCTGESMAPSMSGIRKAYRKTTGSVSCGICDRPFDGQAGLMVHMSRAHKEDYNEMLPTKRVFKWEENELKFLAKMEVDLRASGQVKKINQRLSELIPSRNATQIATVRKRDTYKELVEALTVEQDVRDPRVEAGPTTVEGTSVDSPVDVTKARAALDEWVAASAGQLTEQVVTVKTYVEKLLTGDDCWNETKAVLFPVPARRKHTYRFRRVRYRRVTKRRGPRQNVKQARFKAVQRSYEQNRSETLRQLIDGTYNFDQRHEVVTPSIEEIETAFVDRLERDVGADKSPHVYGPPCDPSPFKGFTGSEIESAISDMNMATAPGTDMLPFKSIRSLPAELLTQIFNGWWTYGVPAAEKENRTVLIPKGGDPKLVNNWRPITIGNVLVRLYAKCWDVRLRRVIHMSERQKAFCPEDGCFENVKIMQHVVRTSKKQRKEVNMVMLDLAKAFDTVLHESVLKALDRKGIPPDVSQVVSDLYAHTKTTVSVQGGQTRKINILKGVKQGCPLSPLLFNLIMDDLISRLEKLDYGVAIGNTKVSCLAFADDLVLLAPTNFEMDALLNICERFFEEKSLKVNTSKSNSLRVLPVKGKQSLKVVMENHRFWKGEPIPSIGFKALAKYLGIKMNPLGEIILPEAEWNGQFDRLCGSPLKPYQKIVGLREIIIPRMIHQLRLSNAGKSKLMAVDRRVRDVFKRILHLPEDKSSSWIHLASGGGIPSLVDLISCSRVKSNARMFKSGDAVAAAAAYANGERLAQMQQRLGVAGLPHNEMRNTFVERRRETLAREYNGVARLTMADSAVTRPWLWNGRFSSKEMVGAIKILSGTLPTNIRNTRGVEEHSLKLCRNGCKVAETDLHVLSSCCMTRNAVSRRHNLVRDKVAKELSRKGGWTIYKERTWVIGQMRFRPDITAERGTERIFVELTIPYEQTKEYLDRRLQEKKEYYKAPTEPSNKCVPENGTASVIAIVIGCAGTVTPAGKDECGKLGKLALGCSSSCRYRDDRR

SEQ ID NO: 15488 - protein, 972 aa, Dermanyssus gallinae
MTDHGDNTPNRGLASPRSGQSDPNRAPCPTCGLSFTRRGLRRHITTKHGGVAYNINDESRPSNSRFTADGLIGVIQDVFRRWRLVRILPKSVRRQVAEEFTKVLCSVAENNDNTAWLSLFSFAPVVLRLPDGGKDDRSLAVIVRKNLRDFAQGKRFDDGSSRLSNVRPRQRTVDTVRLAITKLSEGDISSAARVLISEDTLAQKPSETALLLEKHPPAPSPLSWPSPPQVPLPSTTSADNVRSAIKTFSRSSAAGLDFIRPRLLQDLLSPALGAVADRLAAALAKVVDLLRWGSPLSEWRPLIFGARLFALKKKDGSVRPIACSSAIRRLAAKIGIFENKADISCALGDHQLGFATPGGCEAAVHSTRSFLESRSEATLVVKLDFRNAFNSIRRDHLMSAVKAWAPSMFHQVELAYKEPSCLLLPHDVIMSQTGVQQGDPLGPPLFCLAVKELVDSLECPLNVWYLDDGVLGGAPDAVLRDIHRIIEFAERSGLALNSEKCEVHIVGGAADSEVLEALPGCKTVGTDLELLGVPLFPQGVPAALERWLAKLEDAMSRIHLVGSHRGLFLLRSSFSALRLNHLFRGADCSLASGLLERLNDSMLATVEALLNLSLSTGARQQALLPVLWGGLGLPDATVLSEIALAASLHRSMQQARTLLDSAALTDLEARLETSHRRAVALCGHEPAEAGHQKEWSTALYEQRVVDLIAGCTTDADKARLRAVSSKGAGAWLHAIPCARIGTLLDDESVRIAVGLRLGTDIVYTHTCVCGDVVGPDGRHGLSCIVSAGRRARHQALNETFSRALRSSGLPCVLEPVGLDREGGKRPDGLTLTPFESGCMLVWDATVTDSLAPSMVSAGAARASHASALAEANKARKYQNIGYSYKFYPFAFETLGGPGPSTRSLLQKVGKRLILASGDKRAGDFLRQRLSLDVQRGNAASVRGTLQKWLVPTGPPVTVHTFAGTQMSCSHPE

SEQ ID NO: 15489 - protein, 956 aa, Dermanyssus gallinae
MTDHGDNTPNRGLASPRSGQSDPNRAPCPTCGLSFTRRGLRRHITTKHGGVAYNIDDESRPSNSRFTADGLIGVIQDVFRRWRLVRILPKSVRRQVAEEFTKVLCSVAENNDNTAWLSLFSFAPVVLRLPDGGKDDRSLAVIVRKNLRDFAQGKRFDDGSSRLSNVRPRQRTVDTVRLAITKLSEGDVSSAARVLISEDTLAQKPSETALLLEKHPPAPSPLSWPSPPQVPLPSTTSADNVRSAIKTFSRSSAAGLDFIRPRLLQDLLSPALGAVADRLAAALAKVVDLLRWGSPLSEWRPLIFGARLFALKKKDGSVRPIACSSAIRRLAAKIGIFENKADISCALGDHQLGFATPGGCEAAVHSTRSFLESRSEATLVVKLDFRNAFNSIRRDRLLSAVKAWAPSMFHQVELAYKEPSCLLLPHDVIMSQTGVQQGDPLGPPLFCLAVKELVDSLECPLNVWYLDDGVLGGAPDAVLRDIHRIIEFAERSGLALNSAKCEVHVVGGAADSEVLEALPGCKTVGTDLELLGVPLFPQGVPAALERWLAKLEDAMSRIHLVGSHRGLFLLRSSFSALRLNHLFRGADCSLASGLLERLNDSMLATVEALLNLSLSTGARQQALLPVLWGGLGLPDATVLSEIALAASLHRSIQQARTLLDSAALTDLEARLETSHRRAVALCGHEPAEAGHQKEWSTALYEQRVVDLIAGCTTDADKARLRAVSSKGAGAWLHAIPCARIGTLLDDESVRIAVGLRLGTDIVYTHTCVCGDVVGPDGRHGLSCIVSAGRRARHQALNETFSRALRSSGLPCVLEPVGLDREGGKRPDGLTLTPFESGCMLVWDATVTDSLAPSMVSAGAARASHASALAEANKARKYQNIGYPYKFYPFAFETLGGPGPSTRSLLQKVGKRLILASGDKRAGDFLRQRLSLDVQRGNAASVRGTLQKWLVPTLDPP

SEQ ID NO: 15490 - protein, 947 aa, Dermanyssus gallinae
MTDHGDNTPNRGPVSPRSGQSDPNRAPCPICGLSFTRRGLRRHITTKHGGVAYNIDDESRPSNSRFTADGLIGVIQDVFCRWRLVRILPKSVRRQVAEEFTKVLCSVAENNDDTAWLSLFSFAPVVLRLPDGGKDDRSLAVIVRKNLRDFAQGRRFDDGSSPLSNIRPRQRTVDTVRLAITKLSEGDVSSAARVLISEDTLAQKPSETVSLLDKHPPAPSPLSWPSPPQVPLPSTTSADNVRSAIKTFSRSSAAGLDFIRPRLLQDLLSPALGAVADRLAAALAKVVDLLRWGSPLSEWRPLIFGARLFALKKKDGSVRPIACSSAIRRLAAKIGIFENKADISCALGDHQLGFATPGGCEAAVHSTRSFLESRSEATLVVKLDFRNAFNSIRRDHLLSAVKAWAPSMFHQVELAYKEPSCLLLPHGVIMSQTGVQQGDPLGPPLFCLAVKDLVDSLECPLNVWYLDDGVLGGAPDAVLRDLHRIIEFAERSGLALNSAKCEVHAVGGAADSEVVEALPGCKTVGTDLELLGVPLFPQGVPAALERWLAKLEDAMPRIHLVGSHRGLFLLRSSFSALRLNHLFRGADCSLASGLLERLNDSMLATVEALLNLSLSTSARRQALLPVLWGGLGLPDATVLSEIALAASLHRSMQQARTLLDSAALTDLEARLETSHRRAVALCGHEPAEAGHQKEWSTALYEQRVVDLIAGCTTDADKARLRAVSSKGAGAWLHAIPCARIGTLLDDESVRIAVGLRLGTDIVYTHTCVCGDVVGPDGRHGLSCIVSAGRRARHQALNETFSRALRSSGLPCVLEPVGLDREGGKRPDGLTLTPFESGCMLVWDATVTDSLAPSMVSAGAARASHASALAEANKVRKYQNIGYPYKFYPFAFETLGGPGPSTRSLLQNVGKRLILASGDKRAGDFLRQRLSLDVQRGNAASVRGTLQK

SEQ ID NO: 15491 - protein, 958 aa, Dermanyssus gallinae
MTDHGDNTPNRGPANPQSGQSDPNRAPCPICGLSFTRRGLRRHITTKHGGVAYNINDESRPSNSRFTGDGLIGVIQDVFRRWRLVRILPKSVRRQVAEEFTKVLCSVAENNDDTAWLSLFSFAPVVLRLPDGGKDDRSLAVIVRKNLRDFAQGKRFDDGSSPLSNVRPRQHTVDTVRLAITKLSEGDVSSAARVLISEDTLAQKPSETVLLLDKHPPAPSPLSWPSPPQVPLPSTTSADNVRSAIKTFSQSSAAGLDFIRPRLLQDLLSPALEAVADRLAAALAKVVDLFHWGSPLSEWRPLRGIFGARLFALKKKDGSVRPIACSSAIRRLAAKIGIFENKADISCALGDHQLGFATPGGCEAAVHSTRSFLESRSEATLVVKLDFRNAFNSIRRDHLLSAVNAWAPSMFHQVKLAYKEPSCLLLPHDVIMSQTGVQQGDPLGPPLFCLAVKELVDSLECPLNEWYLDDGVLGGAPDAVLRDIHRIIEFAERSGLALNSAKCEVHVVGGAADSEVLEALPGCKTVGTDLELLGVPLFPQGVPAALERWLAKLEDAMSRIHLVGSHRGLFLLRSSFSALRLNHLFRGADCSQASGLLERLNDSMLATVEALLNLSLSTGARQQALLPVLWGGLGLPDATVLSEIALAASLHRSMQQARTLIDSAAFTDLEARLETSHRRAVALCGHEPAEAGHQKEWSTALYEQRVVDLIAGCTTDADKARLRAVSSKGAGAWLHAIPCARIGTPLDDESVRIAVGLRLGTDIVYTHTCVCGDVVGPDGRHGLSCIVSAGRRARHQALNETFSRALRSSGLPCVLEPVGLDREGGKRPDGLTLTPFESGCMLVWDATVTDSLAPSMVSAGAARASHASALAEANKVRKYQNIGYPYKFYPFAFETLGGPGPSTRSLLQKVGKRLILASGDKRAGDFLRQRLSLDVQRGNAASVRGTLQKWLVPTLDPP

SEQ ID NO: 15492 - protein, 956 aa, Dermanyssus gallinae
MTDHGDNGPYHGLASPRSGQSDPNRVSCPTCALTFTRRGLRRHITVKHGGGAHNIVDESERSNSRFTADQLISVIQVVTRRWRLVRILPKSVRRQVAEVFTKVLCSVADNNDNTAWLALFSFAPVVLRLPDGGKDDRSLAVIVRKNLRDFTDGKRFDLSGSPVPNQPSRQRTVDTVRLAITKLSEGDVSSAARVLISEDTLAQKPSETAVLLDKHPPAPSFLTWPSPPHVLLPSTTSGESVRSAIQTFSRSSAAGLDFIRPRLLQDLLSPALGAAADRLAAALAKVVDLLRWGSPFPDWRPLIFGARLFALKKKDGGVRPIACSSVIRRLAAKICIFENKTEVSGALGCHQLGFATPGGCEAAVHSTLSFLESRSGATLVVKLDFKNAFNTIRRDHLLNAVKAWAPSMFHQVELAYKEPSCLLLPHDTIMSQTGLQQGDPLGPPLFCLGIKELVDSLECPLNTWYLDDGVLGGAPDAVLRDIHRVIEFAERSGLALNPAKCEVHVVGGATDSEVLEVLPGCRTVGTELELLGVPLFPEGVPAALERWIEKLEHAMSRIPLVGSHRGLFLLRSSFSALRLNHLFRGADCSLAPGLLERLNDSVLTTVEALLNLSLSAEARQQALLPVLWGGLGLPDAIVLSEVALVASLHRSLQQAKSLLDSVALTDLEDRLETSRRRAVALCGHEPTEAGRQRDWSAALHEQRVENLIAESATDADRARLRAVSSKGAGAWLHAIPCARIGTLLDDESVRIAVGLRLGTDLVHAHTCVCGDAVQPDGRHGLSCIVSAGRRARHQALNETFSRALRSSGLPCVLEPVGLDREGGKRPDGLTLTPFESGCMLVWDATVTDSLAPSMVSAGAARAGYASALAEAGKVRKYQNIGYPYGFYPLAFETLGGPGPSTRGLLQKVGKRLGLASGDRRAGEFLRQRLSLDVQRGNAASVRGTLQRWLVPTLDPS

SEQ ID NO: 15493 - protein, 956 aa, Dermanyssus gallinae
MTDHGDNTPNRGPASPRSGQSDPNRAPCPTCGLSFTRRGLRRHITTKHGGVAYNIDDESRPSNSRFTADGLIGVIQDVFCRWRLVRILPKSVRRQVAEEFTKVLCSVAENNDDTAWLSLFSFAPVVLRLPDGGKDDRSLAVIVRKNLRDFAQGKRFDDGSSPLSNVRPRQRTVDTVRLAITKLSEGDVSSAARVLISEDTLAQKPSETVSLLDKHPPAPSPLSWPSPPQVPLPSTTSADNVRSAIKTFSRSSAAGLDFIRPRLLQDLLSPALGAVADRLAAALAKVVDLLRWGSPLSEWRPLIFGARLFALKKKDGSVRPIACSSAIRRLAAKIGIFENKADISCALGDHQLGFATPGGCEAAVHSTRSFLESRSEATLVVKLDFRNAFNSIRRDHLLSAVKAWAPSMFHQVELAYKEPSCLLLPHDVIMSQTGVQQGDPLGPPLFCLAVKDLVDSLECPLNVWYLDDGVLGGAPDAVLRDIHRIMEFAERSGLALNSAKCEVHAVGGAADSKVLEALPGCKTVGTDLELLGVPLFPQGVPAALERWLAKLEDAMSRIHLVGSHRGLFLLRSSFSALRLNHLFRGADCSLASGLLERLNDSMLATVEALLNLSLSTGARRQALLPVLWGGLGLPDATVLSEIALAASLHMSMQQARTLLDSAALTDLEARLETSHRRAVALCGHEPAEAGHQKEWSTALYGQRVVDLIAGCTTDADKARLRAVSSKGAGAWLHAIPCARIGTLLDDESVRIAVGLRLGTDIVYTHTCVCGDVVGPDGRHGLSCVVSAGRRARHQALNETFSRALRSSGLPCVLEPVGLDREGGKRPDGLTLTPFESGCMLVWDATVTDSLAPSMVSAGAARASHASALAEANKVRKYQNIGYPYKFYPFAFETLGGPGPSTRSLLQKVGKRLILASGDKRAGDFLRQRLSLDVQRGNAASVRGTLQKWLVPTLDPP

SEQ ID NO: 15494 - protein, 956 aa, Dermanyssus gallinae
MTDHGDNTPNRGPASPRSGQSDPNRAPCPTCGLSFTRRGLRRHITTKHGGVAYNIDDESRPSNSRFTADGLIGVIQDVFCRWRLVRILPKSVRRQVAEEFTKVLCSVAENNDDTAWLSLFSFAPVVLRLPDGGKDDRSLAVIVRKNLRDFAQGKRFDDGSSPLSNVRPRQRTVDTVRLAITKLSEGDVSSAARVLISEDTLAQKPSETVSLLDKHPPAPSPLSWPSPPQVPLPSTTSADNVRFAIKTFSRSSAAGLDFIRPRLLQDLLSPALGAVADRLAAALAKVVDLLRWGSPLSEWRPLIFGARLFALKKKDGSVRPIACSSAIRRLAAKIGIFENKADISCALGDHQLGFATPGGCEAAVHSTRSFLESRSEATLVVKLDFRNAFNSIRRDHLLSAVKAWAPSMFHQVELAYKEPSCLLLPHDVIMSQTGVQQGDPLGPPLFCLAVKDLVDSLECPLNVWYLDDGVLGGAPDAVLRDIHRIMEFAERSGLALNSAKCEVHAVGGAADSKVLEALPGCKTVGTDLELLGVPLFPQGVPAALERWLAKLEDAMSRIHLVGSHRGLFLLRSSFSALRLNHLFRGADCSLASGLLERLNDSMLATVEALLNLSLSTGARRQALLPVLWGGLGLPDATVLSEIALAASLHRSMQQARTLLDSAALTDLEARLETSHRRAVALCGHEPAEAGHQKEWSTALYGQRVVDLIAGCTTDADKARLRAVSSKGAGAWLHAIPCARIGTLLDDESVRIAVGLRLGTDIVYTHTCVCGDVVGPDGRHGLSCIVSAGRRARHQALNETFSRALRSSGLPCVLEPVGLDREGGKRPDGLTLTPFESGCMLVWDATVTDSLAPSMVSAGAARASHASALAEANKVRKYQNIGYPYKFYPFAFETLGGPGPSTRSLLQKVGKRLILASGDKRAGDFLRQRLSLDVQRGNAASVRGTLQKWLVPTLDPP

SEQ ID NO: 15495 - protein, 956 aa, Dermanyssus gallinae
MTDHGDNGPYHGLASPRSGQSDPNRVPCPTCALTFTRRGLRRHITVKHGGGAHNIVDESERSNARFTADQLISVIQVVTRRWRLVRILPKSVRRQVAEVFTKVLCSVADNNDSTAWLALFSFAPVVLRLPDGGKDDRSLAVIVRKNLRDFTDGKRFDLSGSPVPNQPSRQRTVDTVRLAITKLSEGDVSSAARVLISEDTLAQKPSETAVLLDKHPPAPSFLTWPSPPHVLLPSTTSGESVRSAIQTFSRSSAAGLDFIRPRLLQDLLSPALGAAADRLAAALAKVVDLLRWGSPFPDWRPLIFGARLFALKKKDGDVRPIACSSVIRRLAAKICIFENKAEVSGALGCHQLGLATPGGCEAAVHSTRSFLESRSGATLVVKLDFKNAFNTIRRDHLLNAVKAWAPSMFHQVELAYKEPSCLLLPHDTIMSQTGVQQGDPLGPSLFCLGIKELVDSLECPLNTWYLDDGVLGGAPDAVLRDIHRVIEFAERSGLALNPAKCEVHVVGGATDSEVLEVLPGCRTVGTDLELLGVPLFPEGVPAALERWIEKLEHAMSRIPLVGSHRGLFLLRSSFSALRLNHLFRGADCSPAPGLLERLNDSVLTTVKALLNLSLSAEARQQALLPVLWGGLGLPDATVLSEVALVASLHRSLQQAKSLLDSVALTDLEDRLETSRRRAVALCGHEPAEAGRQRDWSAALHEQRVENLIAESATDADRARLRAVSSKGAGAWLHAIPCARIGTLLDDESVRIAVGLRLGTDLVHAHTCVCGDAVQPDGRHGLSCIVSAGRRARHQALNETFSRALRSSGLPCVLEPVGLDREGGKRPDGLTLTPFESGCMLVWDATVTDSLAPSMVSAGAARAGYASALAEAGKVRKYQNIGYPYGFYPLAFETLGGPGPSTRGLLQKVGKRLGLASGDRRAGEFLRQRLSLDVQRGNAASVRGTLQRWLVPTLDPS

SEQ ID NO: 15496 - protein, 785 aa, Dermanyssus gallinae
MVDTVRLAITKLSEGDVSSAARVLISEDTLAQKPSETAVLLDKHPPAPSFLTWPSPPHVLLPSTTSGESVRSAIQTFSRSSAAGLDFIRPRLLQDLLSPALGAAADRLAAALAKVVDLLRWGSPFPDWRPLIFGARLFALKKKDGGVRPIACSSVIRRLAAKICIFENKAEVSGALGCHQLGFATPGGCESAVHSTRSFLESRSGATLVVKLDFKNAFNTIRRDHLLNAVKAWAPSMFHQVELAYKEPSCLLLPHDTIMSQTGVQQGDPLGPPLFCLGIKELVDSLECPLNTWYLDDGVLGGAPDAVLRDIHRVIEFAERSGLALNPAKCEVHVVGGATDSEVLEVLPGCRTVGTDLELLGVPLFPEGVPAALERWTEKLEHAMSRIPLVGSHRGLFLLRSSFSALRLNHLFRGADCSLALGLLERLNDSVLTTVEALLNLSLSAEARQQALLPVLWGGLGLPDAIVLSEVALVASLYRSLQQAKSLLDSVALTDLEDRLETSRRRAVALCGHEPAEAGRQRDWSAALHEQRVENLIAESATDADRARLRAVPSKGAGAWLHAIPCARIGTLLDDESVRIAVGLRLGTDLVHAHTCVCGDAVQPDGRHGLSCIVSAGRRARHQALNETFSRALRSSGLPCVLEPVGLDREGGRRPDGLTLTPFESGCMLVWDATVTDSLAPSMVSAGAARAGYASALAEAGKVRKYQNIGYPYGFYPLAFETLGGPGPSTRGLLQKVGKRLGLASGDRRAGEFLRQRLSLDVQRGNAASVRGTLQRWLVPTLDPS

SEQ ID NO: 15497 - protein, 956 aa, Dermanyssus gallinae
MTDHGDNTPNRGLASPRSGQSDPSRAPCPTCGLSFTRRGLRRHITTKHGGVAYNIDDESRPSNSRFTADGLIGVIQDVFRRWRLVRILPKSVRRQVAEEFTKVLCSVAENNDNTAWLSLFSFAPVVLRLPDGGKDDRSLAVIVRKNLRDFAQGKRFDDGSSRLSNVRPRQRTVDTVRLAITKLSEGDVSSAARVLISEDTLAQKPSETALLLEKHPPAPSPLSWPSPPQVPLPSTTSADNVRSAIKTFSRSSAAGLDFIRPRLLQDLLSPALGAVADRLAAALAKVVDLLRWGSPLSEWRPLIFGARLFALKKKDGSVRPIACSSAIRRLAAKIGIFENKADISCALGDHQLGFATPGGCEAAVHSTRSFLESRSEATLVVKLDFRNAFNSIRRDHLMSAVKAWAPSMFHQVELAYKEPSCLLLPHDVIMSQTGVQQGDPLGPPLFCLAVKELVDSLECPLNVWYLDDGVLGGAPDAVLRDIHRIIEFAERSGLALNSEKCEVHIVGGAADSEVLEALPGCKTVGTDLELLGVPLFPQGVPAALERWLAKLEDAMSRIHLVGSHRGLFLLRSSFSALRLNHLFRGADCSLASGHLERLNDSMLATVEALLNLSLSTGARQQALLPVLWGGLGLPDATVLSEIALAASLHRSMQQARTLLDSAALTDLEARLETSHRRAVALCGHEPAEAGHQKEWSTALYEQRVVDLIAGCTTDADKARLRAVSSKGAGAWLHAIPCARIGTLLDDESVRIAVGLRLGTDIVYTHTCVCGDVVGPDGRHGLSCIVSAGRRARHQALSETFSRALRSSGLPCVLEPVGLDREGGKRPDGLTLTPFESGCMLVWDATVTDSLAPSMVSAGAARASHASALAEANKARKYQNIGYPYKFYPFAFETLGGPGPSTRSLLQKVGKRLILASGDKRAGDFLRQRLSLDVQRGNAASVRGTLQKWLVPTLDPP

SEQ ID NO: 15498 - protein, 902 aa, Dermanyssus gallinae
MNDESQPSNSRLTADRLIGVIQDVTRRWRLVRILPKSVRRQVAEEFTKVLCSVAENNDDTAWLTLFSFAPVVLRLPDGGKDDRSLAVIVRKNLRDFAQGKRFDDGSGPPSNLRPRQRTVDTVRLAITKLSEGDVSLAARVLISEDTLAQKPSETALLWDKHPPAPSPLSWPSPPHVPLPSTTLADNVRSAIRTFSRSSAAGLDFIRPRLLQDQLSLALGAAADRLAAALAKVVDLLRWGSPLSEWRPLIFGARLFALKKKDGSVRPIACSSAIRRLAAKIGILENKADISHALGVHQLGFATPGGCETAVHSTRSFLESRSEATLVVKLDFRNAFNSIRRDYLLSAVKAYVPSMFHQVELAYKKPSCLLLPHDVIMSQTGVQQGDPLGPPLFCLAVKELVDSLECPLNVWYLDDGVLGGAPDAVMRYIHRVIEFAERSGLALNPAKCEVHAVGGAADSEVLQALSGCKTVGKNLELLGVPLFPQGVPDVLERWLVKLENAMSRIHLVGSHRGLFLLRSSFSALRLNHLFRGADCSRASGILERLNDRVMSTLEALLNLSLSARARQQALLPVLWGGLGLPDATVLSETALAASLHRSMQQARSLLDSVALTDLEARLETSHRKAVALCGHEPVEAGHQREWAAILYEQRVENLIAECATDADKARLRAVSSKGAGAWLHAIPCAQIGTLLDDESVKIAVGLRLGTDLVYTHACVCGDVVQPDGRHGLSCIVSAGRRARHQALNETFSRALRSSGLPCVLEPVGLDREGGKRPDGLTLTPFERGCMLVWNATVTDSLAPSMVSAGAARAGHASALAEAGKVRKYQNIGYPYEFHPLAFETLGGPGRSTRSLLQKVGKRLILASGDKRASDFLRQRLSLDVQRGNAASVRGTLQKWLVPTLDPP

SEQ ID NO: 15499 - protein, 896 aa, Dermanyssus gallinae
MTDHGDNTPNRGCASPRSGQSDPNRAPCPICGLSFTRRGLRRHITTKHGGVAYNIDDKSRPSNSRFTADGLIGVIQDVFCRWRLVRILPKSVRRQVAEEFTKVLCSVAENNDDTAWLSLFSFAPVVLRLPDGGKDDRSLAVIVRKNLRDFAQGRRFDDGSSPLSNIRPRQRTVDTVRLAITKLSEGDVSSAARVLISEDTLAQKPSETVSLLDKHPPAPSPLSWPSPPQVPLPSTTSADNVRSAIKTFSRSSAAGLDFIRPRLLQDLLSPALGAVADRLAAALAKVVDLLRWGSPLSEWRPLIFGARLFALKKKDGSVRPIACSSAIRRLAAKIGIFENKADISCALGDHQLGFATPGGCEAAVHSTRSFLESRSEATLVVKLDFRNAFNSIRRDHLLSAVKAWAPSMFHQVELAYKEPSCLLLPHGVIMSQTGVQQGDPLGPPLFCLAVKDLVDSLECPLNVWYLDDGVLGGTPDAVLRDLHRIIEFAERSGLALNSAKCEVHAVGGAADSEVVEALPGCKTVGTDLELLGVPLFPQGVPAALERWLAKLEDAMSRIHLVGSHRGLFLLRSSFSALRLNHLFRGADCSLASGLLERLNDSMLATVEALLNLSLSTSARRQALLPVLWGGLGLPDATVLSEIALAASLHRSMQQARTLLDSAALTDLEARLETSHRRAVALCGHEPAEAGHQKEWSTALYEQRVVDLIAGCTTDADKARLRAVSSKGAGAWLHAIPCARIGTLLDDESVRIAVGLRLGTDIVYTHTCVCGDVVGPDGRHGLSCIVSAGRRARHQALNETFSRALRSSGLPCVLEPVGLDREGGKRPDGLTLTPFESGCMLVWDATVTDSLAPSMVSAGAARASHASALAEANKVRKYQNIGYPYKFYPFAFETLGG

SEQ ID NO: 15500 - protein, 956 aa, Dermanyssus gallinae
MTDHGDNTPNRGLAIPRSGQSDPNRAPCPTCGLSFTRRGLRRHITTKHGGVAYNIDDESRPSNSRFTADGLIGVIQDVFRRWRLVRILPKSVRRQVAEEFTKVLCSVAENNDNTAWLSLFSFAPVVLRLPDGGKDDRSLAVIVRKNLRDFAQGKRFDDGSSRLSNVRPRQRTVDTVRLAITKLSEGDVSSAARVLISEDTLAQKPSETALLLEKHPPAPSPLSWPSPPQVPLPSTTSADNVRSAIKTFSRSSAAGLDFIRPRLLQDLLSPALGAVADRLAAALAKVVDLLRWGSPLSEWRPLIFGARLFALKKKNGSVRPIACSSAIRRLAAKIGIFENKADISCALGDHQLGFATPGGCEAAVHSTRSFWESRSEATLVVKLDFRNAFNSIRRDHLMSAVKAWAPSMFHQVELAYKEPSCLLLPHDVIMSQIGVQQGDPLGPPLFCLAVKELVDSLECPLNVWYLDDGVLGGAPDAVLRDIHRIIEFAERSGLALNSAKCEVHIVGGAADSEVLEALPGCKTVGTDLELLGVPLFPQGVPAALERWLAKLEDAMSRIHLVGSHRGLFLLRSSFSALRLNHLFRGADCSLAFGLLERLNDSMLATVEALLNLSLSTGARQQALLPVLWGGLGLPDATVLSEIALAASLHRSMQQARTLLDSAALTDLEARLETSHRRAVALCGHEPAEAGHQKEWSTALNEQRVVDLIAGCTTDADKARLRAVSSKGAGAWLHAIPCARIGTLLDDESVRIAVGLRLGTDIVYTHTCVCGDVVGPDGRHGLSCIVSAGRRARHQALNETFSQALRSSGLPCVLEPVGLDREGGKRPDGLTLTPFESGCMLVWDATVTDSLAPSMVSAGAVRASHASALAKANKARKYQNIGYPYKFYPFAFETLGGPGPSTRSLLQKVGKRLILASGDKRAGDFLRQRLSLDVQRGNAASVRGTLQKWLVPTLDPP

SEQ ID NO: 15501 - protein, 956 aa, Dermanyssus gallinae
MTDHGDNTPNRGPASPRSGQSDPNRAPCPTCGLSFTRRGLRRHITTKHGRVAYNIDDESRPSNSRFTADGLIGVIQDVFCCWRLVRILPKSVRRQVAEEFTKVLCSVAENNDDTAWHSLFSFAPVVLRLFDGGKDDRSLAVIVRKNLRDFAQGKRFDDGSSPLSNVRPRQRTVDTVRLAISKLSEGDVSSAARVLISEDTLAQKPSETVSLLDKHPLAPSPLSWPSPPQVPLPSTTSADNVRSAIKTFSRSSAAGLDFIRPRLLQDLLSPALGAVADRLAAALAKVVDPLRWGSPLSEWRPLIFGARLFALKKKDGSVRPIACSSAIRRLAAKIGIFENKADLSCALGDHQLGFATPGGCEAAVHSTRSFLESRSEATLVVKLDFRNAFNSIRRDHLLSAVNAWAPRMFHQVELAYKEPSCLLLPHDVIMSQTGVQQGAPLGPPLFCLAVKDLVDSLECPLNVWYLDDGVLGGAPDAVLRDIHRIIEFAERSGLALNSAKCEVHAVGGAADSEVLEALPGCKTVGTDLELLGVPLFPQGVPAALERWLAKLEDAMSRIHLVGSHRGLFLLRSSFSALRLNHLFRGADCSLASGLLERLNDSMLATVEALLNLSLSTGARRQALLPVFWGGLGLPDATVLSEIALAASLHRSMQQARTLLDSAALTDLEARLETSHRRAVALCGHEPAEAGYQKEWSTALYEQRVVDLIAGCTTDADKARLRAVSSKGAGAWLHAIPCARIGTLLDDESVRIAVGLRLGTDIVYTHTCVCGDVVGPDGRHGLSCIVSAGRRARHQALNETFSRALRSSGLPCVLEPVGLDREGGKRPDGLTLTPFESGCMLVWDATVTDSLAPSMVSAGAARASHALALAEANKVRKYQNIGYPYKFYTFAFETLGGPDPSTRCLLQKVGKRLILASGDKRAADFLRQRLSLDVQRGNAASVRGTLQKWLVPTLDPP

SEQ ID NO: 15502 - protein, 956 aa, Dermanyssus gallinae
MTDHGDNTPNRGPASPRSGQSDPNRAPCPTCGLSFTRRGLRRHITTKHGGVAYNIDDESRPSNSRFTANGLIGVIQDVFCRWRLVRILPKSVRRQVAEEFTKVLCSVAENNDDTAWLSLFSFAPVVLRLPDGGKDDRSLAVIVRKNLRDFAQGKRFDDGSSPLSNVRPRQRTVDTVRLAITKLSDGDVSSAARVLISEDTLAQKPSEAVSLLDKHPPAPSPLSWPSPPQVPLPSTTSADNVRSAIKTFSRSSAAGLDFIRPRLLQDLLSPALGTVADRLAAALAKVVDLLRWGSPLSEWRPLIFGARLFALKKKDGSVRPIACSSAIRRLAAKIGIFENKADISCALGDHQLGFATPGGCEAVVHSTRSFLESRSEPTLVVKLDFRNAFNSIRRDYLLSAVKAWAPSMFHQVELAYKEPSCLLLPHDVIMSQTGVQQGDPLGPPLFCLAVKDLVDSLECPLNVWYLDDGVLGGAPDAVLRDIHRIIEFAERSGLALNSAKCEVHAVGDAADSEVMEALPGCKTVGTDLELLGVPLFPQGVPAALERWLAKLEDAMSRIHLVGSHRGLFLLRSSFSALRLNHLFRGADCSLASGLLERLNDSMLATVEALLNLSLSTGARRQAVLPVLWGGLGLPDATVLSEIALAASLHRSMQQARTLLDSAALTDLEARLETSHRRAVALCGHEPAEAGLQKEWSTALYEQRVVDLIAGCTTDADKARLLAVSSKGAGAWLHAIPCARIGTLLDDESVRIAVGLRLGTDIVYTHTCVCGDVVGPDGRHGLSCIVSAGRRARHQALNETFSRALRSSGLPCVLEPVGLDREGGKRPDGLTLTPFESGCMLVWDATVTDSLAPSMVSAGAARASHASAPAEANKVRKYQNIGYPYKFYPFAFETLGGPGPSTRSLLQKVGKRLIQASGDKRAGDFLRQRLSLDVQRGNAASVRGTLQKWLVPTLDPP

SEQ ID NO: 15503 - protein, 956 aa, Dermanyssus gallinae
MTDHGDNTPNRGLASPRSGQSDPNRAPCPTCGLSFTRRGLRRHITTKHGGVAYNIDDESRPSNSRFTADGLIGVIQDVFRRWRLVRILPKSVRRQVAEEFTKVLCSVAENNDNTAWLSLFSFAPVVLRLPDGGKDDRSLAVIVRKNLRDFAQGKRFDDGSSRLSNVRPRQRTVDTVRLAITKLSEGDVSSAARVLISEDTLAQKPSETALLLEKHPPAPSPLSWPSPPQVPLPSTTSADNVRSAIKTFSRSSAAGLDFIRPRLLQDLLSPALGAVADRLAAALAKVVDLLRWGSPLSEWRPLIFGARLFALKKKDGSVRPIACSSAIRRLAAKIGIFENKADISCALGDHQLGFATPGGCEAAVHSTRSFLESRSEATLVVKLDFGNAFNSIRRDHLMSAVKAWAPSMFHQVELAYKEPSCLLLPHDVIMSQTGVQQGDPLGPPLFCLAVKELVDSLECPLNVWYLDDGVLGGAPDAVLRDIHRIIEFAKRSGLALNSAKCEVHIVGGAADSEVLEALPGCKTVGTDLELLGVPLFPQGVPAALERWLAKLEDAMSRIHLVGSHRGLFLLRSSFSALRLNHLFRGADCSLASGLLERLNDSMLATVEALLNLSLSTGARQQALLPVLWGGLGLPDATVLSEIPLAASLHRSMQQARTLLDSAALTDLEARLETSHRRAVALCGHEPAEAGHQKEWSTALYEQRVVDLIAGCTTDADKARLRAVSSKGAGAWLHAIPCARIGTLLDDESVRIAVGLRLGTDIVYTHTCVCGDVVGPDGRHGLSCIVSAGRRARHQALNETFSRALRSSGLPCVLEPVGLDREGGKRPDGLTLTPFESGCMLVWDATVTDSLAPSMVSAGAARASHASALAEANKTRKYQNIGYPYKFYPFAFETLGGPGPSTRSLLQKVGKRLILASGDKRAGDFLRQRLSLDVQRGNAASVRGTLQKWLVPTLDHP

SEQ ID NO: 15504 - protein, 956 aa, Dermanyssus gallinae
MTDHNDNTPYRGPASPRSGQSDPNRAPCPTCGLSFTRRGLRRHITTKHGGVAYNMNDESQSSNSRFTANGLIGVIQDVTRRWRLVRILPKSVRRQVAEEFTKVLCSVAENNDDTAWLTLFSFAPVVLRLPDGGKDDRSLAVIVRKNLRDFAQGKRFDDGSGPPSNLRPRQRTADTVRLAITKLSEGDVSSAARVLISEDTLAQKPSETALLWDKHPPAPSPLSWPSPPHVPLPSTTSADNVRSAIKTFSRSSAAGLDFIRPRLLQDLLSPALGAAADRLAAALAKVVGLLRWGSPLSEWQPLIFGARLFALKKKDGSVRPIACSSAIRRLAAKIGILENKADISHALGVHQLGFATPGGCETAVHSTRSFLESRSEATLVVKLDFRNAFTSIRRDHLLSAVKAYVPSMFHQVELAYKEPSGLLLPHDVIMSQTGVQQGDPLGPPLFCLAVKELVDSLECPLNVWYLDDGVLGGAPDAVMKDIHRVIEFAERSGLALNPAKCEVHAVGGAADSEVLEALPGCKTGATNLELLVVPLFPQGVPDALERWLVKLENAMSRIHLLGSHRGLFLLRSSFSALCLNHLFRGADCSRASGILERLNDRVMSTLEALQNLSLSARARQQALLPVLWGGLRLPDATVLSETALAASLHKSMQQARTLLDSVALTDLEARLEASHRKAVALCGHEPAEAGHQREWAAILYEQRVGNLIAECATDADKARLRAVSSKGAGAWLHAIPCAQIGTLLDDESVRIAVGLRLGTDLVYTHACVCRDVVQPDGRHGLSCIVSAGRRARHQALNETFSRALRSSGLPCVLEPVGLDREGGKRPDGLTLTPFERGCMLVWDATVTDSLAPSMVSAGATQAGHASALAEAGKVRKYQNVGYPYEFHPLAFETLGGPGPSTRSLLQKVGKRLILASGDKRASDFLRQRLSLDVQRGNAASVRGTLQKWLVPTLDPP

SEQ ID NO: 15505 - protein, 956 aa, Dermanyssus gallinae
MTDHGDNTPNRGLASPRYGQSDPNRAPCPTCGLSFTRRGLRRHITTKHGGVAYNIDDESRPSNSRFTADGLIGVIQDVFRRWRLARILPKSVRRQVAEEFTKVLCSVAENNDNTAWLSLFSFAPVVLRLPDGGKDDRSLAVIVRKNLRDFAQGKRFDDGSSRLSNVRPRQRTVDTVRLAITKLSEGDVSSAARVLISEDTLAQKPSETALLLEKHPPAPSPLSWPSPPQVPLPSTTSADNVRSAIKTFSRSSAAGLDFIRPRLLQDLLSPALGAVADRLAAALAKVVDLLRWGSPLSEWRPLIFGARLFALKKKDGSVRPIACSSAIRRLAAKIGIFENKADISCALGDHQLGFATPGGCEAAVHSTRSFLESRSEATLVVKLDFRNAFNSIRRDHLMSAVKAWAPSMFHQVELAYKEPSCLLLPHDVIMSQTGVQQGDPLGPPLFCLAVKELVDSLECPLNVWYLDDGVLGGAPDAVLRDIHRIIEFAERSGLALNSEKCEVHIVGGAADSEVLEALPGCKTVGTDLELLGVPLFPQGVPAALERWLAKLEDAMSRIHLVGSHRGLFLLRSSFSALRLNHLFRGADCSLASGLLERLNDSMLATVEALLNLSLSTGARQQALLPVLWGGLGLPDATVLSEIALAASLHRSMQQARTLLDSAALTDLEARLETSHRRAVALCGHEPAEAGHQKEWSTALYEQRVVDLIAGCTTDADKARLRAVSSKGAGAWLHAIPCARIGTLLDDESVRIAVGLRLGTDIVYTHTCVCGDVVGPDGRHGLSCIVSAGRRARHQALNETFSRALRSSGLPCVLEPVGLDRESGKRPDGLTLTPFESGCMLVWDATVTDSLAPSMVSAGAARASHASALAEANKARKYQNIGYPYKFYPFAFETLGGPGPSTRSLLQKVGKRLILASGDKRAGDFLRQRLSLDVQRGNAASVRGTLQKWLVPTLDPP

SEQ ID NO: 15506 - protein, 956 aa, Dermanyssus gallinae
MTDHGDNTPNRGPASPRSGQSGPNRAPCPICGLSFTRRGLRRHITTKHGGVAYNIDDESRPSNSRFTADGLIGVIQDVFRRWRLVRILPKSVRRQVAEEFTKVLCSVAENNDNTAWLSLFSFAPVVLRLPDGGKDDRSLAVIVRKNLRDFAQGKRFDDGSSRLSNVRPRQRTVDTVRLAITKLSEGDVSSAARVLISEDTLAQKPSETALLLEKHPPAPSPLSWPSPPQVPLPSTTSADNVRSAIKTFSRSSAAGLDFIRPRLLQDLLSPALGAVADRLAAALAKVVDLLRWGSPLSEWRPLIFGARLFALKKKDGSVRPIACLSAIRRLAAKIGIFENKADISCALGDHQLGFATPGGCEAAVHSTRSFLESRSEATLVVKLDFRNAFNSIRRDHLMGAVKAWAPSMFHQVELAYKEPSCLLLPHDVIMSQTGVQQGDPLGPPLFCLAVKELVDSLECPLNVWYLDDGVLGGAPDAVLRDIHRIIEFAERSGLALSSEKCEVHIVGGAADSEVLEALPGCKTVGTDLELLGVPLFPQGVPAALERWLAKLEDAMSRIHLVGSHRGLFLLRSSFSALRLNHLFRGADCSLASGLLERLNDSMLATVEALLNLSLSTGARQQALLPVLWGGLGLPDATVLSEIALAASLHRSMQQARTLLDSAALTDLEARLETSHRRAVALCGHEPAEAGHQKEWSTALYEQRVVDLIAGCTTDADKARLRAVSSKGAGAWLHAIPCARIGTLLDDESVRIAVGLRLGTDIVYTHTCVCGDVVGPDGRHGLSCIVSAGRRARHQALNETFSRALRSSGLPCVLEPVGLDREGGKRPDGLTLTPFESGCMLVWDATVTDSLAPSMVSAGAARASHASALAEANKARKYQNIGYPYKFYPFAFETLGGPGPSTRSLLQKVGKRLILASGDKRAGDFLRQRLSLDVQRGNAASVRGTLQKWLVPTLDPP

SEQ ID NO: 15507 - protein, 549 aa, Dermanyssus gallinae
MFHQVELAYKEPSCLLLPHGVIMSQTGVQQGDPLGPPLFCLAVKDLVDSLECPLNVWYLDDGVLGGAPDAVLRDRHRIIEFAKRSGLALNSAKCEVHAVGGAADSEVVEALPGCKTVGTDLELLGVPLFPQGVPAALERWLAKLEDAMSRIHLVGSHRGLFLLRSSFSALRLNHLFRDADCSLASGLLERLNDSMLATVEALLNLSLSTSARRQALLPVLWGGLGLPDATVLSEIALAASLHRSMQQARTLLDSAALTDLEARLETSHRRAVALCGHEPAEAGHQKEWSTALYEQRVVDLIAGCATNADKARLRAVSSKGAGAWLHAIPCARIGTLLDDESVRIAVGLRLGIDIVYTHTCVCGDVVGPDGRHGLSCIVSAGRRARHQALNETFSRALRSSGLPCVLEPVGLDREGGKRPDGLTLTPFESGCMLVWDATVTESLAPSMVSAGAARASHASALAEANKVRKYQNIGYPYKFYPFAFETLGGPGPSTRSLLQKVGKRLILASGDKRAGDFLRQRLSLDVQRGNAASVRGTLQKWLVPTLDPP

SEQ ID NO: 15508 - protein, 956 aa, Dermanyssus gallinae
MTDHGDNTPNRGPASPRSGQSEPNRAPCPICGLSFTRRGLRRHITTKHGGVAYNIDDESRPSNSRFTADGLIGVIQDVFCRWRLVRILPKSVRRQVAEEFTKVLCSVAENNDDTAWLSLFSFAPVVLRLPDGGKDDRSLAVIVRKNLRDFAQGRRFDDGSSPLSNIRPRQRRVDTVRLAITKLSEGDVSSAARVLISEDTLAQKPSETVSLLDKHPPAPSPLSWPSPPQVPLPSTTSADNVRSAIKTFSRSSAAGLDFIRPRLLQDLLSPALGAVADRLAAALAKVVDLLRWGSPLSEWRPLIFGARLFALKKKDGSVRPIACSSAIRRLAAKISIFENKADISCALGDHQLGFATPGGCEAAVHSTRSFLESRSEATLVVKLDFRNAFNSIRRDHLLSAVKAWAPSMFHQVELAYKEPSCLLLPHGVIMSQTGVQQGDPLGPPLFCLAVKDLVDSLECPLNVWYLDDGVLGGAPHAVLRDLHRIIEFADRSGLALNSAKCEVHAVGGAADSEVVEALPGCKTVGTDLELLGVPLFPQGVPAALERWLAKLEDAMSRIHLVGSHRGLFLLRSSFSALRLNHLFRGADCSLASGLLERLNDSMLATVEALLNLSLSTSARRQALLPVLWGGLGLPDATVLSEIALAASLHRSMQQARTLLDSAALTDLEARLETSHRRAVALCGHEPAEAGHQKEWSTALYEQRVVDLIAGCTTDADKARLRAVSSKGAGAWLHAIPCARIGTLLDDESVRIAVGLRLGTDIVYTHTCVCGDVVGPDGRHGLSCIVSAGRRARHQALNETFSRALRSSGLPCVLEPVGLDREGGKRPDGLTLTPFESGCMLVWDATVTDSLAPSMVSAGAARASHASALAEANKVRKYQNIGYPYKFYPFAFETLGGPGPSTRSLLQKVGKRLILASGDKRAGDFLRQRLSLDVQRGNAASVRGTLQKWLVPTLDPP

SEQ ID NO: 15509 - protein, 956 aa, Dermanyssus gallinae
MTDHGDNTPNCGLASPRSGQSDPNRAPCPTCGLSFTRRGLRRHITTKHGGVAYNIDDESRPSNSRFTADGLIGVIQDVFRRWRLVRILPKSVRRQVAEDFTKVLCSVAENNDNTAWLSLFSFAPVVLRLPDGGKDDRSLAVIVRKNLRDFAQGKRFDDGSSRLSNVRPRQRTVDTVRLAITKLSEGDVSSAARVLISEDTLAQKPSETALLLEKHPPAPSPLSWPSPPQVPLPSTTSADKVRSAIKTFSRSSAAGLDFIRPRLLQDLLSPALGAVADRLAAALAKVVDLLRWGSPLSEWRPLIFGARLFALKKKDGSVRPIACSSAIRRLAAKIGIFENKADISCALGDHQLGFATPGGCEAAVHSTRSFLESRSEATLVVKLDFRNAFNSIRRDHLMSAVKAWAPSMFHQVELAYKEPSCLLLPHDVIMSQTGVQQGDPLGPPLFCLAVKELVDSLECPLNVWYLDDGVLGGAPDAVLRDIHRIIEFAERSGLALNSEKCEVHIVGGAADSEVLEALPGCKTVGTDLELLGVPLFPQGVPAALERWLAKLEDAMSRIHLVGSHRGLFLLRSSFSALRLNHLFRGADCSLASGLLERLNDSMLATVEALLNLSLSTGARQQALLPVLWGGLGLPDATVLSEIALAASLHRSMQQARTLLDSAALTDLEARLETSHRRAVALCGHEPAEAGHQKEWSTALYEQRVVDLIAGCTTDADKARLRAVSSKGAGAWLHAIPCARIGTLLDDESVRIAVGLRLGTDIVYTHTCVCGDVVGPDGRHGLSCIVSAGRRARHQALNETFSRALRSSGLPCVLEPVGLDREGGKRPDGLTLTPFESGCMLVWDATVTDSLAPSMVSAGAARASHASALAEANKARKYQNIGYPYKFYPFAFETLGGPGPSTRSLLQKVGKRLILASGDKRAGDFLRQRLSLDVQRGNAASVRGTLQKWLVPTLDPP

SEQ ID NO: 15510 - protein, 956 aa, Dermanyssus gallinae
MTDHGDNTPNRGLASPRSGQSDPNRAPCPTCGLSFTRRGLRRHITTKHGGVAYNIDDESRPSNSRFTADGLIGVIQDVFRRWRLVRILPKSVLRQVAEEFTKVLCSVAENNDNTAWLSLFSFAPVVLRLPDGGKDDRSLAVIVRKNLRDFAQGKRFDDGSSRLSNVRPRQRTVDTVRLAITKLSEGDVSSAARVLISEDTLAQKPSETALLLEKHPPAPSPLSWPSPPQVPLPSTTSADNVRSAIKTFSRSSAAGLDFIRPRLLQDLLSPALGAVADRLAAALAKVVDLLRWGSPLSEWRPLIFGARLFALKKKDGCVRPIACSSAIRRLAAKIGIFENKADISCALGDHQLGFATPGGCEAAVHSTRSFLESRSEATLVVKLDFRNAFNSIRRDHLLSAVKAWAPSMFHQVELAYKEPSCLLLPHDVIMSQTGVQQGDPLGPPLFCLAVKELVDSLECPLNVWYLDDGVLGGAPDAVLRDIHRIIEFAERSGLALNSAKCEVHVVGGAADSEVLEALPGCKTVGTDLELLGVPLFPQGVPAALERWLAKLEDAMSRIHLVGSHRGLFLLRSSFSALRLNHLFRGADCSLASGLLERLNDSMLATVEALLNLSLSTGARQQALLPVLWGGLGLSDATVLSEIALAASLHRSMQQARTLLDSAALTDLEARLETSHRRAVALCGHEPAEGGHQKEWSTALYEQRVVDLIAGCTTDADKARLRAVSSKGAGAWLHAIPCARIGTLLDDESVRIAVGLRLGTDIVYTHTCVCGDVIGPDGRHGLSCIVSAGRRARHQALNETFSRALRSSGLPCVLEPVGLDREGGKRPDGLTLTPFESGCMLVWGATATDSLAPSMVSAGAARASHASALAEANKARKYQNIGYPYKFYPFAFESLGGPGPSTRSLLQKVGKRLILASGDKRAGDFLRQRLSLDMQRGNAASVRGTLQKWLVPTLDPP

SEQ ID NO: 15511 - protein, 956 aa, Dermanyssus gallinae
MTDHGDNTPIRGPASPRSGQSDPNRAPCPICGLSFTRRGLRRHITTKHGGVAYNIDDESRPSNSRFTADGLIGVIQDVFCRWRLVRILPKSVRRQVAEEFTKVLCSVAENNDDTAWLSLFSFAPVVLRLPDGGKDDRSLAVIVRKNLRDFAQGRRFDDGSSPLSNIRPRQRTVDTVRLAITKLSEGDVSSAARVLISEDTLAQKPSETVSLLDKHPPAPSPLSWPSPPQVPLPSTTSADNVRSAIKTFSRSSAAGLDFIRPRLLQDLLSPALGAVADRLAAALAKVVDLLRWGSPLSEWRPLIFGARLFALKKKDGSVRPIACSSAIRRLAAKIGIFENKADISCALGDHQLGFATPGGCEAAVHSTRSFLESRSEATLVVKLDFRNAFNSIRRDHLLSAVKAWAPSMFHQVELAYKEPSCLLLPHGVIMSQTGVQQGDPLGPPLFCLAVKDLVDSLECPLNVWYLDDGVLGGAPDAVLRDLHRIIEFAERSGLALNSAKCEVHAVGGAADSEVVEALPGCKTVGTDLELLGVPLFPQGVPAALERWLAKLEDAMSRIHLVGSHRGLFLLRSSFSALRLNHLFRGADCSLASGLLERLNDSMLATVEALLNLSLSTSARRQALLPVLWGGLGLPDATVLSEIALAASLHRSMQQARTLLDSAALTDLEARLETSHRRAVALCGHEPAEAGHQKEWSTALYEQRVVDLIAGCTTDADKARLRAVSSKGAGAWLHAIPCARIGTLLDDESVRIAVGLRLGTDIVYTHTCVCGDVVGPDGRHGLSCIVSAGRRARHQALNETFSRALRSSGLPCVLEPVGLDREGGKRPDGLTLTPFESGCMLVWDATVTDSLAPSMVSAGAARASHASALAEANKVRKYQNIGYPYKFYPFAFETLGGPGPSTRSLLQKVGKRLILASGDKRAGDFLRQRLSLDVQRGNAASVRGTLQKWLVPTLDPP

SEQ ID NO: 15512 - protein, 953 aa, Dermanyssus gallinae
MTDHGDNTPNRGPASPRSGQSDPNRAPCPTCGLSFRGLRRHITTKHGGVAYNIDDESRPSNSRFTADGLIGVIQDVFCRWRLVRILPKSVRRQVAEEFTKVLCSVAENNDDTAWLSLFSFAPVVLRLPDGGKDDRSLAVIVRKNLRDFAQGRRFDDSSSPLSNIRPRQRTVDTVRLAITKLSEGDVSSAARVLISEDTLAQKPSETVSLLDKHPPAPSPLSWPSPPQVPLPSTTSADNVRSAIKTFSQSSAAGLDFIRPRLLQDLLSPALGAVADRLAAALAKVVDLLRWGSPLSEWRPLIFGARLFALKKKDGSVRPIACSSAIRRLAAKIGIFENKADISCALGDHQLGFATPGGCEAAVHSTRSFLESRSEATLVVKLDFRNAFNSIRRDHLLSAVKAWAPSMFHQVELAYKEPSCLLPHDVIMSQTGVQQGDPLGPPLFCLAVKDLVDSLECPLNVWYLDDGVLGGAPDAVLRDIHRIIEFAERSGLALNSAKCEVHAVGGAADSEVVEALPGCKTVGTDLELLGVPLFPQGVPAALERWLAKLEDSMSRIHLVRSHRGLFLLRSSFSALRLNHLFRGADCSLASGLLERLNDSMLATVEALLNLSLSTGARRQALLPVLWGGLGLPDATVLSEIALAASLHRSMQQARTLLDSAALTDLEARLETSHRRAVALCGHEPAEAGHQKEWSTALYEQRVVDFIAGCTTDADKARLRAVSSKGAGAWLHAIPCARIGTLLDDESVRIAVGLRLGTDIVYTHTCVCGDVVGPDGRHGLSCIVSAGRRARHQALNETFSRALRSSGLPCVFEPVGLDREGGKRSDGLTLTPFESGCMLVWDATVTDSLAPSMVSGGAARASHASALAKANKVRKYQNIGYPYKFYPFAFETLGGPGPSTRSLLQKVGKRLILASGDKRAGDFLRQRLSLDVQRGNAASVRGTLQKWLVPTLDPP

SEQ ID NO: 15513 - protein, 974 aa, Dermanyssus gallinae
MTDHGNNRPYHGLASPRSGKSYPNRVPCPTRALTFTQRGLRRHITVKHGGGAHNIVDKSERSNSRFTADQLISVIQVVTRRWRLVRILPKSVRRQVAEVFTKVLCSVADNNDSTAWLALFSFAPVVLRLPDGGKDDRSLAVIVRKNLRDFTDGKRFDLSGSPVPNQPTRQQTCDTVRLAITKLSEGDVSSAARVLISEDTLAQKPSETAVLPDKHPPAPSFLTWPSPPHVLLPSTTSGENVRSAIQTFSRSSAAGLDFIRPRLLQDLLSPALEAAADRLAAALAKVVDLLRWGSPFFDWRPLIFGAPLFALKKKDGGVRPIACSSVIRRLAAKICIFENKADVSGALGCHQLGFATPGGCEAAVHSTRSFMESRSGATLVVKLDSKNAFNTIRRDHLLHAVKAWAPSMFHQVELAYKEPSCLLLPHDTIMSQTGVQQGDPLGPPLFCLGIKELVDSLECPLNTLYLDDGVLGGAPDAVLRDIHRVIEFVERSGLALNPAKCEVHVVGGATDSEVLEVLPGCRTVGTDLELLGVPLFPEGVPAALERWIEKLEHAMSRIPLVGFHRGLFLLKSSFSALRLNHLFRGADCSLAPGLLERLNDSVLATVEALLNLSLSAEARQQALLPVLWGGLGLPDAIVLSEVSLVASLHRSLQQAKLLLDSVALTDLEDRLEASRRRAVALRGHGPAEAGRQRDWSAALHEQRVENLIAESATDADRARLRAVSSKGAGAWLHAIPCARIGTLLDDESVRIAVGLRLGTDLVHAHTCVCGDAVQPDGRHGLSCIVSAGRRARHQALNETFSRALRSSGLPCVLEPVGLDSEGGKRPDGLTLTPFESGCMLVWDATVTDSLAPLMVSAGVARAGYASALAEAGKVRKYQNIGYPYGLYPLAFETLGGPGSSTRGLLQKVGKRLGLASDDRQAGEFLRQRLSLDVQRGNAASVRGTLQKWLVPTLDPSYMCTRSQGPNCHVPTVGD

SEQ ID NO: 15514 - protein, 902 aa, Dermanyssus gallinae
MNDESQPSNSRLTADRLIGAIQDVTRRWRLVRILPKSVRRQVAEEFTKVLCSVAENNDDTAWLTLFSFAPVVLRLPDGGKDDRSLAVIVRKNLRDFAQGKRFDDGSGPPSNLRPRQRTVDTVRLAITKLSEGDVSSAARVLISEDTLAQKPSETALLWDKHPPAPSPLSWPSPPHVPLPSTTSADNVRSAIKTFSRSSAAGLDFIRPRLLQDLLSPALGAAADRLAAALAKVVDLLRWGSPLSEWRPLTFGARLFALKKKDGSVRPIACSSAIRRLAAKIGILENKADISHALGVHQLGFATPGGCETAVHSTRSFLESRSEATLVVKLDFRNAFNSIRRDYLLSAVKAYVPSMFHQVELAYKEPSCLLLPHDVILSQTGVQQGDPLGPPLFCLAVKELVDSLECSLNVWYLDDGVLGGAPDAVMRDIHRVIEFAERSGLALNPAKCEVHAVGGAADSEVLEALSGCKTVGKNLELLGVPLFPQGVPDVLERWLVKLENAMSRIHLVGSHRGLFLLRSSFSALRLNHLFRGADCSQASGILERLNDRVMSTLEALLNLSLSARARQQALLPVLWGGLGLPDATVLSETALAASLHRSMQQARSLLDSVALTDLEARLETSHRKAVALCGHEPVEAGHQREWAAILYEQRVENLIAECATDADKARLRAVSSKGAGAWLHAIPCAQIGTLLDDESVRIAVGLRLGTDLVYTHACVCGDVVQPDGRHGLSCIVSAGRRARHQALNETFSRALRSSGLPCVLEPVGLDREGGKRPDGLTLTPFERGCMLVWDATVTDSLAPSMVSAGAARAGHASALAEAGKVRKYQNIGYPYEFHPLAFETLGGPGPSTRSLLQKVGKRLILASGDKRASDFLRQRLSLDVQRGNAASVRGTLQKWMVPTLDPP

SEQ ID NO: 15515 - protein, 956 aa, Dermanyssus gallinae
MTDHNDNTPNRRPASPRSGQSDPNRAPCPTCGLSFTRRGLRRHITTKHGGVTCNMNDESQPSNSRLTADRLIGVIQDVTRRWRLVRILPKSVRRQVAEEFTKVLCSVAENNDDTAWLTLFSFAPVVLRLPDGGTDDRSLAVIVRKNLRDFAQGKRFDDGSGPPSNLRPRQRTVDTVRLAITKLSEGDVSSAARVLISEDTLAQKPSETALLWDKHPPAPSPLSWPSPPHVPLPSTTSADNVRSAIKTFSRSSAAGLDFIRPRLLQDLLSPALGAAADRLAAALAKVVDLLRWGSPLFEWRPLIFGARLFALKKKDGSVRPIASSSAIRRLAAKIGILENKADISHALGVHQLGFATPGGCETAVHSTRSFLESRSEATLVVKLDFRNAFNSIRRDYLLSAVKAYVPSMFHQVELAYKEPSCLLLPHDVIMSQTGVQQGDPLGPPLFCLAVKELVDSLECPLNVWYLDDGVLGGAPDAVMRDIHRVIEFAERSGLALNPAKCEVHAVGGAADSEVLEALSGCKTVGKNLELLGVPLFPQGVPDALERWLVKLENAMSRIHLVGSHRGLFLLRSSFSALRLNHLFRGADCSQASGILERLNDRVVSTLEALLNLSLSARARQQALLPVLWGGLGLPDATVLSETALAASLYRSMQQARSLLDSVALTDLEARLETSHRNAVALCGHEPVEAGHQREWAAILYEQRVENLIAECATDADKARLRAVSSKGAGAWLHAIPCAQIGTLLDDESVRIAVGLRLGTDLVYTHACVCGDVVQPDGRHGLSCIVSAGRRARHQALNETFSRALRSSGLPCVLEPVGLDREGGKRPDGLTLTPFERGCMLVWDATVTDSLAPSMVSAGAARAGHASALAEAGKVRKYQNIGYPYEFHPLAFETLGGPGPSTRSLLQKVGKRLILASGDKRASDFLRQRLSLDVQRGNAASVRGTLQKWLVPTLDPP

SEQ ID NO: 15516 - protein, 956 aa, Dermanyssus gallinae
MTDHNDNTPNRGPASPRSGQSDPNRAPCPTCGLSFTRRGLRRHITTKHGGVTCNMNDESQPSNSRLTADRLIGVIQDVTRRWRLVRILPKSVRRQVAEEFTKVLCSVAEKNDDTAWLTLFSFAPVVLRLPDGGKDDRSLAVIVRKNLRDFAQGKRFDDGSGPPSNLRPRQRTGDTVRLAITKLSEGDVSSAARVLISEDTLAQKPSETALLWDKHPPAPSPLSWPSPPHVPLPSTTSADNVRSAIKTFSRSSAAGLDFIRPRLLQDLLSPALGAAADRLAAALAKVVDLLRWGSPLSEWRPLIFGARLFALKKKDGSVRPIACSSAIRRLAAKIGILENKADISHALGVHQLGFATPGGCETAVHSTRSFLESRSEATLVVKLDFRNAFNSIRRDYLLSAVKAYVPSMFHQVELAYKEPSCLLLPHDVIMSQTGVQQGDPLGPPLFCLVVKELVDSLECPLNVWYLDDGVLGGAPDAVMRDIHRVIDFAERSGLALNPAKCEVHAVGGAADSEVLEALSGCKTVGKNLELLGVPLFPQGVPDVLERWLVKLENAMSRIHLVGSHRGLFLLRSSFSALRLNHLFRGADCSQASGILERLNDRVMSTLEALLNLSLSARARQQALLPVFWGGLGLPDATVLSGTALAASLHRSMQQARSLLDSVALTDLEARLETSHRKAVALCGHEPVEAGHQREWAAILYEQRVENLIAECATDADKARLRAVSSKGAGAWLHAIPCAQIGTLLDDESVRIAVGLRLGTDLVYTHACVCGDVVQPDGRHGLSCIVSAGRRARHQALNETFSRALRSSGLPCVLEPVGLDREGGKRPDGLTLTPFERGCMLVWDATVTDSLAPSMVSAGTARAGHASALAEAGKVRKYQNIGYPYEFHPLAFETFGGPGPSTRSLLQKVGKRLILASGDKRASDFLRQRLSLDVQRGNAASVRGTLQKWLVPTLDPP

SEQ ID NO: 15517 - protein, 956 aa, Dermanyssus gallinae
MTDHNDNTPNRGPASPRSGQSDPNRAPCPTCGLSFTRRGLRRHITTKHGGVTCNMNDESQPSNSRLTADRLIGVIQDVTRRWRLVRILPKSVRRQVAEEFTKVLCSVAENNDDTAWLTLFSFAPVVLRLPDGGKDDRSLAVIVRKNLRDFAQGKRFDDGSGPPSNLRPRQRTVDTVRLAITKLSEGDVSSAARVLISEDTLAQKPSETALLWDKHPPAPSPLSWPSPPHVPLPSTTSADNVRSAIKTFSRSSAAGLDFIRPRLLQDLLSPALGAAADRLAAALAKVVDLLRWGSPLSEWRPLIFGARLFALKKKDGSVRPIACSSAIRRLAAKIGILENKADISHALGVHQLGFATPGGCETAVHSTRSFLESRSEATLVVKLDFRNAFNSIRRDYLLSAVKAYVPSMFHQVELAYKEPSCLLLPHDVIMSQTGVQQGDPLGPPLFCLAVKELVDSLECPLNVWYLDDGVLGGAPDAVMRDIHRVIEFAERSGLALNPAKCEVHAVGGAADSEVLEALSGCKTVGKNLELLGVPLFPQGVPDVLERWLVKLENAMSRIHLVGSHRGLFLLRSSFSALRLNHLFRGADCSQASGILERLNDRVMSTLEALLNLSLSARARQQALLPVLWGGLGLPDATVLSETALAASLHRSMQQARSLLDSVALTDLEARLETSHRKAVALCGHEPVEAGHQREWAAILYEQRVENLIAECATDADKARLRAVSSKGAGAWLHAIPCAQIGTLLDDESVRIAVGLRLGTDLVYTHACVCGDVVQPDGRHGLSCIVSAGRRARHQALNETFSRALRSSGLPCVLEPVGLDREGGKRPDGLTLTPFERGCMLVWDATVTDSLAPSMVSAGAARAGHASALAEAGKVRKYQNIGYPYEFHPLAFETLGGPGPSTRSLLQKVGKRLILASGDKRASDFLRQRLSLDVQRGNAASVRGTLQKWLVPTLDPP

SEQ ID NO: 15518 - protein, 950 aa, Dermanyssus gallinae
MADHGDNTPNRGLASPRSGQSDPNRAPCPTCGLSFTRRGLRRHITTKHGGVAYNIDDESRPSNLTADGLIGVIQDVFRRWRLVRILPKSVRRQVAEEFTKVLCSVAENNDNTAWLSLFSFAPVVLRLPDGGKDDRSLAVIVRKNLRDFAQGKRFDDGSSRLSNVRPRQRTVDTVRLAITKLSEGDVSSAARVLISEDTLAQKPSETALLLEKHPPAPSPLSWPSPPQVPLPSTTSADNVRSAIKTFSRSSAAGLDFIRPRLLQDLLSPALGAVADRLAKVVDLLRWGSPLSEWRPLIFGARLFALKKKDGSVRPIACSSAIRRLAAKIGIFENKADISCALGDHQLGFATPGGCEAAVHSTRSFLESRSEATLVVKLDFRNAFNSIRRDHLMSAVKAWAPSIFHQVELAYKEPSCLLLPHDVIMSQTGVQQGDPLGPPLFCLAVKELVDSLECPLNVWYLDDGVLGGAPDAVLRDIRRIIEFAERSGLALNSEKCEVHIVGGAADSEVLEALPGCKTVGTDLELLGVPLFPQGVPAALERWLAKLEVAMSRIHLVGSHRGLFLLRSSFSALRLNHLFRGADCSLASGLLERLNDSMLATVEALLNLSLSTGARQQALLPVLWGGLGLPDATVLSEIALAASLHRSMQQARTLLDSAALTDLEARLETSHRRAVALCGHEPAEAGHQKEWSTALYEQRVVDLIAGCTTDVDKARLRAVSSKGAGAWLHAIPCARIGTLLDDESVRIAVGLRLGTDIVYTHTCVCGDVVGPDGRHGLSCIVSAGRRARHQALNETFSRALRSSGLPCVLEPVGLDREGGKRPDGLTLTPFESGCMLVWDATVTDSLAPSMVSACAARASHASALAEANKARKYQNIGYPYKFYPFAFETLGGPGPSTRSLLQKVGKRLILASGDKRAGDFLRQRLSLDVQRGNAASVRGTLQKWLVPTLDPP

SEQ ID NO: 15519 - protein, 950 aa, Dermanyssus gallinae
MTDHGDNTPNRGLASPRSGQSDPNRAPCPTCGLSFTRRGLRRHITTKHGGVAYNIDDESRPSNSRFTADGLIGVIQDVFRRWRLVRILPKSVRRQVAEEFTKVLCSVAENNDNTAWLSLFSFAPVVLRLPDGGKDDRSLAVIVRKNLRDFGQGKRFDDGSSRLSNVRPRQRTVDTVRLAITKLSEGDVSSAARVLISEDTLAQKPSETALLLEKHPPAPSPLSWPSPPQVPLPSTTSADNVRSAIKTFSRSSAAGLDFIRPRLLQDLLSPALGAVADRLAAALAKVVDLLRWGSPLSEWRPLIFGARLFALKKKDGSVRPIACSSAIRRLAAKIGIFENKADISCALGDHQLGFATPGGCEAAVHSTRSFLESRSEATLVVKLDFRNAFNSIRRDHLLSAVKAWAPSMFHQVELAYKEPSCLLLPHDVIMSQTGVQQGDPLGPPLFCLAVKELVDSLECPLNVRYLDDGVLGGAPDAVLRDIHRIIEFAERSGLALNSAKCEVHVVGGAADSEVLEALPGCKTVGTDLELLGVPLFPQGVPAALERWLAKLEDAMSRIHLVGSHRGLFLLRSSFSALRLNHLFRGADCSLASGLLERLNDSMLATVEALLNLSLSTGARQQALLPVLWGGLGLPDATVLSEIAPAASLHRSMQQARTLLDSAALTDLEARLETSHRRAVALCGHEPAEAGHQKEWSTALYEQRVVDLIAGCTTDADKARLRAVSSKGAGAWLHAIPCARIGTLLDDESVRIAVGLRLGTDIVYTHTCVCGDVVGPDGRHGLSRRARHQALNETFSRALRFSGLPCVLEPVGLDREGGKRPDGLTLTPFESGCMLVWDATVTDSLAPSMVSAGAARASHASALAEANKARKYQNIGYPYKFYPFAFETLGGPGPSTRSLLQKVGKRLILASGDKRAGDFLRQRLSLDVQRGNAASVRGTLQKWLVPTLDPP

SEQ ID NO: 15520 - protein, 944 aa, Dermanyssus gallinae
MTDHGDYGPYHGLASPRSGQSDPNRVPCPTCALTFTRRGLRRHITVKHGGGAHNIVDESERSNSRFTADQLISVIQVVTRRWRLVRILPKSVRRQVAEVFTKVLCSVADNNDSTAWLALFSFAPVVLRLPDGGKDDRSLAVIVRRNLRDFTDGKRFDISGSPVPNQPSRQRTVDTVRLAITKLSEGDVSSAARFLISEDTLAQKPSETAVLLDKHPPAPSFLTWPSPPHVLLPSTTSGESVRSAIQTFSRSSAAGLDFIRPRLLQDLLSPALGAAADRLAAALAKVVDLLRWGSPFPDWRPLTFGARLFALKKKDGGVRPIACSSVIRRLAAKICIFENKAEVSGALGCHQLGFATPGGCKAAVHSTRSFLESRSGATLVVKLDFKNAFNTIRRDHLLNAVKAWAPGMFHQVELAYKEPSCLLLPHDTIMSQTGVQQGDPLGPPLFCLGIKELVDSLECPLNTWYLDDGVLGGAPDAVLRDIHRVIEFAKRSGLALNPAKCEVHVVGGATDSEVLEVLPGCRTVGTDLELLGVPLFPEGVPAALERWIEKLERAMSRIPLVGSHRGLFLLRSSFSALRLNHLFRGADCSLAPGLLERLNDSVLTTVEALLNLSLSAEARQQALLPVLWGGLRLPDAIVLSEVALVASLHRSLQQAKSLLDSVALTDLEDRLETSRRRAVALCGHEPAEAGRQREWSAALHEQRVENLIAESATDADRARLRAVSSKGAGAWLHAIPCARIGTLLDDESVRIAVGLCLGTDLAHAHTCVCGDDVQPDGRHGLSCIVSTGRRARHQALNETFSRALRSSGLPCVLEPVGLDREGGKRPDGLTLTPFKSGCMLVWDATVTDSLAPSMVSAGAARAGYASALAEAGKVRYYQNIGYPYGLYPLAFETLGGPGPSTRGLLQKVGKRLGLASGNRRAGEFLAASVRRTLQRWLVPTLDPS

SEQ ID NO: 15521 - protein, 549 aa, Dermanyssus gallinae
MFHQVELAYKEPSCLLLPHGVIMSQTGVQQGDPLGPPLFCLAVKDLVDSLECPLNVWYLDDGVLGGAPDAVLRDLHRIIEFAERSGLALNSAKCEVHAVGGAADSEVVEALPGCKTVGTDLELLGVPLFPQGVPAALERWLAKLEDAMSRIHLVGSHRGLFLLRSSFSALRLNHLFRGADCSLASGLLERLNDSMLATVEALLNLSLSTSARRQALLPVLWGGLGLPDATVLSEIALAASLHRSMQQARTLLDSAALTDLEARLETSHRRAVALCGHEPAEAGHQKEWSTALYEQRVVDLIAGCTTDADKARLRAVSSKGAGAWLHAIPCARIGTLLDDESVRIAVGLRLGTDIVYTHTCVCGDVVGPDGRHGLSCIVSAGRRARHQALNETFSRALRSSGLPCVLEPVGLDREGGKRPDGLTLTPFESGCMLVWDATVTDSLAPSMVSAGAARASHASALAEANKVRKYQNIGYPYKFYPFAFETLGGPGPSTRSLLQKVGKRLILASGDKRAGDFLRQRLSLDVQRGNAASVRGTLQKWLVPTLDPP

SEQ ID NO: 15522 - protein, 922 aa, Dermanyssus gallinae
MTDHGDNTPNRGPASLRSGQSDPNRAPCPTCGLSFTRRGLRRHITTKHGGVAYNIDDESRPSNSRFTADGLIGVIQDVFCRWRLVRILPKSVRRQVAEEFTKVLCSVAENNDDTAWLSLFSFAPVVLRLPDGGKDDRSLAVIVRKNLRDFAQGRRFDDGSSPLSNIRPRQRTVDTVRLAITKLSEGDVSSAARVLISEDTLAQKPSETVSLLDKHPPAPSPLSWLSPPQVPLPSTTSADNVRSAIKTFSRSSAAGLDFIRPRLLQDLLSPALGAVADRLAAALAKVVDLLRWGSPLSEWRSLIFEARLFALKKKDGSVRPIACSSAIRRLAAKIGIFENKADISCALGDHQLGFATPGRCEAAVHSTRSFLESRSEATLVVKLDFRDAFNSIRRDHLLSAVKAWAPSMFHQVELAYKEPSCLLLPHDVIMSQTGVQQGDPLGPPLFCLAVKDLVDSLECPLNVWYLDDGVLGGAPDAVLRDLHRIIEFAERSGLALNSAKCEVHAVGGAADSEVVEALPGCKTVGTDLELLGVPLFPQGVPAALERWLAKLENAMSRIHLVGSHRGLFLLRSSFSALRLNHLFRGADCSLASGLLERLNDSMLATVEALLNLSLSTGARRQALLPVLWGGLGLPDATVLSEIALAASLHRSMQQARTLLDSAALTDLEARLETSHRRAVALCGHEPAEAGHQKEWSTALYEQRVVDLIAGCTTDADKARLCAVSSKGAGAWLHAIPCARIGTLLDDESVRIAVGLRLGTDIVYTHTCVCGDVVGPDGRHGLFCIVSAGRRARHQALNETFSRALRSSGLPCVLEPVGLDREGGKRPDGLTLTPFESGCMLVWDATVTDLLAPSMVSAGAARASHASALAEANKVRKYQNIGYPYKFYPIAFETLGGSRSIHSKFATKGRETPDSSQRRQTSG

SEQ ID NO: 15523 - protein, 952 aa, Dermanyssus gallinae
MTDHGDNTPNREPASPRSGPSDPNRAPCPTCGLSFTRRGLRRHIMTKHGGVAYNIDDESRPSNSRFTADGLIGVIQDVFRRWRLVRILPKSVRRQVAEEFTKILCSVAENNDDTVWLSLFSFAPVVLRLPDGGKDDRSLAVIVRKNLRDFAQGKHFDDGSSPLSNVRPRQRTVDTVRLAITKLSEGDVSSAARVLISEDTLAQKPSETGLLLDKHPPAPSPLSCPSLPQVPLPSTTSADNVRSAIKTFSRSSTAGLDFIRPRLLQDLLSPALGAVADRLAAALAKVVDLLRWGSPLSEWRPLIFGARLFALKKKDGSVRPIACSSAIRRLAAKIGIFENRADISCALGDHQLGFATPGGCEAAVHSTRSFLESRSEATLVVKLDFRNAFNSIRRDHLLSAVEAWAPSMFQQVELAYKESSCLLLPHDVIMSQTGVQQGDPLCPPLFCLAVKELVDSLECPLNVWYLDDGGAPDAVLRDIHRIIEFAERSGLALNSAKCEVHVVGGAADSEVLEALPGCKTVGTSLELLGVPLFPQEVPAALERWLAKLEDAMSRIHLVGSHRGLFLLRSSFSALRLNHLFRGADCSLASGLLERLNDSMLATVEALLNLSLSTGARQQALLPVLWSGLGLPDATVLSEIALAASLHRSMQQARTLLDSAAFTDLEARLETSHRRAVALCGHEPAEAGHQKEWSTALYEQRVVDLIAGCTTDADKARLRAVSKGAGAWLHAIPCARIGTLLDDESVRIAVGLRLGTDIVYTHTCVCKDVVGPDGRHGLSCIVSAGRRARYQALNETYSRALRSSGLPCVLEPVGLDREGGKRPDGLTLTPFKSGCMLVWDATVTDSLAPSMVSAGAARASHASALAEANKVRKYQNIGYPYKFYPFAFDTLGGPGPSTRSLLQKVGKRLILASGDKRAGDFLRQRLSLDVQRGNAASVRGTLQKWLVPTLDPP

SEQ ID NO: 15524 - protein, 749 aa, Dermanyssus gallinae
MTAVLLDKHPPAPSFLTWPSPSHVLLPSTTSGKNVRSAIQTFSRSSAAGLDFIRPRLLQDLLSPALGAAADRFAAALAKVVDLLRWGSPFPDWRPLIFGARLFALKNKDGGVRPIACSSVIRRLAAKICIFENKAEVSGALGCHQLGFATPGGCETAVHSTRSFLESRSGATLVVKLDFKNAFNTIRRDHLLNAVKAWAPSMFHQVELAYKEPSCLLLPHDTIMSQTGVQQGDPLGPPLFCLGIKELVDSLECPLNTWYLDDGVLGGALDAVLRDIHRVIEFAERSGLALNPAKCEVHVVGGATDSEVLEVLPGCRTVGTDLELLGVPLFPEGVSAALERWIEKLEHAMSRIPLVGSHRGLFLLRSSFSALRLNHLFRAADCSLARLLERLNDSVLTTVEALLNLSLSAEARQQALLPVLWGGLGLPDAIVLSEVALVASIHRSLQQANSLLNLVALTDLEDRLETSRRRAVALCGHKPAEAGRQKDWSATLHEQRVENLVAESATDADRARLRAVSSKGAGAWLHAIPCARIGTLLDDESVRIAVGLRLGTDLVHAHTCVCGDAVQPDGRHGLSCIVSAGRRARHQALNETFSRALRSSGLPCVLEPVGLDREGGKRPDGLTLTPFESGCMLVWDATVTDSLAPSMVSAGAARAGYASALAEAGKVRKYQNIGYPYGFYPLAFETLGGPGPSTRGLLQKVGKRLGLASGDRRAGEFLRQRLSLDVQRGNAASVRGTLQRWLVPTLDPS

SEQ ID NO: 15525 - protein, 967 aa, Dermanyssus gallinae
MTDHGDNTPNRRPASPRSGQSDPNRAPCPTCGLSFTRRGLRRHITTKHGYVAYNIDDESRPSNSRLTADGLIGVIQDVFCRWRLVRILPKSVRRQIAEEFTKVLCSVAENNDDTAWLSLFSFASVVLRLPDGGKDDRSLAVIVRKNLRDFAQGKRFDDGSSPLSNVRSRQRTVDTVRLAITKLSEGDVSSAARVLISEDTLAQKPSETVSLLDKHPPAPSPLSWPSPPQVPLPSTTSADNVRSAIKTFSRSSAAGLDFIRPRLVQDLLSPALGAVADRLAAALAKVVDLLRWGSPLSEWRPLIFGARLFALKKKDGSVRPIACSFAIRRLAAKIGIFENKADISCALGDHQLGFATPGGCEAAVHSTRSFLESRSEATLVVKLDFRNAFNSIRRDHLLSAVKAWAPSMFHQVELAYKKPSCLLLPHDVIMSQTGVQQGDPLGPPLFCLAVKDLVDSLECPLNVWYLDEGVLGGALDEVLRDIHRIIEFAERSGLALNSAKCEVHAVGGAADSEVLEALPGCKTVGTDLVLLGVPLFPQGVPAALERWLAKLEDAMSRIHLVGSHRGLFLLRSSFSALRLNHLFRGADCSLASGLLKRLNDSMLATVEALLNLSLSTGARRQALLPVVWGGLGLPDATVLSEIALAAFLHRSMQQARTLLDSAALTDLEARLETSHRRAVVLCGHEPAEARHQKEWSTALYEQRVVDLIAGSDKARLRAVSSKGAGAWLHAIPCARIGTLLDDESVRIAVGLRLGTDIVYTHTCVCGDVVGPDGRHGLSCIVSAGRRARHQALNETFSRALRSSGLPCVLEPVGLDREGGKRPDGLTLTPFESGCMLVWDATVTDSLAPSMVSAGAARASHASALAEANKVRKYQNIGYPHKFYPFAFETLGGPGPSTRSLLQKVGKRLILASGDKRAGDFLRQRLSLDVQRGNAASVRGTLQKWLVPTLDPRNAAHVRRDSNVMFPP

SEQ ID NO: 15526 - protein, 901 aa, Dermanyssus gallinae
MTDYGDNRPYHGLANPPSGQSDPNRVPCTTCALTFTRRGLRRHITVKHGGGAHNIIDESERSNSRFTADQLISVTQVVTRRWRLVRILPKSVRRQVAEAFTKVLCSVADNNDSTAWLALFSFAPVVLRLPDGGKDDRSLAVIVRKNLRDFTDGKRFDHSGSPVPNQPPRQRTVDTIRLAITKLSEGDVSSAARVLISEDTLAQKPSERAVLLDKRSPALSFLAWPSPPHVPLPSTTSGENVRSVIQTFSRSSAVGLDFTRPRLLQDLLSPALGAAADRLAAALAKVVNLLRWGSPFPDWRPLIFGARLFALKNKDGAVRPIACSSVIRRLAAKICIFENKADVSGALGCHQLGFATPGGCEAAVHSTQSFLESRSGATLVFNLDYKNAFNTIRRDHLLHAVKAWAPSMFHQVELAYKEPSCLLLPHDTIMSQTGVQQGDPLGPPLFCLGIKELVDSLECPLNTWYLDDGVLGEAPDAVLRDIQKVIEFAERSGLALEHAMSPIPLVGSHGGLFLLKSSFSALRLNHLFRGADCSLAPGFLERLNDSVLTTVEALLNLSLLAEVRQQALLPVLWGGLGLPDAIVVSEVALVASLHRSLQQAKSLFDSVALTDLEDRLEASRRRAVALCGHGPAEAGVQRDWSAALHKQRVENLIAESTTDADRARLRAVSSKGAGAWLHAIAGARIGTLLNDESLKIAVGLCLGTDLVHAHTCVCGDAVQPDGRHGLSCIVSAGRRARHQALTKTFSRALRSSGLPGVLEPVGLDREGGKRPDGLTLTSFESGCMLVWDATVTDTLAPSMVSAGTARAGYASALAEAGKVRKYQNIGYPYGFYPLVFETLGGPGPSTRGLLQKVGKRLGLASGDRRAGEIIRQRLSLDVQRGNAASIRGTLQRWLVPTLDPS

SEQ ID NO: 15527 - protein, 931 aa, Elysia chlorotica
METLRKQKKNLRKQMKVATAEEKLGLQELWRGLKARHSALSRAESARKKRSQKKKNQDRFFRDPFQFARQLFQQPRSGSLSAQKEQLETHLRKTYSDPDREVPLSETAGLVWPAAPGEKFNNKPPSLDEVKAVVQKARAKSAPGPNGVPYLLYKRCPNVLKWLHKILRGAWNNLKISKQWMTAEGVYIPKEQNSSEINQFRPISLLNVEGKIFFSVMASRLTKYLTENGYINTSVQKGGIPGVSGCLEHATMIWEAIQRAKSEKLNLDVIWLDLANAYGSVPHQMIQLALRMYHVPEDIQVMLDDYFSGFQMRFSTNDFTTDWISLEIGIAMGCTISPILFVMAMEVILKAAEGSAGPADLGGGCYMPPLKAFMDDTTIICSNENETHQMLERLDVLMDWCRMKFKPKKSRSLSIRKGKVDASKIFTVAEQQIPTVSQEPVKSLGRWYDSSMKDTRRGLETTEQATEGLLAINRCGLHGKYKVWCLQFMLIPKLLWPLLVYEICSTTVEAIEAKINKFTRRWLGVPPGLTDVAMYCRTAKLKLPLKSILEEYKCGKARLFSMLEDSDDPVVKTVQPSIKTGRKWKAVTAVDQAKECLKIKEVIGQTQTDRKGLGSSTTKWWSKAEGKEKRDMVINEIRLDEDSRRVQKAVQQPQQGQWTNWDNVLQKSLSWNDIWHMAPLRISFLIRSVYDLLPSNANLVRWGKKEDPACPLCQGRQTTQHVLSSCKIALSQGRYTWRHNRVLRELASVLSTAKGETSVPETGTVIFQTEGGAKSWHGRSTKTTNQRKCLLDGCDDWEVSADLPDWDGHPSVIKETGLRPDIVIHSASTHQIIMVELTIPYESRMEEAHIYKREKYLNLTKELRDAGYKAVIMPVEIGARGFIGSSAYDLLTKLSICGSGRTKALKLLAEIAENSSQWIWSRRNEMVLHKD

SEQ ID NO: 15528 - protein, 765 aa, Morbakka virulenta
MKERNEPSSLPEIKFISKLLRAKYSKVAFKMKNFVDHNEKISKEFWKYCKEIFETKAAEEPEFNEEQCFEYFKSILKRSTHKCETFPSWMKMLDAPTKAFNSSTPTYHEIARIVNKMKSGASACPLDQISILTLKNCPYLRTVIHRIISYCWDNSTVPKIWKYGFTILIHKKGSTDLPANFRPITLEPVLSKILSSVIRNRIYSFVRENGYIETNLQKGFWDGISGTIEHTELLSYIINHSRRKQRDVVVTLLDLKNAFGEVSHDLLRMSLKFHHIPEEITSIITEFYTDYHVSVGTKSFVTNPISVERGVLQGDCLSPILFNLCFNTLLRTIDEERIRLIGYYFNECLTPRHWFQFADDTALITSSTGDNQLLLHVFSKWCTWSGLIIRVDKCKTFGIRKTKTTSEQYKPYLKICNEMVPQVELNDRFKYLGKEFSYDMSTHFIETELKKDVTSYLTKLDSLPLHPHHKANVVTKYIYSKIRWRLSIYSISETWTIQNLDNLVNKYIRKWFGLNVGANITHLTLPPNRLGVNFKSVSNILKHCKLSLRRLLNTSKSKDINDVYQLTKNKFMAEDQILKNTTSEDTASRLLQKNLNEKVVKHLDELNEQSAIMKVLNETLSSRKRQQWLEMITPLMSNIYIFARKALIFCLANNSNLKRWKKSDTDRCFLCDKKQTQLHVLSNCVVSVNEKRYTWRHNSVLKTLATYILQLQQYGYSLYVDIDGYQNPAQLFNSFRPDAVIRKGDTIIVVELMICFETNIIKSRY

SEQ ID NO: 15529 - protein, 1066 aa, Nasonia giraulti
MCLTAASTSRSWKLQWPKRPGPLVSRLLCRLRLGGFAALLAVITGAMNNIKKNNKSAEPTGSRAPANSGSNSEPNRPQPRLGEYLCEFPGCNRSFTTARGRGVHHQHAHKDWYDSRQNLEYSKARWNVEEESLLALKEAQLTLEGVNFMNLALADAFPGRTHEAIKKRRQNAKYKQLVREHIARLEADPSVAPDETVDDMVYMDAIRSWILEEPALEKGSFKEDKLNRICQSVRQGDKDLVREELTLYLQEILSNSERDEPQSRPMRPRRDTINKRTKRREEFAKTQDLWRKNPGKCLRHLLKDVKNAVTPDKDVMIPFWENVMTQGTQGTPGIETRRPIIVRLWGPITLEEAKRARPELSSAPGPDGVTARKLRSIPLRILLRVFNIILWCGKAPRYLLKSRTTMIPKKEQAYESGDFRPITVSSVVIRTLNKILATRMMDLVELDDRQKAFQPVDGCSENVFLMDLILRYHRDKHKQMFMASMDMAKAFDSVTHETIKDVMTSAGLPQVMVEYIMDIYENSTTKLSCGDWTSHEVHPTCGVKQGDPLSPMIFNLVIDGLLKKLTDEIGVCVDNIKLNSFAFADDLVLVASTRNGLQELINRSTDYLLRCGLKVNAGKCLTVAIRTVPHEKKTVVDPNTTFRCLGRILPAVKRTSEWKYLGIPFTPEGKFVGDPLGKIKSTIETLSRAPLRPQQKLFGLRVVGLPSLYHLLTLGSANISLLKKIDKTVRNAVKSWLRLPMDTPSAYIHAAVIDGGLGIPSMRWNIPLMRLNRLKNLPYYREDLPTYYQLSIEVKNTLNRLKDGDNVLSTKKDIDKRMAELLYKAVDGKALKESAGIPQQHRWIIEGNNFMSGRDFIELCRIRINALPLKSRTTRGRAAERRCRAGCNNAETLNHVLQQCPRTHDMRIRRHNAIIKYVGRSLNNGEFEVDEEPHFQTPEGLRKPDLIAKRGNMAILVDGQVVSEQADLSRAHRQKATKYVGLKRQIEERYGVKEVHFTSVTLSARGIWSKTSAADLVRLGVLKIRDYKVISTRVLIGGVSIFKDFNRRTSRTAGQRAGVLHRQGIG

SEQ ID NO: 15530 - protein, 920 aa, Muscidifurax raptorellus
MNMALAEVFPGRTLEAIKKKRQNDNYKSMVLGHIARLEANPSADANVIEDSLAYMKKIEAWILEQPSLEKGSFNEDKLNHICRSIRNGDKDLVREELTLYLQEILSENVADRSQRRPPRPRRNNNNSKRALRREEFAKTQDLWRKNPGKCLRYILKDVKNAVIPEKDVMVPFWENVMTQGTRGSPGIATRKPTIDRLWEPININELKIARPALSSAPGPDSVTAKKLRSIPLRILLRIYNIILWCGKAPRYLLKSRTTMIPKKEQAYESGDFRPITVSSVVIRTLNKILATRMMHLVELDERQKAFQPVDGCSENVFLMDVILRFHREKHKQLFMASMDMAKAFDSVTHETIKDVMISAGLPGMMVDYIVDIYENSATQLSCGDWTSHEIHPTCGVKQGDPLSPMIFNLVINGLLKKLTDEIGVSIDNIKVNSFAFADDLVLVASTRNGLQELINRSTEYLLNCGLRVNAGKCLTVAMRTVPHEKKTVVDPNTTFKCLGRILPAVKRTSEWKYLGIPFTSEGKFVGDPLGKLKSTIDSLSRAPLRPQQRLFGLRVVGLPSLYHLLTLGSANISLLKKIDRKVRNAVKSWLRLPMDTPSAYIHASVVQGGLGIPSMRWTIPLMRLNRLKNLPHYRDDLPTYYQISKEVKNTLNRLKNGDNVLTTKKDIDDRMAELLHKAVDGMALKESVKVPQQHRWIMEGNNFMSGRDFIEMCKIRINALPLKSRTTRGRAAERRCRAGCNNSETLNHVLQQCPRTHDKRIKRHDALVKYIGRSLVNNEFVVEEEPNFQTPDGLRKPDLIAKRGNMAVLIDGQVVSEQTDLARAHRLKAEKYKGLKRLIVERYGVKEVHFTSATLSARGIWSKASAADLVRLGALKIRDYKVISTRVLIGGISIFKDFNRRTSRAATGHGAAEHPRQGIG

SEQ ID NO: 15531 - protein, 1020 aa, Pteromalus puparum
MRKTRSNKSAEPTGSGAPANSRTDSQPNQSQPRLGEYLCEFPGCNRSFTTVRGRGVHHQHVHKDWYDSRQNLDASKPRWNDEEESLLALKEAQLTLEGVSFMNLALAEAFPGRTHEAIKKKRQNAKYKQLVRDHIARLEADPSAGIEDAVDDMVYIEALRAWILEQPVLEKGSFKEDKLNRICRSVRNGDKDTVREEITLYLQEVLSNDENEPQRRPARPRRNNNISKRAKRRQDFAKTQDLWRKNPGKCLRYLLKDVKNAVTPEKDIMVPFWENVMTQGTQGSPGIETRKPIIIRLWGPITMDEVKKARPELSSAPGPDGVTAKKLRSVPLRILLRVFNIILWCGKAPRYLLKSRTTMIPKKESAYESGDFRPITVSSVLVRTLHKVLATRMMDLVELDERQKAFQPVDGCSENVFLMDLILRYHREKHKQMFMASMDMAKAFDSVTHETIKDTMFAAGLPHVMVDYIMDIYENSSTQLSCGDWTSHEIHPTCGVKQGDPLSPMIFNLVIDGLLKKLTDEIGVSVDNIKLNSFAFADDLVLVASTRNGLQELINRSTEYLLKCGLKVNAGKCLTVAIRTVPHEKKTVVDPNTTFRCLGRILPAVKRTSEWKYLGIPFTREGKFVGDPLAKLRSTIETLSQAPLRPQQKLFGLRVVGLPSLYHLLTLGSANISLLKKIDKTVRNAVKSWLRLPMDTPSAYIHAPVVEGGLGIPSMRWNIPLLRLNRLKNLPYYREDLPTYYQLSKEVKVTLNRLKDGDNVLTTQKEIDNRMAEQLHKAVDGIALKESSRVPQQHRWIIEGNNFMNGKDFIELCRMRINALPLKSRTTRGRPAERRCRAGCNNAETLNHVLQQCPRTHDARIKRHDALVKYIARSLTNGEFEVDEEPHFQTSEGLRKPDLIAKRGNMAVLIDGQVVSEQADLIRAHRIKAEKYTGLKRQIIERYGVKEVHFTSATLSSRGIWSKTSAADLVRLGALKIRDYKVISTRILIGGICIFKDFNRRTTRTTAGQQAAVHQRQGIG

SEQ ID NO: 15532 - protein, 1206 aa, Lymantria dispar
METDNNETRIGPLPRGDRLGTSGADAGRGSMRTVSGSLLNRRAGVGRIEDVTADQRDGEGADDALQSRASPTDSVGSSASTTIGNEDRRRKWSNKETEELLYCYFKARMAGPGYIRKLYTLFKDRNPNNPKVRKFDGNKLSNQARRIIKQNVISQEIQDRIKRQAEGTLTLALTNTVYASNDNEHSDTSLNIHAITTSTSCASNDNEHTDTSPNVHAITTSTNTQQTHNSAEQAATIDELTSNIEVNEDQDPLILQFLQILAETKETTLADRLFLPKAKINKQFIENLHTINKYIPNLLITNTDLISINHIIYATAKTLIINNNQTPFMPKNTIKPKTDPPWKKRTANKIEKLRKELGQLIEVKRGITTRRMINIKNKLYEKYNIKNENDHNNTAETIKQKIKALAARIKRYEEMSGRKEHNQLFAENEHKLYRSLGNNNNTDIKLPTKEGIEEFWTSILSKPTKYNTQANWIKEVEESTNTIDTTNIEEITIEQVKTAVRKLLNWKTPGVDKIQNYYLKYLTSTHKYLSLLFTKIITGQETLEEWFTTGQVILIPKNSNTEEPKNWRPIACLPSIYKLLTSVLADILYSHCDSNNNIMAIEQRGCRRGARGCKDHLMVNKAILEDAHQAQKNLSMAWIDYQKAFDTVSHEWLLKVLDIYKCPPVIKSFLKWSVPAWKVIMTARGSHESITTEPIYIKRGIFQGDSLSPLLFCLAINPISFILNKYELKGYKLKDSFWINHLVYMDDLKIYANNKSNLKVLLDSVEIFTSDIGMRFGLDKCNVIHIRAGHRSTVTGEGHILLSQEKFKELEVGNSYKYLGIHESGKIEHSKIREQITKEYIKRVKKLIQTHLNARNIIKGINTYTIPVLLYSFGIINYKITDLKKIDTKTRKLLAIKKAHQQKAEVERLYLPIAQGGRGLINIEYMYKTQIVKYKQYLKTEFDDMIKAIVQHDINRGKYSIIKEAREIEQELHLPQDNLHTDTEIKQAIVKTQNTSWRAKQLHGQFPKKVLDQANINTELSFKWINKQHISPGIVSAVFVIQDQAVMTLQHQRDILRTAVDGKCRLCRVKDETAQHIISGCEKLAGTYYVKRHNNLVQYVYWCFAKKHKIEVSPLWWKETMIQPQVKENDTTKIMWETPVQTDITVTHNRPDLIYIDKINNKTFLIDISVPSDYNIGAKEIEKLSKYHLLKTEIGRLWNTQTAVIH

SEQ ID NO: 15533 - protein, 1373 aa, Lymantria dispar
METDNNETRIGPLPRGDRLGTSGADAGRGSMRTVSGSLLNRRAGVGRTEDVTADQRDGEGADDALQSRASPTDSVGSSASTTIGNEDRRRKWSNKETEELLYCYFKARMAGPGYIRKLYTLFKDRNPNNPKVRKFDGNKLSNQARRIIKQNVISQEIQDRIKRQAEGTLTLAPTNTVYASNDNEHSDTSLNIHAITTSTSCASNDNEHTDTSPNVHAITTSTNTQQTHNSAEQAATIDELTSNIEVNEDQDPLILQFLQILAETKETTLADRLFLPKAKINKQFIDNLHTINKYIPNLLITNTDLISINHIIYATAKTLIINNNQTPFMPKNTIKPKTDPPWKKRIANKIEKLRKELGQLIEVKRGITTRRMINIKNKLYEKYNIKNENDHNNTAETIKQKIKALAARIKRYEEMSGRKEHNQLFAENEHKLYRSLGNNNNTDIKLPTKEGIEEFWTSILSKPTKYNTQANWIKEVEESTNTIDTTNIEEITIEQVKTAVRKLLNWKTPGVDKIQNYYLKYLTSTHKYLSLLFTKIITGQETLEEWFTTGQVILIPKNSNTEEPKNWRPIACLPSIYKLLTSVLADILYSHCDSNNNIMAIEQRGCRRGARGCKDHLMVNKAILEDAHQAQKNLSMAWIDYQKAFDTVSHEWLLKVLDIYKCPPVIKSFLKWSMPAWKVIMTARGSHESITTEPIYIKRGIFQGDSLSPLLFCLAINPISFILNKYELKGYKLKDSFWINHLVYMDDLKIYANNKSNLKVLLDSVEIFTSDIGMRFGLDKCNVIHIRAGHRSTVTGEGHILLSQEKFKELEVGNSYKYLGIHESGKIEHSKIREQITKEYIKRVKKLIQTHLNARNIIKGINTYAIPVLLYSFGIINYKITDLKKIDTKTRKLLAIKKAHQQKAEVERLYLPIAQGGRGLINIEYMYKTQIVKYKQYLKTEFDDMIKAIVQHDINRGKYSIIKEAREIEQELHLPQDNLHTDTEIKQAIVKTQNTSWRAKQLHGQFPKKVLDQANINTELSFKWINKQHISPGIVSAVFAIQDQAVMTLQHQRDILRTAVDGKCRLCRVKDETAQHIISGCEKLAGTYYVKRHNNLVQYVYWCLAKKHKIEVSPLWWKETMIQPQVKENDTTKIMWETPVQTDITVTHNRPDLIYIDKINNKTFLIDISVPSDYNIGAKEIEKLSKYHLLKTEIGRLWNTQTAVIPIVVGATGVVAKSINTYLEKLNTTIDITILQKQAAIHSTTIISKVLGDTVFVNNANTQEEPAQNEQQTLNTQHSENTQLTTNTQDTNTTPDIPETVSGERGRRGNQTAHTQNTANTQITHTTQEESHTHRTDTQQTTHSNTRQGRTRGRGRRATPTTRTQHTRNRVGI

SEQ ID NO: 15534 - protein, 1045 aa, Lymantria dispar
MPKNTIKPKTDPPWKKRIANKIEKLRKELGQLIEVKRGITTRRMINIKNKLYEKYNIKNENDHNNTAETIKQKIKALAARIKRYEEMSGRKEHNQLFAENEHKLYRSLGNNNNTDIKLPTKEGLEEFWTSILSKPTKYNTQANWIKEVEESTNTIDTTNIEEITIEQVKTAVRKLLNWKTPGVDKIQNYYLKYLTSTHKYLSLLFTKIITGQETLEEWFTTGQVILIPKNSNTEEPKNWRPIACLPSIYKLLTSVLADILYSHCDSNNNIMAIEQRGCRRGARGCKDHLMVNKAILEDAHQAQKNLSMAWIDYQKAFDTVSHEWLLKVLDIYKCPPVIKSFLKWSMPAWKVIMTARGSHESITTEPIYIKRGIFQGDSLSPLLFCLAINPISFILNKYELKGYKLKDSFWINHLVYMDDLNIYANNKSNLKVLLDSVEIFTSDIGMRFGLDKCNVIHIRAGHRSTVTGEGHILLSQEKFKELEVGNSYKYLGIHESGKIEHSKIREQITKEYIKRVKKLIQTHINARNIIKGINTYAIPVLLYSFGIINYKITDLKKIDAKTRKLLAIKKAHQQKAEVERLYLPIAQGGRGLINIEYMYKTQIVKYKQYLKTEFDDMIKAIVQHDINRGKYSIIKEAREIEQELHLPQDNLHTDTEIKQAIVKTQNTSWRAKQLHGQFPKKVLDQANINTELSFKWINKQHISPGIVSAVFAIQDQAVMTLQHQRDILRTAVDGKCRLCRVKDETAQHIISGCEKLAGTYYVKRHNNLVQYVYWCLAKKHKIEVSPLWWKETMIQPQVKENDTTKIMWETPVQTDITVTHNRPDLIYIDKINNKTFLIDISVPSDYNIGAKEIEKLSKYHLLKTEIGRLWNTQTAVIPIVVGATGVVAKSINTYLEKLNTTIDITILQKQAAIHSTTIISKVLGDTVFVNNANTQEEPAQNEQQTLNTQHSENTQLTTNTQDTNTTPDIPETVSGERGRRGNQTAHTQNTANTQITHTTQEESHTHRTDTQQTTHSNTRQGRTRGRGRRATPTTRTQHTRNRVGI

SEQ ID NO: 15535 - protein, 1271 aa, Curetis bulis
MRKRNLSKGPLPGGNRQGTSGADAGRDSIRAVSGSQLNRRAGAGEPEDITADVRDGDTLRSGSIPENSAGTPGGRTTTSLIQDARRKWSDEDIHEIMFCFFKAKAEGAGYIKRLEALFKDRNPNDPRIHKFNGNTLSNQARRIIKQNVISQEVLQRIQAQAEGGNTSGDNTALEQIDERVEEAPTPILPEEPATPTNNPEINTHIYTEEQSEIINTLVQNINVDEEQDPLILHFLQVLAETKETQINDRQYLPKAKINHQFLKNLNTINNFLPNLFITNHTLRDINEIVYAAAKTLILNNNQKPYIPKTSTRTEIDPPWKRRIRTKIEALRKEVGQLIELERGVNSRKMQKLKIKLYTKYKIQNDIEHKNTIEILKQKIKAYAGRIKRYEDMTNRKEQNQLFKENEHKMYRNLSPQQTGEIRIPQKENVEEFWKSILSKPVTYNRTAGWIKEVQVKNSQIESRDFDEITEDHIKSALRKMLNWKSPGYDKIQNYYLKYLTNTHIYLAKVYTKLLNGTEAYEDWFTVGKVILIPKNAETEHPKNWRPIACLPSMYKLLTSVLTDELYHHCQANDLIASEQRGCRRGARGCKDHLMVNKAILEDAHLSQKNLSMGWIDYQKAFDSVSHDWILKVLDIYKCPPIIKRFLETVMPSWRVVMTARGSKETITTDPIFIRRGIFQGDSLSPLLFCLALNPLSHILNKYELKGYKLRDNIWVNHLLYMDDLKLYANNKNNLKVLLDSVEIFTNDIGMRFGLEKCNILHLTAGHRSNATGEGHILLNGEEFDHLKANQKYKYLGIHESGKIKHGELRDQITKEYFKRIKQLSSTHLNARNLIKGINTYAVPVLLYSFGIVNYKSSDLKKIDIKTRKILAMNKAHQQKADVDRLYLPIAEGGRGLLNIENMHKTQIIKYEQYLKASDDFLIKAIVQHDKHRDKYSITKDAIELQKEIGIRLGTVPTDQDIKKAIRNKQNQSWRNKNLHGQFPKSVLDQANIETELSFKWLKKHPIAPSLESSLFAIQDQAILTRQHQRDILKLDTDGKCRLCANKDETAQHIVSGCEKLAGTYYVRRHNNLVQYVYWCLAKKHHMEVSNLWWKEHLTQPQTKENETAKIMWEIPIQTDVTVAHNRPDIVYIDKQNNKTYLIDVTVPSDYNIGAKEIEKLSKYHLLRTEISRLWNTQATVVPIVIGATGVVGKSIGRHCDKLNAKIDLGILQKQAAMHTTVIMSKVLGDSVFITNSQPTEVGNPITSSTNTQNNLTDTQQTATSSHIQCTQ

SEQ ID NO: 15536 - protein, 1174 aa, Parapoynx stratiotata
MERQINRTSIESLPGGDRRGTSGADAGRHSMRTVSGSPLNRRAGVGETVYATAERGRAGTDDALQGRASPTDSVGSSVSTTNNISDDRRRKWSIEEMKELMFCYFKARSGGAGYIGRLYSLFCERNPNNPKIHKFNGNTLSNQARRIIKQNVISQQLLNQIQNEAEGITSEADNNTRFEPEQGLEPALSPPNTHTPQNIQRPEHTTEQAEIIEQLTQNVIVNENQDPLILNFLQALAETRETAVADRPFLPKAKINKQFLTNLHTLNNYMPNILVTNNTLRDINNIIYAAAKTLIVSNNQSPYVPKEVIKTKTDPPWKRRIQTRIEKFRKEIAQLIEIDRGIDTRRMTNIKEKLYRKYNIQNRNEQTNTIETLKQKVKALAGRIKRYEDMSNRKEQNRMFNENQHRFYRTLGDNSYKDIKLPRKETTEEFWSSILSEPIHYNTEARWIKEVEETSSEVNTIDTEEISETQIKNAVRKLLNWKSPGLDKIQNYYLKYFTSVHSYLALLFTKIVRNTENIEEWFTTGQVILIPKNENTEDPKNWRPISCLPTMYKLFTSVLADLLYDHCSNNNIMAPEQRGCRRGTRGCKDHLMVNKAVLEDAHQSQKNLSMAWIDYQKAFDSVSHDWLLKVLDVYKCPPMVKRFLQLVMPSWRVIMTARGSQSALTTEPILIKRGIFQGDSLSPLLFCLAVNPLSFILNKYELKGYKLKDSCWINHLLYMDDLKLYANNKHNLKVLLDSVEIFTNDIGMRFGLDKCNTLHLSSGHRSSATGEGHILLSSETIKQLAIGDTYKYLGVHESGKIEHSVIKDHLMKEYFKRIKKLLHTHLNARCLIKGINVYAIPVLLYSFGIIHYKNTDLKKIDTKTRKLLAINKAHQQKADVQRLYLPVAEGGRGLINVEYTYKAQIVKYKQYLKEENDYLIKAIVEHDKNRDKYSIIKDAQEIELQLHLTQSNTHTDNEIKQAIVKQHKEAWRGKQLHGQFPKKVLDQANIDTESSFKWIKKQQISPNIESSIFAIQDNAIMTRQHQRDILKEPVDGKCRLCACKDETVQHIISGCEKLAGTYYVKRHNNLVQYVYWCLAKKHKIEVSNLWWKETMIQPQVKENDSTKILWEMPVHTDITVTHNRPDLIYIDKISNKTYLIDITVPSDYNIGPKEIEKLSKYHLLKTEVSRLWNT

SEQ ID NO: 15537 - protein, 1129 aa, Parapoynx stratiotata
MTVLSTDRTGRAGTDDALQGRASPTDSVGSSVSTTNNISDDRRRKWSIEEMKELMFCYFKARSGGAGYIGRLYSLFCERNPNNPKIHKFNGNTLSNQARRIIKQNVISQQLLNQIQNEAEGITSEADNNTRFEPEQGLEPALSPPNTHTPQNIQPPEHTTEQAEIIEQLTQNVIVNENQDPLILNFLQALAETRETAVADRPFLPKAKINKQFLTNLHTLNNYMPNILVTNNTLRDINNIIYAAAKTLIVSNNQSPYVPKEVIKTKTDPPWKKRIQTRIEKFRKEIAQLIEIDRGIDTRRMTNIKEKLYRKYNIQNRNEQTNTIETLKQKVKALAGRIKRYEDMSNRKEQNRMFNENQHRFYRTLGNNSYKDIKLPRKETTEEFWSSILSEPIHYNTEAKWIKEVEETSSEVNTINTEEISETQIKNAVRKLLNWKSPGLDKIQNYYLKYFTSVHSYLALLFTKIVRNTENIEEWFTTGQVILIPKNENTEDPKNWRPISCLPTMYKLFTSVLADLLYDHCSNNNIMAPEQRGCRRGTRGCKDHLMVNKAVLEDAHQSQKNLSMAWIDYQKAFDSVSHDWLLKVLDVYKCPPMVKRFLQLVMPSWRVIMIARGSQSALTTEPILIKRGIFQGDSLSPLLFCLAVNPLSFILNKYELKGYKLKDSCWINHLLYMDDLKLYANNKHNLKVLLDSVEIFTNDIGMRFGLDKCNTLHLSSGHRSSATGEGHILLSGETIKQLAIGDTYKYLGVHESGKIEHSVIKDHLMKEYFKRIKKLLHTHLNARCLIKGINVYAIPVLLYSFGIIHYKNTDLKKMDTKTRKLLAINKAHQQKADVQRLYLPVAEGGRGLINVEYTYKAQIVKYKQYLKEENDYLIKAMVEHDKNRDKYSIINDAQEIELQLHLTQSNTHTDNEIKQAIVKQHKEAWRGKQLHGQFPKKVLDQANIDTESSFKWIKKQQLSPNIESSIFAIQDNAIMTRQHQRDILKEPVDGKCRLCACKDETVQHIISGCEKLAGTYYVKRHNNLVQYVYWCLAKKHKIEVSNLWWKETMIQPQVKENDSTKILWEMPVHTDITVTHNRPDLIYIDKISNKTYLIDITVPSDYNIGPKEIEKLSKYHLLKTEVSRLWNTQ

SEQ ID NO: 15538 - protein, 1354 aa, Apodemia arnacis
MKRQRNSIRLGPLPGGERRGTSGADAGRDSIRTVSGSLLNRRARVGGPEDTTAEYRGGVGTDEALRSGASTPIESTAGSSGETIENLSDDRRRKWSTEEEKELMFCFFKAQSQGPGYINRLYTLFRDRNPTNTKIHKFNGNTLSNQARRIIKQNVLSQELLNRIKDEAEGRVAENTETTRNTTDTNFTTDTNITQQNSRTNTQHDSNTNTQNRQNTDTQPSVEQSDLLDQLTRNITVTEDQDPLILNFLQVLAETKETEIKDRLLLPKAKLNRHFIQNLHTLNNYLPNLLVTTSTLRELNDIIYATAKTLILNNRQIPFVPENVIKVISDPPWKKRIKGRIEKIRKELGQLIEIGRGVNTRRMTNIKTKLYNKYNIQQDNERSNTVEILKQKIKALAGRIKRYEETSQRKKQNRLFNENEHRLYRSLGNNSTTHEVKLPSKDSVEEFWKSILSNPIEFNKDAKWIEEIQVLTDRIHTVESQEITEEQVKIAIIKLHNWKTPGIDKIHNYYLKYLTSTHKYLATVFSNIIGGREQFEEWFTTGQVILIPKNENTEDAKNWRPIACLPSIYKLLTSVLANQLYNHCQENNIMAIEQRGCRRGARGCKDHLMVNKAILEDAHQSQKNLSMAWIDYQKAFDSVSHEWLLKILDIYKCPPMIKAFLKIAMPAWKVIMTARGTQESLTTEPIYIKRGIFQGDSLSPLLFCLAINPISYILSKYEMKGYKLKDSFWINHLLYMDDLKIYANTRYNLKVLLDSIEIFTNDIGMRFGLSKCNTIHIRSGYRNYASGNGHVLLSGENFEQLGIDKTYKYLGVHESGKIEHIKIREQVTKEYFKRIKQLLNTYLNSRNIIKGINTYATPVLLYSFGIINYKSSDLKAIDIKTRKLLAIKKAQQQKADVERLYLPILEGGRGLINIENMYKMQILKYKIYLERENDDLIKVIVQHDKNRDKYSIFKEAKDIERELQMTLHNIHTDKEIKQAIVEKQKAKWRNKQLHGQFPKAVLDQANIDKENSFKWIRKQQIPPSIESAIFAIQDQAVMTRQHQRDILKEDTDGKCRLCNSKDETTQHIISGCEKLAGTYYVKRHNSLVQYVHWCLAKKHNIEVSNFWWKESLIQPQIKENDQTKIMWEIPIQTDVTVTHNRPDLIYVDKTNNTTFLIDIAVPSDYNIGAKEIEKLSKYHLLKTEIRRLWNTQTSVIPIVVGASGIISKSLHRYIEQINTKIDITILQKQAAIHTTTILSKVMGDTIFVNSTSNTQELAPETQRTSHLFTQQTSHTLASQQTLVTQSTPDTRESSTDTQQTSDTSTQVTQQTSHTEASQQTLVTQSTPDTGVFNRYTTNIRYVNTSHTTNITHRG

SEQ ID NO: 15539 - protein, 1082 aa, Udranomia eurus
MHIIDQLTQNIEVNEDQNPLILSFLQILIETRESTIAERPFLPKAKINRNFIQNLNTLNGYLPNLLVTDNSLRDINNIIYATAKTLIINNNQSPYVPKNTFKSKTDPPWKKRIRNKIDIFRKELGQLIEIDRGINTRKMIKIKDKIYSKYNIQNINDHKNIEEILKQKIKALAGRIKRYEDINSKKEQNNLFSENEHKLYRSLGGDGFKDIKLPNKEIVEEFWSSILSNPIQYNSNANWIKEVEISTNAINTTDIHDISEDQIKYAIRKLSNWKTPGIDKIQNYYLKYLTSVHSYLATLFTKIVTHKETLEEWFTTGQVILIPKNEHTEDPKNWRPIACLPTMYKLLTSVLANILYNHCHQNNIIAIEQRGCKRGSRGCKDHLMVNKAILEDAHQSQKNLNMAWIDYQKAFDSVSHEWLTKVLDVYKCPPMIKTFLKLVMPSWRVIMTARGTQNSLTTEPIYVRRGIFQGDSLSPLLFCLAINPLSFVLNKYEMKGYKLKDSIWVNHLLYMDDLKIYANNRHNLKVLLDSVEIFTSDVGMRFGLDKCNIIHISSGHRSSVVGEGHVLLDGEKIKQLAIGDRYKYLGIHESGKIEHSVIRDQISKEYFKRLKQLLNTHLNSRYLIKGINTYAIPVLLYSFGIINYKNNDLKKIDTKTRKLLAINQAHRQKADVERLYLPVTQGGRGLLNVEWMYKTQIVKYKQYLKGESDDLIKAIVEHDIHKDKYSIINEALEIENELHLGRENIHTDKDIKKAIVSKSSEIWRSKQLHGQFVKKVLDQTNIDTELSFKWIKKQQISPNIESSIFAIQDQAVMTRQHRRDILKEPVDGKCRLCNSKDETTQHIISGCEKLAGNYYVKRHNNLVQYVYWCLAKKHKIEVSSLWWKETLTQPQTKENASAKIMWEMPIQTDQTVTHNRPDLIYVDKINNKTYLIDVTVPSDYNIGPKELEKLSKYYLLKNEVSRLWKTQTTIIPIVVGATGVVAKSLIKYIEQLGTFIDISILQKQAAIHTSIILTKVLGDTVFVNNTQNNIQSSHTRQTIISENLPTTAPDSTDRIGTQNQHATTRTQTQRNRRRRKRGEVRQ

SEQ ID NO: 15540 - protein, 1269 aa, Parapoynx stratiotata
MERQINRTSIESLPGGDRRGTSGADAGRHSMRTVSGSPLNRRAGVGETVYATAERGRAGTDDALQGRASPTDSVGSSVSTTNNISDDRRRKWSIEEMKELMFCYFKARSGGAGYIGRLYSLFCERNPNNPKIHKFNGNTHSNQARRIIKQNVISQQLLNQIQNEAEGITSEADNNTRFEPEQGLEPALSTPNTHTPQNIQPPEHTTEPAEIIEQLTQNVIVNENQDPLILNFLQALAETQETAVAERPFLPKAKINKQFLTNLHTLNNYMPNILVTNNTLRDINNIIYAAAKTLIVSNNQSPYVPKEVIKTKTDPPWKRRIQTRIEKFRKEIAQLIEIDRGIDTRRMTNIKEKLYRKYNIQNRNDQTNTIETLKQKVKALAGRIKRYEDMNNRKEQNRMFNENQHRFYRTLGNNSYKDIKLPRKETTEEFWSSILSEPIHYNTEARWIKEVEETSSEVNTIDTEDISETQIKTAVRKLLNWKSPGLDKIQNYYLKYFTSVHSYLALLFTKIVRNTENIEEWFTTGQVILIPKNENTEDPKNWRPISCLPTMYKLFTSVLADLLYDHCSSNNIMAPEQRGCRRGTRGCKDHLMVNKAVLEDAHQSQKNLSMAWIDYQKAFDSVSHDWLLKVLDVYKCPPMVKRFLQLVMPSWQVIMTARGSQSALTTEPILIKRGIFQGDSLSPLLFCLAVNPLSFILNKYELKGYKLKDSCWINHLLYMDDLKLYANNKHNLKVLLDSVEIFTNDIGMRFGLDKCNTLHLSSGHRSSATGEGHILLSGETIKQLAIGDTYKYLGVHESGKIEHSVIKDHLMKEYFKRIKKLLHTHLNARCLIKGINVYAIPVLLYSFGIIHYKNTDLKKIDTKTRKLLAINKAHQQKADVQRLYLPVAEGGRGLINVEYTYKAQIVKYKQYLKEENDYLIKAIVEHDKNRDKYSIIKDAQEIELQLHLTLSNTHTDNEIKQAIVKQHKETWRGKQLHGQFPKKVLDQANIDTELSLKWIKKQQISPNIESSIFAIQDNAIMTRQHQRDILKEPVDGKCRLCACKDETVQHIISGCEKLAGTYYVKRHNNLVQYVYWCLAKKHKIEVSNLWWKETMIQPQVKENDSTKILWEMPVHTDITVTHNRPDLIYIDKISNKTYLIDITVPSDYNIGPKEIEKLSKYHLLKTEVSRLWNTQVTVVPIVVGSTGVVAKSIKRYIDKLDANIDITILQKQAALHTSIIISKVLGDTVFVNNTHQSGSSDTNMQTVQNIHTPQTQHTSQQTNTQTSQS

SEQ ID NO: 15541 - protein, 1000 aa, Parapoynx stratiotata
MPNILVTNNTLRDINNIIYAAAKTLIVSNNQSPYVPKEVIKTKTDPPWKKRIQTRIEKFRKEIAQLIEIDRGIDTRRMTNIKEKLYRKYNIQNRNDQTNTIETLKQKVKALAGRIKRYEDMNNRKEQNRMFNENQHRFYRTLGNNSYKDIKLPRKETTEEFWSSILSEPIHYNTEARWIKEVEETSSEVNTIDTEDISETQIKTAVRKLLNWKSPGLDKIQNYYLKYFTSVHSYLALLFTKIVRNTENIEEWFTTGQVILIPKNENTEDPKNWRPISCLPTMYKLFTSVLADLLYDHCSSNNIMAPEQRGCRRGTRGCKDHLMVNKAVLEDAHQSQKNLSMAWIDYQKAFDSVSHDWLLKVLDVYKCPPMVKRFLQLVMPSWRVIMTARGSQSALTTESILIKRGIFQGDSLSPLLFCLAVNPLSLILNKYELKGYKLKDSCWINHLLYMDDLKLYANNKHNLKVLLDSVEIFTNDIGMRFGLDKCNTLHLSSGHRNSATGEGHILLSGETIKQLAIGDTYKYLGVHESGKIEHSVIKDHLMKEYFKRIKKLLHTHLNARCLIKGINVYAIPVLLYSFGIIHYKNTDLKKIDTKTRKLLAINKAHQQKADVQRLYLPVAEGGRGLINVECTYKAQIVKYKQYLKEENDYLIKAIVEHDKNRDKYSIIKDAQEIELQLHLTQSNTHTDNEIKQAIVKQHKETWRGKQLHGQFPKKVLDQANIDTESSFKWIKKQQISPNIESSIFAIQDNAIMTRQHQRDILKEPVDGKCRLCACKDETVQHIISGCEKLAGTYYVKRHNNLVQYVYWCLAKKHKIEVSNLWWKETMIQPQVKENDSTKILWEMPVHTDITVTHNRPDLIYIDKISNKTYLIDITVPSDYNIGPKEIEKLSKYHLLKTEVSRLWNTQVTVVPIVVGSTGVVAKSIKRYIDKLDASIDITILQKQAALHTSIIISKVLGDTIFVNNTHQSGSSDTNMQTVQNTHTPQTQDTSQQTNTQTSQS

SEQ ID NO: 15542 - protein, 1349 aa, Emesis diogenia
MKSRINNACIGPLPGGERRGTSGADAGRDSIRTVSGSLLSRRARVGGPEDTTAEYRGGVDIDDALQSGASTPIEHIAGSSGETIANVNDDRRRKWSTEEEKELMFCFFKAQYQGPGYINRLYTLFKDRNPSNPKIQKFNGNTLSNQARRILKQNVLSQELLNRIKDEAEGRVAINIEATNNMTETNSEIIPPVTQFNSHTQHRPNTDTQYTSNTDTQPSLDQTNLINQLTANITVTEDQDPLILQFLQVLAETKETAIKERLSLPKAKINKHFLHNIHTLNKYLSNLLITIHTLRELNNIIYATAKTLIINNRQTPFLSKTVMKVISDPPWKKRIKSRIEKIRKELGQLIEIGRGVNTRRMNNIKAKLYNKYNIQDENERTNTVEILMQKIKALAGRIKRYEEISQRKQQNKLFHENEHRLYRSLGNNSISYDVKIPSKDNVEEFWKSILSNPIQYNKDAKWIEEIETASDSINTVEPQEITEEKVKLAIRKLHNWKTPGIDKIHNYYLKYLTSTHKYLATVFSNIIRGREEMEEWFTTGQVILIPKNKNTEDAKNWRPIACLPSIYKLLTSVLANQLYSHCQENNIMAIEQRGCRRGARGCKDHLMINKAILEDAHQSQKNLSMAWIDYQKAFDSVSHEWLLKVLDIYKCPPMIKNFLKVAMPNWKVVMTARGTHESLTTEPIYIKRGIFQGDSLSPLLFCLAINPISYILNKYEMKGYKLKDSFWVNHLLYMDDLKVYANSKYNLKVLLDSIEIFTNDIGMKFGLNKCSTIHIRAGHRSNASGDGHVLLNGDIFEQLGINTTYKYLGIHESGKIEHNKIREQVTKEYFRRTKQLLNTHLNSRNIIKGINTYAIPVLLYSFGIINYKISDLKSIDIKTRKLLAIKKAHQQKSDIERLYLPITEGGRGLINIENTFKVQILKYKQYLEREFDDLIKVIIQHDKNRDKFSIIKEAREIERELQINQNGLHTDKEIKQAIFEKQKARWRNKQLHGQFPKTVLDQANIDKENSFKWIKKQQIPPSIESAIFAIQDQAVMTRQHQRDILKLDIDGKCRLCASKDETTQHIISGCEKLAGTYYVKRHNSLVQYVHWCLARKHNIEVSNFWWKEILTQPQVRENEQAKIMWEIPIQTDVTVTHNRPDLIYVDKINNATYLIDIAVPSDYNIGAKEIEKLSKYHLLKTEIRRLWNTQTNVIPIVVGATGIISKNIHRYIEQLNITIDITILQKQAAIHTTTILSKVMGDTVFVITTPNTQEPTTETQQTSQVSTQRSLDAVNSLQTLDTQSTLDTQKSATQAQQTYDTPTPATQQTSHTVASQPPVTHHSLQNLNTQNNPQNTQTTDRTRRRTRRR

SEQ ID NO: 15543 - protein, 1329 aa, Ennomos quercinarius
MESRNNVERIGPLPGGDRRGTFGADAGRDSMQTVSGSLLSRRARVGEPENTTADQRGGEGADDALQDRASPTNSAGSSATTTNYAVNDDRRRKWSTEELQELMFCYFKARSEGPGYIGRLEALFTERNPNNPKIHKFNGNTLSNQARRVIKQNVISQELLDRLQKQAEGIMPTETPELILNETVTHDTTPTQILHITQPTSEQSETIDQLTNNIEVNEDQDPLVLEFLQILAETKETPIAERLVLPKAKINKRFIENLNILNKYLPNLLITNNTLREINDIIYATAKTLIISNNQTPFMPKNIIKPKTDPPWKKRIQTKIEKFRKELGHLVEIQRGTNTRRMRKIKDKIYSKYNIQNENDHNNITETIKQKVKALAGRIKRYEEKNTKKEQNKLFGENEHRLYRSLDSKSNSEIKIPSKEGVEEFWKSILSNPEQYNTDAKWITEVENSFSEVNTADIEEITEDQVKHAIRKLLNWKSPGIDKIQNYYLKYLTSVHKYLATLFTNIVSGTETFEEWFTTGQVILIPKNENTEDPKSWRPIACLPSMYKLLTSVLANILYSHCHENSIMAIEQRGCRRGARGCKDHLMVNKAILEDAHESQKNLSMAWIDYQKAFDSVSHEWLLKILDVYKCPALIKRFLLLAMPSWRVIMTARGSQDSITTEPIYIRRGIFQGDSLSPLLFCLAINPLSFILNKYEMKGYKLKDSFWINHLLLYMDDLKVYANNRTNLKVLLDSLEIFTSDIGMRFGLDKCNIIHISSGHRSNVTGEGHILLNGETIKHLAIGDRYKYLGVHESGKIEHNTIREQITKEYFKRVKKLMNTHLNSRNLVKGINTYAIPVLLYSFGVINYKNNDLKKIDVKTRKLLAIKKAHQQKAEVERLYLPVNQGGRGLLNVEYMYKTQIVKYKQYLEPKSDHLIEAIVQHDTHRDKYSIMKEVQEIERELHLAVDSRHTDEEIKKAVVKRRNETWRNKQLHGQFPKKVLDQANIDKELSFKWIKKQQISPSIESSIFAIQDQAVMTRQHQRDILKEPVDGKCRLCACKDETTQHIISGCEKLAGTYYVKRHNNLVQYVYWCLAKKHKIEVANLWWKETLVQPQVKENDTTKILWEIPIQTDVTVTHNRPDLIYIDKTNNKTFLIDITVPSDYNIGAKEIEKLSKYHLLKTEISRLWHTQATVIPIVVGATGIVAKSIKKYIDKLDATIDISILQKQAAIHTTTILSKVLGDKVFVHNIPTDQNVPNTQQVSTTQQSSDILDPSNITQTSNTQQSSTTQQTSDTQGPSNTTQISDTQQSSTTQQSSDTPDPSNISRTSNTQQRREQRLGRGRRRRINT

SEQ ID NO: 15544 - protein, 1328 aa, Ennomos quercinarius
MESRNNVERIGPLPGGDRRGTFGADAGRDSMQTVSGSLLSRRARVGEPENTTADQRGGEGADDALQDRASPTNSAGSSATTTNYAVNDDRRRKWSTEELQELMFCYFKARSEGPGYIGRLEALFTERNPNNPKIHKFNGNTLSNQARRVIKQNVISQELLDRLQKQAEGIMPTETPELILNETVTHDTTPTQILHITQPTPEQSETIDQLTNNIEVNEDQDPLVLEFLQILAETKETPIAERLVLPKAKINKRFIENLNILNKYLPNLLITNNTLREINDIIYATAKTLIISNNQTPFMPKNIIKPKTDPPWKKRIQTKIEKFRKELGHLVEIQRGTNTRRMRKIKDKIYSKYNIQNENDHNNITETIKQKVKALAGRIKRYEEMNTKKEQNKLFGENEHRLYRSLDSKSNSEIKIPSKDGVEEFWKSILSNPEQYNTDAKWITEVENSFSEVNTADIEEIIEDQVKHAIRKLLNWKSPGIDKIQNYYLKYLTSVHKYLATLFTNIVSGTETFEEWFTTGQVILIPKNENTEDPKSWRPIACLPSMYKLLTSVLANILYSHCHENSIMAIEQRGCRRGARGCKDHLMVNKAILEDAHESQKNLSMAWIDYQKAFDSVSHEWLLKILDVYKCPALIKRFLLLAMPSWRVIMTARGSQDSITTEPIYIRRGIFQGDSLSPLLFCLAINPLSFILNKYEMKGYKLKDSFWINHLLYMDDLKVYANNRTNLKVLLDSLEIFTSDIGMRFGLDKCNIIHISSGHRSNVTGEGHILLNGETIKQLAIGDRYKYLGVHESGKIEHNTIREQITKEYFKRVKKLMNTHLNSRNLVKGINTYAIPVLLYSFGVINYKNNDLKKIDVKTRKLLAIKKAHQQKAEVERLYLPVNQGGRGLLNVEYMYKTQIVKYKQYLEPKSDHLIEAIVQHDTHRDKYSIMKEAQEIERELHLAVDSRHTDEEIKKAIVKRRNETWRNKQLHGQFPKKVLDQANIDKELSFKWIKKQQISPSIESSIFAIQDQAVMTRQHQRDILKEPVDGKCRLCACKDETTQHIISGCEKLAGTYYVKRHNNLVQYVYWCLAKKHKIEVANLWWKETLVQPQVKENDTTKILWEIPIQTDVTVTHNRPDLIYIDKTNNKTFLIDITVPSDYNIGAKEIEKLSKYHLLKTEISRLWHTQATVIPIVVGATGIVAKSIKKYIDKLDATIDISILQKQAAIHTTTILSKVLGDTVFVHNIPTDQNVPNTQQVSTTQQSSDILDPSNITQTSNTQQSSTTQQTSDTQGPSNTTQISDTQQSSTTQQSSDTPDPSNISRTSNTQQRREQRLGRGRRRRINT

SEQ ID NO: 15545 - protein, 1328 aa, Ennomos quercinarius
MESRNNVERIGPLPGGDRRGTFGADAGRDSMQTVSGSLLSRRARVGEPENTTADQRGGEGADDALQDRASPTNSAGSSATTTNYAVNDDRRRKWSTEELQELMFCYFKARSEGPGYIGRLEALFTERNPNNPKIHKFNGNTLSNQARRVIKQNVISQELLDRLQKQAEGIMPTETPELILNETVTHDTTPTQILHITQPTPEQSETIDQLTNNIEVNEDQDPLVLEFLQILAETKETPIAERLVLPKAKINKRFIENLNILNKYLPNLLITNNTLREINDIIYATAKTLIISNNQTPFMPKNIIKPKTDPPWKKRIQTKIEKFRKELGHLVEIQRGTNTRRMRKIKDKIYSKYNIQNENDHNNITETIKQKVKALAGRIKRYEEMNTKKEQNKLFGENEHRLYRSLDSKSNSEIKIPSKDGVEEFWKSILSNPEQYNTDAKWITEVENSFSEVNTADIEEITEDQVKHAIRKLLNWKSPGIDKIQNYYLKYLTSVHKYLATLFTNIVSGTETFEEWFTTGQVILIPKNENTEDPKSWRPIACLPSMYKLLTSVLANILYSHCHENSIMAIEQRGCRRGARGCKDHLMVNKAILEDAHESQKNLSMAWIDYQKAFDSVSHEWLLKILDVYKCPALIKRFLLLAMPSWRVIMTARGSQDSITTEPIYIRRGIFQGDSLSPLLFCLAINPLSFILNKYEMKGYKLKDSFWINHLLYMDDLKVYANNRTNLKVLLDSLEIFTSDIGMRFGLDKCNIIHISSGHRSNVTGEGHILLNGETIKQLAIGDRYKYLGVHESGKIEHNTIREQITKEYFKRVKKLMNTHLNSRNLVKGINTYAIPVLLYSFGVINYKNNDLKKIDVKTRKLLAIKKAHQQKAEVERLYLPVNQGGRGLLNVEYMYKTQIVKYKQYLEPKSDHLIEAIVQHDTHRDKYSIMKEAQEIERELHLAVDSRHTDEEIKKAIVKRRNETWRNKQLHGQFPKKVLDQANIDKELSFKWIKKQQISPSIESSIFAIQDQAVMTRQHQRDILKEPVDGKCRLCACKDETTQHIISGCEKLAGTYYVKRHNNLVQYVYWCLAKKHKIEVANLWWKETLVQPQVKENDTTKILWEIPIQTDVTVTHNRPDLIYIDKTNNKTFLIDITVPSDYNIGAKEIEKLSKYHLLKTEISRLWHTQATVIPIVVGATGIVAKSIKKYIDKLDATIDISILQKQAAIHTTTILSKVLGDTVFVHNIPTDQNVPNTQQVSTTQQSSDILDPSNITQTSNTQQSSTTQQTSDTQGPSNTTQISDTQQSSTTQQSSDTPDPSNISRTSNTQQRREQRLGRGRRRRINT

SEQ ID NO: 15546 - protein, 1328 aa, Ennomos quercinarius
MESRNNVERIGPLPGGDRRGTFGADAGRDSMQTVSGSLLSRRARVGEPENTTADQRGGEGADDALQDRASPTNSAGSSATTTNYAVNDDRRRKWSTEELQELMFCYFKARSEGPGYIGRLEALFTERNPNNPKIHKFNGNTLSNQARRVIKQNVISQELLDRLQKQAEGIMPTETPELILNETVTHDTTPTQILHITQPTPEQSETIDQLTNNIEVNEDQDPLVLEFLQILAETKETPIAERLVLPKAKINKRFIENLNILNKYLPNLLITNNTLREINDIIYATAKTLIISNNQTPFMPKNIIKPKTDPPWKKRIQTKIEKFRKELGHLVEIQRGTNTRRMRKIKDKIYSKYNIQNENDHNNITETIKQKVKALAGRIKRYEEMNTKKEQNKLFGENEHRLYRSLDSKSNSEIKIPSKDGVEEFWKSILSNPEQYNTDAKWITEVENSFSEVNTADIEEITEDQVKHAIRKLLNWKSPGIDIIQNYYLKYLTSVHKYLATLFTNIVSGTETFEEWFTTGQVILIPKNENTEDPKSWRPIACLPSMYKLLTSVLANILYSHCHENSIMAIEQRGCRRGARGCKDHLMVNKAILEDAHESQKNLSMAWIDYQKAFDSVSHEWLLKILDVYKCPALIKRFLLLAMPSWRVIMTARGSQDSITTEPIYIRRGIFQGDSLSPLLFCLAINPLSFILNKYEMKGYKLKDSFWINHLLYMDDLKVYANNRTNLKVLLDSLEIFTSDIGMRFGLDKCNIIHISSGHRSNVTGEGHILLNGETIKQLAIGDRYKYLGVHESGKIEHNTIREQITKEYFKRVKKLMNTHLNSRNLVKGINTYAIPVLLYSFGVINYKNNDLKKIDVKTRKLLAIKKAHQQKAEVERLYLPVNQGGRGLLNVEYMYKTQIVKYKQYLEPKSDHLIEAIVQHDTHRDKYSIMKEAQEIERELHLAVDSRHTDEEIKKAIVKRRNETWRNKQLHGQFPKKVLDQANIDKELSFKWIKKQQISPSIESSIFAIQDQAVMTRQHQRDILKEPVDGKCRLCACKDETTQHIISGCEKLAGTYYVKRHNNLVQYVYWCLAKKHKIEVANLWWKETLVQPQVKENDTTKILWEIPIQTDVTVTHNRPDLIYIDKTNNKTFLIDITVPSDYNIGAKEIEKLSKYHLLKTEISRLWHTQATVIPIVVGATGIVAKSIKKYIDKLDATIDISILQKQAAIHTTTILSKVLGDTVFVHNIPTDQNVPNTQQVSTTQQSSDILDPSNITQTSNTQQSSTTQQTSDTQGPSNTTQISDTQQSSTTQQSSDTPDPSNISRTSNTQQRREQRLGRGRRRRINT

SEQ ID NO: 15547 - protein, 1173 aa, Autochton itylus
MPREGRTLETLRVRYTPMTNGALVTFVNMERQFRNRTLGPLPGGDRRGTSGADAGRDSMQTVSDSLLNRRARVGGPENTTADLRGGEGTGDALQSRASPTDSVGSSVSTTNNAVSDDRRRKWSTEELQELMFCYFKARSDGPGYIDRLHKIFAERNPNNPKIHKFNGNTLSNQARRIVKHNIISQELMDRIQKRAEGTIDTIEISEQYIAEEEESAPHSHITLTHNTHTEHHVEYSIEQILEIDQLSNNIEVNEDQESIILDFLQILSETKETAIEERQLLPKAKINRRFLENLCKVNKFLPSILATNYTLREINNIIYAAAKTLIINNNQSPYNSKNTFKIKSEPPWKKRIQSKIEKFRKELAQLIELGRGINTRRMIKIKDKLYRHYNIQNENEHKNIEETLKQKIKALAGRIKRYEDINSRKEQNRLFSENEHKLYRSLGGNSFKDIKLPDKETVEEFWSNIFSNPIQYNSKAKWIKDVEESSCEVNTTDIEEILEEQVKHAVKKLLNWKTPGIDKVQNYYLKYLTSVHSYLASIFTKIVSGREILEEWFTTGQVILIPKNEQTLDPKNWRPIACLPTMYKLLSSVLSNILYDHCQQNNIIAIEQRGCRRGARGCKDHLMVNKAILEDAHQSQKNLSMAWIDYQKAFDSVPHEWLTKVLDVYKCPPIVKRFLELVMPSWRMIMTARGTHNLITTEPIYVRRGIFQGDSLSPLLFCLAMNPLSFILNKYEMKGYKLKDSLWVNHLLYMDDLKLYANNKHNLKVLLDSVEIFTRDIGMRFGLDKCNTIHINSGYRNKVTGEGHILLEGDTIKQLAIEDRYKYLGIHESGKIEHSEIRDQIIKEYFKRIKKLINTNLNSRNLIKGINTYAIPVLLYSFGIINYKNSDLKKIDTKTRKLLAIKKAHQQKADVQRLYLPVNQGGRGLLNVEYMYKTQIVKYKQYLKAESDDLVKAIVEHDIHRDKYSVINEAQEIENELHLARGYIHTDKDIREAIVKKFKDIWRNKQLHGQFIKKVLDQTNIDTELSFRWIKKQHISPAIESSIFAIQDQCIMTRQHRRDILKEPIDGKCRLCACKDETTQHIISGCEKLAGNYYIKRHNNLVQYVYWCLAKKHKIEVSNLWWQETLLQPHIKENETAKLLWEMPVQTDVTITHNRPDLIYIDKIHNQTYLIDS

SEQ ID NO: 15548 - protein, 1321 aa, Spathilepia clonius
MTNGALVTFVNMERQFRNRTLGPLPGGDRRGTSGADAGRDSMQTVSDSLLNRRARVGGPEYITADQRGGEGTGDALQSRASPTGSVGSSVWTTNNTTNEDRRRKWSTEELQELMFCYFKARSNGTGYLEKLYKLFTERNPSNPKIHKYNRNTLSNQARRIIKQNVLSQELLDRIQKHAESAIDTMESTEQIVAEEEERDTRYITVTHDTHHTEYSVEQLQTIDQHTRNIEVSEDQDPIILNFLQILSEVKETAIENRELLPKAKINKRFLENLCKLNKFLPNILAVCNSLREINNIVYAAAKTLIINNNQLPYTPTNTFKTKNVPPWKKRIQTKIEKFRKELGQLIELGRGINTRRMEKIKDKLYRQYNIQNENEHKNIEEILKQKIKALAGRIKRYEYINNRKEQNSLFNENEHKLYRSLGGNGFKDIKLPEKEIVEEFWASILSKPVQYNSKAKWIKEVEVSSSEVNTVDIEEISEERIKNAIRKLLNWKTPGLDKIQNYYLKYFTSIHSYLGSLFTKIVTGKETLEEWFTTGQVILIPKNEQTDDPKNWRPIACLPTMYKLLSSVLANILYDHCHLNNIIAIEQRGCRRGARGCKDHLMVNKAILEDAHQSQKNLSMAWIDYQKAFDSIPHEWLTKVLDVYKCPSIIKKFLELVMPSWRVIMSARGTQNSLTTGPISIKRGIFQGDSLSPLLFCLAINPLSFVLSKYEIKGYTLKDNIRINHLLYMDDLKLYANNRHNLKVLLDSVEIFTSDIGMRFGLDKCNTVHISSGHRSKVEGEGHILLDGEIIKQLAIGDTYKYLGIHESGKIEHNVIRDQVTKEYFKRIKKLLNSHLNSRNLIKGINTYAIPVLLYSFGVINYKNSDLMKIDTKTRKLLAIKMAHRQKADVERLYLPVTQGGRGLSNVEYMYKTQIIKYKQYLNTENDNLIKTISEHDIRKDKYSIIKDAQEIENQLHLKRGNIHTDKDIREAIVKRYKNVWRNKQLHGQFIKKVLDQTNIDTELSFKWIRKQQISPALESSVFAIQDQCILTRQYRRDILKETVDGKCRLCACRDETTQHIVSGCEKLAGNYYVKRHNNLVMYVYWCLAKKHNIEVSSLWWKESLQQPHVIENETAKILWEMPVQTDTTITHNRPDLIYVDKSNNQTYLIDVTVPSDYNIGPKEIEKLSKYHLLKNEVSRLWKTQTTVIPIVIGATGVVAKNIKKYIEKLGTFIDITILQKQASIHSSNMLSKVLGDTVFVTNTHNNDTQDTIQPTHTVQTSTMQSTISTPTSNVQQTSLTQQAPSSEQVSNAPDSMNTSHTEEQRKNQQRNRRGRRRIRT

SEQ ID NO: 15549 - protein, 1339 aa, Pellicia arina
MPREGRTLETLRVRYAPMAKGALVTFVNMERQFRNRTLGPLPGGDRRGTSGADAGRDSMQTVSDSLLNRRARVGGPENTTADPRGGEGTDDALQSRASPTYSVGSSVSTTNNAVSDDRRRKWSTEELQELMFCYFKARSEGAGYIDRLHKLFIERNPNNPKIHKFNGNTLSNQARRIIKQNVISQELLDNIQKRAEGITDIAESSEQDVVEEGEATPSSNTNITGNVQHIEYTVEEIQTIDQLAQDIIVSENQDPLILNFLQILSEVKEIRIEERQLLPKAKINKHFLQNMYKLNKFLPNIVATNKSIREINNIIYAAAKTLIINNNQLSYLPKNTYKVKSDSPWKKRIQFKIEKFRKELGQLIELGRGIQTRRMTKIKDKLYRRYNIQNQNEHKNIEETLKQKIKALAGRIKRYEDINSKKEQNNLFSENEHKLYRSLGDNSLRDIKLPDKEIVEEYWSSVLSNPTQYNSNANWIKEVESTSSECSTRDIEEITEEHIKHATRKLLNWKTPGIDKIHNYYLKYFTSVHSYLASIFSKIVSHEESLEEWFTTGQVILIPKNPQTEDPKNWRPIACLPTMYKLLTSVLSNILYDHCYQNNIIAIEQRGCRRGARGCKDHLMVNKAILEDAHQSQKNLSMAWIDYQKAFDSVPHEWLTKVLDVYKCPIIIKKFLEIAMPMWRVTMTARSTENSITTEPIYVRRGIFQGDSLSPLLFCLAINPLSFILNKYEMKGYKLKDSIWINHLLYMDDLKLYANNRNNLKVLIDSVEIFTRDIGMRFGLDKCNTIHISSGHRSQVTGEGHILLEGNVIKQLAIEDTYKYLGIHESGKIDHSVVRDQIVKEYFKRIKKLINTHLNSRNLIKGINTYAIPVLLYSFGVINYKNSDLKKIDTKTRKLLAIKKAHQQKAEVQRLYLPVTEGGRGLLNIEYIYKTQIVKYKQYLNAEGDDLIKTIVQHDKRRNKYSIINEAQQIEDELKLTRGNKHTDKDIKEAIVKRCKDTWRNKQLHGQFIKKVLDQANVDTELSFKWIKKQKISPTIESSIFAIQDQCIMTRQHKRDILKEPIDGKCRLCNCKDETTQHIISGCEKLAGNYYVKRHNNLVQYVYWCLAKKHKLEDSNLWWKEPLIQPQVKENETAKILWEIPVQTDVSITHNRPDLIYINKTTNQTYLIDVTVPSDYNIGPKEIEKLSKYHLLKNEVSRLWKTQTTIIPIVVGATGIVGKSITKYIEKLNTFIDITILQKQAAIHSSTIISKVLGDTVFVNNTHSTDTQNTQQPLHTMQALNAQNTPEQLISTNSTLNSINTTPNLQQHTPAYTQEQGNIQQRNSRRRRKRTCKSTTQIT

SEQ ID NO: 15550 - protein, 1081 aa, Muschampia proto
MEMERNDSNNWPLPGGDRRGTSGADAGRLSMRTVSGSLLNRRAGAGGTQNVTADQRGGEGADEVLQSRASPTDSVGSSASTTNNTNDDRRRKWSTEELEELMFCYFKARTGGPGYICRLFKLFKERNPNNPKIHHFNGNTLSNQARRIVKQNVLSQEQLDRIQMQAEGRVPRVDRSENITSHSQEHNTPEIIQQTPSQNIAIETSNQHESNIEVNEDQDPLILDFLQNLAETIEISLEDRLFLPKAKINKQFIENLNKLNKYLPNLLVTNTSLREINNIIYATAKTLIVNNKQMPFQPKHTLKGKRDPPWKKRIENKIEMFRKELGQLIEIKRGVNSRRMINIKNKLYTKYNVQNANDHDNITETITQKIKALAGRIKRYTEIIIRREQNKLFQENEHKLYRSLGKSSKKHINIPAKEKVEDFWKAILSKSSQYNPEAKWIKEVETYSDDINTEETEEISEEHIKYAIRKLLNWKSPGIDKIQNYYLKYLTSIHKYIALLYTNIVTGRQELEGWFTTGQVILIPKNENTEEPKNWRPIACLPSMYKLLTSVLANLLYKHCDQNNLMAVEQRGCRRGARGCKDHLMVNKCILEDAHQSQKNLSMAWIDYQKAFDSVSHDWLLKILDIYKCPHIIKRFLQITMPSWRVIMTARGSQNSITTDPINIKCGIFQGDSLSPLLFCLAINPLSFILNKYEMKGYKLKDSFWINHLLYMDDLKIYANNKTNLKVLLDSVEIFTNDIGMRFGLDKCNIINIRAGCRNSATGEGHALLSGENLRELAVGDTYKYLGIHESGKIDHKIIRDQFSKEYFKRVKLLLKTNLNSRYLIKGINTYAVPILLYSFGIINYKNSDIKNIDIKTRKLLAMNKVHQQKAEVERLYLPITQGGRGLINIEYMYKAQIIKYKQYLKEESDHLIKTIVQHDTHRNKYSIVKEAQEIAEELNLPRGNIHTDKEIREAIVKNYNKIWRSKQLHGQFPKKVLDLTNVDKELSFNWIKKQRISPSIESSIFAIQDSAIMTRQHQRDILKQAVDGKCRLCADKDETTQHIISGCDKLAGTYYVKRHNNLVQYVYWCLAKKHNIKVDD

SEQ ID NO: 15551 - protein, 857 aa, Lymantria dispar
MPKNTIKPKTDPPWKKRIANKIEKLRKELGQLIEVKRGITTRRMINIKNKLYEKYNIKNENDHNNTAETIKQKIKALAARIKRYEEMSGRKEHNQLFAENEHKLYRSLGNNNNTDIKLPTKEGIEEFWTSILSKPTKYNTQANWIKEVEESTNTIDTTNIEEITIEQVKTAVRKLLNWKTPGIDKIQNYYLKYLTSTHKYLSLLFTKIITGQETLEEWFPTGQVILIPKNSNTEEPKNWRPIACLPSIYKLLTSVLADILYSHCDSNNNIMAIEKRGCRRGARGCKDHLMVNKAILEDAHQAQKNLSMAWIDYQKAFDTVSHEWLLKVLDIYKCPPVIKSFLKWSMPAWKVIMTARGSHESITTEPIYIKRGIFQGDSLSPLLFCLAINPISFILNKYELKGYKLKDSFWINHLVYMDDLKIYANNKSNLKVLLDSVEIFTSDIGMRFGLDKCNVIHIRAGHRSTVTGEGHILLSQEKFKELEVGNSYKYLGIHESGKIEHSKIREQITKEYIKRVKKLIQTHLNARNIIKGINTYAIPVLLYSFGIINYKITDLKKIDTKTKKLLAIKKAHQQKAEVERLYLPIAQGGRGLINIEYMYKTQIVKYKQYLKTEFDDMIKAIVQHDINRGKYSIIKEAREIEQELHLPQDNLHTDTEIKQAIVKTQNTSWRAKQLHGQFPKKVLDQANINTELSFKWINKQHISPGIVSAVFAIQDQAVMTLQHQRDILRTAVDGKCRLCRVKDETAQHIISGCEKLAGTYYVKRHNNLVQYVYWCLAKKHKIEVSPLWWKETMIQPQVKENDTTKIMWETPVQTDITVTHNRPDLIYIDKINNKTFLIDISVPSDYNIGVKRDRKIK

SEQ ID NO: 15552 - protein, 1077 aa, Junonia neildi
MMMESQFNEIRIGSLPGGERRGTSGADAGRLSMQTVSDSLLNRRAGVGEPENSTADQRNGEGADDALQNRVTLTNSAGSSASTTDKMSDDKRRKWSNEELIELMFCFFKARSEGPGYIGRLQQLFTERNPDNPKIKKFNGNTLSNQARRVLKQNVLSQELLNRLQKQAEGVMPINTSEPILNYNQIQNNIPSNTEHICYTPERVQEINQMTQILVNEDQDPLILEFLQVLAEVKETPIEERLVLPKANINKQFIHNLNTLNTFLPKLLLTNNTLREINNIIYAAAKTLIVNNNQIPYTPKTTIKTKQDPPWKVRLQIKTEKLRRELGQLIEIQRGVRTRKMIKIKENLYTKYNIQNENEHNNTVEIIKQKIKALAGRIKRYVDMNTRAEQNKLFKLNEHKLYSNLNININKDIKVPNKQKIEEYWNSILSNPVEYNNEAKWIKEIEASLNEVETSEIESITEEQVKKAVKKLLNWKSAGIDKIQNYYLKYFTSAHKYLASLFTNIVSGAEVLDEWFTTGQVILIPKNENTDDPKNWRPIACLPTMYKLLTSVLANIMYDHCQQNNIIALEQRGCRRGARGCKDHLMVNKSILEDAHQSQKNLSMAWIDYQKAFDSVSHEWLLKLLDIYKCPALIKNFLLLTMPFWRVIMTARGSQESITTDPIHIRRGIFQGDSLSPLLFCLAINPLSFILNKYEIKGYKLKDSFWINHLLYMDDLKLYANNKSNLKILLDSVEIFTDDIGMKFGLEKCNVIHITAGHRSNATGEGHVLLSGDTFKQLAIGQQYKYLGIQESGKINHSDIRDQITKEYFKRIRKLLNTYLNSRFLIKGINTYATPVLLYSFGVINYKINDLKKIDVKTRKMLAMKKAHQQKAEVERLYLPVDEGGRGLINIEYLYKSQIVKYSQYLNNKNDHLIEAIVQHDKNRDKYSILKEAEQIKIELKLTHKDNPTKHEIKEAITKIQNTTWRNKELHGQFPKKVLDQANIDRQLSFRWIKKQQVSPSIESSIFAIQDQTIMTRQHQRDILKEPVDGRCRLCATKDETTQHIISGCEKLAGTYYVKRHNNLVQYVYWCLAKKHK

SEQ ID NO: 15553 - protein, 1173 aa, Emesis brimo
MKSQINRTRKGPLPGGERRGTSGAGAGRDSMQTVSGSQLNRRARAGGPENITADQRGGGVTEDALQSEATPFECSAGSSVVTTDNNVSDDRRRKWSTEEMEELMFCYFKAQFHGPGYIVRLERLFSERNSSNPKIHKFNGNTLSNQARRIIKQNIISQEVLNRIKNRAETEVDSTQNSVQTEEQITSNTQQDIQITHENTHTYTSQSLHQSSQQEYTTTQVENINQLTQNINVNENEDPLILDFLRILAETKATPVSERYLLPKAKINKQFLQNLHKLDQYLPNLLVINHSLREINDIIYATAKTLILNNKQTPFLPKSVTKLKSTPKWKVRIATKLEKCRKEVAQLIEISRGISSRRMLKIKDKLYLKYKIESDNDVRYHIEILTQRIKALAARIKRYDDINNRKDQNRLFSENEHRFYRSLGNSNDNNMNHIQLPSKENIEQFWKAVLSSPKQYNKEAKWIEEVEDTTEEIIINDDDDITVEQVKTAISRLRNWKTPGIDKIHNYYLKYLTSTHEYLASLFTNIVKGNELFEEWFSTGQVILIPKNEHTQDPKNWRPIACLPSTYKLLTSVLANKLYRHCHDNNIMAVEQRGCRRGARGCKDHLMVNKAILEDAHISQKHLSMAWVDYQKAFDSISHEWLLKILDIYKCPPMIKKFLQNIMPQWRVIMTARGSQDTVTTEPIYIRRGIFQGDSLSPLLFCLALNPLSQILNKYEMKGYKLRDSVYINHLLYMDDLKLYANHKNNLKVLIDSVEIFTNDIGMSFGLDKCNTIHLKSGFRSSAIGEGHVLLSGETFSQLALGNTYKYLGVHESGKIEHSVVREQITKKYFKRVKMLLNTHLHSRNLIKGINTYAIPVLLYSFGIVNYKTNDLRKIDIKTRKLLNMKKAHQQKADIERLYLPIAQGGRGLINVENMYKTQIIKYKQYLQIQGDYLIHAVVQHDGNRLKYSITKDFEEIEREFSLPQGNTHINKEIKDAILAIQNNRWRNKQLHGQFPKSVLDQTIIDKELSFKWIKKQKISPSLESSIFAIQDQAVMTRQHQRDILKEQVDGKCRLCHTKDETTQHIISGCEKLAGTYYVKRHNDLVKYVYWCLARKHNIQVSDLWWQEPLIQPQVKENDTAKILWEIPIQTDVTVTHNRPDLIYVDKSSNKTYLIDITVPSDYNIGAKEIEKL

SEQ ID NO: 15554 - protein, 1340 aa, Emesis russula
MERQRNSLRIGPLPGGDRRGTSGADAGRDSMQTVSGSSLSRRARAGGPENITADHRGGGMTGDALQSEALSYESSAGSSVATTNNNVSDDRRRKWSNEEMEELMFCYFKAQFQGPGYITRLERIFTDRNLSNPKIHKFNGNTLSNQARRILKQNIISQEVLNRIRRKAESTELESTENDTPIEEQIAINTQHDLQITQGNRIQNNVNTIQNNRQDSQQEYTTTHAENINQLTQNINVDENQDSLILEFLQTLAETKEQSIADRYLLPKAKINKQFLQNLHKLNQYLPNLLVINHSLREINDIIYATAKTLILNNKQTPFLPKPVTKPKSDPRWKVRIATKLGKCRKEVAQFIEINRGISSRRMQRIKDKLYFKYKIEDDNGLRNQIEILTQRIKALAARIKRYDDINNRKEQNRLFSENEHRFYRSLGSSNNNNINHIRLPSKENIEHFWKSILSSPVQYNKEAKWIKEIENLTDEINENSTEDMITTEEVEISINRLHNWKTPGIDKIHNYYLKYLTSTHKYLAILFNNLVRGSEPIEEWFTTGQVILVPKNENTEDPKNWRPIACLPSTYKLLTSVLANRLYRHCHDNDIMAVEQRGCRRGARGCKDHLMVNKAILEDAHISQKNLSMAWVDYQKAFDSISHEWLLKILDVYKCPPIIKKCLQIVMPQWRVIMTARGSQNTVTTDPIFITRGIFQGDSLSPLLFCLAINPLSFILNKYELKGYKLKDSEYINHLLYMDDLKIYANHNNNLKVLLDSVEIFTNDIGMSFGLDKCNIIHLKSGYRSSTIGEGHVLLSGETFSQLAIGNTYKYLGVHESGKIEHSVVREQITKKYFKRIKMLLNTHLNSRNIIKGVNTYAIPVLLYSFGIINYKISDLRKIDTKTRKLLNIKKAHQQKADVERLYLPITQGGRGLINVENMYKTQIIKYKQYLQIQGDHLIQAIVQHDENRNKYSIMKDFREIERELGLPRGNTHINKEIKDAIVKIQNVRWRNKQLHGQFAKTVLDQANIDKELSFKWIKKQKISPSLESSIFAIQDQAVMTRQHQRDILKDPVDGKCRLCATKDETTQHLISGCEKLAGTYYVKRHNELVKYVYWCLARKHKIEVSDLWWQETLIQPQVKENDSAKILWEIPIQTDVTVAHNRPDLIYVDKVNNKTYLIDITVPSDYNIGAKEIEKLSKYHLLRTEISRLWSTQTTVIPIVVGATGVVAKSISKYIEKLETPIDISILQKQAAIHTSVILSKVLGDNVFVHNTHTHDLQQTQIAPQSLDTQATHRTDDILITQQSDNTQITHQSLETQDVPADIQITHQSLDAQDAPADSNKTQESSYTRRTRRRRIIL

SEQ ID NO: 15555 - protein, 1118 aa, Pyrrhopyge hadassa
MQTVSDSLLNRRARVGRPENTTADQRGGEGTDDALQSRATPTDSVGSSVSTTNNAISDDRRRKWSTEELQELMFCYFKARLDGVGYIDRLHTIFTERNPGNPKIHKFNGNTLSNQARRIIKQNVISQELLDRIQKRAEGRIDTVESLDENVVEEEATAPRNIITPSTHHIDYSIEQIESIDQLTQNIEVNEDQDPLILNFLQILSETKETVIEERLLLPKAKINKRFLENLCKLNKFLPNILATNHSLRDINNIIYAAAKTLIINNNQKPYTPKNTFKNKFDPPWKKRIQTKIEKFRKELGQLIELGRGNITRRMTKIKDKLYRQYNIQNENEHRNTEETLKQKIKALAGRIKRYEDINSRKKQNSLFNENEHKLYRSLGSNSFKDIKLPDKEIVKEFWSSILSNPIHYNSKAKWIKEIEMTSSDINTIDIKEISEEHIKYAIKKLLNWKTPGIDKIQNYYLKYFTSVHSYLGSTFTKIVSDKESLEEWFTTGQVILIPKNEQTEDPKNWRPIACLPTMYKLLSSVLSNILYEHCHQNNIIAIEQRGCRRGARGCKDHLMVNKAILEDAHQSQKNLSMAWIDYQKAFDSVPHEWLVKVLDVYKCPPIIKRFLEIAMPSWKVVMTARGANNSLTTEPIYVRRGIFQGDSLSPLLFCLAINPLSFILNKYEMKGYKLKDSLWINHLLYMDDLKIYANNSHNLKVLLDSVEIFTRDIGMRFGLDKCNTIDINSGRRNKVTGEGHILLEGDIIEQLAIGDRYKYLGIHESGKIEHSVVRDHIIKEYFKRIKKLINTHLNSRNLIKGINTYAIPVLMYSFGIINYKNSDLKKIDTKTRKLLAIKKAHQQKAEVERLYLPVTQGGRGLLNVEYMYKTQIVKCKQYLKAEGDELIKAIVTHDTHRDKYSIIKEAQEIENQLHLARKDKHTDKDIREAIVKKCKDIWRNKQLHGQFIRNVLDQTNIDTELSFKWIKKQQISPTIESSIFAIQDQAIMTRQHRRDILKEPIDGKCRLCACKDETTQHIISGCEKLAGNYYIKRHNNLVQYVYWCLAKKHKIEVSNFWWKETLIQPQVKENENVKILWEMPVQTDVTITHNIPDLIYMSEHSPGSLFSRRISYVNYLL

SEQ ID NO: 15556 - protein, 1325 aa, Pyrrhopyge crida
MPREGRTLETLRVRYTPMTNGALVTFVNMERQFRKRTPGPLPRGDRRGTFGADAGRDSMQTVSGSLLNRRARVGRPENTTADQRGGKGTDDALQSRATPTDSVGSSVSTTNNAISDDRRRKWSTEELQELMFCYFKARLDGVGYIDRLHKIFTERNPSNPKVHKFNGNTLANQARRIIKQNVISQELLDRIQKHAEGRIDTVENLDQNVVEEEATAPPNIITPSTHHKNYSIEQIKSLDRLIQNIEVNEDQDPLILNFLQILSETKETVIEERLLLPKAKINKRFLENLCNLNKFLPNILATNNSLRDINNIIYAAAKTLIINNNQIPYTPKNTFKNNCDPPWKKRIRTKIEKFRKELGQLIELGRGNITRRMTKIKDKLYRQYNIRNENEHRNIEETLKQKIMALAGRIKRYEDINSRKKQNSLFNENEHKLYRSLGSNSFKDIKLPDKEIVKEFWSSILSNPIHYNSKAKWIKEIEMTSSEINTINIKEISEDHIKYAIKKLLNWKTPGIDKIQNYYLKYFTSVHRYLGSTFTKIVSDKETLEEWFTTGQVILIPKNEQTEDPKNWRPIACLPTMYKLLSSVLSNILYEHCLQNNIIAIEQRGCRRGARGCKDHLMVNKAILEDAHQSQKNLSMAWIDYQKAFDSVPHEWLVKVLDVYKCPPIIKRFLEIVMPSWKVVMTARGANNSLTTEPIYVRRGIFQGDSLSPLLFCLAINPLSFILNKYEMKGYKLKDNIWINHLLYMDDLKIYANNRHNLKVLLDSVEIFTRDIGMRFGLDKCNTIHINSGRRNKVTGEGHILLEGDIIEQLAIGDRYKYLGIHESGKIEHSVVRDHITKEYFKRIKKLINTHLNSRNLIKGINTYAIPVLMYSFGVINYKNSDLKKIDTKTRKLLAIKKVHQQKAEVERLYLPVTQGGRGLLNVEYMYTTQIIKYKQYLKAEGDELIKAIVTHDTHRDKYSIIKEAQEIENQLQLAREDKHTDNDIREAIVKKCKDIWRNKQLHGQFIRNVLDQTNIDTELSFKWIKKQQISPTIESSIFAIQDQAIVTRQHRRDILKEPIDGKCRLCACKDETTQHIISGCEKLAGNYYIKRHNNLVQYIYWCLAKKHKIEVSDFWWKETLIHPQVKENENAKILWEMPVQTDVTIIHNRPDLIYIDKTNNRTYLIDVTVPSDYNIGPKEIEKLSKYHLLKNEVSRLWKTQAIIIPIVIGATGIVGKNVKKYIEKLDTFIDITILQKQAAINSTTILSKVLGDTVFVNNTQNAQNTEQPIHSVQASNIQNIPEQLLTNTTDSTVQHLTNTGAPYCPRERGSMQQRIVRRRGRTVK

SEQ ID NO: 15557 - protein, 1195 aa, Pyrrhopyge creona
MFCYFKARLDGVGYIDRLHTIFTERNPGNPKIHKFNGNTLANQARRIIKQNVISQELLDRIQKRAEGRIDTVENFDQNVVEKEATAPRNIITPSTHHIDYSIEQIESIDRLTQNIEVNEDQDPLILNFLQILSETKETVIEERLLLPKAKINKRFLENLCKLNKFLPNILATNHSLRDINNIIYAAAKTLIINNNQIPYTPKNTFRNKFDPPWKKRIQTKIEKFRKELGQLIELGRGNITRRMTKIKDKLYRQYNIQNENEHRNTEETLKQKIMALAGRIKRYEDINSRKKQNSLFNENEHKLYRSLGSNSFKDIKLPDKEIVKEFWSSILSNPIHYNSKAKWIKEIEMTSSEINTIDIKEISEEHIKYAIKKLLNWKTPGIDKIQNYYLKYFTSVHSYLGSIFTKMVSDKESLEEWFTTGQVILIPKNEQTEDPKNWRPIACLPTMYKLLSSVLSNILYEHCHQNNIIAIEQRGCRRGARGCKDHLMVNKAILEDAHQSQKNLSMAWIDYQKAFDSVPHEWLVKVLDVYKCPPIIKRFLEIAMPSWKVVMTARGANNSLTTEPIYVRRGIFQGDSLSPLLFCLAINPLSFILNKYEMKGYKLKDSLWINHLLYMDDLKIYANNSHNLKVLLDSVEIFTRDIGMRFGLDKCNTIDLNSGRRNKVTGEGHILLEGDIIEQLAIGDRYKYLGIHESGKIEHSVVRDHITKEYFKRIKKLINTHLNSRNLIKGINTYAIPVLMYSFGVINYKNSDLKKIDTKTRKLLAIKKAHQQKAEVERLYLPVTQGGRGLLNVEYMYKTQIVKYKQYLKAEGDELIKAIVTHDTHRDKYSIIKEAQEIENQLHLARKDKHTDKDIREAIVKKCKDIWRNKQLHGQFIRNVLDQTNIDTELSFKWIKKQQISPTIESSIFAIQDQAIVTRQHRRDILKEPIDGKCRLCACKDETTQHIISGCEKLAGNYYIKRHNNLVQYVYWCLAKKHKIEVSNFWWKETLIQPQVKENENVKILWEMPVQTDVTIKHNRPDLIYIDKTNNRTYLIDVTVPSDYNIGPKEIEKLSKYHLLKNEVSRLWKTQAIIIPIVIGATGIVGKNVKKYIGKLDTFIDITILQKQAAINSSIILSKVLGDTVFVNNTQNTQNTEQPIHSEQASHIQNIPEQLLTNTTDSTIQHLTNTGAPHCSREREGMQQRIVRRRGRIVK

SEQ ID NO: 15558 - protein, 1213 aa, Eracon sarahburnsae
MFCYFKARSDGAGYIDRLYRLFAERNPNNPKIHKFNGNTLSNQARRIIKQNVISQELLDRIQKHAEGTIDVIERSEQNIAAEEVQVTTHLHTTLTQNTQYMEYTTEQIEIIDQRTQNIEVNEDQDPLILSFLQILSETKEITIEERQLLPKAKINKHFIDNLNKLNKFLPNVLIVNNSLREINNIIYAAAKTLITNNNQLPYTPTYTSKIKSDPPWKRRIRNKIEIFRKELGQLIELDRGISTRRMLKIKDKLYRKYNIQNENEHKNIEEVLKQKIKALAGRIKRYEDINSKKEQNSLFNENEHKLYRSLGCNSLKEIKLPEKESVEKFWSSILSNPVQYNNRAKWIKEVEVSSSEIITTNIEEISEEHIKNATTRLLNWKTPGIDKIQNYYLKYLTSVHIYLGSLFTKIVTHKETLEEWFTTGQVILIPKNEHTEDPKNWRPIACLPTMYKLLTSVLANILYNHCHQNNIIAIEQRGCRRSSRGCKDHLMVNKAILEDAHQAQKNLSMAWIDYQKAFDSVSHAWLTKVLDVYRCPPMIKRFLDLVMPSWKVIMTARGTQNTLTTEPIHVKRGIFQGDSLSPLLFCLAINPLSFILNKYEMKGYKLKDSIWINHLLYMDDLKLYANNRHNLTVLLNSIEIFTNDVGMRFGLDKCNIIHINSGCRNHVTGEGHILLDGEILKQLAIGDRYKYLGIHESGKIEHTVIRDQIAKEYFKRIKKLLNTHLNSRNLIKGINTYAIPVLLYSFGVINYKNSDLKKIDTKTRKLLAIKKAHQQKAEVERLYLPATQGGRGLLNVEYMYKTQIIKYKQYLKAESDDLIKAIVQHDKHRDKYSIINEAHEIENQLHIAHGSIHTDKEIKEAVVKTCKDKWRNKPLHGQFIKKVLDQTNIDTELSFKWIKKQQISPTTESTIFAIQDQAIMTRQHQRDILKEPVDGKCRLCRCKDETTQHIISGCEKLAGNFYVKRHNNLVQYVYWCLAKKHKMEVSNLWWKETLIQPQVKENETAKILWEMSVQTDVTVTHNRPDLIYIDKTNNKTYLIDVTVPSDYNIGPKEIEKLSKYHLLKNEVSRLWKTQTTVIPIVIGATGVVAKSIKKYIEKLGAYIDIGILQKQAAIHSSTILSKVLGDTVFVSNAQTHDTQNTEHAAHAIPSTIIQPTSHTHTQQASTSEQLLTSTLDPTNTTQTQIRKTTTRTQRETNTQRKNRTGRKTRSFQK

SEQ ID NO: 15559 - protein, 1097 aa, Euproctis similis
MESENNVSSIGPLPGGDRRGTSGAGAGRSSHTNRQRLSAEQAGESRGTRSYYSRTTGREGADDALQGRASPAHSVGSSASTTNYANDDRRRKWSTEEMEELMFCYYKARSAGPGYIRTLFTLFKDRNPNNPKVNRFDGNKLSNQARRIIKQNVISQELLNRIQQIAEGTLPSLNENIPNEVQEPNIDYIVETDTPQFDTHQEQYTPDADLINELTSNIQVHEDQDPLILNFLQTLAETEETPVTNRLFLLKAKINKQFLRNLKTINDFLPNILVTNNNLLDINNIIYATAKTLILNNKQTLFKPKNTINPKSNPPWKKRIQIKIEKFRKELGQLIEIKRGIGTRRMIKIKEKLYAKYNICSENDHDNTSETLKQKIKALAARIKRYEDMNNRKNQNKLFSENEHKLYRSLGNNIDREIKLPTKERLEEFWMSVLSNSTQYNTDAKWIKELESSVNTVETIDTVEITLEHIKTAAKKLLNWKTPGIDQIQNYYLKYLTSIHTHLAKLFTNLVLGNENLEEWFTTGQVILIPKNNNNEDPKNWRPIACLYSIYKLLTSVLADVLYKHCQENHIIAIEQRGCRRGARGCKDHLMFNKAILEDAHQSQKKLSMAWIDYQKAFDTVSHQWLLRVLDIYKCPHMIKRFLQLSMPSWRVDMTARGSQEIVTTEPIYIRRGIFQGDSLSPLLFCLAVNPVSFILSKYELKGYKLKDSFWINHLLYMDDLKIYANNKNNLKVLLYSVETFTNDIGMSFGLDKCNVAHISAGHRNTATGEGHILLSGETFKQLAIGDRYKYLGIHESGKIEHAIIRDQITKEYFKRVRKLLQTHLSARNIIKGINTYAIPVLLYSFGIINYKINDIKKIDTKTRKLLAIKKAHQQKAEVGRLYIPVSDGGRGLINVEYIYKSQIVKYKQYLDTEFDDLIRAIVRHDIHRSKYSILKDAKEIEREIQLPHNRQYTDTDIKNAIVKIQNSSWRLKQLHGQFPTKVLDQANIDTELSFKWLKKQHVSPGIESAVFAIQDQAVMTRQHQRDILKLPVDGKCRICQIKDETAQHIISGCEKLAGNYYVKRHNNLVQYVYWCLARKHSIEVSPLWWKENMIQP

SEQ ID NO: 15560 - protein, 1311 aa, Hoplolaimus columbus
MPRALRKTVQPQGETDRPGPSTSDHPSSSARAVRDGSGRMAREQQQSNDDDEEVQVVSPVGGRNGQRRRQVGQLRTGQTLNRRQMARRGRADLSSSSVYDESSSASEQSEQSARGELQPSDPYAYVIDVPIRTNDEGRIECRECRPPKSFPDVGGLQRHLKNVHRPKGHWHTAFRCDRCGQLFSGPRGLWSANDHQKRNKCPAQAFNNTEQRRRQIRPEVPERVPPPSALPTGPTQTRRPVGVATVAEGGARCRRRVPTAHTDMVLPAGQQRVQTPPPCSPSAQEQRQEMPSSSSSSSSDDSYATARTAVPAATPAAQPHPQQQHRMPVTTPPRHQQQGVRHVASSEQQQWMDRLNGTTSPFDLDTLLAELICSVREKARIAFNDQQRHRPQRRRVAVNTHGRRPNPMNADPAPAYDAVEAARIQKLYRRSRVRAYREIVDADSPLCQIDPDELQDHFMRVFGPSPEVAEQMPNEVPEQQPPRDDDPLTPSFTVEEVWTRLSRCNNTAPGPDGIRYAVWKKFDPGAHVLTAVFNVVQRLQYVPADWKRSTTVLIHKKGSKAEVSNWRPIALSNTIGKLYSAVVAHRIGKWARANRRISAAQKGFMPVDGCSEHNFLLQSAIQDCRRNNRTCSLAFLDLTNAFGSIPHAAMFRSLRWTGLNNNSIGQVERLYDGCTTQIRHAAGATADVPIRAGVKQGCPLSPVVFNLSIEPLLRAVNNSGLGYELHGRRICVLAYADDLVLIGKDARELQQLLDLVACVADWAHLKFNHRKCATLDIDGQNNMAWPTSFNIQQSQLPALAIDDFYEHLGVPTGYQRTNAAGSIIDQMTDHLAKIDASKLAQWQKFDAVRTFVLPSIAFHLRNANIEIGRLKQLDNKIRSCSKRWLNLPQRASFETIYLDHSSGGAGLVELRPWAYLSQLVHAFRLLRSTDLGTLCTELLKSVVRKRIRTDPGPQQLADYLNSVADGTASTDISSLWTRLRVATKNLRPWVKVVWQHQEGQLHLCLDGDEQLQPNNIEYQLRSALRRYYFRRLSAKPDQGKAFKLTSLHAASNHFIANGSFTRFADWRFIHRARLDCVPLNGCRRWDRNPARDKRCRRCGHPTFAETLPHVLCNCHAHLTTITRRHNDIQNRLVNAIRPTATAEVRVNQTVPDYPTNQRPDIVVRDNDGRTMTIVDVTMPFENGAAAFRAAREERQRRYGAIGAHFRQLGFDVFVDALVVGPLGTWDPENERVLDRLRIGQRYRQLMRKLMVSDAIRWSRDIYVEHVTGVRQYNDWAELDEPLERRGQERAVGDALDGTLNALDRTLTDGDD

SEQ ID NO: 15561 - protein, 926 aa, Bradysia odoriphaga
MYRGVRGLKIHHCKMHKDIEFSYFEGDGIVDNVSIESIKNRIGHLNKYVKVVKRIPKGARFAAANELSKRIDLCVSENNVNSWEKLILFGFGALQVPKRKSKSQSLTRLVKINIKNLNVQSIDSSNGTIKQKNLPLHKRVEAKISDGDIRGATKLLMSSDTLADQDENTCALLKEKHPSPSQDLNLPEPPDATFIPLITTEEDVRKSINSFYNGSSGGSDGISPQHLKDLIAVSNGDSGTRLLKSITSLSNLMLRGKVQDSICEIIYGARLCALQKKEGGIRPIAIGSVFRRITAKIACGSVREEIGSYLRPKQVGCNTRGGCEAAVHACRSYVRRNRGSRKIILKIDFRNAFNCVERDTLLRTIREKAPSIFPFMWQCYSTTSCLFFGYDQISSQVGAQQGDPCGPMAFALSIHPIIEMLTSELNVWYLDDGTLGGDPETVLHDFEILIEECRKIGLEINPAKCEIFYCGMEDEGITKKFDYLSPGIRVISDGLELLGAAITEEAEERIFIKMHDQMKILFERLKQLNHQMAFYLLKNCFGIPKLTYLLRTTAYFKHEHLLRSLDEDMKCAMEWICNSKFNDQKWSVVSLPIKSGGLGIRKVSEICLPSFISSVHSVINLVTSMYPQLSDETMISDYSRALEKWFTHSDEIPIHMSNQRSWDNLLISQKIDSLSFDSQLDKARFLASTVKESNSWLTALPSKSIGTLLDNNTFRISIALRVGTGICSRHKCVCGEFVSEDGTHGLSCLYSAGRIPRHSEFNNIIHRSLKTANFPSMREPPGMFRDDKKRVDGVTLIPWCNGQLLVWDATCSDTLAPSYLRLSSKKAGSVARKAADVKLNRYKKLSDQGYFILPFAVETLGPWCEEAIRFVDILGNLICERTGEVRSKTYLKQRIGIALQRSNAACVMGTFRESEFERLDEIFYLL

SEQ ID NO: 15562 - protein, 1062 aa, Bradysia coprophila
MMGDDSGGEGPSNIRNLKFLIDEAKSEFNKIHTDDDRWPCPFCIVLSKTKIKCRIHVKRDHPNIYNANEVQFSQLTQTFSESFNDQSETENFPEDLSEFLKLVSEERNNSDEANRKDSQREENLKKCVHCPPELSDKTYKGIRGLKIHHNKMHKDIEFSYFDNVNDVDNVTVESIERDLGYMNKHMKVIKRIPKGARVVASNEMNKLIQQVVQKNDLHSWRNLLFFAYSAFRVPERKTKSESLTRIVKFNIKNLNFNLDNVKIDSRKQKNLPLNKRIEAKISDGDIRGATKLLLSSDSLADQNEETLSILKDKHPEPSRVLDFPQPPDATIKSMVTSEEDVHRAIWSFYNGSSGGIDGIRPQHLKDLLSLSFGDCSDNLLKSITALTNLMLSGKVLLSICRIVYGARLCALTKKDGGLRPIAIGSTFRRITAKIACGDVKVEIGEYLRPKQIGFNTKGGCEAAIHACRSYVSRNRKSRKIILKVDFKNAFNCVERDVLLKTIKERAPSIYAFMWQCYSSTSCLFFGYEQIQSQVGAQQGDPCGPMAFSLCIQPIIEMLMSELNIWYLDDGTLGGESDVVLNDFKRLIADCKKIGLEINPSKCELFFYGKEDKSITDQFNAISPGIKILKNDLELLGAPITEEAMERIFIKIHDKMKLMFERLGQLNHHIAYFILKNCFAIPKLTYLLRTSAYFRYEHLLHNIDKDIQNTLQSICNSEFNDQKWTIISLPVRSGGLGIRKASEICLPTFLSSVSSVINLVTSMYSDLSDETMVSDYNCALEKWSSSFDRIPVIKTCQESWDNIVISENINSLTFNSETEKARFLASTVHESSAWITALPSKFIGTLLDNNTLRIAVALRIGAKICKRHKCRCGEIVSEDGSHGLSCLYSSGRLPRHADFNNIIHRSLQSANVPSMREPPGMFRDDRKRVDGVTLIPWRNGQSMVWDATCSDTLAPSYLRLSSKSPGRVANKAANIKLGKYKKLIEDNYIIIPFAIETLGPWCTEAIKFIDVLGKLLANVTNEKKSKLFLKQRISIALQRSNAACIMGTFDGDLKKLDEIYYIL

SEQ ID NO: 15563 - protein, 926 aa, Bradysia odoriphaga
MYRGVRGLKIHHCKMHKDIEFSYFEGDGIVDNVSIESIKNRIGHLNKYVKVVKRIPKGARFAAANELSKRIDLCVSENNVNSWEKLILFGFGALQVPKRKSKSQSLTRLVKINIKNLNVQSIDSSNGTIKQKNLPLHKRVEAKISDGDIRGATKLLMSSDTLADQDENTCALLKEKHPSPSRDLNLPEPPDATFIPLITTEEDVRKSINSFYNGSSGGSDGISPQHLKDLIAVSNGDSGTRLLKSITSLSNLMLRGKVQDSICEIIYGARLCALQKKEGGIRPIAIGSVFRRITAKIACGSVREEIGSYLRPKQVGCNTRGGCEAAVHACRSYVRRNRGSRKIILKIDFRNAFNCVERDTLLRTIREKAPSIFPFMWQCYSTTSCLFFGYDQISSQVGAQQGDPCGPMAFALSIHPIIEMLTSELNVWYLDDGTLGGDPETVLHDFEILIEECRKIGLEINPAKCEIFYCGMEDEGITKKFDYLSPGIRVISDGLELLGAAITEEAEERIFIKMHDQMKILFERLKQLNHHMAFYLLKNCFGIPKLTYLLRTTAYFKHEHLLRSLDEDMKCAMEWICNSKFNDQKWSVVSLPIKSGGLGIRKVSEICLPSFISSVHSVINLVTSMYPQLSDETMISDYSRALEKWFTHSDEIPIHMSNQRSWDNLLISQKIDSLSFDSQLDKARFLASTVKESNSWLTALPSKSIGTLLDNNTFRISIALRVGTGICSRHKCVCGEFVSEDGTHGLSCLYSAGRIPRHSEFNNIIHRSLKTANFPSMREPPGMFRDDKKRVDGVTLIPWCNGQLLVWDATCSDTLAPSYLRLSSKKAGSVARKAADVKLNRYKELSDQGYFILPFAVETLGPWCEEAIRFVDILGNLICERTGEGRSKTYLKQRIGIALQRSNAACVMGTFRENEFERLDEIFYIL

SEQ ID NO: 15564 - protein, 926 aa, Bradysia odoriphaga
MYRGVRGLKIHHCKMHKDIEFSYFEGDGIVDNVSIESIKNRIGHLNKYVKVVKRIPKGARFAAANELSKRIDLCVSENNVNSWEKLILFGFGALQVPKRKSKSQSLTRLVKINIKNLNVQSIDSSNGTIKQKNLPLHKRVEAKISDGDIRGATKLLMSSDTLADQDENTCALLKEKHPSPSRDLNLPEPPDATFIPLITTEEDVRKSINSFYNGSSGGSDGISPQHLKDLIAVSNGDSGTRLLKSITSLSNLMLRGKVQDSICEIIYGARLCALQKKEGGIRPIAIGSVFRRITAKIACGSVREEIGSYLRPKQVGCNTRGGCEAAVHACRSYVRRNRGSRKIILKIDFRNAFNCVERDTLLRTIREKAPSIFPFMWQCYSTTSCLFFGYDQISSQVGAQQGDPCGPMAFALSIHPIIEMLTSELNVWYLDDGTLGGDPETVLNDFEILIEECRKIGLEINPAKCEIFYCGMEDEGITKKFDYLSPGIRVISDGLELLGAAITEEAEERIFIKMHDQMKILFERLKQLNHHMAFYLLKNCFGIPKLTYLLRTTAYFKHEHLLRSLDEDMKCAMEWICNSKFNDQKWSVVSLPIKSGGLGIRKVSEICLPSFISSVHSVINLVTSMYPQLSDETMISDYSRALEKWFTHSDEIPIHMSNQRSWDNLLISQKIDSLSFGSQLDKARFLASTVKESNSWLTALPSKSIGTLLDNNTFRISIALRVGTGICSRHKCVCGEFVSEDGTHGLSCLYSAGRIPRHSEFNNIIHRSLKTANFPSMREPPGMFRDDKKRVDGVTLIPWCNGQLLVWDATCSDTLAPSYLRLSSKKAGSVARKAADVKLNRYKELSDQGYFILPFAVETLGPWCEEAIRFVDILGNLICERTGEGRSKTYLKQRIGIALQRSNAACVMGTFRENEFERLDEIFYIL

SEQ ID NO: 15565 - protein, 1044 aa, Bradysia odoriphaga
MMGVLATCTYRWPCPFCIVISQTKIKCRIHIKRDHPSIYNANEEEFSQLTQQEESNSFDISGPRDLQEFLRLTEEEEKSKKVSQDQNEDSQIQDDESNLKKCIHCPPKLSHKTYKGIRGLRIHHFKMHKDVEFTFFDNDQSNTVDISIDQIESKLGLLNTNTKIIKRIPKGARMSAAYELAKIVDECALKNDLNSWQNLLFFAYGAFQTPKRKSKSESLTRIVKRNIKNYDINQIKPNMEVKNRKNLPLNKRVEAKISDGDIRCATKLLLSSDSLASQDYETLTLLKEKHPAPSRNLNIPDRPDNTANHLQPSVDDVLKSISSFYNGSSGGIDGIRPQHLKDLISGTNGEPGVKLLKSITSLTNLMFSGKVLDSICRIIYGARLCALTKKDGGIRPIAIGSTFRRITAKIACNGVREDIGAYLRPKQIGVNTKGGCEAAVHVCRSFVRRNKKSRKIILKIDFKNAFNCVERDVLLRTIKEKAPSIYAFMWQCYSSSSALFFGNEQIPSEVGAQQGDPCGPMAFSLSIHRIIEMLTSELNIWYLDDGTLGGEYDVVLTDFKLLIQECQRMGLEINTTKCELFFCGDKDQMIIDQFNTISAGIKVVDNNDFELLGAPITEEAEEKVLVKMHSKLKIMFERIGTLNHHMAYFLLKNCFSIPKLTYLLRSTGYFKHRDLLNSIDEDIKTTLETICNSKFKCDKWELISLPARCGGLGVRKSTEISLPSFISSVHSVINLVTSIDPQLSDETMVADYTLAMEDWFTRFNSIPDIMSSQRSWDNIGISEKVANLSFNSDKDKARYLASATVESNFWLAALPSKHLGTLLDNNTFRISIALRFGLDICSRHKCVCGEMVFKDGLHGLSCSKSAGRIPCHSELNNIIHLSLKSSNIPAMREPPGMFRDDGKRVDGVTLIPWSKGQNLVWDATCSDTMAPSYIHLSCNGPGKVATKAAGVKLNKYKKLLEQNYIILPFAVETLGPWCAEAIQFIDTLGNLIQERTSENRSKMYLKQRIGMAIQRTNAARVMGTFGEDHKGLDEIFYILQNISE

SEQ ID NO: 15566 - protein, 1082 aa, Pissodes strobi
MIIIIIIIIIMIIIIIIIIIIIIMIIIIIIIVRRKKWSNEENKQILRSYFRVPALETDLTMYRSRLREDVILHIPELSNLTEQRIADQTRAIIRNNLLPQIIVDQIRVEINIELNRDGQLEQPEHLEMEIPAAAVEERTESEEGDPNELLNLVDINWNNTYQQHLTEYRGSDPCLRPIIPKLHYNKRSNWIIASGNAALKRDLTDELDMQELHLRIYCAALTCIVQNKQKIWSRGSTCKASNKPPPWERRLCERIDDLRKEIGRIQQIVNGNRTNKLYRRVPVELRRKITGASEQKLTSILTDHLDTQKQRLAAYSRRLRRYRESYQRKQQNKQFSRSERNFYRNLSAGTTPLTNSGIPERDQVENFWANIWENEAQHTENTPRINNEEHTYRHLKMGETNFTENDIKKVIQKLANWRAPGRDGIHNFWYKRFSATHKHLAVQFNKILREPDSLPHFLTNGITHLLPKSSNTRDPSQYRPITCLSTMYQILSAAICEKIYSYLDENNILTEEQKGCRKRARGCKEQVIINSVVLEQARKKNRNLYMAYIDYQKAFDSFPHSWLIRVLQIYGVDPKLQIFLRDSMNQWRTKLSIRTGDNVIETRSIQIKRGIFQGDSLSALWFCLALNPMSNALKQTGYGFNIKAPNQTHIISHLFYMDDFKVYAANKNHLDSVLRFVHRAGTEIGMTFGTSKCQTVAIERGKLVKTQPVKLDEATTIDAMSQDPYKYLGILQTNKIEHSQVKQILTMQFQKRLQSVLKTKLNASNIVKAVNSHAIPALGYSFGIIKWTDTDLQAVNRKIRTSLTKYRMHHPRSSVERVTLSRDEGGRGITDVVKACQQQILGLRKYFSSKHNALHSTVAKADKNYTPLNMFANQHVPLPSALTTEEKTAIWASRELHGRFWYDLKKESVDTTASLEWLKTGSLFPETEGFVIAIQDQVISTRNYQKYILKEDVPTDKCRKCNSTSETIEHVLSGCPSLAGSQYLDRHNKVATITYLEILRTLSIVPTNDRPYYQYQPDPVVENEQAKVYWDKGIVTDVTVMQNRPDITIIFKEEKIAILVDISIPNNNNLETKHAEKMAKYS

SEQ ID NO: 15567 - protein, 1156 aa, Pissodes strobi
MRDVGGRRLRRRASVNQEATAQQHTNNPEQDEAGEQQSQPARRVVQCVATVPTEATRTIVRRKKWSNEENKQILRSYFRVTALDTDLTMYRSRLREDVILHIPELSNLTEQRIADQRRAITRNNLLPQIIVDQIRVEINIELNRDGQLEQPEHLEMEIPAAAVEERTESEEGDPNELLNLVDIDWNNTYQQHLTEYRGSDPCLRPIIIATGNAALKRDLTDELDMQESHLRIYCAALTCIVQNKQKIWSRGSTCKASNKPPPWERRLCERIDDLRKEIGGIQQIVNGNRTNKLYRRVPVELRRKITGASEQKLTSILTDHLDTQKHRLAAYSKRLRRYRESYQRKQQNKQFSRSERNFYRNLSAGTTPLTNSGMPERDQVESFWANIWENEAQHTENTPWINNEEHTYRHLKMGETNFTENDIKKVIQKLAKWRAPGRDGIHNFWYKRFSATHKHLAVQFNKILREPDSLPHFLTNGITHLLPKSSNTRDPSQYRPITCLPTMYKILSAAICEKIYSYLDENNILTEEQKGCRKRARGCKEQVIIDSVVLEQARKKNRNLYMAYIDYQKAFDSVPHSWLIRVLQIYGVDPKLQIFLRDSMNQWRTKLSIRTGDNVIETRSIQIKRGIFQGDSLSALWFCLALNPMSNALKQTGYGFNIKAPNQTHIISHLFYMDDLKVYAANKNHLDSVLRFVHRASAEIGMTFGTSKCQTVAIERGKLMETQPVKLDEATTIDAMSQDPYKYLGILQTNKIELQFQKRLQSVLKTKLNASNIVKAVNSYAIPALGYSFGIIKWTDTDLQAVNRKIRTSLMKYRMHHPRSSMERVTLPRDEGGRGITDVVKACQQQILGLRKYFSSKHNALHSTVAKADQNYTPLNMSANQHVPLPSALTTEEKTAIWASRELHGRFWYDLKKESVDTMASLEWLKTGSLFPETEGFVIAIQDQVISIRNYQKYILKEDVPTDKCRKCNSKSETIEHVLSGYPSLAGSQYLDRHNKVATITYLEILKMLSIVPTNDRPYYQYQPDPVVENEQAKVYWDKGIVTDVTVMHNRPDITIIFKEEKIAILVDISIPNNNNLETKHAEKMAKYSQLKREIQAMWGLKTVKVVPVILSSMGLIPRNLKEQLCEIGIPANTYRAMQKSVVLDAAHIVRSFIES

SEQ ID NO: 15568 - protein, 1368 aa, Hoplolaimus galeatus
MANNGGIRRGPQRGRAEEMGINETVGAGYMVTRQRARAAQMRAHPPMPQHPPNGSPAPNLPEQPGPSTGRAPRRRARVVPGQARADRGGTVMQIPRTHGHLNTSVASDGENSPPVAQTGEHSGSSRGRNAPDRTPSPQPDLLVRDEDLPATPPARRGVVRSWTDNDKDCLLFERDRCLAACRCSWKAFREDHWLPLLREGSIDSDRNDKQLCTQFSNLNIRVLRVRPSQAAWRFRAPASNVRIGRDIPDNQREAGPPQQEVLPLQGAVPPEVVAVQGANSDAGNRPAGTRGTAAPCGAPSNEGFEEFRQEFINCLNRVCGERAMKRRSLRLNGSAISSTVWSWCDKLFTRYHISKEGTSSLKRVNDVIYSIGLALQSLVKSRRAAADAGRAQWYRDQMREISRLRKHVGWISDELARRVAGNAPTRRQKRNFQVIRHRYAENGKAIRTQSQLMRRCGSLKGQLQLAVMRVELRKSDERRKHLRFLPIRRVLAGGLVPSVLESVESVRNYWQEIIGRPKRFTKTANTLEWENSLQDLPAQDISASTLTEERKTWKGVLAKARPHKAPGPDGIPNLLYKKIPSVSDWLFRWLMQIRERKHSFPEWLARGRVVLLPKKAEAREPGDYRPIACLNTCYKLFTGHITRWLTKHLTVNNLLPASQRALIGGEWGCTHAQILDRTVLADAKGRKRALACAWLDYSKAFDSVPHSYIQYLLGKLRIDLRVRSAISDLMRGWQVVYELRTKRGTTASDPLKVHCGVLQGDTLSPLLFCISLIPLSYTIDRAVPKYTTSTLAVGGNATRALKINQIFYMDDCKLFTPHIGDLNAAIELVSEESSAIGLSLNAAKCAIASNVENDQEATGALDIPIIGGAQSYKYLGIEELMSPRESMAWERVSAKMIAKTKALLETDLSTGQIVDAYNATVLPIARYLFGNVIIGTGTFASLVVKARRFDNEVSRLLVKAKLRFSQSTKCRLYCKRSCGGLGLSSVEEGLKEAVVYAWCYIQCMPGLKVTRALVRSLALRNKRSIHTDVLTGVLTEIPEVTVTAVSCVNHEGSGVMINETLFNEPTKAARTIVTLLREEWQKRWIQTWSALPAAGSVTRNANIDQKLSYLWIIRGMVNKRVFRDVLGVQEHTLFTNTRNERNATPMCRQCHKCRETVSHIASGCKAFRGTLMKDRHDGVARAIYHYLSKKYGLATLHYSQQVMPVAKNDRVEILWDQNIVTRRKLLSNRPDIVVFDKVRKCINVVEICCCWVDSIADQQKIKYHKYATNSMVDPKKVAGRLALTVDSPQPDLSLVGQLGERYGREYTNGIHVIPIVIGTCGEVFPGIAGNIRALGAGEREIPDLIERCQRAAVIGTRRLVGAHLSKKE

SEQ ID NO: 15569 - protein, 968 aa, Eupelmus urozonus
MHKDMWDELQLERVDAANRKERWSDEEKEMMARKEAELILRYNKVPNINQKLAAIFDERTVESIKSHRRRASYKRRIEKYLQILQHLSSSSSSESYASADDTLGSSRVEQDDIFSQYFENLEPLNGEIRHACRINTLCGMTSWRSKQEVTAEIGLFLREALPKKRVRNGEEPSDRAELANCSKKKRRRAEYARVQDLWRKDPSRCVKRILDDQLDQQRGLAKDLMEPYWRAIFSKNTGLAPNLTPANEALVALWAPITPIEVKCAYPPNNTAVGPDGLSAKDLREIPTLALARLFNLILWCGRLPEHLYLSRTVLIPKKKDASDPGDFRPITVSSVLVRALHKILANRLKSIKLDERQRGFISTDGCADNTALLDLTLRYHRKRFKKFYMASLDMKKAFDSVSFEAVEEVLKAKGLPEGLRDYISNVYENSKTILQHGGWESTSIHPTCGVKQGDPLSSYIFNFIIDEMLQIVPPEIGVDMDGLKVNVMAFADDLILVASTERGLQTLIDSVANFLYSCGLEANAGKCLTVALVNIPKEKRSVVDARCKFTIRGAGIPSLKRTDEWKYLGIHFTPEGKSNAKVKESLAVKLERMTVAPLKPQQRLWALRTIIIPSVMYQLTMGGVTFGYLRSVDRMIRAAVRKWVHLPHDCPNAYIHADIVDGGLGISSVRWKAPANWVNRLEQLSKSTYLHGNEASTYVEAEKKKAEMRLLDSNTVLRTNSQINERWAKQLHSSVDGAALRDSRLVKGQHSWVGSFTKFLSGKDFVNTIKARINALPTRSRTARGQRKDRICRGGCNLIETSNHVIQHCHRTHGARIKRHNAVVKYLAEKLRKAEYNVEEEPQFKTSAGLRKPDLVATLGNTSFVIDAQIMSEQTDLERAMKTKVQKYGEDQEIISEVKKRWKSRDVITLAPTFSWRGLWCKSSAEKLRELGLLKQPDIKILSTRVLIGGLAAWWMFNSTTSVTRRR

SEQ ID NO: 15570 - protein, 1063 aa, Teleogryllus occipitalis
MRLVNENQFSRCPIPAPTLTQHFLSTHGSESEAAEFGDAFPATVGRAELNSAEFTQEEVARRLALSANTAPGADRISYGHLKQLDPDAKLLTPLLNLIRKAGKIPTEWRASRSILIHKKGDPGDPSNWRPIALSSSVYKLFTGLWAARLSKWAEDHHAFAPAQKGFRPFDGVLEQNFMLGRELRRARLGRGNLNLALLDVANAFGSVPHGAIATALSAAGVGEYFVGLAKQLYSGSTTRYMCEAGLTEEIPMRRGVKQGCPLSGLLFNFVIDPVLRALDAAGEAAPPPALAYADDVAIMARDPATLQVRLDLAAYHLSRLGLLLKPQKCRSLAIQNRSVSAHTFHILTTPIPAMAAHEATSYLGKPVGFNLVESWEGLKEQQRLLDRIAASGLRDHQKLDALVQYVQPATVFPLRLGRYTKGMLRELDKTVRTRAREFLGLPHGASNAFLYAGREDGGVGLLETTTEADIWQVDSTYKLLTSPDRTVREAAMADLREVAAYCQRVGEADADIYAYLNGAALPRSNTGGSCFSRTRQASRRLGLSWRPPSHAAEEGLPCIELPEEITPTCQPSPAAVGRRVGTLDVGAEAGAGESGEPDVDGAEQVDWLAMHWDPWPDPQAGVHVMDTPPPPQLPPPVSPGPALQPEPPPYAAGGTAPEPSADVGETAPTAPLGTGDAEARPAAGDAPRTVAADTGAGGTGATRRRTIDADDAAPAPAGDDAVTSAELNETQEPPTTEARPQPPTPAPAPRLSQLGATPPPPAHPPPPAEGDPVAAFLATPADPDDPRSCITARSRHLLVKRIRHLIHAAHARRWRAQQLQGVFATALEGVGRESTYYLRSGENMRPPVYRFVHAARLNVSTRLNHQGQNERGSRTCRRGCKQLYNDTTPASETIGHVISECRPNLPAMKLRHDRVAAHIKNAAVASGWAILFEDQALGGRGRPDLVIGKGHRAICIEVAVTAAYTDALETKYAAKAAKYAEIRPVLMRRNFREVEFLPVVVGALGEWLEESTAALRKITSSQADLKALRQKVIAEAINGSAACYYFHTAQTDLIPVEYRRACN

SEQ ID NO: 15571 - protein, 1299 aa, Teleogryllus occipitalis
MLAAPPLTPPSPHPHPYSPSTSPSHRNSAARPLPPTPPPRTHALTGGIPPLPPAPRPPHALHRAHSGGTPARRRPPATKRTMPPPQRRTRPPQPQPPTRPLHRRHHPPAQASDGSEATQRPPNSGAARTPTPTRESGLAPRPSPPAGARHAATAAHALRRGSRTSSGPSSTAPGTFSGAELRRRRKTSIQSTRDSPRRCAEASESGSILTPPNPNPNPSRPQPNIAATYRLQSRKAMRLVNENQFSRCPIPAPTLTQHFRATHGSESEAAGFGDAFPAAVGRAELNSAEFSQEEVARRLALSANTAPGADRITYGHLKQLDPEAKLLTPLLNLIRKAGKIPTEWRASRSILIYKKGDPGDPSNWRPIALSSSIYKLFTGLWAARLSKCAEDHHAFAPAQKGFRPFDGVLEQNFMLGRELRRARLGRGNLNLALLDVANAFGSVPHGAIATALSAAGVGEYFVGLAKQLYSGSTTRYMCEAGLTEEIPMRRGVKQGCPLSGLLFNFVIDPVLRALDAAGEAAPPPALAYADDVAIMARDPATLQVRLDLAAYHLSRLGLLLKPQKCRSLAIQNRSVSAHTFHILTTPIPAMAAHEATSYLGKPVGFNLVESWEGLKEQQRLLDRIAASGLRDHQKLDALVQYVQPATVFPLRLGRYTKGMLRELDKTVRTRAREFLGLPHGASNAFLYAGREDGGVGLLETTTEADIWQVDSTYKLLTSPDRTVREAAMADLREVAAYCQRVGEADADIYAYLNGAALPRSNTGGSCFSRTRQASRRLGLSWRPPSHAAEEGLPCIELPEEITPTCQPSPAAVGRRVGTLDVGAGAGAGESGEPVVDGAGQVDWLAMHWDPWPDPQAGEHVMDTPPPPQLPPPVSPGPALQPEPPPYAAGGTAPEPSADVGETAPTAPLGTGDAEARPAAGDAPRTVAADTGAGGTGATRRRTIDADDAAPAPAGDDAVTSAELNETQEPPTTEARPQPPTPAPAPRLSQLGATPPPPAHPPPPAEGDPVAAFLATPADPDDPRSCITARSRHLLVKRIRHLIHAAHARRWRAQQLQGVFATALEGVGRESTYYLRSGENMRPPVYRFVHAARLNVSTRLNHQGQNERGSRTCRRGCKQLYNDTTPASETIGHVISECRPNLPAMKLRHDRVAAHIKNAAVASGWAILFEDQALGGRGRPDLVIGKGHRAICIEVAVTAAYTDALETKYAAKAAKYAEIRPVLMRRNFREVEFLPVVVGALGEWLEESTAALRKITSSQADLKALRQKVIAEAINGSAACYYFHTAQTDLIPVEYRRACN

SEQ ID NO: 15572 - protein, 1269 aa, Ganaspis sp.
MAVVLTWSIPEPIEFKCNYCPPTEIGRQLKSGGRTGLFKKFEDLSKHLKIYHRNINIEHKFQCGTCGFLGTGAYKRKSAITHYKKTHVEAVGAATGGDIIGNDDVIISNDNDIVPVLPPQSQEIERRNETAVTTPEVANSENAIIVTPPCVDTIASRVVTRRRRRGIEISKNNTIDIPTTPTSRNASESGMAPETSMNLRRRMRARRRTLIRDNADVGPIAEDTLSPPTTIFAATQQNNNSNAPDEINASIQTPPLQYVEPQIIVINHDQGAGEDSAGSPAESTPDRVVGESPQQESWPLEEHTSIPRHDAFQRESLYNDNNNINNNVTPPTRNCINETSVNVSEVRDERARIGSKSKTIANLNELEEISQLFVNFASRFQPLVSERKGANKNNGPRKCTLSRKEMATKIQKLYRKNKKHAVQQIIEGNKEDCKIDISNIQTYFENIYKAPQLDVQGLPRDVKFDPVDEASSDNLSINISPFEVVKKLKFMKNTAPGPDGISYPTLLKADPSGAILANIYSASINLNAIPKSWKNSTTILVLKKGDVSRIKNWRPITMTNTIYKIFAALLSDRIALWAKKNNRLSWAQKGFLQYEGCYEHNFVLQEALQLARSKGRSLAVAWLDLANAFPSVPHGTIDHALRLSGLPDNTRDLIMQSITGCNTVIKTKSGQTAAMQMNAGVKQGCPLSPLIFNLVFELVLRGIDDMGGGFHMFGKKIRALAYADDVVLLAPGVEDMQALLNGVERLCSSIGLRININKCATLTMVGGKVCNSALRLEDGVIKALDINEAYEHLGFPTGARFLYHPIDSLTRAEEDVEKINSSLLAPWQKIEATAVFILSRLDFILRGARINKTNLKSLDKLIKKRAKEWMFLPKRASAEIVHIHPSKGGAGLLPVGDLLDIYAIAHAFKLLSSKDPVIREMALASARDSVRVKIKRHPTMNEIAKYLSGDCSDVLSLPSGSKASLWSYVRKATSRQNDRLGVRWSWCEEREELSLECKGWRGNKVIIPPGARSKIIFQLRSATYNFYMNSLLKKKDQGKVFHQSSINKSSNHFLRNGGFTRFADWRFVHRARTNVLPLNGALKGRVDRDRRCRVCGHDLETLPHVINHCNKNMQAITRRHDAVIKRLVKAHKIPGEVAIDQTVEGVDAGSSLLRPDIVIRDERAREITIIDVAVPFENGPEALKIAGDHKLKKYDRLAKSLEDKGYSVFLFEFVVGALGSWDRKNEQVFEHLLIGRKYAGLMRKLVVSETIKWSRDIYVEHVSGIRQFK

SEQ ID NO: 15573 - protein, 1119 aa, Lissonota sp.
MRMAQIEIRFNGRFINKHLLSLMPERTLESIKSRRRKSDYIDLLVDMRQGLPAVVDIEDEVFAADNNDDEENAENLPGTSEGSSGGRFPLDAVVEESLVNVTQVIERSHMLHAEDEIPSTNGRGIFNSTAIGSDLEDLPSFHLAGHGTSLLISVSPRGERSVIAVEPSESLIITTTSEGQRSVTIIERTVNRDVPGSSDISSIPEPPPVLQPRLPSAIAGPSNRHHQAGTPPPDDDPNEDPGNHREPEARDPVREFLENYLETELEWSDPELRLIELFRDRNSLIRARTRGLDEWLDYVYARPRNENMQRVGQRNPRARRDRNINGNRAYKRGEKRALIYRKTQELYKKNRAELAACVIDDKPVGSSVQHPPFDDLVNKFRDIFSDISPPDQGTIYDQKPRMRGMYRQITPDDIEWALRSTKSKSAGPDGLRITHVRKIAMHKLVLVFNIMLLWGSIPLRLKKCRTVMIPKGGNTLDADNWRPITVSSILLRLINKIIGKRLGDLPLHDLQRGFRKIDGVMLNNVTIDTAIVARRESRKPYSLVSIDLRKAFDSVSVNSVKRAMERFDLDPRIREFILDGYRSSFTVIQLGGMESEPILLSRGVKQGDPLSSYLFNMVMDELICQLSESNRGIEVNGLKLPCLGYADDIVLMGSSVREAQDILRSASRFFDQRSLSLNVGKCAATSVGIVPGKKTLYSITRNIFNVREQLIPQKSAGEFFKYLGVQVGMMGVAKPHIESLKTQLERIEKAPLKPDQKLCVIKTYLIPRLLSSLQNPRITLTILKETDKIIRMTVRRVLHLNRTCADAYLHAPIKCGGLGIQSLRAVVPVIMRGRLARISTSYDMYAVRLMGTERVAKLNTKLESWSRSYGGSTDAISRKWGELLDTSYSGNGLLQGSSNRHSGSWIDNPPQFWSGADFVKATQLRGNLLPTQGIPSNPPEQRLCRGGCPGRTESLCHVLQRCPVTHWPRIKRHDRIADLLNRISTGKGWTVEAEPHIRCANGTMRKPDLVLIRDNEAVVIDVAVSWEGPAPLAASYQHKKATYSDAPMMSALMRRYPGKTITVEALVIGARGTWCQRNDATMRKIGLNQEDARRLITATINGSILVHREFMKTTYHGGG

SEQ ID NO: 15574 - protein, 1211 aa, Lissonota sp.
MVRCVCGNEFQSEAGLRQHIRRRYCRGPAPADVHGCQYCLEQNTQRNFDTYIGLRQHIRRAHPVEYNAELEDQVENPIHAPSRWTDEETIRMAQLEVRYTGRFINRHLLSLMPERTIDSIKSRRRKTDYLDLLADFCQGLPAVVDIEDEVFGADDNNDEENAENLPSPTGDSIDDRNPLDVVVEESLISVTQIVERSQAPDLADRISPVNREGIFNSTAFGDDLENLPSFHLIGNGTNLLVTVSPHGNRSVVAVEHTEALIITVSSEGNRSVTVVEQSRNHTSSASKERNLTAMPPQDLHIDQVEVADPDEHHPQMGVIPPDRDPTIEPNNWVDPETQDPVRDFLEVFLQTEHEWSESELYLIQLFRNRNSLTRARTQGLNQWLDDVYSRPRNERPARVHPRRNRSQNHSNNNNNAENRLYNRGKKRALLYKKTQELYKKKRAELAACVVDNKPVGSSAQHPPFEDLVAKYKNIFSDESPPDEAVIYDRKPRMRAIYREITPEDLEWALRSTKSKSAGPDGLRITHVRKIALYRLVLVFNVMLMWGSIPLRMKRCRTIMIPKGGDTRDADNWRPITVSSILLRLINKIIGKRLGDLPLHDLQRGFRKIDGVLLNNVTIDTVIAARRESRKPYSLVSIDLRKAFDSVSIHSVKRAMERFDLDPRIRELILEGYRGAVTVLQLGENESEPISMSRGVKQGDPLSSYLFNMVMDELVYQLAESDRGIEVNGLKIPCLGYADDVVLIGSSVRETQDILRSASRLFEQRSLSLNVGKCAATSVGIVPGKKTLYTITRNIFNVQGQLIPQKSAGEFFKYLGVQVGVMGVSKPHIDDLKMQLVRIDKAPLKPDQKLVIMKTYLLPRLLHSLQSPRTTLTILKETDKIVRMAVRKILHLNRTCADALLHALVRLGGLGLQSMRAVVPVILRERLRNFYASYDVYAVRLMGMERVIKLNNKLESWSREYGGSTDAVGRKWGELLEVSYSGNGLIQGSSNYHSGSWIDDPPPFWSGADFVRAVQLRGNLLPAQGIPSNPPERRFCRGGCPGRTESLCHVLQRCPVMHWPRVRRHDRIADLLQRQSAKKGWAIEKEPHIRCANGLLRKPDLILTKDEDVIVIDVAVAWEGPTHLAATYQHKQATYNDALMMAALTRRYPNKNIRIEALVVGARGIWCQRNDAVVRKIGLGQGEVRQLLTATLNGSTIVHREFMKAAFHRRNR

SEQ ID NO: 15575 - protein, 1237 aa, Curetis bulis
MELRSNGNSQWPLPGDRQGTSGAGAGRDSMRPASGRSLQRWATVEQRVTTSTDVTDETTTTNHNPTSSVLQEMMPATTLEGRSRQRMKWTDQVNRSLLRSYYIVTNLESNLTGYRSVLHQHFTRTYPELNFLTEQRLSDQVRTIHRSNRIPPLERANLKKEVEQYLQTNDNHTQDTNHTPDTHINTHLTLAEQDGRDEGINSETLQSIEPTISLTGDPMPENIQVDRPDDDTSTSPEYNKVNDLFNEILIKYRDTDPTLRPPIPKLKLLNYNKRTINLINKAIFEYLQNCNVTTLEELHLIIYCAATTVTTLDRKTTQTITNSIQSDKKTNYNKIPAWQRRLEYKITKFRKNIGQLTQYLNGNLSNKKQRKINPLNKDRNSINEDLDILKQKLQALSKRLRRYKKSNQRQNENKLFQNNQKLFYRNLYKKQEIINQPPNITEIENYWKNIWSEPVNHNPHPEWMSIEAQETNQIEDMDEISIDINDVKLAIKKTLNWKAPGPDKIHNYWLKYFTSTHETLAIILDTLIKNPQNIPPFLTTGITYLKPKDTDTTNPAKYRPITCLPTIYKLLTSIITYKLNQHITKYNIIPEEQKGSCKGSRGCKEQLIIDTEIHNQVKQKHRNLHYAYIDYQKAFDSVPHSWLIQVLKLYKIDNKIVQFLQHAMGTWTTSLNINTDNKIIKTSLIQIARGIFQGDSLSPLWFCLALNPLSRILNNTGYGYTIDLKNSIKITHLLYMDDIKIYAATRQQLESLIRLTETFSNDIKMKFGVEKCKINSLFKGHHKEAQPHHLSHQDNLIDSMEANQSYKYLGFLQNSSLNHSEIKKELTQNYKQRLNKIFNTKLNARNKTKAANTYAVPILTYSFGIIKWSDTELDALNIATRSIAYKHCIHHIHSAVERFTLPRKLGGRGFIDIKNLHYKQIENLRTYFIQKSANSTLHKAITTLSTSGTPLNFNNNNFNPLEKITTDEQKIEKWKSKALHGKHPYQVHKQDIDSEASCSWLTHGNIFSETEGFIVAIQDQVIKTKNYAKYIIKDDNIQDDSCRICHNAKETIDHITGGCQVLAAKDYINRHDNVAKQIHQKLALKHKLIKTYTPYYKYTPHNVLENNETKLYWDRTIITDKTIICNRPDITLVNKSKKVAYLIDISIPNSDNIRQKHIEKIQKYTPLAEEIKDMWHLDSVHVIPIIISSTGIVPKTLHTSIKHLNLDKHIYINLQKSTVIDTSSIVRRFLNSPSPNS

SEQ ID NO: 15576 - protein, 1195 aa, Gonioctena quinquepunctata
MSKYRIVSSSTSKKGDIMEKLDSGVPKLQLDFHCEFCNRSFNTKRGLNIHKRKMHFSSSTCFISSTPDSSTESNEIENESTNRLNNHLANHKLNLYIAKRIAKSARVSAAEALSKSIDNCIISNSTEAWENLLSFAYKSFCLPPINQNRKESLTTIIKRNIESSNLLQNTTITNPSTSKYNLSKRIVNKVSDGDLTSAIRILTCTDTIATFDETTLLELKSKHPADTEFIYTGSDIFNPLKVNEIEVLNAVKSFRTGSAGGLDSLRPSHLQDLLSKSSGSMGEKLLWSLTNLCNFMLSGKVNRDVIPILYGASLIALRKRCGGIRPIAVGTTFRRLVSKLACSQIKESLGNSFRPIQFGFGTPGECEAVAHAARRFVNQHPDSSSTVFLKIDFENAFNMIYRNILLERVKDTIPNLFPFIRQCYEKPSFLNFGNNVIYSERGVQQGDPLGPALFCLCIENLTRSIEAEFNCWYLDDGAIGGNADLVLEQFQKIISSSNEVGLQLNFKKCELLFLNEHTDNISKKFNDLAPGIKIMDRNNRTLLGAPLSDESLTECINQKTNSLILMASRIDKIPDHIGYFLLKNCLAIPKLMYTLRCCATWRCMEELIHFDATLREILEQITNNHFNDLTWLQVTLPVNKGGLGIRQASSLALPAFLSSFNSVQHLIDQILPNYFTNSPDSFDIECESIWLSKTGISTPSYKLSQKSWDIPLIESSSTKLLESAAYSQFEKARLKAVCTKESGAWLNALPVAFLGTLLDDESFRISVGLRLGCSICVSHTCRCGSNVNDKGIHGLSCKYSSGRFSRHSTVNDLIKRALSTADIPSVLEPLGIIRDDGKRPDGMSLIPWSHGKPLVWDFTCADTVAPSHINLTSKTVGGAANSAEKLKIKKYSGLIDQYNFYPIAIETYGSFGKYAWEFFQIIGRKLIDKTNDPRARTFLFQRISIAIQRGNAASVLGSIPTSESLDEIFICPPGLRILSNSSIISTVPLLTSSPSRQIEGVNSDEMEDTSRRKTLKKNDLFFSSQKITCSDISQSNSSNYNTIRPLGLNGLKNIGKTCFMNSIIQCLSNTRWLLEYLRKDEHMRDINTSISSMKGALIKAFAIVMKELWSEDLSDRVVNTVSLECQIQIFAPRFMGHAQQDAQEFLRYLLEGLHEDINRVIEKPKPILIEIDEKLSNLEKAQEDKISKNGQLKNG

SEQ ID NO: 15577 - protein, 1026 aa, Gonioctena quinquepunctata
MSKYRIVSSSTSKKGDIMEKLDSGVPKLQLDFHCEFCNRSFNTKRGLNIHKRKMHFSSSTCFISSTPDSSTESNEIENESSNRLNNHLANHKLNLYIAKRITKSARVSAAEALSKSIDNCIISNSTEAWENILSFAYKSFCLPPINQNRKESLTTIIKRNIESPNLLQNTTITNPSTSKYNLSKRIVNKVSDGDLTSAIRILTCTDTIATFDETTLLELKSKHSADTEFIYTGSDIFNPLKVNEIEVLNAVKSFRTGSAGGLDSLRPSHLQDLLSKSSGSMGEKLLRSLTNLCNFMLSGKVNRDVIPILYGASLIALRKRCGGIRPIAVGTTFRRLVSKLACSQIKESLGNSFRPIQFGFGSPGGCEAVAHAARRFVNQHPDSSSTVFLKIDFENAFNMIHRNILSERVKDTIPNLFPFTRQCYEKPSFLNFGNNVIYWERGVQQGDPLGPALFCLCIENLTRSIEAEFSCWYLDDGARGDNADLVLEQFQKIISSSNEVGLQLNFKKCELLFLNEHIDNISKKFNDLAPDIKIMDRNNWTLLGAPLSDESLTECINQKTNSLILMASRIDKIPNHIGYFLLKNCLAIPKLMYTLRCCETWRCMEELIHFDATHREILEQMTNNHFNDLTWLQVTLPVNKGGLGIRQASSLTLPAFLSSFNSVQHLIDQILPNYFINSPDSFYIECGSIWLSKTGISTPSYKLSQKSWDIPLIESSSTKLLESAANSQFEKARLKAVCTKESGAWLNALPVAFLGTLLDNESFRISVGLRLGCSICVSHTCRCGSNVNDKGIHGLSCKYSSGRFSRHSTVNDLIKRALSTADIPSVLEPLGIIRDDGKRPDGMSLIPWSHGKPLVWDFTCADTVAPSHINLTSKTVGGAANSAEKLKIKKYSSLIDQYNFYPIAIETYGSFGKYALEFFKIIGRKLINKTNDPRARTFLFQRISIAIQIGNAASVLGSIPTSKSLDEIFIRPPGLRILSNSSIIYTVPLLTASPSRQIEGVNSDEMEDTSRRKALKKNDLFSLPKK

SEQ ID NO: 15578 - protein, 1108 aa, Gonioctena quinquepunctata
MGKKLLRSLTNLCNFMLSGKVSRDVIPILYGASLIALRKRCGGIRPIAVGTTFRRLVSKLACSQIKESLGNSFRPIQFGFGTPGGCEAVAHAARRFVNQHPDSSSTVFLKIDFENAFNMIHRNILLERVKDTIPNLFPFIRQCYEKPSFFNFGNNVIYSGRGVQQGDPLGPALFCLCFENLTKSIEAEFNCWYLDDGAIGGNADLVLEQFQKIISSSNEVGLQLNFKKCELLFLNEHTDNISKKFNYLAPGIKIMERNNWTLLGAPLSDESLTECINQKTNSLILMASRIDKIPNHIGYFLLKNYLAIPKLMYTLRCCATWRCMEELIHFDSTLREILEQITNNHFNDLTWLQVTLPVNKGGLGIRQASSLALPAFLSSFNSVHHLIDQILPNYFTNSPDSFYIECESIRLSKTGISTPSYKLSQKSWDIPLIESSFTKLFESAANSQFEKARLKAVCTKESGAWLNALPVAFLGTLLDNESFRISVGLRLGCSICVSHTCRCGSNVNDKGIHGLSCKYSSGRFSRHSTVNDLIKRALSTADIPSVLEPLGIIRDDGKLPDGMSLIPWSHGKPLVWDFTCADTVAPSHINLTSKTVGGAANSAEKLKIKKYSSLIDQYNFYPIAIETYGSFGEYALEFFKIIGRKLIEKTNDPRARSFLFQRISIAIQRGNAASVLGSIPTSKSLDEIFIRPPGLRILSNSSIISTVPLLTSPPSRQIEGVNSDEMEDTSRRKTLKKNDLFFSSQKITCSDISQSNSSIYNTIRPLGLNGLKNIGYTCFMNSIIQCLSNTGWLLEYLRKDEHMRDINTSISSMKGALIKAFAIVIKELWSEDLSDRVVNTVSLKCQIQIFAPRFMGHDQQDAQEFLRYLLEGLHEDINRVIEKPKPILMGIDEKLSNLEKAQESWTRYLRMDNSKMVDNFVGQLKSSLFCSSCGHCSFSFDPFWDLSFDIPQIPGQLSLSQCLDLFIREEILDGEEKPTCCKCKGRMKCTKKLCIYKFPKILVIHLKRFSPLGRFMGKLNVNIDFPLKGLDMSNYAADNVAPCQYNVYAVSNHSGTTYSGHYTAYCKHPYAGIWHEYNDSRISPISSQSIISEEAFVLFYEQEETNLN

SEQ ID NO: 15579 - protein, 1352 aa, Gonioctena quinquepunctata
MHRSYDKGLASQMCDGSLTGNEGSFSKNESFSDSLNSRLSFQKLNSHIIRRIPKSARVSAAEALCRAIDNCVEYNSLEAWENLFFFAYKSFYLPTSNKNRKESLTSIIKSNIRNNNLPQYISKDIQSLPPTTNLAKCVINKVSDGDLISAVRILSSSDTIASFDSHTLSELRLKHPTDSEVEYTGSENFIPLQVNEIEVSKAVKSFRTGSSGGLDSLRPSHLQDLLSKSSGSMGEKLLSSLTSFCNFLLTGKVIQDVIPILYGASLVALKKDGGIRPIAVGLIFRRLVAKLACSKIKETLGELFRPIQFGFGTPGGCEAVAHAARRFLNQHPDPASTVFLKIDFQNAFNMIHRNILLERVEDKIPNLYPFISQCYKKHTFLNFGNNTILSERGVQQGDPLGPALFCLCIDNLTKSIKADFNCWYLDDGSIGGKSDVILEQFKKIISTSEKIGLKLNFEKCELYFLDDLKDDIPEKFYSFAPGMKIMNKTNWTLLGAPMSEESLAQSLNQKTKSLNLMASRMDSIPKHIGYFLLKNCLAIPKLIYTLRCCPTWSCQNELDLFDSTLRMILEQITNNNFSLSTWLQATLPVNKGGLGIRQASSLALPAFLSSLNSIQHLVDQIVPDYFSSVSDVYYIECESVWCSKTGTSAPDNKISQKSWDLPLIELSSKQLLDSAVNSPFEKARLKAVSTKESGAWLNALPVAFLGTLLDDESFRISVGLRLGCSICVSHTCRCGFIVNEKGTHGLSCRFSSGRSSRHSTVNDLIKRALSTADIPAILEPLGIIRDDGKRPDGMSLIPWSHGKPLVWDFTCVDTVAASHIDSTSRNAGGAADSAEKSKLKKYSTLKDQYIFYPVAIETFGSFGSYATELINHIGQKLINKTDDRRARTFLIQHISIAIQRGNATSVLGSIPATQRLDDIFIRPQRINMSSSIHKNIIRSQIPEKYHLDSTTSKKITRSTISLSNSISSSLQSSSLLRRSNDRENHCIRDCSSLSYDSIKPLVFGSSKTLGLNGLKNIGNTCFMNSAIQCLSNTRWLLEYLRKDEHLKDINTSISSMKGALIKAFEEVVKELWSEDSSDVVVNTVSLKSLIQRFAPRFMGNAQQDAKEFFRYLLGGLHEDVNRVRERPKPMFIEIDENLSDNEKAKESWSRYLRMDNSKIVDNFVGQLKSSLKCTFCGHCSVTFDPFWDLSLPIPESTGKLRLSQCLDLFTREEILDDDEKPTCSKCKERRKCTKSLSILKFPKTLVIHLKRFSQMEGFREKLNVFIDFPLDGLDMNIYAVDNAAPCRYNLYAVSNHSGTTFNGHYTAYCRHPYAGTWHEYNDSRVSPLSPKYIVSGEAYVLFYDQEDTKSQF

SEQ ID NO: 15580 - protein, 1402 aa, Gonioctena quinquepunctata
MMSDVTAAIDSEALEFQCGICGRRFKNGRGLNIHTKRMHRSYDKGSVSQMCDGSLTWNEGSFSKNESFSDSLNSRLSFQKLNSHIIRRIPKSARVSAAEALCRAIDNCVEYNSSEAWENLFFFAYKSFYLPTSNKNRKESLTSIIKSNIRNNDIPQYISKDIQSLPPTTNLAKCVINKVSDGDLISAVRILSIASFDSHTLSELRLKHPTDSEVEYTGSENFIPLQVNEIEVSKAVKSFRTGSSGGLDSLRPSHLQDLLSKSSGSMGEKLLSSLTSFCNFLLTGKVIQDVIPILHGASLVALKKKDGGIRPIAIGLIFRRLVAKLACSKIKETLGELFRPIQFGFGTPGGFLNQHPDPASTVFLKIDFQNAFNMIHRNILLERVEDKIPNLYPFISQCYKKHTFLNFGNNTILSERGVQQGDPLGPALFCLCIDNLTKSIKADFNCWYLDDGSIGGKSDVILEQFKKIISTSEKIGLKLNFEKCELYFLDDLKDDIPKKFYSFAPGMKIMNKTNWTLLGAPMSEESLAQSLNQKTKSLNLMASRMDSIPKHIGYFLLKNCLAIPKLIYTLRCCPTWRCQNELDLFDSTLRMILEQITNNNFSLSTWLQATLPVNKGGLGIRQASSLALPAFLSSLNSIQHLVDQIVPDYFSSVSDVHYIECESVWCSKTGTSAPDNKISQKSWDLPLIELSSKQLLDSAVNSPSEKARLKAVSTKESGAWLNALPVAFLGTLLDDESFRISVGLRLGCSICVSHKCRCGFIVNEKGTHGLSCRFSSRRSSRHSTVNDLIKRALSTADIPAVLEPLGVIRDDGKRPDGMSLIPWSHGKPLVWDFTCVDTVAASHIDSTSRNAGGAADSAEKSKLKKYSTLKDQYIFYPVAIETFGSFGSYATELINHIGQKLINKTDDRRARTFLIQHISIAIQRGNATSILGSIPATQRLDDIFIRPQRINMSSSIHKYIIRSQIPGKYDLDSTTSKKITRSTISLSNSISSSLQSYKYIIRSQIPGKYDLDSTTKTIPARSMIENHCIRDCPFEDSNSGERISLSYDFIKPLVFGSSKTLGLNGLKNIGNTCFMNSAIQCLSNTRWLLEYLRKDEHLKDINTSISSMKSALIKAFEEVVKELWSEDSSDVVVNTVSLKSLIQRFAPRFMGNAQQDAKEFFRYLLEGLHEDVNRVRERPKPMFIEIDENLSDNEKAKESWSRYLRMDNSKIVDNFVGQLKSSLKCTFCGHCSVTFDPFWDLSLPIPESTGNLRLSQCLDLFTREEILDNDEKPTCSKCKERRKCTKSLSILKLPKILVIHLKRFSQMERFREKLNVFIDFPLDGLDMNIYAVDNTAPCRYNLYAVSNHIGTTFNGHYTAYCRHPYAGTWHEYNDSRVSPLSPKNIVSGEAYVLFYDQEDTKS

SEQ ID NO: 15581 - protein, 1399 aa, Gonioctena quinquepunctata
MMSDVRAAIDSEALEFQCGICGRRFKNGRGLNIHTKRMHRSYDKGLASQMCDGSLTWNEGSFSKNESFSDSLNSRLSFQKLNSHIVRRIPKSARVSAAEALCRAIDNCVEYNSLEAWENLFFFAYKSFYLPTSNENRKESLTSIIKSNIRNNNIPQYTSKDIQSLPPTTNLAKCVINKVSDGDLISAVRILSSSDTIASFDSHTLSELRLKHPTDSEVEYTGSENFIPLQVNEIEVSKAVKSFRTGSSGGLDSLRPSHLQDLLSKSSGSMGEKLLSSLTSFCNFLLTGKVIQDVIPILYGASLVALKKNDGGIRPIAVGLIFRRLVAKLACSKMKETLGELFRPIQFGFGTPGGCEAVAHAARRFSNQHPDPASTVFLKIDFQNAFNMIHRNLLERVEDKIPNLYPFISQCYKKHTFLNFGNNTILSERGVQQGDPLGPALFCLCIDNLTKSIKADFNCWYLDDGSIGGKSDVILKQFKKIISTSEKIGLKLNFEKCELYFLDDLKDDIPEKIYSFAPGMKIMNKTNWTLLGAPMSEESLAQSLNQKTKSLNLMASRMDSIPKHIGYFLLKNCLAIPKLIYTLRCCPTWRCQNELDLFDSTLRMILEQITNNNFSLSTWLQATLPVNKGGLGIRQASSLALPAFLSSLNSIQHLVDQIVPDYFSSVFDVYYIECESVWCSKTGTSAPDNKISQKSWDLPLIELSSEQLLDSAVNSPFEKARLKAVSTKESGAWLNALPVAFLGTLLDDESFRISVGLRLGCSICVSHKCRCGFIVNEKGTHGLSCRFSSGRSSRHSTVNDLIKRALSTADIPAVLEPSGIIRDDGKRPDGMSLIPWSHGKPLVWDFTCVDTVAASHIDSTSRNAGGAADSAEKSKLKKYSTLKDQYIFYPVAIETFGSFGSNATELINHIGQKLINKTDDRRARTFLIQHISIAIQRGNATSIPGSIPATQRLDDIFIRPQRINMSSSIHKYIIRSQIPEKYNLDSTTSKKITRSTISLSNSISSSLQSSSLLRSSNDRENHCIRDCSFEDSNRGERISLSYDSIKPLVFGSSKTLGLNGLKNIGNTCFMNSAIQCLSNTRWLLEYLRKDEHLKDINTSISSMKGALIKAFEEVVKELWSEDSSDVVVNTVSLKSLIQRFAPRFMGNAQQDAKEFFRYLLEGLHEDVNRVRERPKPMFIEIDENLSDNEKAEESWSRYLRMDNSKIVDNFVGQLKSSLKCTFCGHCSITFDPFWDLSLPIPESTGKLRLSQCLDLFTRQEILDDDEKPTCSKCKERRKCTKSLSILKFPKILVIHLKRFSQMERFREKLNVFIDLPLDGLDMNNYAVDNAAPCRYNLYAVSNHSGTTFNGHYTAYCRHPYAGTWHEYNDSRVSPLSPKYIVSGETYVLFYDQEDTKSQF

SEQ ID NO: 15582 - protein, 1186 aa, Orius laevigatus
MAFPTSRALANHTSAHETQRRRQEGRPQLPAPDTRARRGAAGRRTAVVGVGAPPDVAARPRDQPPLTRRAGGPRPGGSSEGSRPVRTTRATASAASSLSSSPVTAPPTNDSPPPRMTTATATTAAATTASETASATTATATTPPASSGTPPSRDLDDPSAAGANPLGAVGDGRGSTPGESSERAVRGDRPAIPTSRLADEFGTRLRSVCLAPVTDRVWNEFLAILEEMTARARALLKIRPRGPDGGRARGPPPVEDPKYIQSVYRRNRRRAIRLITGQGRVECDLDLGEVEAHYSDVWSPKVHDPTITSLINEAPTGLEVPAFTTEEVDARIRRFENTAPGEDGIDYKGWRKVDNGAVALTHVFNMCRTHRRIPPAWKESMTVLLPKSDRPQTISDWRPISLCPTIYKIYSALIAARLEGWCEGHAVLSPSQKGFRPYDGVFEHNYVLQNRLREARMGRRDICVVWLDLANAFPSVPHSVIADSLGALGVGQHLLDVIKDMMSGMGTSILCGSERTRRIPVGSGVKQGCPLSGLLFNIAINVVLEEVQPREEQRHSVLAYADDLTLMSDGPGQMRELLEAVEPLLGRLGFLIKPQKCRSLHLSGVTPRGARDTVFRVGGSEIRALRDGEAFEFLGRPVGFRAFGSKEVVRDACSAGVSVLRSQLAPWQKLDALRSFIFPTCHFSMRGGDIAKGEWSRLDDVLRAEIKKVLYVPEEACSEYIYGSSKEGLVGVPMAAEESDIALVDSAFKLLTCADTALLEMARDELAKTAAQRIRRNPTEAELASMMSGETEGPFKHTSSALSNQWTKARAASRRLGVSWGFEGVEPSLTVAEKTLHANERRKVSSCVRQKMQAQRGAEIREKPGQGRVAQCLLGVPESSHFMRTGEYTTFADWRFIHKARLGLVPLQGHTPGRDVPKGCRRCSYDNETLPHVLDHCMVHSHLYQMRHNSIVNRIEAAVGRGSRVIGKNTSVDGSALRPDLVVAKGNEAVIFEITVPFENRSEALRQARERKEEIYAEVRSRLLDRFARVHIAPIIVGALGAWDRANDKHLRRICSPKYIATMRKLMVSETIAWSRCIFMEHLSGRMQRPNAYRRRNTGGTDQTGHQPTQTSAQGAWPAGSGVGGGGDAYVSPPPPQSWGTDDTWDWLLIRPAQDESPSAGAGSTPAGPPGGMWPVQPSGREVSSE

SEQ ID NO: 15583 - protein, 1030 aa, Anoncus sp.
MPRNPVTRSGRPTGRAALTVENEVAGEGDEPLPGVAEDERHGNQCRAPGCNRNFVTVIGRGVHEQRAHRDWHDANARQQVYTVWNKEADTLLARKEHELTLAGTRNINQALWAAFPEKSFDSIKSRRRQPAYKATLAEVVEEHLDLERVQAELAEGNARGNVEPEQAGPDYKAALVETLRGLPIFNSDEFKSNILNRLCSNADVQGVETTYGELSNYLRDILPLPTRQPGGRRPPQGPQEPITRRQARRSSYAKTQKLWMKNRSRCIGAIMDGEVTEPPSPEVMDPFWRALLTREVESSPDAERLGEVHPEIWAPIQMGEIKAIKFNSGTAPGPDGLELRRYKKIPTEVLLRIFNLFMLCGKIPGHLLESVTTLIPKKAEATEPGEYRPITVSSVLARAFHKILANRMAASVPLDPRQRAFQKTDGCAESTFLLDFVLKWHRKHARPLYMAAIDVAKAFDTVSHPTVIQTMEIKGVPAPAIQYIHTVYANSSTRLKYGSHTSEPIRPTCGVKQGDPLSPALFNFVIDRLLQKLPSGVGADIEGTKINAMAFADDIILMASTKEGLQQNLNSAGEFLAACGLSVNANKCLTVALRTVPQEKRVVVDRTAVFKIGGRAVPVMRATDEFKYLGIPFSPDGRITVDPVRIIAEALAKLSKAPLKPQQRIFALTVFILSKIYHLMALGSIRIGVLNKIDRTIRNSARKWLSLPMDATNAYFHAAVEDGGLGIPSARWIGPWLRLQRLNALEDGAGERSLYRQEEINLVEKRLNVNGQILRRKNDIRKHWSRLLYQAIDGIALRLSAKTKGQHTWVSDGTSFLSGRDYINLIRLRINAMPTRSRTTRGRRADRSCRAGCGYVETTNHALQICHRTHGARIQRHDAVVKYLARGLSQQGYAVTIEPQYRTNEGLRKPDIVATKNRRTIVVDAQVVGEQADLDRAHKRKSDYYFNNEHLLDLMEDREQTTDITFTSATVSWRGVWGPKSAKSLVDLKVIKKRELKVISTRVLIGGIAAFSLFNKTTATRAGRGRRGIG

SEQ ID NO: 15584 - protein, 884 aa, Anoncus sp.
MDEERAAEEAAGAAALAEDQGHDYDQALVSFLRELPTCNAAGYRSDTLNRLCALAGIQDTDTILGELSNYLRGILPLPGRPPARGGPPRRPAQGKTKRQARRSAYAATQKLWRRNRGRCVGSILEGDAIDPPSPEFMEPFWRALMTREIVDTPQDEIPNEVNHEIWAPIQMAEIKAGKFNNGTAPGPDGLDIKRYKQIPYEVLVRIFNLFMLCGRLPAHLLESTTTLIPKKAEAREPGEYRPITVSSILARAFHKVIANRMCNTIPLDPRQRAFIKIDGCSESTFLLDFVLRFHRKHARPLYMAAIDVAKAFDSVSHPTVVQTMKVKGVPAPMIRYVESVYQGSTTRLKYGCHTSEPIRPSCGVKQGDPLSPMLFNLVIDRMLRRLPTGVGVDMEGVMVGAMAFADDVILLASTKAGMQQNLDSAVGFLASCGLAVNAEKCHTTAFRTVPREKRTVIDRDAVFKIDGRVVPALKRTDQFKYLGIPFSPDGRASVNPTTIIAQALESLTRAPLKPQQRMFALRVYILPKIYHLVALGNIRVGVLNKVDRMTRKSVRKWLCLPHDTPNAYFHAAILDGGLGVPAMRWTGPWLRLQRLKQLDAGIQERSLFRQQEIDQCERRLNANGRVMNRRLDVQHHWSSALYRAVDGAALKLSPATQSQHSWVGDGTSFLSGRDYINLIRLRINAMPTKSRTSRGRRADRSCRAGCGYIETTNHALQICHRTHGARIKRHDAVVNYIARGLAQRGYAVKTEPKYRTAEGLRKPDIVATKNRRTVVVDAQVVSEQTNLDISHRNKTRYYEGNEQLLDIIEREEDTTEIKFTSATVSWRGIWGPKSAKTLLDLGIIAKGDLKIISTRVLVGGIAAFAFFNRTTAVRNGRGNRRGIG

SEQ ID NO: 15585 - protein, 1412 aa, Euura saliciscinereae
MAAWKPAELRVIERYLNDKRDDVLTQEDYLLLRNQIQGRSLAAIKKKALDLRRPRPRARPAPAAWTDEDTRRLAVRYTQSNGASIGDRLTQVLPEFPGRSAKALGHRLLAQLPQIYYLREEVPAAWIEEHLPQQQQPQPPPDDLNRDDLNREEDLRLHEPPVRRDLHPVRAEGQDNNPGGDDHPRQRDEGPEEPGAQPQQVPAILENPVARGPEEDPRPVRVQRGTHHWTETEVRRLAIRYADTDGRTKTARLQNIAAEFPGRTISGLTSKLSRTYPAIYNQTANIPEEWRREDLGIPPPPREPPNGARQPEQDPRDEDEDQGQPGLNQNVEEGEPNVIHPERAEVRRDTQMERVEHPQVSETTLRKFKRLWDDSTKRKNLPKIKKINGQPDPRLLQEIDGALHLALRETENSNAPPNVKRRRQKTAIYTAGVILAGEMRPEPTKQPPRYVITERKITKLNRHINLARELQQWNRRGLPRRLKAEAREIRKTKMTPQQYITANKDRIRILEGRLQYQKKKSKVMKTRTEFKGKPSMNTIESKQAYTGPDLKATEAHFRDLLGNPGLDGGKKPSPTFNAWIAKLKEHRNGMEFEHQLSEDRIETQVKLALRKAAPWKAAGEDAIPTALYKLLKSARGVLTRFVRDTLKGDRQITPADARARVVLIHKGGDGQDPGNYRPIAVLNSDYKILTAVIASTVKDSLPTWAIPKEQLAREKVWGTAHATLMDKACTQEARAFRRDHWSAWYDFTKAYDSIHHHQLQRLACALPIHSKIIDTIRNIIRVWSIKVQVGRKQTNPIQVKRGVYQGDTMSPLLFILITACLIHQLNTDREINKKCKGRHQVLAYMDDFKCHAPSEAGINEMTRVLSTAAGELGLALNLKKCAHYNRQEHQQQQREEEEEPLDGAQGDAAIPEDEDALFLPAVREGYKYLGIHQLERDTQINHQLVAQKILEGTRKIIDSDLAPTQKISLFNTTLAPAATHVLGNLYPNESRGTTLRKCRDLDREVRKILINKGCKGKTTARVSTYIPQARGGLGLKSIELETEIQYVRRGLYLQTHEDLGSTRTRYDRLIRAGWRNPVTDAQAILQKYEVHPQPMGETEDTAAHCRKTAGKVREAQTAVLIEEWGRNMNYGRIVNNEGNNITFPAQTSIHMDDWQMAILGAAAEEQLHGAGGIPGRRRPCRRGCQVDETAYHIAVGCVTPEYNTRHDKAVWWLLKYILEATAAPPEASCELTFGKSEIAVDYRWNDREVRLRGGMKIYTETKLHHNRPDIHIILSNPAEVYVIEVAVSHIQNLRTQERIKRTKYQRNSATHVNDRNLDDVPRSHNLVAELERAYRCPVKLGVLVLGAYGELIATEENIKMQHILGKLGVKPWRVKTLMGRCCYSVAASTADIILRRLNQRDTDTYPLQPPAE

SEQ ID NO: 15586 - protein, 1409 aa, Euura saliciscinereae
MAAWKPAELRVIERYLNDKRDDVLTQEDYILLRNQIQGRSIAAIKKKALDLRRPRPRARPAPAAWTDEDTRRLAVRYTQSNGASIGDRLTQVLPEFPGRSVKALGHRLLAQLPQIYYLREEVPAAWIEEHPPQQQQPQPPPDDLNRDDLNREEDLRLHEPPVRRDPPVRAEGQDNNPGGDDHPRQRDEGPEEPGAQPQQVPAILGNPVARGPEEDPRPVRVQRGSHHWTETEVRRLAIRYADTDGRTKTARLQNIAAEFPGRTISGLTSKLSRTYPAIYNQTENIPEEWRREDLGVPPPPREPPDGDRQPEQDPRDEDQGQPGLNQNIEEGEPNVIQLERAEVRRGTQMERVEHPQVSENILRKFKRLWDDSTKRKNLPKIKKINGQPDPRLLQEIDGALHLALRETENSNAPSNVKRRRQKTAIYTAGVILAGEMRPEPTKQPPRYVITERKITKLNRHINLARELQQWNRRGLPRRLKAEAREIRKAKMTPQQYITANKDRIRILEGRLQYQKKKSKIMKTRAEFKGKPSMNTIEPKQASTGPDLKATEAHFRDLLGNPGLDGGKKPSPTFNAWIAKLKEHRNGMEFEHQLSEDRIETQVKLALRKAAPWKAAGEDAIPTAVYKLLKSARGVLTRFVRDTLKGDRQITPADARARVVLIHKGGDRQDPGNYRPIAVLNSDYKILTAVIATTVKDSLPTWAIPKEQLAREKVWGTAHATLMDKACTQEARVLRRDHWSAWYDFTKAYDSIHHHQLQRLACALPIHSKIIDTIRNIIRVWSIKVQVGRKQTKPIQVKRGVYQGDTMSPLLFILITACLIHQLNTDREINKKCKGRHQVLAYMDDFKCHAPSEAGINEMTRVLSAAAGELGLALNLKKCAHYNRQEHQQQQREEEEEPLDGAQGDAAVPEDEDALFLPAVREGYKYLGIHQLERDTQMNHQLVAERILEGTGKIIDSDLAPTQKISLFNTTLAPAATHVLGNLYPNESRGTTLRKCRDLDREIRKILINKGCKGKTTARVGTYIPQARGGLGLKSIELETEIQYVRRGLYLQTHEDLGSTRTRYDRLVRAGWRNPVTDAQAILQKYEVHPQPRGETEDTAAHCRKTAGKVREAQTAVLIEEWGRNMNYGRIVNNEGNNIMFPAQTSIHMDDWQMAILGAAAEEQLHGAGGIPGRRRPCRRGCQVDETAYDIAVGCVTPEYNTRHDKAVWWLLKYILEATAAPPEASCELTFGKSEIAVDYRWNDREVRLRGGIKIYTETKLHHNRPDIHIILSNPAEVYIIEVAVSHIQNLRTQERIKRTKYQRNSGTHVNDRNLDDVPRSHNLVAELERAYRCPVKLGVLVLGAYGELIATEENIKMQRILGKLGVKPWRVKTLMGRCCYSVAASTADIILRRLNQRDTDTYPLQPPAE

SEQ ID NO: 15587 - protein, 945 aa, Graphium evemon
MRFLLFLDKKLSIYNGNCACLHFFSNSISQWKCLRCSHNPRTGDAFESHFREVHQVQVLFYCPFCEFEGNSVKQVAAHMRSKVCNRTVSIEPLRDDELEPPDPVLMPPQPLLPNLRLAIDSLDDSTFKRLANETYSARPGLNHISTLADHLTCLSRLDFQRHPRQRRPRRRRRNHDQDSIQREFNRNQYYWRTDKKKCYSVVMKGDIESRLNIDDADAFYRELFGQVGECRADLLNTRPTDSVHILHYIGEGEIERYLRKKKKSSPGPDGLTANAVLPRLKEWTILINLCLKVKRLPRLWHESRTNLVPKSNSDRPADHRPLSVSSIAYRAMSASLARTLYHSVSLHPSQRGFIDSDGTHQAITMVRYLAAKGTRMVSVDLKKAFDSIPHDTLLKVCRANGLDGPTLKLIKDIYTEATTFIQVKSRKTEPIPLLRGVRQGDPLSPLLFNLVVDQLLRRLDETGYGVTLERTSTGVKKLAAIAYADDLVIFADTTEELGSQLFLANRILSQLGLTINVNKTFAVNTNIPGLQSKHAFKYLGAIIDPTGESRMKVNELTELVETLDRGVLRGNQKLFFLRYHLLPSVYHRLIHESTTGTTLFAMATKLRKATRKWARLPASTCSSFIHLAIRNGGLGIPNLRWTIPEMARSRMCRLQRCPTWFIQHLVKSNWYSNELYRVDALCPMEGAEKWHLNDISKANPAHMTYPIGGATFANQHLSGGSYVEGRNFYRFVQLRSMADNHNTRRARQPLHCTKCHSGELATLQHILCKCDDNASSIRSRHDQVLQQIVYHCRKQNLVTIVEPSLPNGLRPDLLVLLPNRETLCLDVTVIFELNKESLNKANHIKQSKYEPYVEELSNIMWHEMRLLAEHQPRLFEPAPPPLRPPRMSIYGLAFGCRGTISATALNILKDKLKMPNWKINKLLNLVISNSLDLFIHSPLATNSAT

SEQ ID NO: 15588 - protein, 930 aa, Rhinocypha anisoptera
MFTTRLSTLAAHFAKELMLPAYVVLSGSLPRTTISMAGQTNPSSLTRRLEMLTTDRANFRAEAVCFYGCQDLLHCNHYRMLSVEIKPRYIERRPSQWRCLRCNHNPRTGDAFEAHLSNVHQVSVQFYCPFCEFEGRSVKQVAAHMRSRVCNRTVSIEPLSEEELIPPDLVPIPPRPLLPGLRTAIDSLEDSTFKRLANEVYYAQPGTNHISTLADHLTGLSRLASQRRRRRPRRRRRNRGQDPVEREFNRNQFYWRTDKKKCYSVVMNGDIESRLNIEDADAFFRELFGQVGNCRADLLNTNPTSTVHLLGYISEEEIEWYCKKKKKSSPGPDGLTSNVLLPRLKEWTILINLCLKEKRLPRLWHESRTTLVPKCDSDRPSDHRPLSVSPIAYRAMSASLARTLSRSVSLHPGQRGFIDSDGIHQAISMVRYLAAKGTRMVSIDLRKAFDSVPHDTLLKVCRANGVDSDTMKLFKDIYTGATTVIQVKGRKTGPIPLLRGVRQGDPLSPVLFNLVIDQLLRRLDETNRGVTLHRLNSGENRLSALAYADDLVIFADTTEDLGAQLFLANQLLSQLGLTINVDKSFSFNANLPGLQSRPFFKYLGAWIDPKGDSRMKVIELKEQIDKLDRGVLRGNQKLFFLRYHLLPSVYHRLIHESTTGTTLFEMSTKLRMISRKWTRLPASTCSSFIHLAIRNGGLGIPNLRWTIPEMARSRMCRLQKCPIWFIQHLVKSNWYANELYRWDALCPIDGAEKWHLNDVSKANSAHMTFPVGGTRFANQHLSGGGYVEGQKFYRFVQLRSTVENKNTQRVRPPLPCLKCNSGEMATLQHILCKCADNAVSIRKRHDQVLKEIVYHCQRANMVTLVEPTLPCGLKPDLVVQLPSGEVLCLDVTVVFELNKESLNQANRLKQEKYQPHLEEIKDVLRRRSQR

SEQ ID NO: 15589 - protein, 963 aa, Atrophaneura dixoni
MADQTNSSHLRSPEILAADRTNFHAEVICFQNCTSLLECRHFRTLSIEIKPRYIERRPSQWRCLCCTDNPRTADAFVDHMSEVHNVEVLIYCPFCSFEGRSVKQVAAHMRSRVCNRTVTIEPLRDDEIDLSDFVSLPARPLLPELRRLIDSLDESTFKRLANEVYYGAPGTNHISTLADHLTSLARLACQRPSRRRRRRRRRNRGQDLVQREFNRNQYNWRTDKKKCYSVVMNGDIESQLDIEEADSFYRDLFGQVGECRADLLSMRPPDSVSLINFISEEEIESYLRKKKKSSPGPDGLVSHALLPRLKEWTILINLCLKVRRLPRTWHESRTSLIPKSNSERPADHRPLSVSPIAYRAMSASLAQSLYQSVSLHPAQRGFIDSDGIHQAVTLVRYLAARGTRMVSIDLKKAFDSIPHDTLLKVCRANGLDSASMDLIKDIYTGATTVIQVRSRRTEPIPLRRGVRQGDPLSPLLFNLVIDQLLHRLDETNRGVTLDRTPSREKRLAALAYADDLVIFADSTLALSEQLFLANQVLSQLGLTINIDKSFAFNTAIPGLQTRLAFKYLGAIIDPTGRSRMKVNDLMELVAKLDRGVLRGNQKLYFLRYHLLPSVYHRLVHEASTGNKLFEMATMLRKYVRRWTRLPAFTCSSYIHLSIKNGGLGIPNLRWTIPEMTRSRMSRLQRCPLWFVQHLIKSKWYEKELYRVDALCSIDGAERWHLNDISKANPGHMTFPVGGAKFANQHLSGGGFVEGRKFYRFVQMRSAADNNNTRRAMPPPLCVKCHSGEPATLQHILCSCEDNLNSIRERHDTVLKQIVAHCRRSNLVVIVEPTLSCGLRPDLVVLLPSGETLCLDITVVFELNKDSLNKANRLKQVKYQPHLAEIHQLMSNELRSHPGNLVQRSSLVTAYGLAFGCRGSISATALNVLKSRLAVPIWRINKMINLIISSSLDLFVHSPHALTL

SEQ ID NO: 15590 - protein, 1066 aa, Papilio phestus
MVTPRVTAYVPKRQKMPVANLFQSVHTVPKKATGNHNAQKSPKRNSRFALTVPMSSLKMSIIRLSTPDVQFDKKQMLPGYVAPSGFPPRISIPMAGQTSPSLPSRRLEMLTADRANFRAEAICFFSCQDLLHCNHFRTLSVEIKPRYIERRPSQWKCLRCSHNPRTGDAFESHFREVHQVQVLFYCPFCEFEGNSVKQVAAHMRSKVCNRTVSIEPLRDDELEPPDPVLMPPQPLLPNLRLAIDSLDDSTFKRLANETYSARPGLNHISTLADHLTCLSRLDFQRHPRQRRPRRRRRNHDQDSIQREFNRNQYYWRTDKKKCYSVVMKGDIESRLNIDDADAFYRELFGQVGECRADLLNTRPTDSVHILHYIGEGEIERYLRKKKKSSPGPDGLTANAVLPRLKEWTILINLCLKVKRLPRLWHESRTNLVPKSNSDRPADHRPLSVSSIAYRAMSASLARTLYHSVSLHPSQRGFIDSDGTHQAITMVRYLAAKGTRMVSVDLKKAFDSIPHDTLLKVCRANGLDGPTLKLIKDIYTEATTFIQVKSRKTEPIPLLRGVRQGDPLSPLLFNLVVDQLLRRLDETGYGVTLERTSTGVKKLAAIAYADDLVIFADTTEELGSQLFLANRILSQLGLTINVNKTFAVNTNIPGLQSKHAFKYLGAIIDPTGESRMKVNELTELVETLDRGVLRGNQKLFFLRYHLLPSVYHRLIHESTTGTTLFAMATKLRKATRKWARLPASTCSSFIHLAIRNGGLGIPNLRWTIPEMARSRMCRLQRCPTWFIQHLVKSNWYSNELYRVDALCPMEGAEKWHLNDISKANPAHMTYPIGGATFANQHLSGGSYVEGRNFYRFVQLRSMADNHNTRRARQPLHCTKCHSGELATLQHILCKCDDNASSIRSRHDQVLQQIVYHCRKQNLVTIVEPSLPNGLRPDLLVLLPNRETLCLDVTVIFELNKESLNKANHIKQSKYEPYVEELSNIMWHEMRLLAEHQPRLFEPAPPPLRPPRMSIYGLAFGCRGTISATALNILKDKLKMPNWKINKLLNLVISNSLDLFIHSPLATN

SEQ ID NO: 15591 - protein, 1326 aa, Meloidogyne luci
MAININKTYKEVVCGMSRPLEVSRKLSQERQAVGQSSDAVGGSPASRGNKGNLNAAQWDRMEEDSMFMTWRRAEISNGRRLTPAEFFEIWEVFRKSSDASKQGGFGYRSAVALYQRRRVLEKRGYQFEGDQIVKSGLPIEQKAKPHKSKLQNLAINKERVLTLGRAYVKDKSPTQPEQASEVLKEKESLVQLSEEDQVPEGTEVPANRTSKRHPRTSKKNNEKKTEDKGKGDKDNTVSKEQQLEREALRAEFWRTYHRTKGKMERKALRINAGKVKASEWVCLGICVRECVDRHARKYGILKVLNTAVYSAGKTLETRTSVSRKEAQKAFSEWKSDRKRECERIRVHIGWITDEIHRRKTKTEPTFKQRRNFLDLQRRFQVGGRPIRSTKDLMAKSESLKVHLKLLKDRIDLRCKKEREAVEKAKPLRRKLEEPRGESKLKSADDARKYWSGIVGREKAFEKTPELTSWAEAVREKTTKGQQFSNYAEDLRRWNNVLKKARPSKAPGPDGIPNLLWKRLIPANKVLFDWFMGIKKHKLRFPNWLTEGRVVLLPKGDDPSNPANYRPIACLNTMYKLLTGVMTTWISDHLTAHEILPYEQRALVKDTWGCTHATILDRTITSHAKATNTPLAAVWIDFAKAFDSVSQLWIRYALRAINLQPNIRYAISELMRGWSVRYELMKNGKIIQSNKLRVRNGVLQGDSMSPLLYCLAIAPISHNLKTLPKYKVSIPGQDVTLNLNHLFYMDDFKGFAPSNEYLGEIIEKTRGIARSLGLEFNTKKCAWIPTEIQREEAVINLPTLGSKAYTYLGVEESLEVDFDQAWNRIKEKMVVRVEKLLKTEKTWGAFRIGYSACVMPVGRFLYMNTVVGGPSWIKARDLATEFDNTVRKLLRQKPEEGTKGWRFYSACSSRLYVETASGGLGLKSLTEVLYEGIVYCWSYIRCKDDLEIARILFGSRARKGISESVTKGLKKLILRPMKLSEEIMVPAAEGNEAVHGKKGLLVSGQYHDNATRGARAIMKLVKTKVNEVRLEIWKSLPMAGQVINSPVIDNKLSFQWLQRANVGRTVFRNCIAAQEGALKAVELFRKGQTEADVTCRRCKGARESVQHILSGCPVYRTGLMLERHNNVVNQLHATFRRRFDLPKISHNQPVPAVRENNSAKIFYDVRLFTRNVRSTLQGVDNEIRYEGIRHDRPDLVIFDKTMGKIHIVEVCVAWYENLVNQEQIKYHKYATNSEIDDVQVLADPKTRTHGYNIRSLMGELYGKDFKSGVFVTPIVIGTCGEVLPNIVERLGELNIKGKTALQLLEKMQLGAIHGSDRLIRAHLSLSR

SEQ ID NO: 15592 - protein, 1366 aa, Meloidogyne luci
MPLSVWDMSNLQTRPRRHTWADYDVWGTASEKLKMMTSMNKNNKNNKGERREGSEENQPHDVLRELSQERPVARRLSDAVGGLPARRGNKGNLSAARWDRIEEDSMFITWRKAEIRNGRRLTPAEFFEIWEVFRQSTDAGKQGGFGNRSAIALYQRRRELEKRGYRFEGDQLIKQPGLPIEQKTTQHKSKLQNLANNERVLTLGRTYVKDKSPTRSEQVSEARKEKEKERLVHLSLIKQVPKGTKVPANTLKVTASTSDKNKEKAKDKCKENKDNTSSGELLEREALRAEFWRTYHQTIRGKMERKPLRINVSKVKASEWVGLGQCVRECVDRHAQKYGVLKVLNTAVYTAGKTLETSTSAGHKEARRLAAEWKNDRMKECNRLRTHIGWITDEIRRRRSKIKPTPKQRRNFYDLQRCYQVGGRPIRTTNDLMAKNESLKVHLALLKGRIELRARRECEALQKALPLRRKLEEPRGESKLKSAEDARNYWSGIVGKQRPFERTPELTNWSKAVQEKTAKGQQFSSYAEDLRRWQSVLKKARPSKAPGPDGIPNLLWKRLIPANRVLFDWLMGIKKHKLKFPKWLTEGRVVLLPKRGDLSRAENYRPIACLNTMYKLITGVMTAWINDHLTTHDILPYEQRALVKDTWGCTHATILDRTITSHAKATNTCLAAVWVDFAKTFDSVSQPWIRYTLRAINLQPNIRHAVAELMRGWSVRYELLKNGRITQSKKLRVKNGVLQGDSMSPLLYCLAIAPISHNLESLPKYEVSIPGQETTLSLNHLFYMDDFKGFATSNKYLREIIEKTRGIAKPIGLEFNTKKCAWIPAEIQGEEAVIDLPILGNKAYSYLGVEESFEVNFDEAWNRIKEKMVNRIEKLLLTEKTWGSFRTAYSVCVMPVGRFLYMNTVAGGPSWLKARDLASEFDKLVRKLLKQQTNDGAKGWRFYSSCSSRLYVETKSGGLGLKSLIEVLHEGVVYCWSYLQCKNDLEIARILFGSRARKGISESVTKGFRKLILRPMKLSEVIMVPAAEGNETVHGKRGLFVDGQYHENATKGARAIMKLVKAKINDVQLGIWKSLPMAGQVINSPVIDHVLSFHWLKRAKIGRLVFRNCIAAQEGALNAAELFRKGQTEADIKCRRCHAARESVQHILSGCPVYRTGLMLERHNNVVNRLHAMFSRRFGLQQVAHNQPVPAVMENDSAKIYYDVHLFTRNVRATLQGVDKTMRYEGLRHDRPDLVIFDKTTGKIHVVEVCVAWYENLVKQDQIKYHKYATNSEIEDVTVLADPITRTHGYNIRALLGELYGKEFKAGVSVTPIVIGTCGEVLPNIVERLGELNIKGKSALELLDKMQLGAIHGSDRLIRAHLSLSR

SEQ ID NO: 15593 - protein, 1326 aa, Meloidogyne luci
MAININKTYKEVVCGMSRPLEVSRKLSQERQAVGQSSDAVGGSPASRGNKGNLNAAQWDRMEEDSMFMTWRRAEISNGRRLTPAEFFEIWDVFRKSSDASKQGGFGYRSAVALYQRRRVLEKRGYQFEGDQIVKSGLPIEQKAKPHKSKLQNLAINKERVLTLGRAYVKDKSPTQPEQASEVLKEKESLVQLSEEDQVPEGTEVPANRTSKRHPRTSKKNNEKKTEDKGKGDKDNTVSKEQQLEREALRAEFWRTYHRTKGKMERKALRINAGKVKASEWVCLGICVRECVDRHARKYGILKVLNTAVYSAGKTLETRTSVSRKEAQKAFSEWKSDRKRECERIRVHIGWITDEIHRRKTKTEPTFKQRRNFLDLQRRFQVGGRPIRSTKDLMAKSESLKVHLKLLKDRIDLRCKKEREAVEKAKPLRRKLEEPRGESKLKSADDARKYWSGIVGREKAFEKTPELTSWAEAVREKTTKGQQFSNYAEDLRRWNNVLKKARPSKAPGPDGIPNLLWKRLIPANKVLFDWFMGIKKHKLRFPNWLTEGRVVLLPKGDDPSNPANYRPIACLNTMYKLLTGVMTTWISDHLTAHEILPYEQRALVKDTWGCTHATILDRTITSHAKATNTPLAAVWIDFAKAFDSVSQLWIRYALRAINLQPNIRYAISELMRGWSVRYELMKNGKIIQSNKLRVRNGVLQGDSMSPLLYCLAIAPISHNLKTLPKYKVSIPGQDVTLNLNHLFYMDDFKGFAPSNEYLGEIIEKTRGIARSLGLEFNTKKCAWIPTEIQREEAVINLPTLGSKAYTYLGVEESLEVDFDQAWNRIKEKMVVRVEKLLKTEKTWGAFRIGYSACVMPVGRFLYMNTVVGGPSWIKARDLATEFDNTVRKLLRQKPEEGTKGWRFYSACSSRLYVETASGGLGLKSLTEVLYEGIVYCWSYIRCKDDLEIARILFGSRARKGISESVTKGLKKLILRPMKLSEEIMVPAAEGNEAVHGKKGLLVSGQYHDNATRGARAIMKLVKTKVNEVRLEIWKSLPMAGQVINSPVIDNKLSFQWLQRANVGRTVFRNCIAAQEGALKAVELFRKGQTEADVTCRRCKGARESVQHILSGCPVYRTGLMLERHNNVVNQLHATFRRRFDLPKISHNQPVPAVMENNSAKIFYDVRLFTRNVRSTLQGVDNEIRYEGIRHDRPDLVIFDKTMGKIHIVEVCVAWYENLVNQEQIKYHKYATNSEIDDVQVLADPKTRTHGYNIRSLMGELYGKDFKSGVFVTPIVIGTCGEVLPNIVERLGELNIKGKTALQLLEKMQLGAIHGSDRLIRAHLSLSR

SEQ ID NO: 15594 - protein, 1064 aa, Meloidogyne javanica
MERKALRINVGKVKASEWVGLGICVRECVDRHARKYGILKVLNTAVYSAGKTLEARTSVSRKEAQKAFSEWKNDRKKECERIRVHIGWITDEIRRRKSKSEPTFKQRRNFLDLQRCYQVGGRPIRSTKDLMAKNVSLKVHLKLLKDRIDLRCKKECEAVEMAKPLRRKLEEPRGESKLKSADDARKYWSGIVGKEKAFEKTPELTSWAEAVREKTTKGQQFSNYAEDLRRWNNVLKKARPTKAPGPDGIPNLLWKRLIPANKVLFDWFMGIKKHKLRFPNWLTEGRVVLLPKGDDPSNPANYRPIACLNTMYKLLTGVMTTWIGEHLTAHGILPYEQRALVKDTWGCTHATILDRTITSHAKATNTPLAAVWIDFAKAFDSVSQLWIRYALRAINIQPNIRHAIGELMRGWSVRYELMKNGKIIQSNKLRVRNGVLQGDSMSPLLYCLAIAPISHNLKTLPKYKVSVPGQDVTINLNHLFYMDDFKGFAPSNEYLREIIEKTRGIARSLGLEFNTKKCAWIPTEIRGEEAVIELPTLGSKAYTYLGVEESLEVDFDQAWNRIKERMVVRVKKLLKTEKTWGTFRTGYSTCVMPVGRFLYMNTVVGGPSWIKARDLATEFDGTVRKLLRQKSEEGTKGWRFYSACSSRLYVETASGGLGLKSLTEVLYEGIVYCWSYIQCKDDLEIARILFGSRARKGISESVTKGFKKLVLRPMKLSEEIMVPAAEGNEAVHGKKGLFVCGQYHDNATKGARAIMKLVKTKINEVRLEIWKSLPMAGQVINSPIIDNKLSFHWLQKAKVGRTVFRNCIAAQEGALKAVELFRKGQTETDVTCRRCKGARESVQHILSGCPVYRTGLMLERHNNVVNQLHATFRRRFDLPKISHNQPIPAVMESDSAKIFYDVRLFTRNVRAALKGDENEIRYEGLHHDRPDLVIFDKTAGKIHIVEVCVAWYENLVNQENIKYHKYATNSEVEDVQVLANPSTRTHGFNIRALMGELYGKEFKAGVTVTPIVIGTCGEVLPNINERLEELNIKGKTALQLLEKIQLGAIHGSDRLIRAHLSLSR

SEQ ID NO: 15595 - protein, 1325 aa, Meloidogyne floridensis
MAININKTYKEVVCGMSRPLEVSRKLSQERQAVGQSSDAVGGSPASRGNKGNLNAAQWDRMEEDSMFMTWRRAEISNGRRLTPAEFFEIWEVFRKSSDASKQGGFGYRSAVALYQRRRVLEKRGYQFEGDQIVKSGLPIEQKAKPHKSKLQNLAINRERVLTLGRAYVKDKSPTQPEQASEVLKEKESLVQLSEEEVPEGTEVPANRTSKRHPRTSKKNNEKKTEDKGKGDKDNTVSKEQQLEREALRAEFWRTYHRTKGKMERKALRINAGKVKASEWVCLGICVRECVDRHARKYGILKVLNTAVYSAGKTLETRTSVSRKEAQKAFSEWKSDRKRECERIRVHIGWITDEIHRRKTKTEPTFKQRRNFLDLQRRFQVGGRPIRSTKDLMAKSESLKVHLKLLKDRIDLRCKKEREAVEKAKPLRRKLEEPRGESKLKSADDARKYWSGIVGREKAFEKTPELTSWAEAVREKTTKGQQFSNYAEDLRRWNNVLKKARPSKAPGPDGIPNLLWKRLIPANKVLFDWFMGIKKHKLRFPNWLTEGRVVLLPKGDDPSNPANYRPIACLNTMYKLLTGVMTTWISDHLTAHEILPYEQRALVKDTWGCTHATILDRTITSHAKATNTPLAAVWIDFAKAFDSVSQLWIRYALRAINLQPNIRYAISELMRGWSVRYELMKNGKIIQSNKLRVRNGVLQGDSMSPLLYCLAIAPISHNLKTLPKYKVSIPGQDVTLNLNHLFYMDDFKGFAPSNEYLGEIIEKTRGIARSLGLEFNTKKCAWIPTEIQREEAVINLPTLGSKAYTYLGVEESFEVDFDQAWNRIKEKMVVRVEKLLKTEKTWGAFRIGYSACVMPVGRFLYMNTVVGGPSWIKARDLATEFDNTVRKLLRQKPEEGTKGWRFYSACSSRLYVETASGGLGLKSLTEVLYEGIVYCWSYIRCKDDLEIARILFGSRARKGISESVTKGLKKLILRPMKLSEEIMVPAAEGNEAVHGKKGLFVSGQYHDNATRGARAIMKLVKTKVNEVRLEIWKSLPMAGQVINSPVIDNKLSFQWLQRANVGRTVFRNCIAAQEGALKAVELFRKGQTEADVTCRRCKGARESVQHILSGCPVYRTGLMLERHNNVVNQLHATFRRRFDLPKISHNQPVPAVMENNSAKIFYDVRLFTRNVRSTLQGVDNEIRYEGIRHDRPDLVIFDKTMGKIHIVEVCVAWYENLVNQEQIKYHKYATNSEIDDVQVLADPKTRTHGYNIRSLMGELYGKDFKSGVFVTPIVIGTCGEVLPNIVERLGELNIKGKTALQLLEKMQLGAIHGSDRLIRAHLSLSR

SEQ ID NO: 15596 - protein, 1331 aa, Meloidogyne luci
MVASHNKNKNKEVEMREVEEGNQPHEVPREPSQERCAVRQLSDAVGGSPARRGNKGNLSAARWDQTEEDSMFITWRKAEIRDGRRLTPAEFLIIWEDFRKSSATGKQGGFGFRTAKALYLRRRELEKRGYQLEGDQIAKPGLPIERKAKPHKSKLQNLADNERVLTLGRAYVKDKSPTRPEQPSEVNTEKEEGIVQPSKEKEKVPEGTKVSTNTSKRLVTSKEIKGKKTEDKSKGDKDCTNTCEQLEREALRTVFWKTYYQTIKGKMERKALRINVSKVKASEWSGLGQCVRECVDRHARRYGILKVLNTAVYTAGKTLETSTSLGQVEARRLAAEWKCDRMKECNRLRTHIGWISDEIRRRRSKNNPTPKQRRNFLDLQRCYQVGGRPIRTTNDLMAKNESLKAHLAMLKARIELRSRGEREALEKAKPLRRKLEEPRGESKLKSAEDARNYWAGIVGKQKVFERTPELANWASAMQEKTVKGQEFGSQAEDLRRWNAVLKKARPSKAPGPDGIPNLLWKRLIPANRVLFDWLMGIKKHKLKFPKWLTEGRVVLLPKGGDLSKSENYRPIACLNTMYKLITGVMTTWINDHLTAHDILPYEQRALVKDTWGCTHATILDRTITSHAKATNAPLAAVWIDFAKAFDSVSQPWIRYALRAINLQPNVRHAVAELMRGWSVRYELLKNGKIIQSKKLRVKNGVLQGDSMSPLLYCLAIAPISHSLETLPKYKVSVPGQETTLSLNHLFYMDDFKGFANSNEEMKVIINRTKGIAKSLGLEFNARKCAWISNENQGEGTAVIDLPTLGSKAYTYLGVEESFEIDFEGAWNRIKEKMVSRIEKLLVTEKTWGSFRTAYSMCVMPVGRFLYMNTIAGGPSWLKARDLASEFDKMVRKLLKQQTEEGAKGWRFQNASTSRLYVETKSGGLGLKSLTQVLYEGIVYCWSYLHCKNDLEIARILFGSRARKGIPESVSKGFRKLVLRPMKLSEEIMVPAAEGNEAVHGKKGMFVAGQYHDNATKGARAIMKLVRAKFNEVHLGIWKSLPMAGQVANSPAIDQVLSFQWLKRAKVGRTVFRNCIAAQEGALNAAELFRKGQTEADVKCRRCHAARESVQHILSGCPVYRTGLMLERHNNVVNSLHATFSRRFGLPRIAPNQPVPAVMENDSAKIYYDVRLFTRNVRATLQGDDNATRYEGLRHDRPDLVVFDKTTGKIHIVEVCVAWYDNLVNQENIKYHKYATNSEVEDVQVLANPKTRTHGYNVRALMGELYGKEFKAGVSVTPIVIGTCGEVLPNIIERMGELNIKGKSALELLDKMQLGAIHGSDRLIRAHLSLSR

SEQ ID NO: 15597 - protein, 1329 aa, Meloidogyne luci
MVASHNKNKEVEMREVEEGNQPHEVPREPSQERCAVRQLSDAVGGSPARRGNKGNLSAARWDQTEEDSMFITWRKAEIRDGRRLTPAEFLIIWEDFRKSSATGKQGGFGFRTAKALYLRRRELEKRGYQLEGDQIAKPGLPIERKAKPHKSKLQNLADNERVLTLGRAYVKDKSPTRPEQPSEVNTEKEEGIVQPSKEKEKVPEGTKVSTNTSKRLVTSKEIKGKKTEDKSKGDKDCTNTCEQLEREALRTVFWKTYYQTIKGKMERKALRINVSKVKASEWSGLGQCVRECVDRHARRYGILKVLNTAVYTAGKTLETSTSLGQVEARRLAAEWKCDRMKECNRLRTHIGWISDEIRRRRSKNNPTPKQRRNFLDLQRCYQVGGRPIRTTNDLMAKNESLKAHLAMLKARIELRSRGEREALEKAKPLRRKLEEPRGESKLKSAEDARNYWAGIVGKQKVFERTPELANWASAMQEKTVKGQEFGSQAEDLRRWNAVLKKARPSKAPGPDGIPNLLWKRLIPANRVLFDWLMGIKKHKLKFPKWLTEGRVVLLPKGGDLSKSENYRPIACLNTMYKLITGVMTTWINDHLTAHDILPYEQRALVKDTWGCTHATILDRTITSHAKATNAPLAAVWIDFAKAFDSVSQPWIRYALRAINLQPNVRHAVAELMRGWSVRYELLKNGKIIQSKKLRVKNGVLQGDSMSPLLYCLAIAPISHSLETLPKYKVSVPGQETTMSLNHLFYMDDFKGFANSNEEMKVIINRTKGIAKSLGLEFNARKCAWISNENQGEGTAVIDLPTLGSKAYTYLGVEESFEIDFEGAWNRIKEKMVSRIEKLLVTEKTWGSFRTAYSMCVMPVGRFLYMNTIAGGPSWLKARDLASEFDKMVRKLLKQQTEEGAKGWRFQNASTSRLYVETKSGGLGLKSLTQVLYEGIVYCWSYLHCKNDLEIARILFGSRARKGIPESVSKGFRKLVLRPMKLSEEIMVPAAEGNEAVHGKKGMFVAGQYHDNATKGARAIMKLVRAKFNEVHLGIWKSLPMAGQVANSPAIDQVLSFQWLKRAKVGRTVFRNCIAAQEGALNAAELFRKGQTEADVKCRRCHAARESVQHILSGCPVYRTGLMLERHNNVVNSLHATFSRRFGLPRIAPNQPVPAVMENDSAKIYYDVRLFTRNVRATLQGDDNATRYEGLRHDRPDLVVFDKTTGKIHIVEVCVAWYDNLVNQENIKYHKYATNSEVEDVQVLANPKTRTHGYNVRALMGELYGKEFKAGVSVTPIVIGTCGEVLPNIIERMGELNIKGKSALELLDKMQLGAIHGSDRLIRAHLSLSR

SEQ ID NO: 15598 - protein, 1331 aa, Meloidogyne luci
MVASHNKNKNKEVEMREVEEGNQPHEVPREPSQERCAVRQLSDAVGGSPARRGNKGNLSAARWDQTEEDSMFITWRKAEIRDGRRLTPAEFLIIWEDFRKSSATGKQGGFGFRTAKALYLRRRELEKRGYQLEGDQIAKPGLPIERKAKPHKSKLQNLADNERVLTLGRAYVKDKSPTRPEQPSEVNTEKEEGIVQPSKEKEKVPEGTKVSTNTSKRLVTSKEIKGKKTEDKSKGDKDCTNTCEQLEREALRTVFWKTYYQTIKGKMERKALRINVSKVKASEWSGLGQCVRECVDRHARRYGILKVLNTAVYTAGKTLETSTSLGQVEARRLAAEWKCDRMKECNRLRTHIGWISDEIRRRRSKNNPTPKQRRNFLDLQRCYQVGGRPIRTTNDLMAKNESLKAHLAMLKARIELRSRGEREALEKAKPLRRKLEEPRGESKLKSAEDARNYWAGIVGKQKVFERTPELANWASAMQEKTVKGQEFGSQAEDLRRWNAVLKKARPSKAPGPDGIPNLLWKRLIPANRVLFDWLMGIKKHKLKFPKWLTEGRVVLLPKGGDLSKSENYRPIACLNTMYKLITGVMTTWINDHLTAHDILPYEQRALVKDTWGCTHATILDRTITSHAKATNAPLAAVWIDFAKAFDSVSQPWIRYALRAINLQPNVRHAVAELMRGWSVRYELLKNGKIIQSKKLRVKNGVLQGDSMSPLLYCLAIAPISHSLETLPKYKVSVPGQETTLSLNHLFYMDDFKGFANSNEEMKVIINRTKGIAKSLGLEFNARKCAWISNENQGEGTAVIDLPTLGSKAYTYLGVEESFEIDFEGAWNRIKEKMVSRIEKLLVTEKTWGSFRTAYSMCVMPVGRFLYMNTIAGGPSWLKARDLASEFDKMVRKLLKQQTEEGAKGWRFQNASTSRLYVETKSGGLGLKSLTQVLYEGIVYCWSYLHCKNDLEIARILFGSRARKGIPESVSKGFRKLVLRPMKLSEEIMVPAAEGNEAVHGKKGMFVAGQYHDNATKGARAIMKLVRAKFNEVHLGIWKSLPMAGQVANSPAIDQVLSFQWLKRAKVGRTVFRNCIAAQEGALNAAELFRKGQTEADVKCRRCHAARESVQHILSGCPVYRTGLMLERHNNVVNSLHATFSRRFGLPRIAPNQPVPAVMENDSAKIYYDVRLFTRNVRATLQGDDNATRYEGLRHDRPDLVVFDKTTGKIHIVEVCVAWYDNLVNQENIKYHKYATNSEVEDVQVLANPKTRTHGYNVRALMGELYGKEFKAGVSVTPIVIGTCGEVLSNIIERMGELNIKGKSALELLDKMQLGAIHGSDRLIRAHLSLSR

SEQ ID NO: 15599 - protein, 1269 aa, Oryctes borbonicus
MGSDSPGPSGTLVDDPAMLGSKAKTTVATSKGAVPKRPLLTAPKPVKAGTRPAAKSIPEHGTKKSSGPSQRATEIPAAQSRFCCETCGVSYSARANLARHAKECGSRDRTKCLYCPSTYDSFAAVRLHERRAHLEQYRAELESRLGAPAPVVMAQIAAIEAKTRKGVPFYKEMRTVTGLTDHQIRSRREKPEYKKYLERARQELKEGSLRTFTKKIAVLPKPSKEPTPGTSVAAPPPSPAPEQTPTPPSLAESHPRISISSTDSDVFIVGQETALPQPHQMLQPPSPGASPRRSEPRGPKEKRLRLSSPLQQPPTKRRAAAVSLSGTHDAGNAPSVDRSAASVKRKRTVASPSTERDAPTPMRPRLATLHGSPKRPDGPPPSPPPRVRPRLSVSTNDIRPVDSLIPVSDESNILDEAFLRRLATLRPTADEFTRELIGLGLSGTIPDLDRAITIWLQRAFPAKARRTCTQQSGLRDESLPTPTSRQRRASAFKKAQDLYQKDRSLLAEKILTGSPMLQEEVQPNIRDVEDLYADIYERRTETDLAPATDTRESATVFQPVGKEEIVAAIKTWSNSAPGPDGITVAQVKRCPTNLLEALFNIILYRRMTPTSWKASRTILIPKDGNRADPSNWRPITIGPALQRLLHRILARRLSAALDLHPAQRGFRNTDGTLANITMLEHYIKYRRLKGKTYNIVSLDVRKAFDTVSHAAIFRALERFNVDAGIREYIRSTLAEAYTTIQVGGRITRKIHLRNGVKQGDPLSPLLFNAVVDELIGALNRTQPGGTLSPACKIAAMAFADDILLLEDRDLDVPISLGTACEFFKSRGMALNPTKCTSISAAVVSGKSVPRSRPSFKIDGRYVQALGGLNSFKYLGLRFGSRGVLKPGVHNLTIWLRNLERSPLKPHQKLNILKTYLVPRLHYGLQSPGVTGGILQESDRLVRRTARKILHLNVHTGSQFLHARVRDGGLGLVQLRYKVPCILLRRLENLKQEQDITNWNSIFSIDGPARAFYFRAMTLASKGDPDSFWKEEIVIRPYSAGLQDAADDASSRRWIGEVPRGWAARDYVRAVQLRTGNLPTQALPYNPPGQRRCRHGCNRNESLSHVLQGCPATHHERIQRHNEIVSKLARHTRKKGWNTEVEPYVYHQDGQLFKPDLAIHLPNNTLVICDAQVCWEGPRPLATSWDNKRLVYDNVRFREAARRHWGEKRYIFSPLLLGARGIWPRCNLPTTNILVIPSYLRASCVHSCLKWGSTIHRRFMAGVWRRRPPE

SEQ ID NO: 15600 - protein, 1224 aa, Trypoxylus dichotomus
MIAPKPGEAGMRPPAQKKILSRAKKDSGPLQGATTVTTAGPSRFCCETCGVSYTSKANLARHAKDCGKRDRTKCTYCPLTFDSFAAVRQHERRAHQEQYREELESRLGAPEAMLMEKLAKIEARAIKGAPFLKEMTVATGLTMHQVRSRRERPEYARYLDRARREVKESSLRTFKKTAAPLSTRIVPAPKITSAATPPSAPSSAPSPLSSAPPPIELSDTDSEVEIVQVDKPATPKPQKPPIRTLGKPGGGETSAVSEKRHRLSSPLKPPAKRRDIRPEGDRGTLEASTKTPLGRGPAEKRKRSTPTSDDQPPIRPRLATHHGSPRRADDPPPSPPPRVPRRLSISATELRSIGGPSSPTVPIEILDEAFLSCLVTSRSSVDDATKALIGVGLSGQKEELDEAITNWLMTAFPVDRRKRPTTSTPNVRPPPPTTSRQRRMSAYKKAQDLFQKDRTALAERVLTGCPLLAEEVYPKIKDVEDFYAGIYERPAPTDPRPVTISGESESVFKPVTSEEITASIKTWANSAPGPDGITIALIKRCPTNLLEVLFNIILYRRMTPTAWKTSRTILIPKEGDRRDPANWRPITIGPALQRLLHRVLAKRLGKAVPLHPAQRGFRSIDGTLANLVLLEHYVKARRLKGKSYNVVSLDVRKAFDTVSHAAILRALRRLNLDLGLQEYIKSTLADAHTTISVGGSSTRSLQINNGVKQGDPLSPFLFNAVLDELIGILNERQPGGTLTPECRVSAMAFADDILLLEDRDLDVPISLGTTMDFLSASGMELNPSKCSSISASVVSGKSVPRSRPVFKIDGQWIRVLAGPSSFRYLGLLFGSQGALKPSLHNLIGWLNNLERCPLKPHQKFCLLKTYIVPRLFYGLQSPALTGGILQEGDRLIRRTARRILHLNVHTGSQFLHARIRDGGLGLVQLRYKIPVILLRRLDNLRQDGKDITKWETVFNIDGPAQSLYYRVKGLASRGDPDPYWREQIATRPYSAGLQDAADDGASRRWIDSIPRGWAPRDYISAVQLRTGNLPTQALPYRAAGQRGCRHGCPRVESLSHVLQGCPATHNERIRRHDEVVAKLARHTRGKGWRTEVEPYVYHQDGQLFKPDLAIHQPNDTLVICDAQVCWEGPRTLATSWDNKRLVYDNVRFREAAARHWGKKTLVFSPILLGARGVWPRCNKPTTDILGIPPILRSSCVCSCLKWGPTLHRRFMAGVWRRRPPDRRP

SEQ ID NO: 15601 - protein, 1224 aa, Trypoxylus dichotomus
MIAPKPGEAGMRPPAQKKILSRAKKDSGPLQGATTVTTAGPSRFCCETCGVSYTSKANLARHAKDCGKRDRSKCTYCPLTFDSFAAVRQHERRAHQEQYREELESRLGAPEAELMEKLAKIEARAIKGAPFLKEMTVATGLTMHQVRSRRERPEYARYLDRARREVKESSLRTFKKTAAPLSTRIVPAPKITSAATPPSAPSSAPSPLSSAPPPIELSDTDSEVEIVQVDKPATPKPQKPPIRTLGKPGGGETSAVSEKRHRLSSPLKPPAKRRDIRPEGDRGTLEASTKIPLGRGPAEKRKRSTPTSDDQPPIRPRLATHHGSPRRADDPSPSPPPRVPRRLSISATELRSIGGPSSPTVPIEILDEAFLSCLVTSRSSVDDATKALIGVGLSGQKEELDEAITNWLMTAFPVDRRKRPTTSTPNVRPPPPTTSRQRRMSAYKKAQDLFQKDRTALAERVLTGCPLLAEEVYPKIKDVEDFYAGIYERPAPADPRPVTISGESESVFKPVTSEEITASIKTWANSAPGPDGITIALIKRCPTNLLEVLFNIILYRRMTPTAWKTSRTILIPKEGDRRDPANWRPITIGPALQRLLHRVLAKRLGKAVPLHPAQRGFRSIDGTLANLVLLEHYVKARRLKGKSYNVVSLDVRKAFDTVSHAAILRALRRLNLDLGLQEYIKSTLADAHTTISVGGSSTRSLQINNGVKQGDPLSPFLFNAVLDELIGILNERQPGGTLTPECRVSAMAFADDILLLEDRDLDVPISLGTTMDFLSASGMELNPSKCSSISASVVSGKSVPRSRPVFKIDGQWIRVLAGPSSFRYLGLLFGSQGALKPSLHNLIGWLNNLERCPLKPHQKFCLLKTYIVPRLFYGLQSPALTGGILQEGDRLIRRTARRILHLNVHTGSQFLHARIRDGGLGLVQLRYKIPVILLRRLDNLRQDGKDITKWETVFNIDGPAQSLYYRVKGLASRGDPDPYWREQIATRPYSAGLQDAADDGASRRWIDSIPRGWAPRDYISAVQLRTGNLPTQALPYRAAGQRGCRHGCPRVESLSHVLQGCPATHNERIRRHDEVVAKLARHTRGKGWRTEVEPYVYHQDGQLFKPDLAIHQPNDTLVICDAQVCWEGPRTLATSWDNKRLVYDNVRFREAAARHWGKKTLVFSPILLGARGVWPRCNKPTTDILGIPPILRSSCVCSCLKWGPTLHRRFMAGVWRRRPPDRRP

SEQ ID NO: 15602 - protein, 1224 aa, Trypoxylus dichotomus
MIAPKPGEAGMRPPAQKKILSRAKKDSGPLQGATTVTTAGPSRFCCETCGVSYTSKANLARHAKVCGKRDRTKCTYCPLTFDSFAAVRQHERRAHQEQYREELESRLGAPEAMLMEKLAKIEARAIKGAPFLKEMTVATGLTMHQVRSRRERPEYARYLDRARREVRESSLRTFKKTAAPLSTRIVPAPKITSAATPPSAPSSAPSPLSSAPPPIELSDTDSEVEIVQVDKPATPKPQKPPIRTLGKPGGGETSAVSEKRHRLSSPLKPPAKRRDIRPEGDRGTLEASTKTPLGRGPAEKRKRSTPTSDDQPPIRPRLATHHGSPRRADDPPPSPPPRVPRRLSISATELRSIGGPSSPTVPIEILDEAFLSCLVTSRSSVDDATKALIGVGLSGQKEELDEAITNWLMTAFPVDRRKRPTTSTPNVRPPPPTTSRQRRMSAYKKAQDLFQKDRTALAERVLTGCPLLAEEVYPKIKDVEDFYAGIYERPAPTDPRPVTISGESESVFKPVTSEEITASIKTWANSAPGPDGITIALIKRCPTNLLEVLFNIILYRRMTPTAWKTSRTILIPKEGDRRDPANWRPITIGPALQRLLHRVLAKRLGKAVPLHPAQRGFRSIDGTLANLVLLEHYVKARRLKGKSYNVVSLDVRKAFDTVSHAAILRALRRLNLDLGLQEYIKSTLADAHTTISVGGSSTRSLQINNGVKQGDPLSPFLFNAVLDELIGILNERQPGGTLTPECRVSAMAFADDILLLEDRDLDVPISLGTTMDFLSASGMELNPSKCSSISASVVSGKSVPRSRPVFKIDGQWIRVLAGPSSFRYLGLLFGSQGALKPSLHNLIGWLNNLERCPLKPHQKFCLLKTYIVPRLFYGLQSPALTGGILQEGDRLIRRTARRILHLNVHTGSQFLHARIRDGGLGLVQLRYKIPVILLRRLDNLRQDGKDITKWETVFNIDGPAQSLYYRVKGLASRGDPDPYWREQIATRPYSAGLQDAADDGASRRWIDSIPRGWAPRDYISAVQLRTGNLPTQALPYRAAGQRGCRHGCPRVESLSHVLQGCPATHNERIRRHDEVVAKLARHTRGKGWRTEVEPYVYHQDGQLFKPDLAIHQPNDTLVICDAQVCWEGPRTLATSWDNKRLVYDNVRFREAAARHWGKKTLVFSPILLGARGVWPRCNKPTTDILGIPPILRSSCVCSCLKWGPTLHRRFMAGVWRRRPPDRRP

SEQ ID NO: 15603 - protein, 1224 aa, Trypoxylus dichotomus
MIAPKPGEAGMRPPAQKKILSRAKKDSGPLQGATTVTTAGPSRFCCETCGVSYTSKANLARHAKDCGKRDRTKCTYCPLTFDSFAAVRQHERRAHQEQYREELESRLGAPEAMLMEKLAKIEARAIKGAPFLKEMTVATGLTMHQVRSRRERPEYARYLDRARREVKESSLRTFKKTAAPLSTRIVPAPKITSAATPPSAPSSAPSPLSSAPPPIELSDTDSEVEIVQVDKPATPKPQKPPIRTLGKPGGGETSAVSEKRHRLSSPLKPPAKRRDIRPEGDRGTLEASTKTPLGRGPAEKRKRSTPTSDDQPPIRPRLATHHGSPRRADDPPPSPPPRVPRRLSISATELRSIGGPSSPTVPIEILDEAFLSCLVTSRSSVDDATKALIGVGLSGQKEELDEAITNWLMTAFPVDRRKRPTTSTPNVRPPPPTTSRQRRMSAYKKAQDLFQKDRTALAERVLTGCPLLAEEVYPKIKDVEDFYAGIYERPAPTDPRPVTISGESESVFKPVTSEEITASIKTWANSAPGPDGITIALIKRCPTNLLEVLFNIILYRRMTPTAWKTSRTILIPKEGDRRDPANWRPITIGPALQRLLHRVLAKRLGKAVPLHPAQRGFRSIDGTLANLVLLEHYVKARRLKGKSYNVVSLDVRKAFDTVSHAAILRALRRLNLDLGLQEYIKSTLADAHTTISVGGSSTRSLQINNGVKQGDPLSPFLFNAVLDELIGILNERQPGGTLTPECRVSAMAFADDILLLEDRDLDVPISLGTTMDFLSASGMELNPSKCSSISASVVSGKSVPRSRPVFKIDGQWIRVLAGPSSFRYLGLLFGSQGALKPSLHNLIGWLNNLERCPLKPHQKFCLLKTYIVPRLFYGLQSPALTGGILQEGDRLIRRTARRILHLNVHTGSQFLHARIRDGGLGLVQLRYKIPVILLRRLDNLRQDGKDITKWETVFNIDGPAQSLYYRVKGLASRGDPDPYWREQIATRPYSAGLQDAADDGASRRWIDSIPRGWAPRDYISAVQLRTGNLPTQALPYRAAGQRGCRHGCPRVESLSHVLQGCPATHNERIRRHGEVVAKLARHTRGKGWRTEVEPYVYHQDGQLFKPDLAIHQPNDTLVICDAQVCWEGPRTLATSWDNKRLVYDNVRFREAAARHWGKKTLVFSPILLGARGVWPRCNKPTTDILGIPPILRSSCVCSCLKWGPTLHRRFMAGVWRRRPPDRRP

SEQ ID NO: 15604 - protein, 910 aa, Trypoxylus dichotomus
MTLLTTHHGSPRRADDPPPSPPPRVPRRLSISATELRSIGGPSSPTVPIEILDEAFLSCLVTSRSSVDDATKALIGVGLSGQKEELDEAITNWLMTAFPVDRRKRPTTSTPNVRPPPPTTSRQRRMSAYKKAQDLFQKDRTALAERVLTGCPLLAEEVYPKIKDVEDFYAGIYERPAPTDPRPVTISGESESVFKPVTSEEITASIKTWANSAPGPDGITIALIKRCPTNLLEVLFNIILYRRMTPTAWKTSRTILIPKEGDRRDPANWRPITIGPALQRLLHRVLAKRLGKAVPLHPAQRGFRSIDGTLANLVLLEHYVKARRLKGKSYNVVSLDVRKAFDTVSHAAILRALRRLNLDLGLQEYIKSTLADAHTTISVGGSSTRSLQINNGVKQGDPLSPFLFNAVLDELIGILNERQPGGTLTPECRVSAMAFADDILLLEDRDLDVPISLGTTMDFLSASGMELNPSKCSSISASVVSGKSVPRSRPVFKIDGQWIRVLAGPSSFRYLGLLFGSQGALKPSLHNLIGWLNNLERCPLKPHQKFCLLKTYIVPRLFYGLQSPALTGGILQEGDRLIRRTARRILHLNVHTGSQFLHARIRDGGLGLVQLRYKIPVILLRRLDNLRQDGKDITKWETVFNIDGPAQSLYYRVKGLASRGDPDPYWREQIATRPYSAGLQDAADDGASRRWIDSIPRGWAPRDYISAVQLRTGNLPTQALPYRAAGQRGCRHGCPRVESLSHVLQGCPATHNERIRRHDEVVAKLARHTRGKGWRTEVEPYVYHQDGQLFKPDLAIHQPNDALVICDAQVCWEGPRTLATSWDNKRLVYDNVRFREAAARHWGKKTLVFSPILLGARGVWPRCNKPTTDILGIPPILRSSCVCSCLKWGPTLHRRFMAGVWRRRPPDRRP

SEQ ID NO: 15605 - protein, 1224 aa, Trypoxylus dichotomus
MIAPKPGEAGMRPPAQKKILSRAKKDSGPLQGATTVTTAGPSRFCCETCGVSYTSKANLARHAKDCGKRDRTKCTYCPLTFDSFAAVRQHERRAHQEQYREELESRLGAPEAMLMEKLAKIEARAIKGAPFLKEMTVATGLTMHQVRSRRERPEYARYLDRARREVKESSLRTFKKTAAPLSTRIVPAPKITSAATPPSAPSSAPSPLSSAPPPIELSDTDSEVEIVQVDKPATPKPQKPPIRTLGKPGGGETSAVSEKRHRLSSPLKPPAKRRDIRPEGDRGTLEASTKTPLGRGPAEKRKRSTPTSDDQPPIRPRLATHHGSPRRADDPPPSPPPRVPRRLSISATELRSIGGPSSPTVPIEILDEAFLSCLVTSRSSVDDATKALIGVGLSGQKEELDEAITNWLMTAFPVDRRKRPTTSTPNVRPPPPTTSRQRRMSAYKKAQDLFQKDRTALAERVLTGCPLLAEEVYPKIKDVEDFYAGIYERPAPTDPRPVTISGESESVFKPVTSEEITASIKTWANSAPGPDGITIALIKRCPTNLLEVLFNIILYRRMTPTAWKTSRTILIPKEGDRRDPANWRPITIGPALQRLLHRVLAKRLGKAVPLHPAQRGFRSIDGTLANLVLLEHYVKARRLKGKSYNVVSLDVRKAFDTVSHAAILRALRRLNLDLGLQEYIKSTLADAHTTISVGGSSTRSLQINNGVKQGDPLSPFLFNAVLDELIGILNERQPGGTLTPECRVSAMAFADDILLLEDRDLDVPISLGTTMDFLSASGMELNPSKCSSISASVVSGKSVPRSRPVFKIDGQWIRVLAGPSSFRYLGLLFGSRGALKPSLHNLIGWLNNLERCPLKPHQKFCLLKTYIVPRLFYGLQSPALTGGILQEGDRLIRRTARRILHLNVHTGSQFLHARIRDGGLGLVQLRYKIPVILLRRLDNLRQDGKDITKWETVFNIDGPAQSLYYRVKGLASRGDPDPYWREQIATRPYSAGLQDAADDGASRRWIDSIPRGWAPRDYISAVQLRTGNLPTQALPYRAAGQRGCRHGCPRVESLSHVLQGCPATHNERIRRHDEVVAKLARHTRGKGWRTEVEPYVYHQDGQLFKPDLAIHQPNDTLVICDAQVCWEGPRTLATSWDNKRLVYDNVRFREAAARHWGKKTLVFSPILLGARGVWPRCNKPTTDILGIPPILRSSCVCSCLKWGPTLHRRFMAGVWRRRPPDRRP

SEQ ID NO: 15606 - protein, 1224 aa, Trypoxylus dichotomus
MIAPKPGEAGMRPPAQKKILSRAKKDSGPLQGATTVTTAGPSRFCCETCGVSYTSKANLARHAKDCGKRDRSKCTYCPLTFDSFAAVRQHERRAHQEQYREELESRLGAPEAELMEKLAKIEARAIKGAPFLKEMTVATGLTMHQVRSRRERPEYARYLDRARREVKESSLRTFKKTAAPLSTRIVPAPKITSAATPPSAPSSAPSPLSSAPPPIELSDTDSEVEIVQVDQPATPKPQKPPIRTLGKPGGGETSAVSEKRHRLSSPLKPPAKRRDIRPEGDRGTLEASTKTPLGRGPAEKRKRSTPTSDDQPPIRPRLATHHGSPRRADDPSPSPPPRVPRRLSISATELRSIGGPSSPTVPIEILDEAFLSCLVTSRSSVDDATKALIGVGLSGQKEELDEAITNWLMTAFPVDRRKRPTTSTPNVRPPPPTTSRQRRMSAYKKAQDLFQKDRTALAERVLTGCPLLAEEVYPKIKDVEDFYAGIYERPAPADPRPVTISGESESVFKPVTSEEITASIKTWANSAPGPDGITIALIKRCPTNLLEVLFNIILYRRMTPTAWKTSRTILIPKEGDRRDPANWRPITIGPALQRLLHRVLAKRLGKAVPLHPAQRGFRSIDGTLANLVLLEHYVKARRLKGKSYNVVSLDVRKAFDTVSHAAILRALRRLNLDLGLQEYIKSTLADAHTTISVGGSSTRSLQINNGVKQGDPLSPFLFNAVLDELIGILNERQPGGTLTPECRVSAMAFADDILLLEDRDLDVPISLGTTMDFLSASGMELNPSKCSSISASVVSGKSVPRSRPVFKIDGQWIRVLAGPSSFRYLGLLFGSQGALKPSLHNLIGWLNNLERCPLKPHQKFCLLKTYIVPRLFYGLQSPALTGGILQEGDRLIRRTARRILHLNVHTGSQFLHARIRDGGLGLVQLRYKIPVILLRRLDNLRQDGKDITKWETVFNIDGPAQSLYYRVKGLASRGDPDPYWREQIATRPYSAGLQDAADDGASRRWIDSIPRGWAPRDYISAVQLRTGNLPTQALPYRAAGQRGCRHGCPRVESLSHVLQGCPATHNERIRRRDEVVAKLARHTRGKGWRTEVEPYVYHQDGQLFKPDLAIHQPNDTLVICDAQVCWEGPRTLATSWDNKRLVYDNVRFREAAARHWGKKTLVFSPILLGARGVWPRCNKPTTDILGIPPILRSSCVCSCLKWGPTLHRRFMAGVWRRRPPDRRP

SEQ ID NO: 15607 - protein, 1097 aa, Trypoxylus dichotomus
MTLFLKEMTVATGLTMHQVRSRRERPEYARYLDRARREVKESSLRTFKKTAAPLSTRIVPAPKITSAATPPSAPSSAPSPLSSAPPPIELSDTDSEVEIVQVDKPATPKPQKPPIRTLGKPGGGETSAVSEKRHRLSSPLKPPAKRRDIRPEGDRGTLEASTKTPLGRGPAEKRKRSTPTSDDQPPIRPRLATHHGSPRRADDPPPSPPPRVPRRLSISATELRSIGGPSSPTVPIEILDEAFLSCLVTSRSSVDDATKALIGVGLSGQKEELDEAITNWLMTAFPVDRRKRPTTSTPNVRPPPPTTSRQRRMSAYKRAQDLFQKDRTALAERVLTGCPLLAEEVYPKIKDVEDFYAGIYERPAPTDPRPVTISGESESVFKPVTSEEITASIKTWANSAPGPDGITIALIKRCPTNLLEVLFNIILYRRMTPTAWKTSRTILIPKEGDRRDPANWRPITIGPALQRLLHRVLAKRLGKAVPLHPAQRGFRSIDGTLANLVLLEHYVKARRLKGKSYNVVSLDVRKAFDTVSHAAILRALRRLNLDLGLQEYIKSTLADAHTTISVGGSSTRSLQINNGVKQGDPLSPFLFNAVLDELIGILNERQPGGTLTPECRVSAMAFADDILLLEDRDLDVPISLGTTMDFLSASGMELNPSKCSSISASVVSGKSVPRSRPVFKIDGQWIRVLAGPSSFRYLGLLFGSQGALKPSLHNLIGWLNNLERCPLKPHQKFCLLKTYIVPRLFYGLQSPALTGGILQEGDRLIRRTARRILHLNVHTGSQFLHARIRDGGLGLVQLRYKIPVILLRRLDNLRQDGKDITKWETVFNIDGPAQSLYYRVKGLASRGDPDPYWREQIATRPYSAGLQDAADDGASRRWIDSIPRGWAPRDYISAVQLRTGNLPTQALPYRAAGQRGCRHGCPRVESLSHVLQGCPATHNERIRRHDEVVAKLARHTRGKGWRTEVEPYVYHQDGQLFKPDLAIHQPNDTLVICDAQVCWEGPRTLATSWDNKRLVYDNVRFREAAARHWGKKTLVFSPILLGARGVWPRCNKPTTDILGIPPILRSSCVCSCLKWGPTLHRRFMAGVWRRRPPDRRP

SEQ ID NO: 15608 - protein, 1224 aa, Trypoxylus dichotomus
MIAPKPGEAGMRPPAQKKILSRAKKDSGPLQGATTVTTAGPSRFCCETCGVSYTSKANLARHAKDCGKRDRSKCTYCPLTFDSFAAVRQHERRAHQEQYREELESRLGAPEAELMEKLAKIEARAIKGAPFLKEMTVATGLTMHQVRSRRERPEYARYLDRARREVKESSLRTFKKTAAPLSTRIVPAPKITSAATPPSAPSSAPSPLSSAPPPIELSDTDSEVEIVQVDKPATPKPQKLPIRTLGKPGGGETSAVSEKRHRLSSPLKPPAKRRDIRPEGDRGTLEASTKTPLGRGPAEKRKRSTPTSDDQPPIRPRLATHHGSPRRADDPPPSPPPRVPRRLSISATELRSIGGPSSPTVPIEILDEAFLSCLVTSRSSVDDATKALIGVGLSGQKEELDEAITNWLMTAFPVDRRKRPTTSTPNVRPPPPTTSRQRRMSAYKKAQDLFQKDRTALAERVLTGCPLLAEEVYPKIKDVEDFYAGIYERPAPTDPRPVTISGESESVFKPVTSEEITASIKTWANSAPGPDGITIALIKRCPTNLLEVLFNIILYRRMTPTAWRTSRTILIPKEGDRRDPANWRPITIGPALQRLLHRVLAKRLGKAVPLHPAQRGFRSIDGTLANLVLLEHYVKARRLKGKSYNVVSLDVRKAFDTVSHAAILRALRRLNLDLGLQEYIKSTLADAHTTISVGGSSTRSLQINNGVKQGDPLSPFLFNAVLDELIGILNERQPGGTLTPECRVSAMAFADDILLLEDRDLDVPISLGTTMDFLSASGMELNPSKCSSISASVVSGKSVPRSRPVFKIDGQWIRVLAGPSSFRYLGLLFGSQGALKPSLHNLIGWLNNLERCPLKPHQKFCLLKTYIVPRLFYGLQSPALTGGILQEGDRLIRRTARRILHLNVHTGSQFLHARIRDGGLGLVQLRYKIPVILLRRLDNLRQDGKDITKWETVFNIDGPAQSLYYRVKGLASRGDPDPYWREQIATRPYSAGLQDAADDGASRRWIDSIPRGWAPRDYISAVQLRTGNLPTQALPYRAAGQRGCRHGCPRVESLSHVLQGCPATHNERIRRHDEVVAKLARHTRGKGWRTEVEPYVYHQDGQLFKPDLAIHQPNDTLVICDAQVCWEGPRTLATSWDNKRLVYDNVRFREAAARHWGKKTLVFSPILLGARGVWPRCNKPTTDILGIPPILRSSCVCSCLKWGPTLHRRFMAGVWRRRPPDRRP

SEQ ID NO: 15609 - protein, 1224 aa, Trypoxylus dichotomus
MIAPKPGEAGMRPPAQKKILSRAKKDSGPLQGATTVTTAGPSRFCCETCGVSYTSKANLARHAKDCGKRDRTKCTYCPLTFDSFAAVRQHERRAHQEQYREELESRLGAPEAMLMEKLAKIEARAIKGAPFLKEMTVATGLTMHQVRSRRERPEYARYLDRARREVKESSLRTFKKTAAPLSTRIVPAPKITSAATPPSAPSSAPSPLSSAPPPIELSDTDSEVEIVQVDKPATPKPQKPPIRTLGKPGGGETSAVSEKRHRLSSPLKPPAKRRDIRPEGDRGTLEASTKTPLGRGPAEKRKRSTPTSDDQPPIRPRLATHHGSPRRADDPPPSPPPRVPRRLSISATELRSIGGPSSPTVPIEILDEAFLSCLVTSRSSVDDATKALIGVGLSGQKEELDEAITNWLMTAFPVDRRKRPTTSTPNVRPPPPTTSRQRRMSAYKKAQDLFQKDRTALAERVLTGCPLLAEEVYPKIKDVEDFYAGIYERPAPTDPRPVTISGESESVFKPVTSEEITASIKTWANSAPGPDGITIALIKRCPTNLLEVLFNIILYRRMTPTAWKTSRTILIPKEGDRRDPANWRPITIGPALQRLLHRVLAKRLGKAVPLHPAQRGFRSIDGTLANLVLLEHYVKARRLKGKSYNVVSLDVRKAFDTVSHAAILRALRRLNLDLGLQEYIKSTLADAHTTISVGGSSTRSLQINNGVKQGDPLSPFLFNAVLDELIGILNERQPGGTLTPECRVSAMAFADDILLLEDRDLDVPISLGTTMDFLSASGMELNPSKCSSISASVVSGKSVPRSRPVFKIDGQWIRVLAGPSSFRYLGLLFGSQGALKPSLHNLIGWLNNLERCPLKPHQKFCLLKTYIVPRLFYGLQSPALTGGILQEGDRLIRRTARRILHLNVHTGSQFLHARIRDGGLGLVQLRYKIPVILLRRLDNLRQDGKDITKWETVFNIDGPAQSLYYRVKGLASRGDPDPYWREQIATRPYSAGLQGAADDGASRRWIDSIPRGWAPRDYISAVQLRTGNLPTQALPYRAAGQRGCRHGCPRVESLSHVLQGCPATHNERIRRHDEVVAKLARHTRGKGWRTEVEPYVYHQDGQLFKPDLAIHQPNDTLVICDAQVCWEGPRTLATSWDNKRLVYDNVRFREAAARHWGKKTLVFSPILLGARGVWPRCNKPTTDILGIPPILRSSCVCSCLKWGPTLHRRFMAGVWRRRPPDRRP

SEQ ID NO: 15610 - protein, 1224 aa, Trypoxylus dichotomus
MIAPKPGEAGMRPPAQKKILSRAKKDSGPLQGATTVTTAGPSRFCCETCGVSYTSKANLARHAKDCGKRDRTKCTYCPLTFDSFAAVRQHERRAHQEQYREELESRLGAPEAMLMEKLAKIEARAIKGAPFLKEMTVATGLTMHQVRSRRERPEYARYLDRARREVKESSLRTFKKTAAPLSTRIVPAPKITSAATPPSAPSSAPSPLSSAPPPIELSDTDSEVEIVQVDKPATPKPQKPPIRTLGKPGGGETSAVSEKRHRLSSPLKPPAKRRDIRPEGDRGTLEASTKTPLGRGPAEKRKRSTPTSDDQPPIRPRLATHHGSPRRADDPPPSPPPRVPRRLSISATELRSIGGPSSPTVPIEILDEAFLSCLVTSRSSVDDATKALIGVGLSGQKEELDEAITNWLMTAFPVDRRKRPTTSTPNVRPPPPTTSRQRRMSAYKKAQDLFQKDRTALAERVLTGCPLLAEEVYPKIKDVEDFYAGIYERPAPTDPRPVTISGESESVFKPVTSEEITASIKTWANSAPGPDGITIALIKRCPTNLLEVLFNIILYRRMTPTAWKTSRTILIPKEGDRRDPANWRPITIGPALQRLLHRVLAKRLGKAVPLHPAQRGFRSIDGTLANLVLLEHYVKARRLKGKSYNVVSLDVRKAFDTVSHAAILRALRRLNLDLGLQEYIKSTLADAHTTISVGGSSTRSLQINNGVKQGDPLSPFLFNAVLDELIGILNERQPGGTLTPECRVSAMAFADDILLLEDRDLDVPISLGTTMDFLSASGMELNPSKCSSISASVVSGKSVPRSRPVFKIDGQWIRVLAGPSSFRYLGLLFGSQGALKPSLHNLIGWLNNLERCPLKPHQKFCLLKTYIVPRLFYGLQSPALTGGILQEGDRLIRRTARRILHLNVHTGSQFLHARIRDGGLGLVQLRYKIPVILLRRLDNLRQDGKDITKWETVFKIDGPAQSLYYRVKGLASRGDPDPYWREQIATRPYSAGLQDAADDGASRRWIDSIPRGWAPRDYISAVQLRTGNLPTQALPYRAAGQRGCRHGCPRVESLSHVLQGCPATHNERIRRHDEVVAKLARHTRGKGWRTEVEPYVYHQDGQLFKPDLAIHQPNDTLVICDAQVCWEGPRTLATSWDNKRLVYDNVRFREAAARHWGKKTLVFSPILLGARGVWPRCNKPTTDILGIPPILRSSCVCSCLKWGPTLHRRFMAGVWRRRPPDRRP

SEQ ID NO: 15611 - protein, 1224 aa, Trypoxylus dichotomus
MIAPKPGEAGMRPPAQKKILSRAKKDSGPLQGATTVTTAGPSRFCCETCGVSYTSKANLARHAKDCGKRDRSKCTYCPLTFDSFAAVRQHERRAHQEQYREELESRLGAPEAELMEKLAKIEARAIKGAPFLKEMTVATGLTMHQVRSRRERPEYARYLDRARREVKESSLRTFKKTAAPLSTRIVPAPKITSAATPPSAPSSAPSPLSSAPPPIELSDTDSEVEIVQVDKPATPKPQKPPIRTLGKPGGGETSAVSEKRHRLSSPLKPPAKRRDIRPEGDRGTLEASTKTPLGRGPAEKRKRSTPTSDDQPPIRPRLATHHGSPRRADDPSPSPPPRVPRRLSISATELRSIGGPSSPTVPIEILDEAFLSCLVTSRSSVDDATKALIGVGLSGQKEELDEAITNWLMTAFPVDRRKRPTTSTPNVRPPPPTTSRQRRMSAYKKAQDLFQKDRTALAERVLTGCPLLAEEVYPKIKDVEDFYAGIYERPAPADPRPVTISGESESVFKPVTSEEITASIKTWANSAPGPDGITIALIKRCPTNLLEVLFNIILYRRMTPTAWKTSRTILIPKEGDRRDPANWRPITIGPALQRLLHRVLAKRLGKAVPLHPAQRGFRSIDGTLANLVLLEHYVKARRLKGKSYNVVSLDVRKAFDTVSHAAILRALRRLNLDLGLQEYIKSTLADAHTTISVGGSSTRSLQINNGVKQGDPLSPFLFNAVLDELIGILNERQPGGTLTPECRVSAMAFADDILLLEDRDLDVPISLGTTMDFLSASGMELNPSKCSSISASVVSGKSVPRSRPVFKIDGQWIRVLAGPSSFRYLGLLFGSQGALKPSLHNLIGWLNNLERCPLKPHQKFCLLKTYIVPRLFYGLQSPALTGGILQEGDRLIRRTARRILHLNVHTGSQFLHARIRDGGLGLVQLRYKIPVILLRRLDNLRQDGKDITKWETVFNIDGPAQSLYYRVKGLASRGDPDPYWREQIATRPYSAGLQDAADDGASRRWIDSIPRGWAPRDYISAVQLRTGNLPTQALPYRAAGQRGCRHGCPRVESLSHVLQGCPATHNERIRRHDEVVAKLARHTRGKGWRTEVEPYVYHQDGQPFKPDLAIHQPNDTLVICDAQVCWEGPRTLATSWDNKRLVYDNVRFREAAARHWGKKTLVFSPILLGARGVWPRCNKPTTDILGIPPILRSSCVCSCLKWGPTLHRRFMAGVWRRRPPDRRP

SEQ ID NO: 15612 - protein, 816 aa, Trypoxylus dichotomus
MTAFPVDRRKRPTTSTPNVRPPPPTTSRQRRMSAYKKAQDLFQKDRTALAERVLTGCPLLAEEVYPKIKDVEDFYAGIYERPAPTDPRPVTISGESESVFKPVTSEEITASIKTWANSAPGPDGITIALIKRCPTNLLEVLFNIILYRRMTPTAWKTSRTILIPKEGDRRDPANWRPITIGPALQRLLHRVLAKRLGKAVPLHPAQRGFRSIDGTLANLVLLEHYVKARRLKGKSYNVVSLDVRKAFDTVSHAAILRALRRLNLDLGLQEYIKSTLADAHTTISVGGSSTRSLQINNGVKQGDPLSPFLFNAVLDELIGILNERQPGGTLTPECRVSAMAFADDILLLEDRDLDVPISLGTTMDFLSASGMELNPSKCSSISASVVSGKSVPRSRPVFKIDGQWIRVLAGPSSFRYLGLLFGSQGALKPSLHNLIGWLNNLERCPLKPHQKFCLLKTYIVPRLFYGLQSPALTGGILQEGDRLIRRTARRILHLNVHTGSQFLHARIRDGGLGLVQLRYKIPVILLRRLDNLRQDGKDITKWETVFNIDGPAQSLYYRVKGLASRGDPDPYWREQIATRPYSAGLQDAADDGASRRWIDSIPRGWAPRDYISAVQLRTGNLPTQALPYRAAGQRGCRHGCPRVESLSHVLQGCPATHNERIRRHDEVVAKLARHTRGKGWRTEVEPYVYHQDGQLFKPDLAIHQPNDTLVICDAQVCWEGPRTLATSWDNKRLVYDNVRFREAAARHWGKKTLVFSPILLGARGVWPRCNKPTTDILGIPPILRSSCVCSCLKWGPTLHRRFMAGVWRRRPPDRRP

SEQ ID NO: 15613 - protein, 1197 aa, Ophraella communa
MEQNTINENNQGGRVLRAGTLRNRQEVQPGVEAAGASGGTLSKGSTRHGINPVTDALPEDQPTTTKTGKVRQRVKWTYEMNSHVMRCFYTLTENGKYPLDRKELLRLFLEKFPSYVNVTEQRLADQKRVITNNNLITKPQLEMIKQQVENSLQNKISSNSTSIPLVDVNNIDENQNNEVVTNDSAEQNIVLPEETVTDDITRLSAELEKALTEFSGTNPTNRPRIPKQNNSQKLNQYTAIINDSVFPTKLQAIDNFEDLQTLIYAGAVAVVRCLGGKIEHKDPIRRKSRTEAWERRLVKGIDNLRADIGRVHQYKQGNRSKKMVKAFQRISEATRKHTERDPNNNETSEILDTLTQKLKTKTSRLKRYRESALRRAQNLKFNSNQKGYYRDLRSSKTDHNEPLPPQNVVEQYWSNIWSQPVNHDADAAWMKAEAAHMDNVPHMPATSITTETISKAILTTHNWKAPGIDNLHNFWLKRFKSTHPLLAKAFTTFLDNPNTIPLFLTQGITYLLPKENGPLSDPSKYRPITCLCTIYKLLTSCISTKIYQHLYEHKILAEEQKGCIKNSKGCKEQLIIDSIVIEQAAKKHRNIFTAFIDYQKAFDSVPHSWLIHVLRLYKVDDKTINILQHLMSSWKTTLRLNHGETSITSNPINIKRGIFQGDSLSPLWFCLALNPLSTLLNTTNLGFQIKQGNRINHVINHLLYMDDIKLYAKNEKALHELIRLTEIFSKNIQMNFGIEKCKTLNIKKGKIINCNFELDDGRIMESMSERDTYKYLGLAQNNQINHKSIKEKVLKSYLKRVSDILKSKLNGRNTFKAINTFAIPVLTYTFGIVCWTPTDLEDIQVKTRCLLRKFRAHDPKSSIERIVLPRNLGGRGLIDIVQLHNSQISTLQQYFIQKVTSLHKAVSKADLGYTPLDLAHVTDVKRPTRNSNHDDHITRWTSKALHGRYPNEVNQPHVDKEASNKWLTSSDLFVETEGFVISIQDQVVPTNNYRKFILKENVSDQCRRCKASSETIQHIMSGCSKLAPTSYLQRHDQVAKIIHQKLALKHNLHSDNSPYYKYEPQSVLENNTYKLYWNRSILTDKTIPSNRPDITFTDKMSATTYLIDIAIPNSHNLLSTWNEKLTKYSPLAEEIKNIWKQNTVHIVPIILSTTGIIPTDLHRSLQIINMNPFLYIQLQKSVLLHTTAIVKRHLNLQ

SEQ ID NO: 15614 - protein, 1257 aa, Timema californicum
MGLASPCPSSLAFDADSAASDLVAHDPMPQEPKGVNDDDSAYGQRITILVPFVQNVCVACRNEPSTKGVYRALSLGDNIKHAREKHGELDLVFKCSKCDKLWNTKMAALVHVAKCAGAKSPKAFKCPKCKESFDRAVGLSQHKRQKHPMLRNEERSVGVAGARPPRVLRQGGIFTAGELETMLMLEEYLAGEENIAKKMAEMMKSKTVTQIRNKRCEAAYRKRLDVAKGRWGLPWDRRNDGSPAFSPLLRKIGRKVMKLPEYDSDSADAGDGGEVPQDNGSASVAPEISSSPAVDGSVNDTSVVETVRQEVSEVGGARSLDVSGGCCLSIEDTPLKDLIEHFWDPLKAREKRCEGETMVSVDSTMPPCVMVSEPIEAGVSEWCDELMEKLISTRIDKDVRAMDIVESLQVLASSPPLQEDLDRHYTMVAEYLRPAAGKVEGSVSRRNPSGRRSGGARRAEKRFQYARAQELFRKDPGLLAACIRKNVDFATANLDGINRCDVEDAYNSLWGVKPVVRSIEMGEGRPVASLSDFMWPIGSEEVKAKVRKIKKSSAPGVDGLKREALEGGAKYCVLSALYNVILVTGLLPSEWSINRTTLIPKEGADLTKVGSYRPITISSLVSMVFWGIVDQRLRKIEVINRRQKGFTDEQGCFSNIRLLAEVVKMMKVRNGGVGIQLDVAKAFDTVPHEVIGPALRRQGVPAVVVDLVVRSYKGVVTTIYHPRGDIDIGLKRGVKQGDPLSPLFFNIILDVLIDKLETLPGYAVDDGVNISVMGFADDLVLFADDVVKAQCLMDETVEFLGALNMGVSVAKSCAFEIFKTKDAWFLKDPKVVVLGQDVPAVKADTPLKYLGVGYSLWSGIDVSQTERNIAEVMMRVGKARLKPYQKLELVVTYIIPHYVYQLVVAMPSSNMLKSLDRIVRNACKEFLHFPLSISNGIFYCKKIDGGLGLPKLVDLVPRVILGAGLRMMDSSDPVIRAINGGEVMVEGLKAIAKGCRIRFPYDRHDLLKFKDSCRREDVKKWSDLAAQGRAVKSHAGDRNGNCFLSDPTLLKPCRFITALQLRSNTCGDRSSLNRAILQQELLCRKCKQGRETLTHILGQCTYTKLARIRRHNEICDLIERRILEGKETAEVSKEPELISPTGIKLKPDLVINSRGRVLVVDVTVRHEDGDNLQRARAEKLAKYSVLLPSLCEQFGVSEGAVLPIVVGNTGAVPWMTESCLRNISGITTRDLKTIALIALRSSIEIYHAFLDYDRGVW

SEQ ID NO: 15615 - protein, 1153 aa, Timema bartmani
MSGLAHVAKCPGAKPVKAFKCPKCKESFDRAVGLSQHKRHRHPVLRNEERIAAATGKKPSHVVVRQGAVFTSNEIETMLMLEEYLAGEDNIAMKMANMMGSKTATQIRSKRREPAYLKRVAEARNGRRLPRMDSDGLSPALSPLLRKTMKKTRKLPEYDSDVSLDTGSHLGTSGMSTNTDVECPETLVDPAGMERLNATPGDSMMQQGGSMGMLLDASTGSWASIDDIPLKELVEHFWKPEIVDEMHLEGPDSVHMEEPMTPPQEVVNGYEGIEVAEWREEVMTRLMSIRIDRDDHATGLVESLQILASSPPLQEDLDRHYSMIVEYLRPAAKKEKVSSAGRKTSVNKSGTRRAEKKFQFARAQELFKKDPGLLATCIRKDVDFVAANLDGINRAEIEDMYKLLWGVEPQVRDIDLDDGRPIASLSDFMWPIEPDEVKARLSRMKKSSAPGNDGLKKEALEGGVKNRVLSALYNVILITGLLPLEWSVNRTTLIPKEGTDLTTAGNYRPITISSLVSRVFWGIIDQRLRKIVNINKRQKGFTDEQGCFTNVRLLAEVVKLMKNKKGGVGIQLDVAKAFDTVPHAIIGPALMRQGVPTVMIDLINRSYNNVTTSIHHPKGNIDIGLRRGVKQGDPLSPLLFNVVLDVLIDKLEGMAGFTISEGVSLSCMAFADDLVLFADDVAGAQCLMDETVEFLGALSMSVSVIKSCAFRIVKTKDAWILMDPKVEIMGQDIPAVKPDKPLKYLGIGYSLWSGIEVAQTEKNIMGVMSRVCKARLKPHQKLELVSKYIIPHYVYQLVVAMPSFNILKCLDGIVRNACKEFLHLPVSISNGILYCRKIDGGLGLPKLRDLVPRVTLAAGLKLIESADPVIRAINGGEIMMEGLRLMANSCRIRFPYDRHDIVKFKESCRKEEVKNWSDQVAQGRAVMSHVGDSNGNCFLRDPTLLKPCRFITALQLRSNTCGDRSTLNRAKPQQELLCRKCKQGRETLTHILGQCIYTKPARIRRHNEICDLIERRILEGREAAEVCKEPELISPTGERLKPDLVINSQGRVLVVDDVTVRHEDGDNLRRARAEKLAKYSVLLPSLQERFGVLQGAVFPIVVGNTGAIPWATEGCLRMIEGIMTGDLKTISLIALRSSIEIYHGFMDYDRGIW

SEQ ID NO: 15616 - protein, 963 aa, Riptortus pedestris
MADSGPFECRHCGRGFSTATGMGMHSKRAHLVEHNASIRRVQVRRRWGPEELWCLASEELRLVEAGFEGDVNAQLSGILEGRSADAINRARVKPAYRELIQRIGDDRRTEGTPRGPAAVEPGRECGEALRSALRGLVVDLSGSRTLCTDRLLAVAGRALAGADVSSCLGEWISVHLAAGARVEISHDSDRHSRQCPGMGDIRPSRRESYRRVQRLWKFDRAAAAREILDGGPAVPGHSLRELDEFWRPIVEEQSLPWSGEEVRGERLHASTNVWTPVTMAEVTTMCPSVGSAPGLDRVSPAVWRGLDWRVRVLILNILLLEGRVPKEQLRARVTMIPKCERPGSPGDYRPISVASVIVRHLHRILAARLESVVPLVPQQFGFRRGFDGVAGNVFLLDAVLRTAWRKKRSLCAAFLDVRKAFDSVSHAALFRILEERGVQGEFIDYIRAVYGNATSRICMTGEEAAEMHPSRGVRQGDPLSSILFNMVMDHVVAGLPGDVGFLLGGVRCGVLAYADDLVLLGLRCLLRAVADGLGDCGLELNPAKSRTLTVALESVRKVVWLETEVRYMVGDAVIQPVGLEDSWEYLGVKFSHSGVVRDHVDVGPGLERISRAPLKPQQKMELLRTFFLPGMFHRGTFGVTYQYTLKAIDVAVRSVVRRWLRLPHDTPCSFFHAPARFGGLGIPRFESLMPYFRARRFCGVDGALENCGLGDNVRDALGYDFPCHGECPPHPRGREIENLYSTVDGRDLNGVEEVGASSAWLVRRSHDMSGRDYVQYLRLYAGALPVRVRLSRGIGRRTDGSIKCRLGCGRDETQVHAVNHCPAMRPAVTLRHHAVVKLLSESLRRRGWRVFVEKTLVREQEEVCRPDIIIANEEELVILDVTVVTGLIKDETFSQLKVEKYGKEWVLSAAAAATSSLARRRRGEREKERGGGRERERERERERERESARERAREREREREREN

SEQ ID NO: 15617 - protein, 973 aa, Riptortus pedestris
MGMHSKRAHPVEHNAAIRRVQVRRRWDPEELWCLASEELRLVEAGFEGDVNAQLSGILEGRSADAINRARVKPAYRELIRRIGDDRRTEGNPRGPAAVEPGRECGEALRSALRGLVVDLSGSRTTLCTDRLLAVAGRALAGADVSSCLGEWISVHLAAGARVEISHDSDRHSRQCPGMGDIRPSRRESYRRVQRLWKFDRAAAAREILDGGPAVPVHSVRELDEFWRPIVEEQSLPWSGEEVRGERLHASTNVWTPVTMAEVTTMCPSVGSAPGLDRVSPAVWRGLDWRVRALILNILLLEGRVPKEQLRARVTMIPKCERPGSPGDYRPISVASVIVRHLHRILAARLESVVPLVPQQFGFRRGFDGVAGNVFLLDAVLRTAWRKKRSLCAAFLDVRKAFDSVSHAALFRILEERGVQGEFIDYIRAVYGNATSRICMTGEEAAEMHPSRGVRQGDPLSPILFNMVMDHVVAGLPGDVGFLLGGVRCGVLAYADDLVLLASSVPGLRCLLRAVADGLGDCGLELNPAKSRTLTVALESVRKVVWLETEVRYMVGDAVIQPVGLEDFWEYLGVKFSHSGVVRDHVDVGPGLERISRAPLKPQQKMELLRTFFLPGMFHRGTFGVTYQYTLKAIDVAVRSVVRRWLRLPHDTPCSFFHAPARFGGLGIPRFESLMPYFRARRFCGVDGALENCGLGDNVRDALGYDFPCHGECPPHPRGREIENLYSTVDGRDLNGVEEVGASSAWLVRRSHDMSGRDYVQCLRLYAGALPVRVRLSRGIGRRTDGSIKCRLGCGRDETQVHAVNHCPAMRPAVTLRHHAVVKLLSESLRRRGWRVFVEKTLVREQEEVCRPDIIIANEEELVILDVTVVTGLIKDETFSQLKVEKYGKEWVLSAAAAATGSLARRRRVIPVTATYKGIWAKWTAKELRSIGVGSRVLHWMTLRILRGGNMNFGTFKKMATLGCSRRRGVLPRT

SEQ ID NO: 15618 - protein, 994 aa, Riptortus pedestris
MADSGPFECRHCGRGFATATGMGMHSKRAHPVEHNAAIRRVQVRRRWDPEELWCLASEELRLVEAGFEGDVNAQLSGILEGRSADAINRARVKPAYRELIRRIGDDRRTEGSPRGPAAVEPGRECGEALRSALRGLVADLSGSRTTLCTDRLLAVAGRALTGADVSSCLGEWISVHLAAGARVEISHDSDRHSRQCPGMGDIRPSRRESYRRVQRLWKFDRAAAAREILDGGPAVPVHSVRELDEFWRPIVEEQSLPWSGEEVRGERLHAGTNVWTPVTMAEVTTMCPSVGSAPGLDRVSPAVWRGLDWRVRALILNILLLEGRVPKEQLRARVTMIPKCERPGSPGDYRPISVASVIVRHLHRILAARLESVVPLVPQQFGFRRGFDGVAGNVFLLDAVLRTAWRKKRSLCAAFLDVRKAFDSVSHAALFRILEERGVQGEFIDYIRAVYGNATSRICMTGEEAAEMHPSRGVRQGDPLSPILFNMVMDHVVAGLPGDVGFLLGGVRCGVLAYADDLVLLASSVPGLRCLLRAVADGLGDCGLELNPAKSRTLTVALESVRKVVWLETEVRYMVGDAVIQPVGLEDSWEYLGVKFSHSGVVRDHVDVGPGLERISRAPLKPQQKMELLRTFFLPGMFHRGTFGVTYQYTLKAIDVAVRSVVRRWLRLPHDTPCSFFHAPARFGGLGIPRFESLMPYFRARRFYGVDGALENCGLGDNVRDALGYDFPCHGECPPHPRGREIENLYSTVDGRDLNGVEEVGASSAWLVRRSHDMSGRDYVQYLRLYAGALPVRVRLSRGIGRRTDGSIKCRLGCGRDETQVHAVNHCPAMRPAVTLRHHAVVKLLSESLRRRGWRVFVEKTLVREQEEVCRPDIIIANEEELVILDVTVVTGLIKDETFSQLKVEKYGKEWVLSAAAAATGSLARRRRVIPVTATYKGIWAKWTAKELRSIGVGSRVLHWMTLRILRGGNMNFGTFKKMATLGCSRRRGVLPRT

SEQ ID NO: 15619 - protein, 994 aa, Riptortus pedestris
MADSGPFECRHCGRGFATATGMGMHSKRAHPVEHNAAIRRVQVRRRWDPEELWCLASEELRLVEAGFEGDVNAQLSGILEGRSADAINRARVKPAYRELIRRIGDDRRTEGSPRGPAAVEPGRECGEALRSALRGLVADLSGSRTTLCTDRLLAVAGRALTGADVSSCLGEWISVHLAAGARVEISHDSDRHSRQCPGMGDIRPSRRESYRRVQRLWKFDRAAAAREILDGGPAVPVHSVRELDEFWRPIVEEQSLPWSGEEVRGERLHASTNVWTPVTMAEVTTMCPSVGSAPGLDRVSPAVWRGLDWRVRALILNILLLEGRVPKEQLRARVTMIPKCERPGSPGDYRPISVASVIVRHLHRILAARLESVVPLVPQQFGFRRGFDGVAGNVFLLDAVLRTAWRKKRSLCAAFLDVRKAFDSVSHAALFRILEERGVQGEFIDYIRAVYGNATSRICMTGEEAAEMHPSRGVRQGDPLSPILFNMVMDHVVAGLPGDVGFLLGGVRCGVLAYADDLVLLASSVPGLRCLLRAVADGLGDCGLELNPAKSRTLTVALESVRKVVWLETEVRYMVGDAVIQPVGLEDSWEYLGVKFSHSGVVRDHVDVGPGLERISRAPLKPQQKMELLRTFFLPGMFHRGTFGVTYQYTLKAIDVAVRSVVRRWLRLPHDTPCSFFHAPARFGGLGIPRFESLMPYFRARRFCGVDGALENCGLGDNVRDALGYDFPCHGECPPHPRGREIENLYSTVDGRDLNGVEEVGASSAWLVRRSHDMSGRDYVQYLRLYAGALPVRVRLSRGIGRRTDGSIKCRLGCGRDETQVHAVNHCPAMRPAVTLRHHAVVKLLSESLRRRGWRVFVEKTLVREQEEVCRPDIIIANEEELVILDVTVVTGLIKDETFSQLKVEKYGKEWVLSAAAAATGSLARRRRVIPVTATYKGIWAKWTAKELRSVGVGSRVLHWMTLRILRGGNMNFGTFKKMATLGCSRRRGVLPRT

SEQ ID NO: 15620 - protein, 994 aa, Riptortus pedestris
MADSGPFECRHCGRGFATATGMGMHSKRAHPVEHNAAIRRVQVRRRWDPEELWCLASEELRLVEAGFEGDVNAQLSGILEGRSADAINRARVKPAYRELIRRIGDDRRTEGSPRGPAAVEPGRECGEALRSALRGLVADLSGSRTTLCTDRLLAGAGRALTGADVSSCLGEWILVHLAAGAGVEISHDSDRHSRQCPGMGDIRPSRRESYRRVQWLWKFERAAAAREILDGGPAVPVHSVRELDEFWRPIVEEQSLPWSGEEVRGERLHASTNVWTPVTMAEVTTMCPSVGSAPGLDRVSPAVWRGLDWRVRALILNILLLEGRVPKEQLRARVTMIPKCERPGSPGDYRPISVASVIVRHLHRILAARLESVVPLVPQQFGFRRGSDGVAGNVFLLDAVLRNAWRKKRSLCAAFLDVRKAFDSVSHAALFRILEERGVQGEFIDYIRAVYGNATSRICMTGEEAAEMHPSRGVRQGDPLSPILFNMVMDHVVAGLPGDVGFLLGGVRCGVLAYADDLVLLASSVPGLRCLLRAVAEGLGDCGLELNPAKSRTLTVALESVRKVVWLETEVRYMVGDAVIQPVGLEDSWEYLGVKFSHSGVVRDHVDVGPGLERISRAPLKPQQKMELLRTFFLPGMFHRGTFGVTYQYTLKAIDVAVRSVVRRWLRLPHDTPCSFFHAPARFGGLGIPRFESLMPYFRARRLCGVDGALENCGLGDNVRDALGYDFPCHGECPPHPRGREIENLYSTVDGRDLNGVEEVGASSAWLVRRSHDMSGRDYVQYLRLYAGALPVRVRLSRGIGRRTDGSIKCRLGCGRDETQVHAVNRCPAMRPAVTLRHHAVVKLLSESLRRRGWRVFVEKTLVREQEEVCRPDIIIANEEELVILDGTVVTGLIKDETFSQLKVEKYGKEWVLSAAAAATGSLARRRRVIPVTATYKGIWAKWTAKELRSIGVGGRVLHWMTLRILRGGNMNFGTFKKMATLGCSRRRGVLPRT

SEQ ID NO: 15621 - protein, 994 aa, Riptortus pedestris
MADSGPFECRHCGRGFATATGMGMHSKRAHPVEHNAAIRRVQVRRRWDPEELWCLASEELRLVEAGFEGDVNAQLSGILEGRSADAINRARVKPAYRELIRRIGDDRRTEGNPRGPAAVEPGRECGEALRSALRGLVVDLSGSRTTLCTDRLLAVAGRALAGADVSSCLGEWISVHLAAGARVEISHDSDRHSRQCPGMGDIRPSRRESYRRVQRLWKFDRAAAAREILDGGPAVPVHSVRELDEFWRPIVEEQSLPWSGEEVRGERLHASTNVWTPVTMAEVTTMCPSVGSAPGLDRVSPAVWRGLDWRVRALILNILLLEGRVPKEQLRARVTMIPKCERPGSPGDYRPISVASVIVRHLHRILAARLESVVPLVPQQFGFRRGFDGVAGNVFLLDAVLRTAWRKKRSLCAAFLDVRKAFDSVSHAALFRILEERGVQGEFIDYIRAVYGNATSRICMTGEEAAEMHPSRGVRQGDPLSPILFNMVMDHVVAGLPGDVGFLLGGVRCGVLAYADDLVLLASSVPGLRCLLRAVADGLGDCGLELNPAKSRTLTVALESVRKVVWLETEVRYMVGDAVIQPVGLEDSWEYLGVKFSHSGVVRDHVDVGPGLERISRAPLKPQQKMELLRTFFLPGMFHRGTFGVTYQYTLKAIDVAVRSVVRRWLRLPHDTPCSFFHAPARFGGLGIPRFESLMPYFRARRFCGVDGALENCGLGDNVRDALGYDFPCHGECPPHPRGREIENLYSTVDGRDLNGVEEVGASSAWLVRRSHDMSGRDYVQYLRLYAGALPVRVRLSRGIGRRTDGSIKCRLGCGRDETQVHAVNHCPAMRPAVTLRHHAVVKLLSESLRRRGWRVFVEKTLVREQEEVCRPDIIIANEEELVILDVTVVTGLIKDETFSQLKVEKYGKEWVLSAAAAATGSLARRRRVIPVTATYKGIWAKWTAKELRSIGVGSRVLHWMTLRILRGGNMNFGTFKKMATLGCSRRRGVLPRT

SEQ ID NO: 15622 - protein, 994 aa, Riptortus pedestris
MADSGPFECRHCGRGFATATGMGMHSKRAHPVEHNAAIRRVQVRRRWDPEELWCLASEELRLAEAGFEGDVNAQLSGILEGRSADAINRARVKPAYRELIRRIGDDRRTEGSPRGPAAVEPGRECGEALRSALRGLVVDLSGSRTTLCTDRLLAVAGRALAGADVSSCLGEWISVHLAAGTRVEISHDSDRHSRQCPGMGDIRPSRRENYRRVQRLWKFDRAAAAREILDGGPAVPVHSVRELDEFWRPIVEEQSLPWSGEEVRGERLHASTNVWTPVTMAEVTTMCPSVGSAPGLDRVSPAVWRGLDWRVRALILNILLLEGRVPKEQLRARVTMIPKCERPGSPGDYRPISVASVIVRHLHRILAARLESVVPLVPQQFGFRRGFDGVAGNVFLLDGVLRTAWRKKRSLCAAFLDVRKAFDSVSHAALFRILEERGVQGEFIDYIRAVYGNATSRICMTGEEAAEMHPSRGVRQGDPLSPILFNMVMDHVVAGLPGDVGFLLGGVRCGVLAYADDLVLLASSVPGLRCLLRAVADGLGDCGLELNPAKSRTLTVALESVRKVVWLETEVRYMVGDAVIQPVGLEDSWEYLGVKFSHSGVVRDHVDVRPGLERISRAPLKPQQKMELLRTFFLPGMFHRGTFGVTYQYTLKAIDVAVRSVVRRWLRLPHDTPCSFFHAPARFGGLGIPRFESLMPYFRARRFCGVDGALENCGLGDNVRDALGYDFPCHGECPPHPRGREIENLYSTVDGRDLNGVEEVGASSAWLVRRSHDMSGRDYVQYLRLYAGALPVRVRLSRGIGRRTDGSIKCRLGCGRDETQVHAVNHCPAMRPAVTLRHHAVVKLLSESLWRRGWRVFVEKTLVREQEEVCRPDIIIANEEELVILDVTVVTGLIKDETFSQLKVEKYGKEWVLSAAAATTGSLARRRRVIPVTATYKGIWAKWTAKELRSIGVGSRVLHWMTLRILRGGNMNFGTFKKMATLGCSRRRGVLPRT

SEQ ID NO: 15623 - protein, 947 aa, Marasmia exigua
MSVSNTTSSHSTTCLICDRSFNSSRGLNIHRSRKHRVNTIATLPVQSSQVTATAPDTPFHLHLSTLKQNCPIVKRIPRGARISVANKLSEIVDQCVEHNSTEAWERLFTFAYVILHVQQHNQQKTTYSLTQKIKNNCTNPDITPLITLHPTRNHHDHNISKKVEEKITDGDLRGASRLLFSNDVVSPDTPETLDALRSKHPPAPATPPLSEPLTDAQVCLQVTQNDLVSAITSFKPGSAAGLDGLSPQHLKDLISVQAGNSGQVLISSLTKLINFMLLGKINTEIIPILYGANLIALSKKDGGVMPIAVGSTFRRLTSKLAVRQISQKLRSQFEPHQLGFCTKGGCEAAVHAARTLLTQNRSEVLLKLDVKNAFNSVNRDTLLLEIKNNTPEIYNYLFQCYNSPSKLLYKANELNSAVGCQQGDPLGPAIFSLAINPVVQNLASKFNVWYLDDGTLGDEAETVLSDFSDIIQKLSSIGLVLNFDKCEIFMLRDSLRPNRRSEIISKFKIVAPNIRILSETSLHLLGSPIFESAIIPHVEKLIAKFNECSGRLFEINPHSALLILKFCLFVPKFTYLLRCCPLWKFQNITQNLDSMLKICLEKILNINLLDKSWIQASLPIRFGGIGIRKSTDVALPAFLSSIHSTSTLVTKIMRLVTAPLEVACLAEASDAWKMAFPGQNLPVDPNSQRCWDKIQREFIQNTLINNSTNADLARLRAVSRKESGHWLQAYPSANVGTLLDAETLRVAVGLRLGAEVCIPHKCLCGTTVSALGHHGLSCVKSAGRLSRHSSLNDIIRRSLATINVPANLEPNGILRDDGKRPDGMSLIPWKMGRALVWDATCVDTLAPSHLPGTTRSAGAAADAAERLKATKYRHLSGAYHFVAFGVETLGPWGSDALSFFRDLAKRLVEVTGEPKAGSYLAQRISIAIQRGNAASILGTLPRGPTLF

SEQ ID NO: 15624 - protein, 943 aa, Cnaphalocrocis medinalis
MSASNTTSSSSTTCLICNRSFTSSRGLNIHRSRKHRVSTSVPASSSTPSPALNNTPFHLHLSSLKQNCPIVKRIPRGARIAVANKLTEIIDQCLETNSIAAWERLFTFPYVILHVNQKNQDDTCSLTQKIKNNCANPDITPLITIHPRRNHQNYNFSRKVDEKIADGDLRGASRLLFSSDVVSPDTAETLEALRSKHPPAPATPPPPEPLTDAQVCLQITQNDLVSAITSFKPGSAAGLDGLSPQHLKDLISVQAGNAGQVLISCLTKLINFMLLGKINDEIVPILYGANLIALSKKDGGVRPIAVGSTFRRLTSKLAVKHISQKLRSQFEPHQLGFCSKGGCEAAVHAARTLLTQNRSEVLLKLDVKNAFNSVNRDTLLSEIKNNAPEIYNYLFQCYNSPSKLLYKSNELDSAVGCQQGDPLGPAIFSLAINPVVQNLSSKFNVWYLDDGTLGDEAETVLSDFSNIIHKFSSIGLALNFNKCEIFISDSLPANRISEITSKFENIAPNIKILSKSNLHLLGSPIFDSAVTPHVQNLIAKFNECSGRLSEINPHSALFILKFCLFVPKFTYLLRCCPLWKFQSITQNLDSMLKICLEKILNINLSDHSWIQASLPIRFGGIGIRKITDVALPAFLSSIHGTSTLVTKIMRPITVSLEVACLTEASDAWKMAYPGQNLPAVPNSQRCWDKIQCETIQNYLINNSTNADLARLRAVSRKESGHWLQAYPSANVGTLLDSETLRVAVGLRLGAEVCIPHRCSCGNTVTALGHHGLSCVRSAGRFSRHSSLNDIIRRSLATINVPANLEPNGISRDDGKRPDGMSLIPWRMGRALVWDATCVDTLAPSHLPGTMRNAGAAAEAAEKLKAAKYRHLSGTYHFVAFGVETLGPWGPDALSFFRDLTKRLVEVTGDPKAGSYFAQRISIAIQRGNAASILGTLPQGPTLF

SEQ ID NO: 15625 - protein, 949 aa, Endotricha flammealis
MNPSDVTVSQVISCSICNRNFNTVRGLNIHRTRIHSHHVNPVTIPSQTCTQSHTPFHTHLSALKKNILLVKRIPRGARIAVATKLSEIVEQCVDTNSFESWQRLMTFSYSTLHAPTTDTNSHLSLTQKIKNNCITEPDLSSQPISNPQVKSNGKSKFNLSSKINEKIGGGDLRGAARLLFSNDVISPDSPETLDTLQSKHPPAPTIPPPPEPLTDTQACLQITNKDIVLAITSFKPGSAAGLDGLSPQHLKDLISIQAGNASQMLISSLTKLTNLMLLGNVDPDIAPILYGANLIALTKKDGGIRPIAVGSTFRRIVSKLCVKYISNKLRNQFEPHQLGFCTKGGCEAAVHAVRTLSTQNWSEVILKLDVKNAFNSVNRDTLLKEIKKSTPEIFNYLNQCYYSPSKLLYKNHALESAVGCQQGDPLGPAIFSLAINPIIKNLASKFNVWYLDDGTLGDNAETVVSDLSGLILSFKSIGLDLNFNKCEIFISENVTSTRRSEIISKFNAIAPNIKILSEENFNLLGSPVFESAITPHVENLTTQFNDCSNRLLEINSHCALLILKFCLFVPKFTYLMRCCPLWKSQNLTHKLDNIVKCHLEKILNIQLTEQSWIQASLPIRYGGIGIRKISSVALPAFLSSIHSTATLVNKILMRIPAPFEVACLVEASDAWKMAYPTKNLPENPNSQRSWDKICCEEIQNLLLLNNSTDADQARLRAVSRKEAGHWLHAYPCANVGTLLDSETLRVAIGLRLGAQVCIPHRCPCGTMVNALGHHGLSCTRSAGRLSRYASINDIICRSLVTVNVPAILEPNGIARNDGKRPDGMSLVPWSMGRALVWDATCVDTLAPSHLHGTSRSAGAAAESAEKLKATKYQQLTGSYDFVAFGVETLGPWGTSALSFFRDIAKRLRQTTGDPKAGSYFAQRISIAVQRGNAASILGTLPQGPCLFNA

SEQ ID NO: 15626 - protein, 948 aa, Endotricha flammealis
MNPSDVTVSQVISCSICNRNFNTIRGLNIHRTRIHSHHVNPVTIPSQTCTQSHTPFHTHLCSLKKNILLVKRIPRGARIAVATKLSEIVEQCVDTNSFESWQRLMTFSYSTLHAPTTDTNSHLSLTQKIKNNCITEPDLSSQPISNPQIKSNGKSKFNLSSKINEKIGGGDLRGAARLLFSNDVISPDSPETLDTLQSKHPPAPTIPPPPEPLTDTQACLQITNKDIVLAITSFKPGSAAGLDGLSPQHLKDLISIQAGNASQMLISSLTKLTNFMLLGKVDPDIAPILYGANLIALTKKDGGIRPIAVGSTFRRIVSKLCVKYISNKLRNQFEPHQLGFCTKGGCEAAVHAVRTLSTQNWSEVILKLDVKNAFNSVNRDTLLKEIKKSTPEIFNYLNQCYYSPSKLLYKNHALESAVGCQQGDPLGPAIFSLAINPIIKNLASKFKVWYLDDGTLGDNAETVVSDLSGLILSFKSIGLDLNFNKCEIFISENVTSTRRSEIISKFNAIAPNIKILSEENFNLLGCPVFESAITPHVENLTTKFNDCSNRLLEINSHCALLILKFCLFVPKFTYLMRCCPLWKSQNLTHKLDNIVKCHLEKILNIQLTEQSWIQASLPIRYGGIGIRKISSVALPAFLSSIHSTATLVNKILMRIPALFEVACLVEASDAWKMAYPTKNLPENPNSQRSWDKICCEEIQNLLLLNNSTDADQARLRAVSRKEAGHWLHAYPCANVGTLLDSETLRVAIGLRLGAQVCIPHRCPCGTMVNALGHHGLSCTRSAGRLSRHASINDIIRRSLVTVNVPAILEPNGIARDDGKRPDGMSLVPWSMGRALVWDATCVDTLAPSHLHGTSRSAGAAAESAEKLKATKYQQLTGSYDFVAFGVETLGPWGTCALSFFRDIAKRLRQTTGDPKAGSYFAQRISIAVQRGNAASILGTLFFLFFFCL

SEQ ID NO: 15627 - protein, 949 aa, Endotricha flammealis
MNPSDVTVSQVISCSICNRNFNTVRGLNIHRTRIHSHHVNPVTIPSQTCTQSHTPFHTHLCSLKKNILLVKRIPRGARIAVATKLSEIVEQCVDTNSFESWQRLMTFSYSTLHAPTTDTNSHLFLTQKIKNNCITEPDLSSQPISNPQIKSNGKSKFNLSSKINEKIGGGDLRGAARLLFSNDLISPDSPETLDTLQSKHPPAPTIPPPPEPLTDTQACLQITNKDIVLAITSFKPGSAAGLDGLSPQHLKDLISIQAGNASQMLISSLTKLTNFMLLGKVDPDIAPILYGANLIALTKKDGGIRPIAVGSTFRRIVSKLCVKYISNKLRNQFEPHQLGFCTKGGCEAAVHAVRTISTQNWSEVILKLDVKNAFNSVNRDTLLKEIKKSTPEIFNYLNQCYYSPSKLLYKNHALESAVGCQQGDPLGPAIFSLAINPIIKNLASKFNVWYLDDGTLGDNAETVVSDLSGLILSFKSIGLDLNFNKCEIFISENVTSTRRSEIISKFNAIAPNIKILSEENFNLLGCPVFESAITPHVENLTTKFNDCSNRLLEINSHCALLILKFCLFVPKFTYLMRCCPLWKSQNLTHKLDNIVKCHLEKILNIQLTEQSWIQASLPIRYGGIGIRKISSVALPAFLSSIHSTATLVNKILMRIPAPFEVACLVEASDAWKMAYPTKNLPENPNSQRSWDKICCEEIQNLLLLNNSTDADQARLRAVSRKEAGHWLHAYPCANVGTLLDSETLRVAIGLRLGAQVCIPHRCPCGTMVNALGHHGLSCTRSAGRLSRHASINDIIRRSLVTVNVPAILEPNGIARDDGKRPDGMSLVPWSMGRALVWDATCVDTLAPSHLHGTSRSAGAAAESAEKLKATKYQQLTGSYDFVAFGVETLGPWGTCALSFFRDIAKRLRQTTGDPKAGSYFAQRISIAVQRGNAASILGTLPQGPCLFNA

SEQ ID NO: 15628 - protein, 949 aa, Endotricha flammealis
MNPSDVTVSQVISCSICNRNFNTVRGLNIHRTRIHSHHVNPVTIPSQTCTQSHTPFHTHLSALKKNILLVKRIPRGARIAVATKLSEIVEQCVDTNSFESWQRLMTFSYSTLHAPTTDTNSHLSLTQKIKNNCITEPDLSSQPISNPQVKSNGKSKFNLSSKINEKIGGGDLRGAARLLFSNDVISPDSPETLDTLQSKHPPAPTIPPPPEPLTDTQACLQITNKDIVLAITSFKPGSAAGLDGLSPQHLKDLISIQAGNASQMLISSLTKLTNLMLLGNVDPDIAPILYGANLIALTKKDGGIRPIAVGSTFRRIVSKLCVKYISNKLRNQFEPHQLGFCTKGGCEAAVHAVRTLSTQNWSEVILKLDVKNAFNSVNRDTLLKEIKKSTPEIFNYLNQCYYSPSKLLYKNHALESAVGCQQGDPLGPAIFSLAINPIIKNLASKFNVWYLDDGTLGDNAETVVSDLSGLILSFKSIGLDLNFNKCEIFISENVTSTRRSEIISKFNAIAPNIKILSEENFNLLGSPVFESAITPHVENLTTKFNDCSNRLLEINSHCALLILKFCLFVPKFTYLMRCCPLWKSQNLTHKLDNIVKCHLEKILNIQLTEQSWIQASLPIRYGGIGIRKISSVALPAFLSSIHSTATLVNKILMRISAPFEVACLVEASDAWKMAYPTKNLPENPNSQRSWDKICCEEIQNLLLLNNSTDADQARLRAVSRKEAGHWLHAYPCANVGTLLDSETLRVAIGLRLGAQVCIPHRCPCGTMVNALGHHGLSCTRSAGRLSRHASINDIIRRSLVTVNVPAILEPNGIARDDGKRPDGMSLVPWSMGRALVWDATCVDTLAPSHLHGTSRSAGAAAESAEKLKATKYQQLTGSYDFVAFGVETLGPWGTSALSFFRDIAKRLRQTTGDPKAGSYFAQRISIAVQRGNAASILGTLPQGPCLFNA

SEQ ID NO: 15629 - protein, 949 aa, Endotricha flammealis
MNPSDVTVSQVISCSICNRNFNTVRGLNIHRTRIHSHHVNPVTIPSQTCTQSHTPFHTHLSSLKKNILLVKRIPRGARIAVATKLSEIVEQCVDTNSFESWQRLMTFSYSTLHAPTTDTNSHLSLTQKIKNNCITEPDLSSQPISNPQVKSNGKSKFNLSSKINEKIGGGDLRGAARLLFSNDVISPDSPETLDTLQSKHPPAPTIPPPPEPLTDTQACLQITNKDIVLAITSFKPGSAAGLDGLSPQHLKDLISIQAGNASQMLISSLTKLTNFMLLGKVDPDIAPILYGANLIALTKKDGGIRPIAVGSTFRRIVSKLCVKYISNKLRNQFEPHQLGFCTKGGCEAAVHAVRTLSTQNWSEVILKLDVKNAFNSVNRDTLLKEIKKSTPEIFNYLNQCYYSPSKLLYKNHALESAVGCQQGDPLGPAIFSLAINPIIKNLASKFNVWYLDDGTLGDNAETVVSDLSGLILSFKSIGLDLNFNKCEIFISENVTSTRRSEIISKFNAIAPNIKILSEENFNLLGSPVFESAITPHVENLTTKFNDCSNRLLEINSHCALLILKFCLFVPKFTYLMRCCPLWKSQNLTHKLDNIVKCHLEKIFNIQLTEQSWIQASLPIRYGGIGIRKISSVALPAFLSSIHSTATLVNKILMRIPAPFEVACLVEASDAWKMAYPTKNLPENPNSQRSWDKICCEEIQNLLLLNNSTDADQARLRAVSRKEAGHWLHAYPCANVGTLLDSETLRVAIGLRLGAQVCIPHRCPCGTMVNALGHHGLSCTRSAGRLSRHASINDIIRRSLVTVNVPAILEPNGIARDDGKRPDGMSLVPWSMGRALVWDATCVDTLAPSHLHSTSRSAGVAAESAEKLKATKYQQLTGSYDFVAFGVETLGPWGTSALSFFRDIAKRLRQTTGDPKAGSYFAQRISIAVQRGNAASILGTLPQGPCLFNA

SEQ ID NO: 15630 - protein, 949 aa, Endotricha flammealis
MNPSDVTVSQVISCSICNRNFNTVRGLNIHRTRIHSHHDNPVTIPSQTCTQSHTPFHTHLCSLKKNILLVKRIPRGARIAVATKLSEIVEQCVDTNSFESWQRLMTFSYSTLHAPTTDINSHLSLTQKIKNNCITEPDLSSQPISNPQIKSNGKSKFNLSSKINEKIGGGDLRGAARLLFSNDVISPDSPETLDTLQSKHPPAPTIPPPPEPLTDTQACLQITNKDIVLAITSFKPGSAAGLDGLSPQHLKDLISIQAGNASQMLISSLTKLTNFMLLGKVDPDIAPILYGANLIALTKKDGGIRPIAVGSTFRRIVSKLCVKYISNKLRNQFEPHQLGFCTKGGCEAAVHAVRTLSTQNWSEVILKLDVKNAFNSVNRDTLLKEIKKSTPEIFNYLNQCYYSPSKLLYKNHALESAVGCQQGDPLGPAIFSLAINPIIKNLASKFNVWYLDDGTLGDNAETVVSDLSGLILSFKSIGLDLNFNKCEIFISENVTSTRRSEIISKFNAIAPNIKILSEENFNLLGCPVFESAITPHVENLTTKFNDCSNRLLEINSHCALLILKFCLFVPKFTYLMRCCPLWKSQNLTHKLDNIVKCHLEKILNIQLTEQSWIQASLPIRYGGIGIRKISSVALPAFLSSIHSTATLVNKILMRIPAPFEVACLVEASDAWKMAYPTKNLPENPNSQRSWDKICCEEIQNLLLLNNSTDADQARLRAVSRKEAGHWLHAYPCANVGTLLDSETLRVAIGLRLGAQVCIPHRCPCGTMVNALGHHGLSCTRSAGRLSRHASINDIIRRSLVTVNVPAILEPNGIARDDGKRPDGMSLVPWSMGRALVWDATCVDTLAPSHLHGTSRSAGAAAESAEKLKATKYQQLTGSYDFVAFGVETLGPWGTCALSFFRDIAKRLRQTTGDPKAGSYFAQRISIAVQRGNAASILGTLPQGPCLFNA

SEQ ID NO: 15631 - protein, 915 aa, Ceratina japonica
MNQALAEIFRERTTDAIKSHRKRPDYRARVLDYITELRNTASTPSIPPPQQEETNHQDEDILTHLATLPTTEEDTYHKQELQDIVDKLRTQDRSATLQDLATYLRKIHPPPRTNNQRRRTQRNQTTRTRKQQRRHEYAMTQLQWQKKRKRCIQNILKRTDNAEQPERDVMEPFWTAIMEATSDSAPAIEDPCNTDDRIWKPISGTEIRSAMLPLGTAAGPDGVTSRQLRAMPSGILIRVFNIILYCRRLPECLRTARTVFLPKIDNASEPGNFRPISIPSVLTRCLHKILATRLASAVEIDERQRAYRDTDGCRDNTFLLDIILKFHHRRFKDVYMASLDVSKAFDSVSHATITTTLQALGCPPEFVEYINTVYGEGTTVLQCDGWTSAPIRPKRGVKQGDPLSPIIFNIHRLLKKLSPEVGCRVGGACINAAAFADDLFLFATTPAGLQKLIDTVARYLQECGMRLNPDKCLTIGFKANANLKKTAVDTTTRFRCKNRTLRTLGRGEVITYLGIKFTALGRAGIKPAEIIAPGLEALTRAPLKPQQRLFALRTVLIPGLYYHLALGDVTLSALNKVDVHVRNAVRKWLSLPHDVPTAYIHADVKDGGLGIPSLRWTAPLQRLGRLRSTRNSHGDLANTQMDGYLDEEISKCERRLNDHGSQMANNDDVKNRWAERLHDAIDGRGLRGSRSVPQQHQWIADGTRLLTGMDFINCTKARIGALPTKSRSSRGRYSDWLCRAGCAVPETINHVVQQCHRTHGNRIKRHNAIVSYVARNLERQGYVVKMEPEYRTTEGVRKPDIVATMGQTTLVVDAQVVSEQTDLDRAHTRKVEYYSANRSLTNTILATEGSRQIRHHSATLSWRGLWSAKSAQELVNIGVIKMNELKILATRALIGTVAGYHMFLKATTVRRVGVG

SEQ ID NO: 15632 - protein, 1085 aa, Petromyzon marinus
MNERLTDELTTEFILSDMFSWDYPCTDQNKCYPCNLVFLDHRTWSSHMTRVHPHANKTYKCRICNRTADSIHKIASHYGRTCKSLIGKTSAITTTIEETLFSCSYCSRGFTTKTGLGVHTRRTHPTEHEARLQQNAPGRKVRWGEEEVEIMAHKEAQQNDEDINMNQLIQNSVMPHRTLEAIKGKRRNIKYKELVRTLKETTYKVENQCLVNLVLPTTSEITTTPSEGDQPAIRAEKEQSLTAAEDLQVIITDLKIENLSHNQALLLLNSHVEKFLNRSKPINRKDRVNQQEKDENRHRRQSKQTKYRRYQYLYHTNKKALLDEITSDRSGPSIYPTEESIRGTFVTLFESNSPPDNIPFKLKNDQSCIDIVKAITLDELIKTLAIMKDKSPGQDNIILSDLRTLPIKYLLDILNIILYLQDIPQIWKQHRTRLIPKTKEDLEKPSNWRPITISSIVIRLLHKILSYRLGQQLKLNYRQKAFLPVDGCFENSALLHFIIHNARQKHENTQIVSIDLSKAFDSVSHESIIRALKRFNLSKESTTYLTNIYKCNLTDIVFGSTTMRNINLKRGVKQGDPLSPLLFNMIMDELLDNLPTYIGVNVGNQKVNSMMFADDLILFAETECGMNKLLDITTKFLDDRHLKININKCNSLRFIKYGKQKTFSVATTSSYFINNEPINPVSYVKGFKYLGIEFDPRGKRSISCNLLAAMLNKLTRAPLKPEKKVYLINNNLIPRIIHQLVLGKVTKGLLMSLDSEIRKTVKLLLRLPHDTPDSFFYTSVSNGGMGIRNLCDSVALSIISRHNKMITSDDLAIRALSQQSYTIATLKQAHIIAGSKFPSKSLNQNKWSNKLYQTTDGRGLVYCQSQTENNSWITGNHRTIKSYNYIDMVKLRINALPTKSRCNRGTLETKQCRFKCRSINNQISEETLAHILQKCDRSHYSRIARHDSLVQFLATAAQKLNWEVIKEPTLPSDTNKAKPDLILVRDSHVLIVDVAVPWESRSLAHAYDFKVKKYATDKKMQAYLKTIYPEKEIRTEALIISARGGWCALNNMVTKKVGLSSAWVKLALIKVMEGSVKIWRSWSKG

SEQ ID NO: 15633 - protein, 1080 aa, Pleurobrachia bachei
MNKNNEKNSGAVRGPDVSVTDNRPSQALRTSDSLQCPNCRKLFKSKGGLTRHTNKCAPCCQKGDKRQKPVEPRMECSTCGMFFSGQRGLAIHKRKKHPTEWNETKRVEDSLSRKRIRWTSGDRELLYIGTLEWEDSAKTHTKEEWVRDHKFPERSLNSIKCQIRSKAFARYVQARDESAPAPTLEAAIQEDECVGNILSLKDDAIKWLEKEPDGEEYLAIYERLQDSRLSEAGDLSRRKFDKLASKFTPFAESQKPAKQRSKTVDQTSKTKGKLSPSKLRRRQRYGQCQKEWHNSKQRGGLIRSILQGKFGNEKVLKSPQETEETIGFWEGIFNRESTRDDREVENARDVIGTLDNMITVEEVAKALKGKSDKARGPDGVPHRWLKELGATKLAILYNGVFCTSKIPDSWREARTVLIPKKEEPKGPADYRPITIGSYFYRAYTTVLGGRITSSIKPSQRQKGFVRTDGIRDNLCLLDGLIYHSKSRIQPLHLSFMDVRKAFDSVSHNSIKRMLKWSGIPPLLRSVVNDLYVGATTSVLGKKVPIRVGVKQGDPLSSVLFNLVIDMALDGLTDDLGVSYLGEKISWIAFADDLVLLASSRATLQELITTITDRLEKVGLVMNGDKCKSLSLMADGKRKRTYVDTSQKLYAGGTMLDSMSITDYYTYLGIGNGARGVKRENLHSEWKSLLERTSKAPLKPHQKLYVLKKHAYPTLQHKCSFQQTSKKCLTELDKLTRRYVREWLWLPPDTAMEAFHALVEDGGLQLPSFRYEVPLNKFRRLCKMRVSEDPLVKKLASAEPVKTKIKNAKKLCVVDGSPVETKFQLMSKVRDAYWKKRDGKGLRTEPMQVKRGNFGQIQGPVTTLSTRNFVGAWNVRLNTTQTPARKNRAGGADNSASTCDKCPNGRVATLGHISQSCPETHGSRTKRHDRVVDHLQSALLNEREVTDCLKEPAIRPKGKSYCKPDLVVVMAEKVVVVDVQITSDGGIEDLEGVAKRKTDKYGSPEVLKATLLHLGLPSETPISVHAFSITWRGNTLRHTLEAASILGVTHILPRVTTDVLVDTYRMYLGWKNSGKRYVLNN

SEQ ID NO: 15634 - protein, 1090 aa, Pleurobrachia bachei
MNRLNNEKNSGAVRSTEFSVADNRPSQSLRTTESHRCPNCRKLCRSGNGLALHMKHCAKCYQNGDNRQEPVKPRMECSICGLFFSGQRGVAIHKRKKHPAEWNETKRVEDTLSRKKIRWTSGDRELLHLGMIEWEASAKTHSQEDWVRDHKFPERTINSIKCQIRSKLFRRYVAARPRDEAPAPTPEAAIQEDECAGSILCLKDAAIRWLEKEPDGEEYLAIYERLQDGRLGEAGERSRRKFDELASKYTPLAKSQKPAKGRSKPVDLKSKTNGKLSPAKRRRRAKYGQCQKEWHNNNQRSGLIRSILQGKFGSKEVLKDPRETEETIDFWSGIFNRDSTPDSREIENARETIGALDNMITVEEVAKALKGKSERARGPDGVPHKCLKELGATKLAILYNGVFCTSEVPDSWREARTVLIPKKEEPKGPADYRPITIGSYFYRAYTSVLGGRISDVVRPSQRQKGFVRSDGIRDNLCLLDGLIYNSKNRVQPLHMSFMDVRKAFDSVSHFSIQRMLRWSGIPPLLRSVINDLYIGATTSVLGKTVPVKVGVKQGDPLSSILFNLVLDMALDGLTDELGVSYLGERLCWMAFADDLVILAPSRATLQELISNITDRLKRVGLVMNGDKCKSLSICADGKRKRTYVDTSQKLYIEGNMLDSMSITDYYTYLGIGNGARGVKKENLHSEWKTLLERTDKAPLKPHQKLYVVKKHAYPTLQHKCSFQYASKKCLTELDKLTRRYVRKWMWLPQDTTIEAFYASVEDGGLQLPSFRYEVPLNKFRRLCKMRTSEDPLVRKLANAEPAKTKIDNAKKLCVVDGNSIENKSQLKSRVRDAYWKSYDGRGLRTEPQQVKRGNFGQLQGAVTTLSTRNLVGAWNIRLNTTQTPARKNRAGGAGGAGDSASTCDKCPNGRLATLGHISQSCPETHGSRTKRHDRVVDHLQSALLNAQGVTSVLKEPEIRPKGKSYCKPDLVVAMAERVVVVDVQITSDGGIEDLEGVAKRKTDKYGSPEILKATLLHLGLPSDTPISVHAFSITWRGNTLRHSLETASTLGVTHILPRVTTDVLVDTYRMFLGWRASGRRCVPNKKSTLK

SEQ ID NO: 15635 - protein, 1208 aa, Diaphorina citri
MSTDNHERRKRAVPARLQECILDTGRRSVIKNIKKMPVLLESKGNCVHTPVITSVLECPVDSYSAIILPSHQNVFSSSENVTNISQESLSDERQPIPNTSPAPDILDDSTFSFTPVREDLPNVPPNLVNANGCKSHPTPKLPLDYPNSLPSDQVTSNNHLHKLLPSLAPAIEDLPSVFLTTTGNADDHISPARSDTSDHQNTPSHDQAYQAISNILLTPVIPNDNDSILSVTTSTIENPCNISPATNIISDDPASNDTSEIIDHRPREKCPYCMGHYVAGTGLQIHINSAHPAESRAQREQRYILPRPDSQTHTDIDSETDSQQSTVTSADQRKIQSQLANLAKTFENMLSSPLDEVLLQEKCLELHKVLREAILVLPGPKHPATKHFEKRQKAKNQTSITMRQSQNPARKSKAERDRRKAKYNYEVAQFMYYNRRKHVVRKITDGNKAINSNKLETEILQSYFSDKLSNPNDKCREHYPNVPQDQSTVTITKDDVIEEIKKVNFDSSAGPDGVIPRAIKNTPCEQAIANLSNVILKFSVLPPCLCQGRTVLIFKDGDPSDPKNYRPITIFPLVRRIIEKCLEKKLKWFTSTAPEQRGFKNGPGTHINASLVNGCLRDAKSKKKEICVVFLDVSKAFDTVGHKHIEKTLLSSGAPSCLTNALLACVNNNSTKIENQMEKTATIDIKRGVAQGAPTSPILFSLAIDHIIREQNESSIKEAYGYEVTPSEQLSLLAFADDLAVIAKNKEAASAIINAVDMRLAEIGLSMNPSKSQGIHISKGKLNGTGVYTTRGCIKTITNNTETIRYLGTNFSDEIYLDTPNLMSKHTSKLKNLTESPLLHPDQKLNIVNQYLWPTLVYPLQCAPLNKIPNTFLKDIDKTTRSAVKEILSLPADVPNGMLYGPRKYRGLGLMKAEWEAPLQNINILRKLDESNTPLLSTLRSCDIEISSACNTLDTSPSESVKKMRETLREREFEAWEKMALRGLGVCVYKEVPMSNKWVYDKQILSSSEWTTALKMSANIAGVRAIPGRNTGTTLCRQPGCAEKETLSHVLGSCHKNELLRNTRHHTVRSSIANELRHLGWTVDEEISCISEDSSTRRCDIVAVNTEKSQAIILDPTVRFEKSASQALEVNDEKKSIYEPCIPDLARRYNVEVSKFQVTGLLFGARGAIPLFTFNSLRDLGITSKHIINIGQQVLKDSVRMLNLHLFH

SEQ ID NO: 15636 - protein, 955 aa, Panagrellus redivivus
MPPPRRSADGHAPPVSRPRADPPGNEPEETIDWVARFKACSTGCELEASMEALMVEVCKQLATVGTAEHAPRPRPPSSVCKKSGGYDPVAATKIQRLYRRNRKRAFRDIVEGDSQHCQLPVDEVQRHFTSVFNANPRDEAPPPDCVPPWDPLADPEDSDPLSVPVTIEEVTARLTKAMDTSPGPDGVRYSIWKKLPNGAHILKEIYNAVLRIRYSPSTWSTSTTILLHKKDDVNDLSNWRPIALSNTVGKLFASIQGSRLLNWSRRHGRISKSQKGFMPYEGCLEHNAALQDMIQNARRTNTEAVFAWLDFRNAFGSAPHTTIFQSLALAGLAEESIGVVKMLYKDCTTSIRCGNNMTDPIAIKAGVKQGCPLSPIVFNLALEPLIRAVESLNQGIQIHGQSRSVLGYADDLVLISSSPEGLEEQLLVASMVADWAGLSFNARKCASLHVKGMKPGVIKTQFNIQAVPMEIVDAEGVYQHLGVPTGYKVQPSATKTVQKMQQQLEAIHKSLLAPWQKFDALHTFVLSQLSFHLKAGHVPKKPLIKLDKAIVRTCKLWLKLPERASNEILYLPYSLGGQNLLPLSKLADACQLTRAVRLLTSNDPSSAELAQKTMVSVAAKRLRRAASQEDTARFYNGDASPEFKTYTDVESAWTHLRKATTRLKTSIDVAWKPLDSGLELEICGQPAARNTVERQLRDALRLKYYNTLVAKKDQGKVIEVTAAVSASNHFCRAGKYTMFADWRFIHRARLNVVPLNGCNRAGKGNNTACRRCGQPGETLPHVLNHCRPLLHLGTQRHNAVLKRLQKAVKLGPEVKVYENTSIPEVASNLRPDWVTIDEKAKVVNIIDVTIPFESRASAFTTARETKTKKYADIAKHFKDRGYDTFLDAFIIGPLGGYDPANNVVTKRLGINDTYLNLMRKLMVSDTIRWSREIYVQHITGVNQQQKQRRNRQPAQ

SEQ ID NO: 15637 - protein, 1581 aa, Caenorhabditis latens
MLEKHGTQHRPRIKSAPTTNQKVAAVMKKAAPSLQRPERVERKGYAGLPVEESTPEKILRVEAMEKLPQTRAVTKSLSVLKESVKKSVKKTEEKQMGKKVFSIFSKNGETNSPASRRLSVAPVRTNSLGSVVDLSNLQGPERVKAAKQNAQITARLETKRRRSSLSVLKPQKVSGKSGKEEINRISAIIPEDSDVSREKDGNKSGVLNLTFESDGSNGYVGKRFNTWCLDHEDSREAWLSDEVIQWYLERICAKSEKYKVLDPLTWEIWKINGIQMVESKLWSSKTYFFPVCEENHWILLIIDSQSVWYANSLAYEPAGNVAKFLKELKRERKYFEIPTPYQQDKVNCGVHVCLIARSIESGVYWYDIKDVQSFRTDMKIMLRRRGYELFSAPYHQNIPQKMSIDVDDCEIIDDVFYDDFEKEKVESEDVKKTTTEILIENITPLENTEKVEECKRIDSILFDESEKDEKETADVKENRSELSIEKDKIIDKSPADVIENVVKESEGLLEVFRSEISTENATIPVQNDENGDDFGIINNILTNLVEIVVYNVEGIREIPKLMDIKLATPEKVTQVKQKRREKPKKQMGKIQKVPAGKADELIQQVRVWFEKEFNSYVQDGKSFQRLEWLADSLTAAIHKASVGDEGAVKKIEKRCPPLEMKEGEMSTQTTVTKSVRNTSQNSGEKSKGARESLGKSYWQNRAKTYNRLIGKVSKQCEIPIGILEKFFTETTSVTNVPKEVLEAKSSKLPNAQVGEWIEGEFTHKELADALKKTKDTAPGVDGLKYHHLSWFDPDSRLLALLYNECRVHRRIPAHWKEAETILLYKGGDELKPDNWRPISLMPTIYKLYSSLWNRRIRSVNGVLSKCQRGFQEREGCNESIGILRTAIDVAKGKKRDLSVAWLDLTNAFGSVPHELIEHTLIRNGFPEMVVHVVKDMYKGASIRVKNKTEKSEQIQIKSGVKQGDPISPTLFNMCLENVIRRHLDTAAGHKCLNTKIKVLAFADDMAILSESKDQLQRELTKLDGDCTPLNLIFKPAKCASLVIEKGKVNPSAVINLKGVPIRNMAGSDTYKYLGIQTGVETRTSEMDLIESVVKEFELLVRDEELTLPQKLDCIKSFMLPKMTYMYGNSIPKLTELKYFAGETMKAVKSIHEIPHSGAPVEYCQLPISKGGLGVACPKITALITYLVSTMKKLWSDDEYIKRLYSDYLKEVVVAEMGREDVTLSDMAAYLSNETPSNKKNFGYTTFTRIREVCRGLSSIKDSPLHKIKIVEHEGKLAILVQAIEDGPEAVYTESHVKKLQLLLKKEANTGILHRFITTKPVKSQVVQVVLQHPQSNSFVRNGGEMSFSTHKIVHKARLNLLVCNANTWDPNSTKECRRCKKKETQMHILQVCTYNRSGLITERHNAVHNKVSELIKKGSKKNWELEDDLVIPGPSVKRPDIVLRSPDGKEIILADVTCPYECLDGMQGAWDYKVKKYTETYKYLEARGIKVTVLPIVVGSLGTWWKPTTNSLLQLGIDRKTINQWIPKLCAATAEYSKNIYWRHIKGDRYLSIPMKFGLDKPPGNSWKRGKRHKPPKPAKK

SEQ ID NO: 15638 - protein, 2455 aa, Caenorhabditis remanei
MEFSCQSHCEKTTALNPYDSEFREEPDSESISKKVIPTFDFPGKIEKSDGESQKSDFSSEKISDSNSELILVIPTSVSSHRIRKSDQKLHSNVEKERNFEFEAFCIENGSEKSIFQAEIQIISVKNHFSAVLIPLALPFVHKQRYFSEKSLKIAARNAAKSVSLTAVSASLHSLHTNDKDTLLHFNDSDGSRTSICTYRMVESDGMEGIGYGDDSGIFYFVGKRVEKWKILEKAEALAKNSFFSEIPSKNDFRDVIRENCPENRLFIVFFSRKTMINLVSFEKIIRLFPEELLRNLLALSANSLVSQPNFWRPAEKFAGKLLILTKRKLELMEKSLLNPKNEGKSREITAEMRDLLIFGADDEISNKNVFFIVEKENFFDFNNIFISESSKNRSEVATDAKTSETGHEKWLKRRPRRPPKDSKRIAEKEKVSDLKICKKPSLVYGAESVDVSSSADLSICSASQLRNFYQIFYVENVKIDRIMKFMVEFWRESAVMRVFTSFNNWFMLVDKEKILALPVISSFSLQIIDRIDKNGVNQKLLIFAENQCVLSENNRSEPEISREFLENAAKTWFLWENRAKKLENIDFVFENANFVSGSWKLAPAEREAVSMRDVANESIDRVTIRREEREEGFAGGKKVRDSEFCSDISQVHREVAEEGLYLSSVLSVCLATSTESFYAFEKIEKDKKEKLVFSVELFESFAEEQVSNSSELVGRGKMPVFSVFVPLPCQIIDRKCHKKENGAKIAKNEPNMGNSKRKMQFSMKRPPAIVIRGGAKIAKSEIEKADRIVLVETRGENVVVCQVSIPATRYRCYYKNCFGTSAGGAGAADLQHLTRHLSSVHQKKVEWTYKCSICGEEAAGKSTKATRWVSSHMLEKHGAQHRPRIRSAPTTNQKVSDVLKKAAPSLQRPERAVRKGYTAPPVEETTPEKILRVEAMEKMPQTRAVTKSLSVLKESVKKSVKKTEEKQMGKKVFSIFSKNGETSSPASRRLSVAPVRTNSLGSVVDLSNLQGPERVKAAKLNAQISARMETKRRRSSLSVLKPQKVSGKSGKEETNRISEIIPEDSIVSRENDWNESGVLNLTFESDGSNGYVGKKFNTWCLDHEDSREAWLSDEVIMWYLERICSKSEKYKVLDPLTWEIWKIEGIQMVESKLWSSKTYLFPVCEENHWILLIIDSQSVWYANSLAYEPAGNVAKFLKELKRERKYFEIPTPYQKDKVNCGVHVCLIARSIESGVYWYDIKDVQSFRSDMKRMLRRRGYELFSAPYHQIIPQKMSNDVDDCEIIDDVFYDDSEKERDESEDGKKNITGISIENITPLEKTEKVEECKRIDSILYGESEKGENETVDVKETRSDLSIEKGEIIDKLPADVIENVVKESEGLLEVFRSEISTENTTIPAQNRENENDFGIISNILSKLVETVVYNVEGIREIPKLMDIKLATPEKVCQVKQKRREKPKKQMGKIQKVPAGKADELIQKVRVWFEKEFNSYLQDGKSFQRLEWLADSLTAAIHKASVGDEGAVKKIEKRCPPLEMKEGEMSTQTTVTKSARNTSQKSGEKSKGARESLGKSYWQNRAKTYNRLIGKESKQCEIPIGVLEKFFTETTSVTNVPKEVLEAKSSKLPNVQVGEWIEGEFTQKELADALKKTKDTAPGVDGLKYHHLSWFDPDSRLLALLYNECRVHRRIPAHWKEAETILLYKGGDELKPDNWRPISLMPTIYKLYSSLWNRRIRSVNGVLSKCQRGFQEREGCNESIGILRTAIDVAKGKKRDLSVAWLDLTNAFGSVPHELIEHTLIRNGFPEVVVHVVKDMYKGASIRVKSKTEKSEQIQIKSGVKQGDPISPTLFNMCLENVIRRHLDTAAGHKCLNTKIKVLAFADDMAILSESQDQLQRELTKLDRDCTPLNLIFKPAKCASLVLEKGKVNAAAVINLKGVPIRNMACSDTYKYLGIQTGVETRTSEMDLIESVVKEFELLVRDEELTLPQKLDCIKSFMLPKMTYMYGNSIPKLTELKYFAGETMKAVKSIHEIPHSGSPVEYCQLPISKGGLGVACPKITALITYLVSTMKKLWSDDEYIKKLYSDYLKEVVVAETGRQDVTLSDMAAYLSNETPSKKKNFGYTTFTRIREVCRGLSSIKDAPLHKIKIVEHEGKLAILVQAIEDGPEAVYTESHVKKLQLLLKKEANTGILHRFITQKPVKSQVVQVVLQHPQSNSFVRNGGQMSFSAHKIVHKARLNMLVCNANTWDATSTKQCRRCVKEKETQMHILQVCTYNKSGLITERHNAVHNKVSELIKKGSKRNWKLVDDSVIAGPSVKRPDIMLRSPDGKEIILADVTCPYECGLKGMQRAWDYKVEKYTKAYKYLEARGIKVTVLPIVVGSLGTWWKPTTNSLVQLGIDRKTINEWIPKLCAATAEYSKNIYWRHIKGDRYQSIPMKFGLDKPPGNSWKRGKRRKPPKPAKN

SEQ ID NO: 15639 - protein, 1020 aa, Caenorhabditis remanei
MDIKLATPEKVCQVKQKRREKPKKQMGKIQKVPAGKADELIQKVRVWFEKEFNSYLQDGKSFQRLEWLADSLTAAIHKASVGDEGAVKKIEKRCPPLEMKEGEMSTQTTVTKSARNTSQKSGEKSKGARESLGKSYWQNRAKTYNRLIGKESKQCEIPIGVLEKFFTETTSVTNVPKEVLEAKSSKLPNVQVGEWIEGEFTQKELADALKKTKDTAPGVDGLKYHHLSWFDPDSRLLALLYNECRVHRRIPAHWKEAETILLYKGGDELKPDNWRPISLMPTIYKLYSSLWNRRIRSVNGVLSKCQRGFQEREGCNESIGILRTAIDVAKGKKRDLSVAWLDLTNAFGSVPHELIEHTLIRNGFPEVVVHVVKDMYKGASIRVKSKTEKSEQIQIKSGVKQGDPISPTLFNMCLENVIRRHLDTAAGHKCLNTKIKVLAFADDMAILSDSQDQLQRELTKLDRDCTPLNLIFKPAKCASLVLEKGKVNAAAVINLKGVPIRNMACSDTYKYLGIQTGVETRTSEMDLIESVVKEFELLVRDEELTLPQKLDCIKSFMLPKMTYMYGNSIPKLTELKYFAGETMKAVKSIHEIPHSGSPVEYCQLPISKGGLGVACPKITALITYLVSTMKKLWSDDEYIKRLYSDYLKEVVVAEMGRQDVTLSDMAAYLSNETPSKKKNFGYTTFTRIREVCRGLSSIKDAPLHKIKIVEQEGKLAILVQAIEDGPEAVYTESHMKKLQLLLKKEVNSGILHRFITQKPVKSQVVQVVLQHPQSNSFVRNGGQMSFSTHKIVHKARLNMLVCNANTWDPASTKQCRRCGEKETQMHILQVCSYNKSGLITERHNAVHNKVSELIEKGSKRNWELQDDLVIPGPSVKRPDIMLRSPDGKEIILADVTCPYEYLKGIQRAWDHKVEKYTKAYKYLEARGIKVTVLPIVVGSLGTWWKPTTNSLLQLGIDRKTINEWIPKLCAATAEYSKNIYWRHIKGDRYQSIPMKFGLDKPPGNSWKRGKRRKPPKPAKN

SEQ ID NO: 15640 - protein, 1206 aa, Caenorhabditis remanei
MKRMLRRRGYELFSAPYHQIIPQKMSNDVDGCEIIDDVFYDDSEKERDESEDVKKNITEVSIENITPLEKTEKVEECKRIDSILYGESEQGENETVDVKETGSDLSIEKGEIIDKLPVDVIENVVKESAGLLEVFRSEISTENATIPVQNRENGNDFGIISNILSKLVETVVYNVEGIGEIPKLMDIKLATPEKVCQVKQKRREKPKKQMGKIQKVPAGKADELIQQVRVWFEKEFNSYVQDGKSFQRLEWLADSLTAAIHKASVGDEGALKKIEKRCPPLEMKEGEMSTQTTVTKSARNTSQMSGEKSKGARESLGKSYWQNRAKTYNRLIGKESKQCEIPIGVLEKFFTETTSVTNVPKEVLEAKSSKLPKAQVGEWIEGEFTQKELADALKKTKDTAPGVDGLKYHHLSWFDPDSRLLALLYNECRVHRRIPAHWKEAETILLYKGGDELKPDNWRPISLMPTIYKLYSSLWNRRIRSVNGVLSKCQRGFQEREGCNESIAILRTAIDVAKGKKRDLSVAWLDLTNAFGSVPHELIEHTLIRNGFPEMVVQVVKDMYKGASIRVKSKTEKSEQIQIKSGVKQGDPISPTLFNMCLENVIRRHLDTAAGHKCLNTKIKVLAFADDMAILSESQDQLQRELTKLDGDCTPLNLIFKPAKCASLVLEKGKVNAAAVVNLKGVPIRNMACSDTYKYLGIQTGVETRTSEMDLIESVVKEFELLVRDEELTLPQKLDCIKSFMLPKMTYMYGNSIPKLTELKYFAGETMKAVKSIHEIPHSGSPVEYCQLPISKGGLGVACPKITALITYLVSTMKKLWSDDEYIKKLYSDYLKEVVVAETGRQDVTLSDMAAYLSNETPSKKKNFGYTTFTRIREVCRGLSSIKDAPLHKIKIVEHEGKLAILVQAIEDGPEAVYTESHVKKLQLLLKKEANTGILHRFITQKPVKSQVVQVVLQHPQSNSFVRNGGQMSFSAHKIVHKARLNLLVCNANTWDATSTKQCRRCVKEKETQMHILQVCTYNKSGLITERHNAVHNKVSELIKKGSKRNWKLVDDSVIAGPSVKRPDIMLRSPDGKEIILADVTCPYECGLKGMQRAWDHKVEKYTKAYKYLEARGIKVTVLPIVVGSLGTWWKPTTNSLVQLGIDRKTINEWIPKLCAATAEYSKNIYWRHIKGDRYQSIPMKFGLDKPPGNSWKRRKRRKPPKPAKN

SEQ ID NO: 15641 - protein, 1581 aa, Caenorhabditis latens
MLEKHGTQHRPRIKSAPTTNQKVAAVMKKAAPSLQRPERVERKGYAGLPVEESTPEKILRVEAMEKLPQTRAVTKSLSVLKESVKKSVKKTEEKQMGKKVFSIFSKNGETNSPASRRLSVAPVRTNSLGSVVDLSNLQGPERVKAAKQNAQITARLETKRRRSSLSVLKPQKVSGKSGKEEINRISAIIPEDSDVSREKDGNKSGVLNLTFESDGSNGYVGKRFNTWCLDHEDSREAWLSDEVIQWYLERICAKSEKYKVLDPLTWEIWKINGIQMVESKLWSSKTYFFPVCEENHWILLIIDSQSVWYANSLAYEPAGNVAKFLKELKRERKYFEIPTPYQQDKVNCGVHVCLIARSIESGVYWYDIKDVQSFRTDMKIMLRRRGYELFSAPYHQNIPQKMSIDVDDCEIIDDVFYDDFEKEKVESEDVKKTTTEILIENITPLENTEKVEECKRIDSILFDESEKDEKETADVKENRSELSIEKDEIIDKSPADVIENVVKESEGLLEVFRSEISTENATIPVQNDENGDDFGIINNILTNLVEIVVYNVEGIREIPKLMDIKLATPEKVTQVKQKRREKPKKQMGKIQKVPAGKADELIQQVRVWFEKEFNSYVQDGKSFQRLEWLADSLTAAIHKASVGDEGAVKKIEKRCPPLEMKEGEMSTQTTVTKSVRNTSQNSGEKSKGARESLGKSYWQNRAKTYNRLIGKVSKQCEIPIGILEKFFTETTSVTNVPKEVLEAKSSKLPNAQVGEWIEGEFTHKELADALKKTKDTAPGVDGLKYHHLSWFDPDSRLLALLYNECRVHRRIPAHWKEAETILLYKGGDELKPDNWRPISLMPTIYKLYSSLWNRRIRSVNGVLSKCQRGFQEREGCNESIGILRTAIDVAKGKKRDLSVAWLDLTNAFGSVPHELIEHTLIRNGFPEMVVHVVKDMYKGASIRVKNKTEKSEQIQIKSGVKQGDPISPTLFNMCLENVIRRHLDTAAGHKCLNTKIKVLAFADDMAILSESKDQLQRELTKLDGDCTPLNLIFKPAKCASLVIEKGKVNPSAVINLKGVPIRNMAGSDTYKYLGIQTGVETRTSEMDLIESVVKEFELLVRDEELTLPQKLDCIKSFMLPKMTYMYGNSIPKLTELKYFAGETMKAVKSIHEIPHSGAPVEYCQLPISKGGLGVACPKITALITYLVSTMKKLWSDDEYIKRLYSDYLKEVVVAEMGREDVTLSDMAAYLSNETPSNKKNFGYTTFTRIREVCRGLSSIKDSPLHKIKIVEHEGKLAILVQAIEDGPEAVYTESHVKKLQLLLKKEANTGILHRFITTKPVKSQVVQVVLQHPQSNSFVRNGGEMSFSTHKIVHKARLNLLVCNANTWDPNSTKECRRCKKKETQMHILQVCTYNRSGLITERHNAVHNKVSELIKKGSKKNWELEDDLVIPGPSVKRPDIVLRSPDGKEIILADVTCPYECLDGMQGAWDYKVKKYTETYKYLEARGIKVTVLPIVVGSLGTWWKPTTNSLLQLGIDRKTINQWIPKLCAATAEYSKNIYWRHIKGDRYLSIPMKFGLDKPPGNSWKRGKRHKPPKPAKK

SEQ ID NO: 15642 - protein, 2458 aa, Caenorhabditis latens
MEFSCQSHCEKTTALNPYDSEFKKELNSDFISKKVIPTSDFPGKIAKSDGESQKSDFSPEKVSDSISDVPTVIPTSDSSLRIRKSDQKPQSNVEKERIFDFDAFCSENDGEKSIFQAEIQIISVKNHFSVVLIPVAPPFVHKQRYFGENSQKIAARNAAKPVSPTAVSASPHSPRTLDKDTLLHSNDSDASRTAKCTYRMVDLDGMEGLGYGEYSGIFYFVGKSVEKWKILEKAKILVKNPFFSEIPSKNGFRDIIRGNRPENRLFIVFFSRKMMINLVSFEKITRLLPEELLRILLALSANSLVSQPNFWRPAEKYVGKLLILVKRKLELTKKSLPNLGNEVKNREITPEMRDLLIFGADDENSNKNVFFIVEKENFFDFNKVFVSESSKIRSEDAKEATTIEKGQEKWLERRPRRPPKDWKEIAEKETVSDLKICKKPSLVYGAESVDVPSSADLSICSASRLHHFYQIFSVENVKIDKNMKFTVEIWRDSAVMRVFTSFYNWFMLVDEGKVLALPVFSSFSLQIIDWTDKNGANQKMLIFAENQGVFSENNRSETEISREFLENAAKTWFLWENRAKELENIDFVFENINFVSGSLKLPPAERKAVSTRDVANESIERVTIRREELDKGSADGKKVREPEICSDISQEHREVAEEDLYSSSVLSVCLATSTESFFTFEKIEKDKKKILVFLVEFFGSFVEKQVPNSSKCRSVLVEKRKMPGFLVFSTLPCQIINRKSHNKEKWAEIAKNEPKMGNFKRKMQSSIKRPPAKVIRGGAKIARSEAEKAERIVLLETRGENIVVCQVLIPPTGRYRCYYEDCFGTSAGGAGAADLQHLTRHLSNVHQKKVEWTYKCSICGEEPTGKSTKATRWVSSHMLEKHGTQHRPRIKSAPTTSQKVAAVMKKAAPSLQRPERVERKGYAGLPVEESTPEKMLRVEAMEKLPQTRAVTKSLSVLKESVKKSVKKTEEKQMGKKVFSIFTKNGETNSPASRRLSVAPVRTNSLGSVVDLSNLQGPERVKAAKQNAQITARLESKRRRSSLSVLKPQKVSGKPGKEEINRISAIIPEDSDVSREKDGNESGVLNLTFESDGSNGYVGKRFNTWCLDHEDSREAWLSDEVIQWYLERICAKSEKYKVLDPLTWEIWKINGIQMVESKLWSSKTYFFPVCEENHWILLIIDSQSVWYANSLAYEPAGNVAKFLKELKRERKYFEIPTPYQQDKVNCGVHVCLIARSIESGVYWYDIKDVQSFRTDMKIMLRRRGYELFSAPYHQNVPQKMSIDVDDCEIIDDVFYDDFEKEKVESEDVKKTTTEILIENITPLENTEKVEECKRIDSILFDESEKDEKETADVNENRSELSIEKDIKIDKSPADVIENIVKESEGLLEVFRSEISTENTTIPVQNDENGDDFGIINNILTNLVEIVVYNVEGIREIPKLMDIKLATPEKVTQVKQKRREKPKKQMGKIQKVPAGKADELIQQVRVWFEKEFNSYVQDGKSFQRLEWLADSLTAAIHKASVGDEGAVKKIEKRCPPLEMKEGEMSTQTTVTKSVRNTSQNSGEKSKGARESLGKSYWQNRAKTYNRLIGKVSKQCEIPIGILEKFFTETTSVTNVPKEVLEAKSSKLPNAQVGEWIEGEFTHKELADALKKTKDTAPGVDGLKYHHLSWFDPDSRLLALLYNECRVHRRIPAHWKEAETILLYKGGDELKPDNWRPISLMPTIYKLYSSLWNRRIRSVNGVLSKCQRGFQEREGCNESIGILRTAIDVAKGKKRDLSVAWLDLTNAFGSVPHELIEHTLIRNGFPEMVVHVVKDMYKGASIRVKNKTEKSEQIQIKSGVKQGDPISPTLFNMCLENVIRRHLDTAAGHKCLNTKIKVLAFADDMAILSESKDQLQRELTKLDGDCTPLNLIFKPAKCASLVIEKGKVNASAVINLKGVPIRNMAGSDTYKYLGIQTGVETRTSEMDLIESVVKEFELLVRNEELTLPQKLDCIKSFMLPKMTYMYGNSIPKLTELKYFAGETMKAVKSIHEIPHSGAPVEYCQLPISKGGLGVACPKITALITYLVSTMKKLWSDDEYIKRLYSDYLKEVVVAEMGREDVTLSDMAAYLSNETPSNKKNFGYTTFTRIREVCRGLSSIKDSPLHKIKIVEHEGKLAILVQAIEDGPEAVYTESHVKKLQLLLKKEANTGILHRFITTKPVKSQVVQVVLQHPQSNSFVRNGGEMSFSTHKIVHKARLNLLVCNANTWDPNSTKECRRCKKKETQMHILQVCTYNRSGLITERHNAVHNKVSELIKKGSKKNWELEDDLVIPGPSVKRPDIVLRSPDGKEIILADVTCPYECLDGMQGAWDYKVKKYTETYKYLEARGIKVTVLPIVVGSLGTWWKPTTNSLLQLGIDRKTINQWIPKLCAATAEYSKNIYWRHIKGDRYLSIPMKFGLDKPPGNSWKRGKRHKPPKPAKK

SEQ ID NO: 15643 - protein, 1180 aa, Caenorhabditis latens
MSIDVDDCEIIDDVFYDDFEKEKVESEDVKKTTTEILIENITPLENTEKVEECKRIDSILFDESEKDEKETADVKENRSELSIEKDKIIDKSPADVIENVVKESEGLLEVFRSEISTENATIPVQNDENGDDFGIINNILTNLVEIVVYNVEGIREIPKLMDIKLATPEKVTQVKQKRREKPKKQMGKIQKVPAGKADELIQQVRVWFEKEFNSYVQDGKSFQRLEWLADSLTAAIHKASVGDEGAVKKIEKRCPPLEMKEGEMSTQTTVTKSVRNTSQNSGEKSKGARESLGKSYWQNRAKTYNRLIGKVSKQCEIPIGILEKFFTETTSVTNVPKEVLEAKSSKLPNAQVGEWIEGEFTHKELADALKKTKDTAPGVDGLKYHHLSWFDPDSRLLALLYNECRVHRRIPAHWKEAETILLYKGGDELKPDNWRPISLMPTIYKLYSSLWNRRIRSVNGVLSKCQRGFQEREGCNESIGILRTAIDVAKGKKRDLSVAWLDLTNAFGSVPHELIEHTLIRNGFPEMVVHVVKDMYKGASIRVKNKTEKSEQIQIKSGVKQGDPISPTLFNMCLENVIRRHLDTAAGHKCLNTKIKVLAFADDMAILSESKDQLQRELTKLDGDCTPLNLIFKPAKCASLVIEKGKVNPSAVINLKGVPIRNMAGSDTYKYLGIQTGVETRTSEMDLIESVVKEFELLVRDEELTLPQKLDCIKSFMLPKMTYMYGNSIPKLTELKYFAGETMKAVKSIHEIPHSGAPVEYCQLPISKGGLGVACPKITALITYLVSTMKKLWSDDEYIKRLYSDYLKEVVVAEMGREDVTLSDMAAYLSNETPSNKKNFGYTTFTRIREVCRGLSSIKDSPLHKIKIVEHEGKLAILVQAIEDGPEAVYTESHVKKLQLLLKKEANTGILHRFITTKPVKSQVVQVVLQHPQSNSFVRNGGEMSFSTHKIVHKARLNLLVCNANTWDPNSTKECRRCKKKETQMHILQVCTYNRSGLITERHNAVHNKVSELIKKSSKKNWELEDDLVIPGPSVKRPDIVLRSPDGKEIILADVTCPYECLDGMQGAWDYKVKKYTETYKYLEARGIKVTVLPIVVGSLGTWWKPTTNSLLQLGIDRKTINQWIPKLCAATAEYSKNIYWRHIKGDRYLSIPMKFGLDKPPGNSWKRGKRHKPPKPAKK

SEQ ID NO: 15644 - protein, 1690 aa, Laupala kohalensis
MRRYDLRPRGRPEGASVRCVSSRRSMSCPPEGTPRAVEREKRLSASPLPPTPQPRTLTPRSPPTPAPRRSLVLGTPSLVNGSDADLAVSPDRVLSCEGNVQTPINAGGTARREVKLTDTEWLLTVSPRVTAEEKEGSARSGRSYAHVAASPPPLPTPTDPKRVEELPGSVTERRAVPSACPPAKVDRDRARRKPRPVPRKREDVGLQVCHPWVSGDKVFTLYPLPMQLRCPLCVDGCWQQPGVGGAELLTAFTHHVKEVHEKEVLNHCLGCGRAVKSTKGKQCGCLADVSVVGPPIVFDPCVVATERITVKDGKASRMTHNSVRTVDGLWLLPLPTPRAIVCPECQYPVATSLDGDRNRKRENFMEHLRVQHKAKATTICRGCLSVVGDVNGHLRRCRRLAVIPPGEIPELALPVFCRAPGCKLRYPSLRLAKQHARRHRRRNARTAAGSDRPPRAFTVREKKERLCRALGVQSLRTAATEETTANGRRRTPQPVTHEFRRVPTSEERALARRLQAGVVAPPAPKQSEPVLLRSASDSVGELVVAPTPDPAPTEPVLKRSTCVGKGKGKPAATVAVTRDEPVLKRSSHEAVSPDPTPLEPVLMRSVRKRHGKRKAVVAPPPLPPTPAAPACEDAPVVADPSAPAVKSAAPRRDRAQWVRRARNLPGSEQRVAPAATANSQSADEEGDSSSNSSASNDSRMLKELEEEFRRLLGREPDPDAAALLEVAYEGLVACAQSIVRLPPARGRGNDGGRVERDAEHLRSAYKRNPRRTMRNIMGDDGKRCELTKEQVQTHFESVLQASGPADLSGLYPQTGERPTVKDTPFTPQEVVRRLQFATNSAPGEDRLTYSHLKSVDPDGRVLATLFNCVRHLRRIPLAWRRSRTVLIHKGGEESEMSNWRPIALMPTLAKLYAGLWASRLSAWVEEHGVLSSAQKGFRPFDGVLEHNFMLQDTIGAARRKKRDICVAFLDLANAFGSVPHAAILAAVEAAGAGSVFLEVVRDLYSRTQTVVLTGGSATEPISMDCGIRQGCPLSAILFNLVVDPVLRAIEVAPPSKPSVLAYADDLVVMGDSPTELQDRLDVTVGVLRRLGVAAKPAKCRSLHLHRGGVNSTTSFSVDGAIIEALGYAEFARYLGKPVGYQLVPSWDDVQRAQEAAYKIADAPLHPWQQLDALKKFLLPSLSFPVRMGHFGKGQMAQLDKILRPPLKHILRLPERATNHYLYGSRDAGAVGFLEMASEVDIWAVDVGFKILTSPDPHVRAAAMEALSDEVKYCFTAEQVTPQLLGAYLSGERKDRHAQMSSWWTRTRASSRRLQVTWHFPEEEGCISLQLPTFNDGPSNAPAAHPFPPPPPPSPAVSPVSGASGGNVGGDADSAEAGTDEPASGFSAFRSTESNISARMRHQVVRRLRRMVQERHNRKWLRLKDQGRCAAALTRSGKISSRFMEKGCDWQTWRFAHSARLNVVRGLRHQVYDNADDSAAACRKGCCDSNGAPLRETLAHVLNGCVSHGTRWTLRHNKVVSTLKGAATRAGYRVLGESRAFTTENLRPDLVVSKGSRIYIYEVTCPFASDGRLEKVREEKINKYEPLRAHFLASGFLSAEVLPIVIGSLGEWDVGNDAAVKKLVSNDRKRSALTEGMVLAVLSASRSIFQIHIGRDNWADPEFLRRGKGAATWENACGDGSTSVENLTEDS

SEQ ID NO: 15645 - protein, 1103 aa, Sitophilus oryzae
MKWTRELNIDIMRSFYYVNQCQDQPLPGWRSSLHADFTRRHPDLQVSEQNVVDRKRVILSKQYLTVDELQNIKREVGNILQQEQEYGDNERNIFHRDEGTSEEQVDRTQQEAENQVPPDNENEVAKEKLAETFESLLAMYINTCPLERPAIPVLRNVRKAQGIIERVNTLLEAYTTPDKSLEYVHLALYCAAVTVVQHNGQSTYYPRAISYNRLDQIPAWRRRLEKTIDKLRGRADLIAEFLKDKPSKKVHQKVRTIAEGAKIYENQPNYLQKLIELQDTYRQKYKAKGARLSRFNATDKRKKQNNEFLKSQKQFFRKLENESAVQQDTAEVDVKAFGNYWSGVWAESERFNHDADWISTIEDKVLNVPRMVVNTFSKEDITAAIKKTQNWKTPGPDRIQNFWLKRFPAIHGALARCFTQALDDPHIFPEFLSNGNTVLLFKKGDPKDPKNYRPITCLSVIYKLFTAVINERLYQHCQTHQIFEAEQKGCIRAALGCKEQLTIDSIILKQVQKKQKNLNISYIDYSKAFDSVPHDWLLRVLDIYKVCPRIINTLGHLMRQWRTDLKLPSRHIGTVRIKRGIFQGDSLSPLWFCLAMNPMSTLLNHTTAGYKIDQGNGKRLNHLLYMDDLKLYGETPSKLNYLIETVQVFSRDIRMSFGFDKCATVNIKRGKIEDRQQVICNIKQLPPKDTYRYLGLAQNSTIDHTTIKREIREKYNTRLMKLLNTKLSGYNLIKAINAWAIPVLTYSFGVVKWSNTDLEDLDRLTRRQLTKFRNLHTNSSVYRLYVSRRMGGRGLLNIKDLCLKQENGMRQRFMSSNCAIMRLIVAQDKGYTPLNLSYRNRIDKPISIEERVAGWKNGALHGRYPKSLQSEGVDLHSSLAWLKNGKLFPETEGFMMAIQDGVMWTRNYEKNVLKQDVVDVCRKCSMRGETIEHITSGCSTLADNAYLGRHNQLAIKSELLSKISPPYYKYSPQPVLESRDAVLYWDRPIITDRTVDHNRPDILFIDKINKTGIIIDIAVPLSHRIKHTETDKITKYENLSYDLKYVWNLKTVKILPFVISVKGIISTEFQKNLKEINLPCSIAKVGQRAVLLQTCHIVRKFLK

SEQ ID NO: 15646 - protein, 992 aa, Adalia bipunctata
MTRRIGEAYKKNLMLYDGLPVEMKPKLPRMKGSKEMLKMVRMVDEIISEHIDGNTPTLDNLVDLVYAGAITVCEGQGVKIINENPAIKSHKPPWCARLEGKIFNIRKKLGVLHTYLSTTEPSKKLQRSVGRIASEFRVRAGDGRFREGITVVSDKLKQKIKALANRIRRYNERVSRYKNNNLYYKDQRQFFRTLEKNPAINTQAPNLATMHMFWNNIWGTDAPHKSGFIIDSIESNTPRHHMEQIHISEEDVSCVLRKMNNWSAPGVDKIHNYWWKHFAGVRPALASALQKALEDPNSIPEFFTLGITNMLPKEDAAQDPKQYRPITCLPTIYKILTGTITHHIWKHIRKHDILSREQNGCRRDAMGCKELLVMDSIITKQAKRKMRNISIAWIDYRKAFDSVPHSWLLNVLRLYGVSEQIVCLLEHLMQTWRTNLLIRTSSGQYRTPEIKVKRGIFQGDTLSPLWFCLALNPLSMLLNNNSYGYVINKERNVKITHQLYMDDLKLYAHNQEQLKKLLSIVSSFSKAINMEIGVEKCAIIHVKRGKITEGEGETLKSGDTLPNLGPQETYKYLGVQQALDIKAADVRKSMKEKLMKRLKLVLKSKLNSKAMFQAINSWVLPSIAYSFGIVKWSTTEINNINTKIRTTLTKYGVHHPHASVNRLYLPRKEGGRGMQHLSITHDKVIKNMRDYFKANNSPFFKIICQADENITPLQLSCETVSTFDVTLERLSEEWHSKPLHGRYPGNLKSRNVNKEQSLTYLTAGYLFPETEGRLMAIQDQVIATRAFLKHIAGQNLSSDQCRRCNQATEHIQHITSSCPILAPKEYLERHNAVAKIYHQELALRTGLIQQKEANYTYRPKDILENERYKLYWDTTIITDRPVKHNRPDIVIFDRREDDVKIIDITIPADENINKAYMEKVSKYHDLAFELKEIYKLRKTSILPIILSVNGLIEMHLLENTQRLQLDQHLISTAQKEVILGTTRTVRRFLLSS

SEQ ID NO: 15647 - protein, 1089 aa, Adalia bipunctata
MRVHYIAKDMEMRTTKKYRHILTDIWNDINPSRQSYANLLSNRVRWILDNQKFTTEELYLIERSCMPTGATEWVDDPELTINERTTRRVSLWRPEDPVDLETNATFKRNLMLYGGIAPEKRPNIPRMRGSKEMLKKVESVDRVIVGHVGSSKPSLHDLVDYVYAGAATVCETLGRKLAYGKSIRTPKKPPWTRRLEETIIKLRKKIGIFHNYLNTANPSKKLKKSVKKAASGYRIKIKDKGFVEQIKVVMDKLKQKIKALGNRLRRYNERVLRYKNNQLFYKNQRQFYRDLEAGPSADSEPPKPEEMHSYWKNIYADDAPYNRGFVTENIVSNVPEHSMQSIQISEQDLSCVLKKLSNWSAPGVDKIHNYWWKHFLGLIPSLRSALQEALDDPTKIPEFFTLGITNMLPKESGTSDPKKYRPITCLPTVYKILTGTISRHLWKYVNANNILAKEQNGCRRDAMGCKELLVVDSIITKLAKRKQRNISMAWIDYRKAFDSVPHAWLLRVLRLYGVSEQVVNLLEHLMQTWRTNLLVKTHNGEYKTAEIQIKRGIFQGDTLSPLWFCLALNPLSQLLNNNSYGFIINKERNARISHQLYMDDLKLYSRNAEELRKLLSVVRSFSRAIRMEMGVEKCAIIHVKRGKITEGESRILTSEDALPHLGPQETYKYLGVQQALEIRSRDVKSSLREKLLKRLRLVLRAKLNSGALFNSINSWVLPSVVYSFGVVRWSQTEIDELSTKIRTTLTKFGVHHPHASVNRLYIPRKEGGRGMQHLAIVHDRVLKNLREYFINKNSPFMRTICEADENITPLHLSSGTAPLLNVTVEKLREEWYSKALHGRYPKNLKLKTVNEKESLTYLTSGYLFPETEGRILAVQDQVIGTRAFLKRIAGQNLPTDQCRRCSQATEHIQHITSSCPILAPREYLERHNAVCKIYHQAIGLSMKLIKNITPNHTYMPSDVLENDRYKLYWDTSIITDRPVKHNRPDIVLLDREKSEIKIIDVTIPADDNIEKAYTEKLSKYHDLAFEMKEVYRLKSTSIIPLILSVNGLVESHLPENTSRLGLEQDLISKAQREVILGTTRTVRKFLTSS

SEQ ID NO: 15648 - protein, 1169 aa, Adalia bipunctata
MTQGGGGCRTGPLRSRPEDQSDGGLCGASGADLQDGTVRPELVARENSLDERQARPAVPRRQDGRTRWTEEDNILLMRVHFIAKELETTATKTYRQHLTEIWNDVRSDRKSYANLLSNRVRWILQNQKFTSEELHNIEKSCWPTGTTVATDEVQPIARRRSIFSDLVRRSTAAHESPMTRRIGEAYKKNLMLYDGLPVEMKPKLPRMKGSKEMLKMVRMVDEIISEHIDGNTPTLDNLVDLVYAGAITVCEGQGVKIINENPAIKSHKPPWCARLEGKIFNIRKKLGVLHTYLSTTEPSKKLQRSVGRIASEFRVRAGDGRFREGITVVSDKLKQKIKALANRIRRYNERVSRYKNNNLYYKDQRQFFRTLEKNPAINTQAPNLATMHMFWNNIWGTDAPHKSGFIIDSIESNTPRHHMEQIHISEEDVSCVLRKMNNWSAPGVDKIHNYWWKHFAGVRPALASALQKALEDPNSIPEFFTLGITNMLPKEDAAQDPKQYRPITCLPTIYKILTGTITHHIWKHIRKHDILSREQNGCRRDAMGCKELLVMDSIITKQAKRKMRNISIAWIDYRKAFDSVPHSWLLNVLRLYGVSEQIVCLLEHLMQTWRTNLLIRTSSGQYRTPEIKVKRGIFQGDTLSPLWFCLALNPLSMLLNNNSYGYVINKERNVKITHQLYMDDLKLYAHNQEQLKKLLSIVSSFSKAINMEIGVEKCAIIHVKRGKITEGEGETLKSGDTLPNLGPQETYKYLGVQQALDIKAADVRKSMKEKLMKRLKLVLKSKLNSKAMFQAINSWVLPSIAYSFGIVKWSTTEINNINTKIRTTLTKYGVHHPHASVNRLYLPRKEGGRGMQHLSITHDKVIKNMRDYFKANNSPFFKIICQADENITPLQLSCETVSTFDVTLERLSEEWHSKPLHGRYPGNLKSRNVNKEQSLTYLTAGYLFPETEGRLMAIQDQVIATRAFLKHIAGQNLSSDQCRRCNQATEHIQHITSSCPILAPKEYLERHNAVAKIYHQELALRTGLIQQKEANYTYRPKDILENERYKLYWDTTIITDRPVKHNRPDIVIFDRREDDVKIIDITIPADENINKAYMEKVSKYHDLAFELKEIYKLRKTSILPIILSVNGLIEMHLLENTQRLQLDQHLISTAQKEVILGTTRTVRRFLLSS

SEQ ID NO: 15649 - protein, 1089 aa, Coccinella septempunctata
MRVHYIAKDMEIRTRRRYRQLLTEFWNDVSPGRQSYANLLCNRVRWILDGQKFTSEELYRIERSFIPTGATEWVEDSDLTMDEGTKRRVSLWRPENPVDLENNERFKRNLILYGGVAPDKRPNIPRLKGSSELLKEVRSIDRVIVGHIGSSRPSLHDLMDYVYAGAVTVCERQGHKITYGKAVRTPQRPPWTRRLEEKITKLRKKIGVLHSYLGEAAPSKKLRKSMKKTASEYHIKVNSKGLKDQLKSLMDKLKQKIKALGSRLRRYNERVLRFKNNQLFYRNQKQFFRNLEARPNADTEPPKPEEMQGYWSNIWAENAPHNRGFVIDSIKTNTPEYSMQPISISEQDISCVMKRLNNWSAPGVDKIHNYWWKNFSGLRPALISALQEAINNPTSIPDFFTLGVTYMLPKEKDTRDPKKYRPITCLPTIYKILTAIITRHLWKHINANNILAMEQNGCRRNAMGCKELLIVDSIITKQAKKRQRNISIAWIDYKKAFDSVPHSWLLEVLKLYGVSEQVVNLLEQLMQTWRTRLLVKTPNGEYETAEINIKRGIFQGDTLSPLWFCLALNPLSRLLNNHSYGYVVDRDHNIRINHRLYMDDLKLYARNAEELEKLLSIVRSFSGAIRMEMGIEKCAVIHVKRGKITEEGARALNSEDQLPYLGPHESYKYLGVQQALEIKSKEVRNTLKEKLLQRLRLVLRAKLNSRSLFTAINSWVLPSVVYSFGVVGWSKTEIEDLNTKIRTTLTKFGVHHPHASVSRLYLPRKDGGRGMQHLAIVHDRILKNLREYFTSNNSDFIRTICRADENITPLQLSSGSASLLGVTEEKLRNEWHSKALHGRYPNNLKKEAVSERDSLTYLTSGYLFPETEGRIIAVQDQAVATRAFLKRIAGQNLATDQCRKCNQATEHIQHITSSCPILAPRDYLERHNAVCKLYHQAIGMRVGLITIVKANHIYLPNDVLENKRYKLYWDTVMTTDRPVKHNRPDIVLLDLEEGSVKIIDITIPADENIEKSYAEKVSKYHDLAFEMKQIYRLKSTCIIPIIISVNGLIESHLPENTRRLELDHQLVSKAQKEVILGTTRTVRKFLTST

SEQ ID NO: 15650 - protein, 1115 aa, Harmonia axyridis
MGISLDEDLPRPTSNPTQDGRTRWSEEDNIILMRVHYIAKDMEMRSTKRYRQLLTEIWNDVYPSRQSYANLLSNRVRWILESQKFTTEELYCIERSYNPTGATEWVDDPELIINERTTRRVSLWRPQNPIDLETNTAFKKNLMLYGGIAPEKRPNIPRMKGSKEMLLKVESVDRVLAGHIGCSQPSLHELVDFVYVGALTVCESLGRKITYGKAIRTPQRPPWTRRLEEKIGIFYSYLNTTIPSKRLRKSIKKAAAEYRIKIKDKNFVERITVLMDKHKQKIKALGNRLRRYNERVLRYQNNQLFYKNQRQFYRNLEAGPKAHSEPPKLDEMHGYWNNIWADDEPHSKRFVTENIRSNTPEYSMQPTRVSEQDLNYVLKKLSNWSAPGVDKIHNYWWKHFSSLKPALRSALQEALDDPTKIPEFFTLGVTNMLPKENGAQDPKKYRPITCLPTIYKILTGIITRHLWKHVNTNNILAKEQNGCRRNAMGCKELLVIDSVITKQASRKLRNLSMAWIDYKKAFDSVPHSWLLEVLKLYGVSEQVVNLLEHLMQTWRTNLIVKTTNGEYKTAEIKIKRGIFQGDTLSPLWFCLALNPLSQMLNHNKYGYILDRLRNVRISHSLYMDDLKLYARNAEELKKLLSIVKSFSRAIRMEMGVEKCAVIHVKRGKIIEGDSNILTGEEELPHLGPQESYKYLGIQQALEIRSKDMKSSLKEKLLKRLRLVLKAKLNSGALFGAINSWVLPSVVYSFGVIGWSRTEIDELSTKIRTTLTKFGVHHPHASVNRLYIPRKEGGRGMQHLAIAYDRVVSSLREYFLNNNNSPLKKTICEADENITPLHLSSATTPLLGVTVEKLREEWYSKPLHGRYPKNLKSKSVNEKESTTYLTSGYLFPETEGRILAVQDQVVGTRAFLKRIAGQNLPTDQCRRCNQATEHIQHITSSCPILAPREYLERHNAVCKIYHQAIGRSIGLIKDIVQNHTYLPSEVLENDRYKLYWDTSIITDRPVQHNRPDIVLLDREKSEVKIIDVTIPADDNMERAYTDKLTKYHDLAFEMKEIYRLKTTSVIPLILSVNGLVESHLLENTLRLGIEEKLVSLAQKEVILGTVRTVRKFLTSL

SEQ ID NO: 15651 - protein, 980 aa, Adalia bipunctata
MLYGGIAPEKRPNIPRMKGSKEMLMKVESVDRVLAGHIGCSQPSLLELVDLVYVGAVTVCESLGRKITYGKAIRTPQRPPWTRRLEEKIKKLRKKIGIFHSYLNTTNPSKRLRKLIKKAAAEYRIKTKDKHFVEQITVLMDKLKQKIKALGNRLRRYNERVSRYQNNQLFYKNQRQFYRNLEDGPNAHSEPPKPDEMHGYWNNIWADDEPHSDGFVTESIRSNTPEYSMQPIRVSEQDLSYVLKKLSNWSAPGVDKIHNYWWKHFSSLKPALRSALQEALDDPTKIPEFFTLGVTNMLPKENGAQDPKKYRPITCLPTIYKILTGTITRHLWKHVNANNILAKEQNGCRRNAMGCKELLVIDSIITKQVSRKLRNLSMAWIDYKKAFDSVPHSWLLEVLKLYGVSEQVVNLLEHLMQTWRTNLIVKTTKGEYKTAEIKIKRGIFQGDTLSPLWFCLALNPLSQMLNNSKYGYILNKVRSVRISHSLYMDDLKLYARNAEELKKLLSIVKSFSRVIRMEMGVEKCAVIHVKRGKIVESESNILTGEEELPHLGPQESYKYLGIQQALEIRSKDVKGSLKEKLLKRLRLVLKAKLNSGALFNAINSWVLSSVVYSFGVIGWSRTEIDELSTKIRTTLTKFGVHHPHASVNRLYIPRKEGGRGMQHLSIAYDRVVSSLREYFLNNNNSPFKKTICEADENITPLHLSSATAPLLGVTVEKLREEWYSKPLHGRYPKNLKSKSVNEKKSTTYLTYGYLFPETEGRILAVQDQVVGTRAFLKRIAGQNLPSDLCRRCNQATEHIQHITSSCPILAPREYLERHNAVCKIYHQAIGRSIGLIKDIVQNHTYLPSEVLENDRYKLYWDTSIITDRPVQHNRPDIVLLDREKSEVKIIDVTIPADDNMERAYTDKLTKYHDLAFEMKEIYRLKTTSVIPLILSVNGLVESHLLENTLRLGVEEKLVSLAQKEVILGTARTVRKFLTSL

SEQ ID NO: 15652 - protein, 1090 aa, Adalia bipunctata
MRVHYIAKDMEMRTTKRYRQLLTEIWNDVYPSRQSYANLLSNRVRWILENKKFTTEELYCIERSYNPTGATEWVDDPELIINERTTRRVSLWRPQNPIDLETNTAFKKNLMLYGGIAPEKRPNIPRMKGSKEMLMKVESVDRVLAGHIGCSQPSLLELVDLVYVGAVTICESLGRKITYGKAIRTPQRPPWTTRLEEKIKKLRKKIGIFHNYLNTTNPSKRLRKLIKKAAAEYRIKTKDKHFVEQITVLMDKLKQKIKALGNRLRRYNERVSRYQNNQLFYKNQRQFYRNLEDGPNAHSEPPKPDEMHGYWNNIWADDEPHSDGFVTESIRSNTPEYSMQPIRVSEQDLSYVLKKLSNWSAPGVDKIHNYWWKHFSSLKPALRSALQEALDDPTKIPEFFTLGVTNMLPKENGAQDPKKYRPITCLPTIYKILTGTITRHLWKHVNANNILAKEQNGCRRNAMGCKELLVIDSIITKQVSRKLRNLSMAWIDYKKAFDSVPHSWLLEVLKLYGVSEQVVNLLEHLMQTWRTNLIVKTTKGEYKTAEIKIKRGIFQGDTLSPLWFCLALNPLSQMLNNSKYGYILNKVRSVRISHSLYMDDLKLYARNAEELKKLLSIVKSFSRVIRMEMGVEKCAVIHVKRGKIVESESNILTGEEELPHLGPQESYKYLGIQQALEIRSKDVKGSLKEKLLKRLRLVLKAKLNSGALFNAINSWVLPSVVYSFGVIGWSRTEIDELSTKIRTTLTKFGVHHPHASVNRLYIPRKEGGRGMQHLSIAYDRVVSSLREYFLNNNNSPFKKTICEADENITPLHLSSATAPLLGVSVEKLREEWYSKPLHGRYPKNLKSKSVNEKESTTYLTYGYLFPETEGRILAVQDQVVGTRAFLKRIAGQNLPSDLCRRCNQATEHIQHITSSCPILAPREYLERHNAVCKIYHQAIGRSIGLIKDIVQNHTYLPSEVLENDRYKLYWDTSIITDRPVQHNRPDIVLLDREKSEVKIIDVTIPADDNMERAYTDKLTKYHDLAFEMKEIYRLKTTSVIPLILSVNGLVESHLLENTLRLGVEEKLVSLAQKEVILGTTRTVRKFLTSL

SEQ ID NO: 15653 - protein, 1090 aa, Coccinella septempunctata
MRVHYIAKDMEMRTTKRYRQLLTEIWNDVYPSRQSYANLLSNRVRWILENQKFTTEELYCIERSYNPTGATEWVDDPELIIDERTTRRVSLWRPQNPTDLETNTAFKKNLMLYGGIAPEKRPNIPRMKGSKEMLMKVESVDRVLAGHIGCNQPSLHELVDFVYVGAVTVCESLGRKITYGKAMRTPQRPPWTRRLEEKIKKLRKKIGIFYSYLNTTDPSKRLRKSIKKAAAEYRIKTKDKNFVEQITVLMDKLKQKIKALGNRLRRYNERVSRYQNNQLFYKNQRQFYRNLEAGPNAHSEPPKPDEMHGYWNNIWADDEPYSEGFVTESIRSNTPEYSMQPIRVSEQDLSYVLKKMSNWSAPGVDKIHNYWWKHFSSLKPALRSALQEALDDPTKIPEFFTLGATNMLPKENYAQDPKKYRPITCLPTIYKILTGTITRHLWKHVNANNILAKEQNGCRRNAMGCKELLVIDSVITKQASRKLRNLSMAWIDYKKAFDSVPHSWLLEVLKLYGVPEQVVNLLEHLMQTWRTNLIVKTTSGEYKTAEIKIKRGIFQGDTLSPLWFCLALNPLSQMLNNNKYGYILDKVRNVRISHSLYMDDLKLYARNAEELKKLLTIVKSFSRAIRMEMGVEKCAVIHVKRGKIIEGDSNILTGEEELPHLGPQESYKYLGIQQALEIRSKDVKSSLKEKLLKRLRLVLKAKLNSGALFSAINSWVLPSVVYSFGVIGWSRTEIDELSTKIRTTLTKFGVHHPHASVNRLYIPRKEGGRGMQHLAIAYDRVVSSLREYFLNNNNSPFKKTICEADENITPLHLSSATTPLLGVTVEKLREEWYSKPLHGRYPKNLKSKSVNEKESTTYLTSGYLFPETEGRILAVQDQVVGTRAFLKRIAGQNLPTDQCRRCNQATEHIQHITSSCPILAPREYLERHNAVCKIYHQAIGRSIGLIKDIVQNHTYLPSEVLENDRYKLYWDTSIITDRPVQHNRPDIVLLDREKSEVKIIDVTIPADDNMERAYTDKLTKYHDLAFEMKEIYRLKTTSVIPLILSVNGLVESHLPENTLRLGLEEKLVSLAQKEVILGTARTVRKFLTSL

SEQ ID NO: 15654 - protein, 1122 aa, Harmonia axyridis
MGISLDEDLPRPTSNPTQDGRTRWSEEDNIILKSVHYIAKDMEMRSTKRYRQLLTEIWNDVYPSRQSYANLLSNRVRWILESQKFTTEELYCIERSYNPTGATEWVDNPELIINERTTRRVSLWRPQNPIDLETNTAFKKNLMLYGGIAPEKRPNIPRMKGSKEMLLKVESVDRVLAGHIGCSQPSLHELVDFVYVGALTVCESLGRKITYGKAIRTPQRPPWTRRLEEKINKLRKKIGIFYSYLNTTIPSKRLRKSIKKAAAEYRIKIKDKNFVERITVLMDKHKQKIKALGNRLRRYNERVLRYQNNQLFYKNQRQFYRNLEAGPKAHSEPPKLDEMHGYWNNIWADDEPHSKRFVTENIRSNTPEYSMQPTRVSEQDLNYVLKKLSNWSAPGVDKIHNYWWKHFSSLKPALRSALQEALDDPTKIPEFFTLGVTNMLPKENGAQDPKKYRPITCLPTIYKILTGIITRHLWKHVNTNNILAKEQNGCRRNAMGCKELLVIDSVITKQASRKLRNLSMAWIDYKKAFDSVPHSWLLEVLKLYGVSEQVVNLLEHLMQTWRTNLIVKTTNGEYKTAEIKIKRDIFQGDTLSPLWFCLALNPLSQMLNHNKYGYILDRLRNVRISHSLYMDDLKLYARNAEELKKLLSIVKSFSRAIRMEMGVEKCAVIHVKRGKIIEGDSNILTGEEELPHLGPQESYKYLGIQQALEIRSKDMKSSLKEKLLKRLRLVLKAKLNSGALFGAINSWVLPSVVYSFGVIGWSRTEIDELSTKIRTTLTKFGVHHPHASVNRLYIPRKEGGRGMQHLAIAYDRVVSSLREYFLNNNNSPLKKTICEADENITPLHLSSATTPLLGVTVEKLREEWYSKPLHGRYPKNLKSKSVNEKESTTYLTSGYLFPETEGRILAVQDQVVGTRAFLKRIAGQNLPTDQCRRCNQATEHIQHITSSCPILAPREYLERHNAVCKIYHQAIGRSIGLIKDIVQNHTYLPSEVLENDRYKLYWDTSIITDRPVQHNRPDIVLLDREKSEVKIIDVTIPADDNMERAYTDKLTKYHDLAFEMKEIYRLKTTSVIPLILSVNGLVESHLLENTLRLGIEEKLVSLAQKEVILGTARTVRKFLTSL

SEQ ID NO: 15655 - protein, 1090 aa, Coccinella septempunctata
MRVHYIAKDMEMRTTKRYRQLLTEIWNDVYPSRQSYANLLSNRVRWILENQKFTTEELYCIERSYNPTGATEWVDDPELIINERTTRRVSLWRPQNPTDLETNTAFKKNLMLYGGIAPEKRPNIPRMKGSKEILMKVESVDRVLAGHIGCNQPSLHELVDFVYVGAVTVCESLGRKITYGKAMRTPQRPPWTRRLEEKIKKLRKKIGIFYSYLNTTDPSKRLRKSIKKAAAEYRIKTKDKNFVEQITVLMDKLKQKIKALGNRLRRYNERVSRYQNNQLFYKNQRQFYRNLEAGPNAHSEPPKPDEMHGYWNNIWADDEPYSEGFVTESIRSNTPEYSMQPIRVSEQDLSYVLKKMSNWSAPGVDKIHNYWWKHFSSLKPALRSALQEALDDPTKIPEFFTLGATNMLPKENYAQDPKKYRPITCLPTIYKILTGTITRHLWKHVNANNILAKEQNGCRRNAMGCKELLVIDSVITKQASRKLRNLSMAWIDYKKAFDSVPHSWLLEVLKLYGVPEQVVNLLEHLMQTWRTNLIVKTTSGEYKTAEIKIKRGIFQGDTLSPLWFCLALNPLSQMLNNNKYGYILDKVRNVRISHSLYMDDLKLYARNAEELKKLLTIVKSFSRAIRMEMGVEKCAVIHVKRGKIIEGDSNILTGEEELPHLGPQESYKYLGIQQALEIRSKDVKSSLKEKLLKRLRLVLKAKLNSGALFSAMNSWILPSVVYSFGVIGWSRTEIDELSTKIRTTLTKFGVHHPHASVNRLYIPRKEGGRGMQHLAIAYDRVVSSLGEYFLNNNNSPFKKTICEADENITPLHLSSATTPLLGVTVEKLREEWYSKPLHGRYPKNLKSKSVNEKESTTYLTSGYLFPETEGRILAVQDQVVGTRAFLKRIAGQNLPTDQCRRCNQATEHIQHITSSCPILAPREYLERHNAVCKIYHQAIGRSIGLIKDIVQNHTYLPSEVLENDRYKLYWDTSIITDRPVQHNRPDIVLLDREKSEVKIIDVTIPADDNMERAYTDKLTKYHDLAFEMKEIYRLKTTSVIPLILSVNGLIESHLPENTLRLGLEEKLVSLAQKEVILGTARTVRKFLTSL

SEQ ID NO: 15656 - protein, 1090 aa, Adalia bipunctata
MRVHYIAKDMEMRTTKRYRQLLTEIWNDVYPSRQSYANLLSNRVRWILENKKFTTEELYCIERSYNPTGATEWVDDPELIINERTTRRVSLWRPQNPIDLETNTAFKKNLMLYGGIAPEKRPNIPRMKGSKEMLMKVESVDRVLAGHIGCSQPSLLELVDLVYVGAVTVCESLGRKITYGKAIRTPQRPPWTRRLEEKIKKLRKKIGIFHSYLNTTNPSKRLRKLIKKAAAEYRIKTKDKHFVEQITVLMDKLKQKIKALGNRLRRYNERVSRYQNNQLFYKNQRQFYRNLEDGPNAHSEPPKPDEMHGYWNNIWADDEPHSDGFVTESIRSNTPEYSMQPIRVSEQDLSYVLKKLSNWSAPGVDKIHNYWWKHFSSLKPALRSALQEALDDPTKIPEFFTLGVTNMLPKENGAQDPKKYRPITCLPTIYKILTGTITRHLWKHVNANNILAKEQNGCRRNAMGCKELLVIDSIITKQVSRKLRNLSMAWIDYKKAFDSVPHSWLLEVLKLYGVSEQVVNLLEHLMQTWRTNLIVKTTKGEYKTAEIKIKRGIFQGDTLSPLWFCLALNPLSQMLNNSKYGYILNKVRSVRISHSLYMDDLKLYARNAEELKKLLSIVKSFSRVIRMEMGVEKCAVIHVKRGKIVESESNILTGEEELPHLGPQESYKYLGIQQALEIRSKDVKGSLKEKLLKRLRLVLKAKLNSGALFNAINSWVLPSVVYSFGVIGWSRTEIDELSTKIRTTLTKFGVHHPHASVNRLYIPRKEGGRGMQHLSIAYDRVVSSLREYFLNNNNSPFKKTICEADENITPLHLSSATAPLLGVTVEKLREEWYSKPLHGRYPKNLKSKSVNEKKSTTYLTYGYLFPETEGRILAVQDQVVGTRAFLKRIAGQNLPSDLCRRCNQATEHIQHITSSCPILAPREYLERHNAVCKIYHQAIGRSIGLIKDIVQNHTYLPSEVLENDRYKLYWDTSIITDRPVQHNRPDFVLLDREKSEVKIIDVTIPADDNMERAYTDKLTKYHDLAFEMKEIYRLKTTSVIPLILSVNGLVESHLLENTLRLGVEEKLVSLAQKEVILGTARTVRKFLTSL

SEQ ID NO: 15657 - protein, 1090 aa, Harmonia axyridis
MRVHFIAKDMEMRSTKRYRQLLTEIWNDVYPSRQSYANLLSNRVRWILESQKFTTEELYCIERSYNPTGATEWVDDPELIINERTTRRVSLWRPQNPIDLETNTAFKKNLMLYGGIAPEKRPNIPRMKGSKEMLLKVESVDRVLAGHIGCSQPSLHELVDFVYVGALTVCESLGRKITYGKAIRTPQRPPWTRRLEEKIKKLRKKIGIFYSYLNTTIPSKRLRKSIKKAAAEYRIKIKDKNFVERITVLMDKHKQKIKALGNRLRRYNERVLRYQNNQLFYKNQRQFYRNLEAGPKAHSEPPKLDEMHGYWNNIWADDEPHSERFVTENIRSNTPEYSMQPTRVSEQDLNYVLKKLSNWSAPGVDKIHNYWWKHFSSLKPALRSALQEAVDDPTKIPEFFTLGVTNMLPKENGAQDPKKYRPITCLPTIYKILTGIITRHLWKHVNTNNILAKEQNGCRRNAMGCKELLVIDSVITKQASRKLRNLSMAWIDYKKAFDSVPHSWLLEVLKLYGVSEQVVNLLEHLMQTWRTNLIVKTTNGEYKTAEIKIKRGIFQGDTLSPLWFCLALNPLSQMLNHNKYGYILDRLSNVRISHSLYMDDLKLYARNAEELKKLLSIVKSFSRAIRMEMGVEKCAVIHVKRGKIIEGDSNILTGEEELPHLGPQESYKYLGIQQALEIRSKDMKNSLKEKLLKRLRLVLKAKLNSGALFGAINSWVLPSVVYSFGVIGWSRTEIDELSTKIRTTLTKFGVHHPHASVNRLYIPRKEGGRGMQHLAIAYDRVVSSLREYFLNNNNSPLKKTICEADENITPLHLSSATTPLLGVTVEKLREEWYSKPLHGRYPKNLKSKSVNEKESTTYLTSGYLFPETEGRILAVQDQVVGTRAFLKRIAGQNLPTDQCRRCNQATEHIQHITSSCPILAPREYLERHNAVCKIYHQAIGRSIGLIKDIVQNHTYLPSEVLENDRYKLYWDTSIITDRPVQHNRPDIVLLDREKSEVKIIDVTIPADDNMERAYTDKLTKYHDLAFEMKEIYRLKTTSVIPLILSVNGLVESHLLENTLRLGIEEKLVSLAQKEVILGTTRTVRKFLTSL

SEQ ID NO: 15658 - protein, 1114 aa, Coccinella septempunctata
MIYIYIHINRTGETRWSEEENIILMRVHYIAKDMEMRTTKRYRQLLTEIWNDVYPSRQSYANLLSNRVRWILENQKFTTEELYCIERSYNPTGATEWVDDPELIINERTTRRVSLWRPQNPTDLETNTAFKKNLMLYGGIAPEKRPNIPRMKGSKEMLMKVESVDRVLAGHIGCNQPSLHELVDFVYVGAVTVCESLGRKITYGKAMRTPQRPPWTRRLEEKIKKLRKKIGIFYSYLNTTDPSKRLRKSIKKAAAEYRIKTKDKNFVEQITVLMDKLKQKIKALGNRLRRYNERVSRYQNNQLFYKNQRQFYRNLEAGPNAHSEPPKPDEMHGYWNNIWADDEPYSEGFVTESIRSNTPEYSMQPIRVSEQDLSYVLKKLSNWSAPGVDKIHNYWWKHFSSLKPALRSALQEALDDPTKIPEFFTLGATNMLPKENCAQDPKKYRPITCLPTIYKILTGTITRHLWKHVNANNILAKEQNGCRRNAMGCKELLVIDSVITKQASRKLRNLSMAWIDYKKAFDSVPHSWLLEVLKLYGVPEQVVNLLEHLMQTWRTNLIVKTTSGEYKTAEIKIKRGIFQGDTLSPLWFCLALNPLSQMLNNNKYGYILDKVRNVRISHSLYMDDLKLYARNAEELKKLLTIVKSFSRAIRMEMGVEKCAVIHVKRGKIIEGDSNILTGEEELPHLGPQESYKYLGVQQALEIRSKDVKSSLKEKLLKRLRLVLKAKLNSGALFSAINSWVLPSVVYSFGVIGWSRTEIDELSTKIRTTLTKFGVHHPHASVNRLYIPRKEGGRGMQHLAIAYDRVVSSLREYFLNNNNSPFKKTICEADENITPLHLSSATTPLLGVTVEKLREEWYSKPLHGRYPKNLKSKSVNEKESTTYLTSGYLFPETEGRILAVQDQVVGTRAFLKRIAGQNLPTDQCRRCNQATEHIQHITSSCPILAPREYLERHNAVCKIYHQAIGRSIGLIKDIVQNHTYLPSEVLENDRYKLYWDTSIITDRPVQHNRPDIVLLDREKSEVKIIDVTIPADDNMERAYTDKLTKYHDLAFEMKEIYRLKTTSVIPLILSVNGLVESHLPENTLRLGLEEKLVSLAQKEVILGTARTVRKFLTSL

SEQ ID NO: 15659 - protein, 686 aa, Anoplius nigerrimus
MLDLTNAFGSVPHATIRRALADAGVPAPITSIIKNLYINCSTRVRTAEGFTRKININAGVKQGCPLSPAVFNLAIDPLLRAVGGEEDGYNLRGRRTAVLAYADDLVLLSDSAGKMQDMLNRVEAAAGGLGFSFNPSKCATLHQNCRGTRRALPTRLSLQGVELRALAAGESYEHLGVPTGFQVNQTPYHTIDGLSRDLRAIDESLLAPWQKAEAVASFLLPRLDFSLRGSHVEKRPLKTVDLAIRRMAKSWMHLPQRASAEVVYLPPSRGGMGLLPLSDWVDALTIAHAFRLLTSPDAVVRELAWTSLRESAAKKIGRPASNRDLAEYLSGSLEGDFARVGGDISTLWTRTRTATRRSKARLGLVWFYSIAREEMVVTLRGSRGRTTTVGPDARVQIIRRLRAAVHESYAEQLANKPDQGKVFQVSSRSSVSNHFVRGGNFTRFADWRFVHRARLDVLPLNGTRRWENGDRRCRRCGGALESLPHVLCHCRPHAAAWQLRHDSVVERIGKASRLPGSLSINKRVEGVEGDLVELRPDIVVRHEPTRSVAIVDVTIAFENQCLAFKEARARKHAKYEPLANALRGRGYDVTVAAIVVGALGSWDPANEAVLKMLKISPKYAKLMRRLIVSETIRWSRDIYVEHVSGVRQYTQVASPDNTTDSTIPAPPASDNGGVGEQEPPLAERTN

SEQ ID NO: 15660 - protein, 1659 aa, Anoplius nigerrimus
MELIFEFPFPEEFRCPECYVPNRVSKHRSSYKTTNDLLKHARLHHPGFTVQYKCGACDFVGSGRYPIKAVKVHHAALHSSENNLNSSNNNTNAQAGLVEARSCRERRVASGVTGPASRGGLRSNNRNNNLNSYFASATADTERRSSGSPTTTTTTTTPPAVSTARRTSTEPATGAPAAETARTRPGGAARPAESPSEGSPREDGRRTTRAGRARSVPGDVRPPGRADRGVAAATTRNLTGATRGPAAATRARRTPASAAAAATTTAAAATMTAPERRRTTRLGSQTAANISYAAVTAGATVVSPAEGLDTAARRGLRSRRSSSLPPGEVGGNDRSPPTRDVRSPPSALTVILEERGALASVPPGTPTMPVTMTTTTVTTTVSGGPIMSTGVPRGRATNSISPIFSGRPTLSPPEVVVNVAGLAGAATSWEYQPSSSPPTPPLPVIDGNDDDDNAREGAGEPWRTVPARRRRSLPATPTTSGHSSPPAPPPRPSTPPITAAAATPSPTSAAATPPPPPAAPVRHRLPPTAAFSMRRSLNSSTSPTNSRGRPERAARDDTPGTCSTTGRGRRLSDLLSPRGSPRRCGTGVGVGVGASLPTGREAPPVGTGGGAARPRGSRVAARRPPVPVGQPSRRGTGRSPRGSVGLAEVREQLVGRAEAVANTADLEDVAVSAAAFFRESSEPAGGGESNGRRGRREQLPRRGGGTAARGLGERAGHRPRQRRDADRDRDRDTNNNRRDLDDRRYTADRPQTEVGGDVRGPPVRRSRVEEATYIQRLFRSNRRRAVQRVLGGSPPRCTVPKERVAEYFERVHARSGTTGSWQPPPPPYGEPDEASNGALVRPFAASEVDLRLRRTSNSAPGPDGLSYRDLRRGDPECRLLASLFNACLRLGSVPDCWKDSNTVLVHKKGDRGDLSNWRPLALGDTTPKLFAAVLADRLLGWTTANKRLSDAQKGFLQCEGCFEHNFVLQEALNDARRGGREVVVAWLDLTNAFGSVPHATIHRALAGAGVPAPITSIIKNFYINCSTRVRTAEGFTRKININAGVKQGCPLSPAVFNLAIDPLLRAVGGGGDGYNLRVRRTAILAYADDLVLLSDSAGNMQNLLNRVEAAAGGLGLTFNPAKCATLHQHCRGPRRALPTRLSLQGVELRALAAGESYEHLGVPTGFQNDQTPHDTIGGLHRDLRAIDNSLLAPWQKAEAVATFLLPRLDFSLRGSHVEKRPLKTVDLAIRRLAKSWLHLPQRASAEVVYLPPSRGGVGLLPLSDWVDALTIAHAFRLLTSPGAVVRELAWTSLRESASRKIGRPATNRDLAEFLSGSLEGDFARVGGDISTLWTRARAAARRTGEKLDLEWKYSNARKELVVTLRGSRGRLTTVGPDARGQIIRRLRAAIHEFYAEHLANKPDQGKAFQVSSRSSVSNHFVRGGNFTRFADWRFVHRARLDVLPLNGTRRWGNGDRRCRRCGEALESLPHVLCHCRPHAAAWQLRHDSVVERIGKASRLPGSLSINKRVEGVEGDLVELRPDIVVRHEPTRSVAIVDVTIAFENQYLAFEEARARKHAKYEPLANALRGRGYDVTVAAIVVGALGSWDPANEAVLKALKISPRYAKLMRRLIVSETIRWSRDIYVEHVSGVRQYTLSTNIEPNSSVPAPSASENGGVGE

SEQ ID NO: 15661 - protein, 1698 aa, Anoplius nigerrimus
MAAKRVLCVSTPCALSLFRSTTPIHSLLRRVRLGTRRTYITKGMELIFNFPFPETFPCPECYTPGRASKNNGSYKNANDLIKHARIHHPGYSVQYRCGVCGFIGVGRYPIKAVKTHHAEEHSILNTLNNSAQAGPGNRRSCREGRVADGLTGSVSRGGPRETNSNSNVRFHDTINGAERRSSGSPTNTNITPATQTTAERSTEPATGAPAAETARVRPGGAARAAQSPREGSPREEGSRTTRAGRARSVPVEVRPPGRAERRVAAATTRNLTGTTRGPAAATRARRTPASAAAAATTSAAATTTAAPTSRRTTRLGSQTAANVTYAAVTAGATVVSPAEGLDTAARRGLRSRRSSSLPPGEVGGNDRSPPPRDVRSPPSALTVIPEERGALASVPPGTPTMPVTMTTTTVTTSTSGGPIMSTGVPRGRAAILTSFAFSDRRTLSPPEVVVNVAGLAGAATPWEHQRTSSPPTPPLPIINGDDDDDDNAREGAGEPWRTVPARRRRSTPATPTTPGHPSPPAPSPRPSTTPTSAAATATPPPPTIAAATPPPPPAAPTRHRLPPTAALTMRRSLNSSTSPTNSRGRPERAAREDTPETCSTTGRGRRLSDFLSPRGSPRRCGTGVGVGVGASLPTGRAAPPGGIGGATSRPRGSRVAARRPPVPVDQPSLRGAERSPRGSVDPVEMREQLIGRAEAVANAADLEDVAVAAASFFRESSEPAGGGESGGRRDRRGQPTRRGGGTAARGLGGRAGHRPRQRRDADRDRDIDSNNNRRDLDDRRNTADRPQTEMSGGGRGPPVRRSRVEEATYIQRLFRSNRRRAVQRVLGGSPPRCTVPKERVAEYFERVHARSGTTGSWQPPPPPYGDPDEASSGALVRPFTASEVDLRLRRTSNSAPGPDGLTYRDLRRGDPDCRLLASIYNACLRLGSVPECWKDSNTVLVHKKGDRGDLSNWRPLALGDTTPKLFAAVLADRLLGWCTANKRLSDAQKGFLRCEGCYEHNFVLQEALNDARRGGREVVVAWLDLTNAFGSVPHATIRRALADAGVPAPITSIIKNLYINCTTRVRTAEGYTRKIKINAGVKQGCPLSPAVFNLAIDPLLRAVGGEGDGYNLRGRRTAILAYADDLVLLSDSADKMQRLLNKVEAAAGGLGFTFNPAKCATLHQHCRGPRRALPTRLSLQGVELRALAAGESYEHLGVPTGFQIVQTPYNTIDGLHRDLRAIDNSLLAPWQKAEAVASFLLPRLDFSLRGSHVEKRPLKTVDLAIRRLAKSWLHLPQRASAEVVYLPPSRGGVGLLPLSDWVDALTIAHAFRLLTSPDAVVRELAWTSLRESASRKIGRPATNRDLAEFLSGSLEGDFARVGGDISTLWTRARAAARRSGEKLDLEWKYSTARKELVITLRGSRGRLTTIGPDARAQIIRRLRAAIHEFYSLQLGNKPDQGKVFQVSSRSSVSNHFVRGGNFTRFADWRFVHRARLDVLPLNGTRRWGNGDRRCRRCGEALESLPHVLCHCRPHAAAWQLRHDAVVERLAKASRLPGILSVNRRVEGVDGDLRGLRPDIVVRHESSRTITIVDVTVAFENEYIAFEEARGRKHVKYEPLADQLRGHGYEVTVAAIVVGALGSWDPANEAVLKTLKISPKYAKLMRRLIVSETIRWSRDIYVEHVSGVRQYKTNATPGTDSPNVAAPMPSDSETRDVGE

SEQ ID NO: 15662 - protein, 1130 aa, Anoplius nigerrimus
MRRRSNSSTSPTNSRQLPERAAREDTPETCSTTGRGRRLSDFLSPRGNPRRCGTGVGEGVGASLPTGRAAPPGGIGGATSRPRGSRVAARRPPVPVDQPSLRGTGRSPRGSVGPVEMREQLIGRAEAVANAADLEDVAVAAASFFRESSEPASGGESGGRRDRREQLTRRGGGTAARGLGGRAGHRPRQRRDVDRDRDSDTNNNRRDLDDRRNTTDRPRTEVSGDGRGPPVRRSRVEEATYIQRLFRSNRRRAVQRVLGGSPPRCTVPKERVAEYFERVHARSGTTGSWQPPPPPYGDPDEASSGALVRPFTASEVDLRLRRTSNSAPGPDGLSYRDLRRGDPDCRLLASIYNACLRLGSVPECWKDSNTVLVHKKGDRNDLANWRPLALGDTTPKLFAAVLADRLLGWCTANKRLSDAQKGFLQCEGCYEHNFVLQEALNDARRGGREVVVAWLDLTNAFGSVPHATIRRALADAGVPAPITNIIKNLYINCTTRVRTAEGFTRKINIEAGVKQGCPLSPVVFNLAIDPLLRVVGGGEDGYNLRGRRTAILAYADDLVLLSDSAGNMQTLLNKVEAAAGGLGFTFNPAKCATLHQQCRGPRRALPTRLSLQGVELRALAAGESYEHLGVPTGFQIVQTPYNTIDGLHRDLRAIDNSLLAPWQKAEAVASFLLPRLDFSLRGSHVEKRPLKTVDLAIRRLAKSWLHLPQRASAEVVYLPPSRGGVGLLPLSDWVDALTIAHAFRLLTSPDAVVRELAWTSLRESATRKIGRPATNRDLAEFLSGSLEGDFARVGGDISTLWTRARAAARRTGEKLDLEWKYSTARKELVVTLRGSRGRLTTIGPDARAQIIRRLRAAIHEFYSLQLGNKPDQGKVFQVSSRSSVSNHFVRGGNFTRFADWRFVHRARLDVLPLNGTRRWGNGDRRCRRCGEALEGLPHVLCHCRPHAAAWQLRHDAVVERLAKASRLPGALSVNKRVEGVDGDLGGLRPDIVVRHESSRTVTIVDVTVAFENEYIAFEEARGRKHVKYEPLADQLRGHGYEVTVAAIVVGALGSWDPANEAVLKTLKISPKYAKLMRRLIVSETIRWSRDIYVEHVSGVRQYKTNATPGIDSPNVAAPTPPDSETRDVGE

SEQ ID NO: 15663 - protein, 1654 aa, Anoplius nigerrimus
MELIIDYPFPETFPCPECFVPGRAGKHVGSYKAANDLLKHARKHHPGFTVQYRCGVCGFIGDGRYPIKSVKAHHADEHCELNISNSNAQAGPRNTRSCREGRVAGGLTGSASRGGSRANNNNRNLNSYFPSATGTERRSSGSPTTTTTSPPATRTAERTTEPATGAPADDTALTRPGGAASDAYSPREGSPREEGRRTTRAGRARSVPVDVRPPGRADRRVAAATTRILTGATRGPAAATRARRTPASAAAAATTSAAATTMAAPTTRRTTRLGSQTAANVTYAAVTAGASVVSPAEGLDTAARRGLRSRRSSSLPPGEVGGSDRSPPTRDVRSPPSALTIIEEERGALASVPPGTPTMPVTMTTTTVTTTVSGGPIMSTGVPRGRATEISIIPFSGRLTLSPPEVVVNVAGLAGAATSWEQLRPSSPPTPPLPRISASDDDDDNNAREGAGEPWRTVEARRRRSQPATPTPSGHPSPPPPTPRPSTPPTTAAATAVTPPPTTAAATPPPPPAAPTRHRLPPTAALTMRRRSNSSTSPTNSRRRPERAAREETPETCSTTGRGRRLSDFLSPRGSPRQCGTGVGEGVGASLPTGRAAPPGGIGGATSRPRGSRVAARRPPVPVGQPSLRGAERNPRGSVDPVEMREQLIGRAEAVANAADLEDVAVAAASFFRESSEPAGGGESGGRRDRRGQPTRRGGGTAARGLGGRSGHRPRQRRDADRDRDIDTNNNRRDLDDRRNTADRPRTEVSGDGRGPPVRRSRVEEATYIQRLFRSNRRRAVQRVLGGSPPRCTVPKEGVAEYFERVHARSGTTGSWQPPPPPYGDPDEVSSGALVRPFTASEVDLRLRRTSNSAPGPDGLTYRDLRRGDPDCRLLASIYNACLRLGSVPECWKDSNTVLVHKKGDRGDLSNWRPLALGDTTPKLFAAVLADRLLGWCTANKRLSDAQKGFLQCEGCYEHNFVLQEALNDARRGGREVVVAWLDLTNAFGSVPHATIRRALADAGVPAPITSIIKNFYTNCSTRVRTAEGYTRKININAGVKQGCPLSPAVFNLAIDPLLRAVGGGEDGYNLRGRRTAVLAYADDLVLLSDSAGKMQDMLNRLEAAAGGLGFSFNPSKCATLHQNCRGTRRALPTRLSLQGVELRALAAGESYEHLGVPTGFQINQTPFHAIDGLRRDLRAIDESLLAPWQKAEAVASFLLPRLDFSLRGSHVEKRPLKTVDLAIRRMAKSWMHLPRRASAEVVYLPPSRGGMGLLPLSDWVDALTIAHAFRLLTSPDAVVRELAWTSLRESAAKKIGRPASNRDLAEYLSGSLEGDFARVGGDISTLWTRTRTATRRSKARLGLVWTYSSSREEMVVTLRGSRGRKTTVGPDARVQIIRRLRAAVHESYAEQLANKPDQGKVFQVSSRSGVSNHFVRGGNFTRFADWRFVHRARLDVLPLNGTRRWESGDRRCRRCGEALESLPHVLCHCRPHAAAWQLRHDSVVERIGKASRLPGSLSINKRVEGVEGDLVELRPDIVVRHEPTRSVAIVDVTIAFENQYLAFEEARARKHAKYEPLANALRGRGYDVTVAAIVVGALGSWDRANEAVLKALKISPRYAKLMRRLIVSETIRWSRDIYVEHVSGVRQYTSSINNGTNSSVPAPSASENGDVGE

SEQ ID NO: 15664 - protein, 950 aa, Anoplius nigerrimus
MREQLIGRAEVVANAADLEDVAVAAASFFRESSEPAGGGESGGRRDRREQLTRRGGGTAARGPRDRAGHRHRLRRDADVNTDSDVDNNRRDADNRRNRSDRPLTDEVSGGGRGPPVRRSRVEEATYIQRLFRSNRRRAVQRVLGGSPPRCTVPKERVAEYFERVHARSGTTGSWQPPPPPYGDPDEASSGALVRPFTASEVDLRLRRTSNSAPGPDGLTYRDLRRGDPDCRLLASIYNACLRLGSVPECWKGSNTVLVHKKGDRNDLANWRPLALGDTTPKLFAAVLADRLLGWCTTNKRLSDAQKGFLQCEGCYEHNFVLQEALNDARRGGREVVVAWLDLTNAFGSVPHATIRPALADAGVPAPITSIIKNFYINCTTRVRTAKGFTRKININAGVKQGCPLSPAVFNLAIDPLLRVVGGEGDGYNLKGRRTAILAYADDLVLLSDSAGKMQRLLNKVEAAAGGLGLKFNPSKCATLHQQCRGPRRALPTRLTLQGVELRALAAGESYEHLGVPTGFQINQTPYQTIGGLQRDLRAIDDSLLAPWQKAEAVATFLLPRLDFSLRGAHVAKGPLKTVDLSIRRAAKSWMHLPQRASAEVVYLPPSRGGCGLLPLTDWVDALTIAHAFRLLTSPDAVVRELAWTSLREAVSKKIGRPASNSDLADYLSGSLEGEFARDGGDVATLWSRARAATRRSKPKLALIWKYSIARKELVVTLRGSRERETTVGPDARAQIIRRLRAAIHEFYSIQLARKPDQGKVFQVSSRSGVSNHFVRGGNFTRFADWRFIHRARLDVLPLNGARRWGNGDRRCRRCGEALESLPHVLCHCRPHAAAWQMRHDAVVERIARASRLPGALSVNKRVEGVDGDLGGLRPDIVIRHEPSRTVTIVDVTIAFENQYPAFEEARGRKHVKYEPLAEQLRGHGYEVALRRSSSAPSAHGIRPTRRFLKR

SEQ ID NO: 15665 - protein, 1643 aa, Anoplius nigerrimus
MELIFDFPFPETFPCPECFMPGSASKHNGSYKTANDLLKHARKYHPGFTAQYRCGVCGFIGVGRYPIKSVKTHHADEHCNLNNSNNSTQAGPGNTRNTRSCREGRVAGGLTGSASRGGPRPNNNSNLNSYFPSAAGTQRRSNGSPTTTTTSPATRTTTEQTTEPATGAPAAETARARPGGAARAAQSPREGSPREEGSRTTRAGRARSVPVEVRPPGRAERRVAAATTRNLTGATRGPAAATRARRTPASAAAAATTTAAATTMAAPTTRRTARLGSQTAANVTYAAVTAGATVVSPAEGLDTAARRGLRSRRSSSLPPGEVGGSDRSPPTRDVRSPPSALTVIPEERGALASVPPGTPTMPVTMTTTTVTTTVSGGPIMSTGVPRGRATETTNSLFSGRLTLSPPEVVVNVAGLAGAATSWEHRYSSSPPTPPLPLITGEDDDDDNVREGAEEPWRTVPARRRRSLPATPTTSGHSSPPAPSPRPTTPPITAAATPPPPPAAPTRNRLPPTAAFSMRRSLNSSTSPTNSRGRPERAAREDTPETCSTTGRGRRLSDFLSPRGNPRRCGTGVGEGVGASLPTGRATPPGGIGGATSRPRGSRVAARRPPVPVDQPSLRGTERSPRGSVDPVEMREQLIGRAEAVANAADLEDVAVAAASFFRESSEPAGGGESGGRRDRREQPTRRGGGTAARGLGGRAGHRPRQRRDADRDRDIDTNNNRRDLDDRRNTADRPRTEVSGDGRGPPVRRSRVEEATYIQRLFRSNRRRAVQRVLGGSPPRCTVPKEGVAEYFERVHARSGTSGSWQPPPPPYGDPDEASSGALVRPFTASEVDLRLRRTSNSAPGPDGLTYRDLRRGDPDCRLLASIYNACLRLGSVPECWKDSNTVLVHKKGDRNDLANWRPLALGDTTPKLFAAVLADRLLGWCTTNKRLSDAQKGFLQCEGCYEHNFVLQEALNDARRGGREVVVAWLDLTNAFGSVPHATIRRALADAGVPAPITSIINNFYINCTTRVRTAEGLTRKINISAGVKQGCPLSPAVFNLAIDPLLRAVGGEGDGYNLRGRRTAILAYADDLVLLSDSADKMQRLLNKVEAAAGGLGFTFNPAKCATLHQHCRGPRRALPTRLSLQGVELRALAAGESYEHLGVPTGFQNNQTPYNIIDGIHRDLRAIDNSLLAPWQKAEAVATFLLPRLDFSLRGSHVEKRPLKTVDLAIRRLAKSWLHLPQRASAEVVYLPPSRGGVGLLPLSDWVDALTIAHAFRLLTSPDAVVRELAWTSLRESASRKIGRPATNRDLAEFLSGSLEGDFARVGGDISTLWTRARAAARRSGEKLDLEWKYSTARKELVITLRGSRGRLTTIGPDARAQIIRRLRAAIHEFYSLQLGNKPDQGKVFQVSSRSGVSNHFVRGGNFTRFADWRFVHRARLDVLPLNGTRRWGNGDRRCRRCGEALESLPHVLCHCRPHAAAWQLRHDAVVERLAKASRLPGALSVNKRVEGVDGDLGGLRPDIVVRHESSRTVTIVDVTIAFENKYIAFEEARGRKHAKYEPLAEQLRGHGYEVAVAAIVVGALGSWDPANEAVLKLLKVSPNYAKLMRRLIVSDTLRWSRDIYVEHVSGVRQNKTNNATPTNTGAPSSPVPENGGVGE

SEQ ID NO: 15666 - protein, 1647 aa, Anoplius nigerrimus
MELIFDFPFPETFPCPECFMPGSASKHNGSYKTANDLLKHARKYHPGFTAQYRCGVCGFIGTGRYPIKSVKTHHADDHENINNSNNSVQAGPGNTRNTRSCREGRVAGGLTGSASRGGPRPNNNSNLNSYFPSAAGTQRRSNGSPTTTTTSPATRTTAEQTTEPATGAPAAETAPARPGGAARAAQSPREGSPREEGSRTTRAGRARSVPVDVRPPGRAERRVAAATTRNLTGATRGPAAATRARRTPASAAAAATTSAAATTTAAPTNRRTTRLGSQTAANATYAAVTAGATVVSPAEGLDTAARRGLRSRRSSSLPPGEVGGNDRSPLPRDVRSPPSALTVIPEERGALASVPPGTPTMPVTMTTTTVTTTVSGGPIMSTGVPRGRATTLISPVFSDRPTLSPPEVVVNVAGLAGAATSWEHQRMSSSPTPPLPLITGEDDDDDNVREGAGEPWRTVPARRRRSLPATPTTSGHSSPPAPSPRPTTPPTTATATPPPPPAAPTRNRLPPTAAFSMRRSLNSSTSPTNSRGRPERAAREDTPETCSTTGRGRRLSDFLSPRGNPRRCGTGVGEGVGASLPTGRATPPGGIGGATSRPRGSRVAARRPPVPVDQPSLRGAGRSPHGSVDPVEMREQLIGRAEAVANAADLEDVAVAAASFFRESSEPAGGGESGGRRDRREQLTRRGGGTAARGPRDRAGHRHRLRRDADVNTDSDVDNNRRDADDRRNRSDRPLTDEVSGDARGPPARRSRVEEATYIQRLFRSNRRRAVQRVLGGSPPRCTVPKERVAEYFERVHARSGTTGSWQPPPPPYGEPDEASNGALVRPFAASEVDLRLRRTSNSAPGPDGLSYRDLRRGDPECRLLASLFNACLRLGSVPDCWKDSNTVLVHKKGDRGDLSNWRPLALGDTTPKLFAAVLADRLLGWCTTNKRLSDAQKGFLQCEGCYEHNFVLQEALNDARRGGREVVVAWLDLTNAFGSVPHATIRRALADAGVPAPITNIIKNLYINCTTRVRTAEGFTRKIKIEAGVKQGCPLSPVVFNLAIDPLLRVVGGGEDGYNLRGRRTAILAYADDLVLLSDSAGNMQNLLNKVEAAAGGLGFTFNPAKCATLHQHCRGPRRALPTRLSLQGVELRALAAGESYEHLGVPTGFQIDQTPYKTIDGLHRDLRAIDNSLLAPWQKAEAVATFLLPRLDFSLRGSHVEKRSLKTVDLAIRRVAKSWLHLPQRASAEVVYLPPSRGGVGLLPLSDWVDALTIAHAFRLLTSPDAVVRELAWTSLRESASRKIGRPATNRDLAEFLSGSLEGDFARVGGDISTLWTRARAAARRSGRKLDLQWKYSTARWELVITLRGSRGRSTTIGPDARAQIIRRLRAAIHEFYSLQLENKPDQGKVFQVSSRSGVSNHFVRGGNFTRFADWRFVHRARLDVLPLNGTRRWGNGDRRCRRCGEALEGLPHVLCHCRPHAAAWQLRHDAVVERLAKASRLPGALSVNKRVEGVDGDLGGLRPDIVVRHESSRTVTIVDVTVAFENEYIAFEEARGRKHVKYEPLADQLRGHGYEVTVAAIVVGALGSWDPANEAVLKMLKISPKYAKLMRRLIVSETIRWSRDIYVEHVSGVRQYKTNATPGIESPNVAAPTPSDSENRDVGE

SEQ ID NO: 15667 - protein, 1643 aa, Anoplius nigerrimus
MELFFDFPFPETFPCPECFMPGSASKHNGSYKTANDLLKHARKYHPGFTAQYRCGVCGFIGTGRYPIKSVKTHHADEHENLNNSISIQARPGNNTRSCREGRVAGGLTGPASRGGRRNTNINSNGALHVPAAERRSSGSPTTTNTSPATRTTAERTSTEPATGAPAAETARVRPGGAARAAQSPREGSPREEGSRTTRAGRARSVPVEVRPPGRAERRVAAATTRNLTGTTRGPAAATRARRTPASAAAAATTSAAATTTAAPTTRRTTRLRSQTAANATYAAVTAGATVVSPAEGLDTAARRGLRSRRSSSLPPGEVGGNDRSPPPRDVRSPPSALTVIPEERGALASVPPGTPTMPVTMTTTTVTTSVSGGPIMSTGVPRGRATNITTNTFSGRLTLSPPEVVVNVAGLAGAATSWEHRYSSSPPTPPLPLITGEDDDDDNVREGAGEPWWTVPARRRCSLPATPTTSGHSSPPAPSPRPTTPPITAAATPPPPPAAPIRNRLPPTAAFSMRRSLNSSTSPTNSRGRPERAAREDTPETCSTTGRGRRLSDFLSPRGSPRQCGTGVGEGVGASLPTGRATPPGGIGGATSRPRGSRVAARRPPVPVDQPSLRGTGRSPRGSVDPVEMREQLIGRAGAVANAADLEDVAVAAASFFRESSEPASGGESGGRRDRREQLTRRGGGTAARGPRDRAGHRHRLRRDADVNRDSDVDNNRRDADNRRDTTARPLTDDVSGGGRGPPVRRSRVEEATYIQRLFRSNRRRAVQRVLGGSPPRCTVPKERVAEYFERVHARSGTTGSWQPPPPPYGDPDEASSGALVRPFTASEVDLRLRRTSNSAPGPDGLSYRDLRRGDPDCRLLASIYNACLRLGSVPECWKDSNTVLVHKKGDRNDLANWRPLALGDTTPKLFAAVLADRLLGWCTTNKRLSSAQKGFLQCEGCYEHNFVLQEALNDARRGGREVVVAWLDLTNAFGSVPHATIRRALADAGVPAPITSIIKNFYINCTTRVRTAEGLTRKININAGVKQGCPLSPAVFNLAIDPLLRVVGGEGEGYNLKGRRTAILAYADDLVLLSDSAGNMQRLLNKVEAAAGGLGLKFNPSKCAILHQQCRGPRRALPTRLSLQGVELRALAAGESYEHLGVPTGFQISQTPYHTIGGLQQDLRAIDNSLLAPWQKAEAVATFLLPRLDFSLRGSHVAKGPLKTVDLSIRRAAKSWMHLPQRASAEVVYHPPSRGGCGLLPLTDWVDALTIAHAFRLLTSPDAVVRELAWTSLREAVSKKIGRPASNSDLADYLSGSLVGEFARDGGDIATLWSRARAATRRSKSRLALVWKYSIARDELVVTLRGSRERETTVGPDARAQIIRRLRAAIHEYYYLQLFNKPDQGKVFQVSSRSSVSNHFVRGGNFTRFADWRFAHRARLDVLPLNGTRRWGNGDRRCRRCGEALESLPHVLCHCRPHAAAWQMRHDAVVERIARASRLPGALSVNKRVEGVDGDLGGLRPDIVIRHEPSRTVAIVDVTVAFENKYIAFQEARGRKHAKYEPLADQLRGHGYEVTVAAIVVGALGSWDPANEAVLKTLKISPRYAKIMRRLIVSETIRWSRDIYVEHVSGIRQYKSNVTTGTEILNTAAPPPSDSETRDVGE

SEQ ID NO: 15668 - protein, 1661 aa, Anoplius nigerrimus
MELIFDYPFPETFPCPECFMPGSASKHNGSYKTANDLLKHARKYHPGFTAQYRCGVCGFIGVGRYPIKSVKTHHADEHSNLNNSSNNTLAGPGNTRNTRSCREGRVAGGLTGPASRGGSRPNNNSNLNSYFPSAAGTQRRSNGSPTTTTTSPATRTTAEQTTEPATGAPAAETARTRPGGAARAAQSPREGSPREEGSRTTRAGRARSVPVEVRPPGRAERRVAAATTRNLTGVTRGPAAATRARRTPASAAAAATTSAAATTTAAPTSRRTTRLGSQTAANVSYAAVTAGATVVSPAEGLDTAARRGLRSRRSSSLPPGEVGGSDRSPPTRDVRSPPSALTIIEEERGALASVPPGTPTMPVTMTTTTVTTSISGGPIMSTGVPRGRATNLTFVPFSDRPTLSPPEVVVNVAGLAGAASSWEQQRLSSPPTPPLPRITTASDDDDDNNAREGAGEPWRTVEARRRRSQPATPIPSGHPSPPPPTPRPSTTPTTAAATAATPSPATAAATPPPPPAAPTRHRLPPTAALTMRRRSNSSTSPTNSRRRPERAAREETPETCSTTGRGRRLSDFLSPRGSPRRCGTGVGVGVGASLPTGRAAPPGGIGGATSRPRGSRVAARRPPVPVDQPSLRGAERSPRGSVDPVGMREQLIGRAEAVANAADLEDVAVAAASFFRESSEPASGGESGGRRDRREQLTRRGGGTAARGPRDRAGHRHRLRRDADVNTDSDVDNNRRNADIRRDMTARPLTDDVSGDGRGPPVRRSRVEEATHIQRLFRSNRRRAVQRVLGGSPPRCTVPKERVAEYFERVHARSGTTGSWQPPPPPYGDPDEASSGALVRPFTASEVDLRLRRTSNSAPGPDGLTYRDLRRGDPDCRLLASIYNACLRLGSVPECWKDSNTVLVHKKGDRSDLANWRPLALGDTTPKLFAAVLADRLLGWCTTNKRLSSAQKGFLQCEGCYEHNFVLQEALNDARRGGREVVVAWLDLTNAFGSVPHATIRRALADAGVPAPITNIINNLYINCTTRVRTAEGFTRKISINAGVKQGCPLSPAVFNLAIDPLLRVVGGEGDGYNLKGRRTAILAYADDLVLLSDSAGKMQNLLNKVEAAAGGLGLTFNPAKCAILHQQCRGPRRALPTRLTLQGVELRALAAGESYEHLGVPTGFQVNQTPYHTIGGLQRDLRAVDESLLAPWQKAEAVAAFVLPRLDFLLRGAHVEKGPLKVIDLSIRRAAKSWMHLPQRASAEVVYLPPNRGGVGLLPLSDWVDALTIAHAFRLLTSPDAVVRELAWTSLREAASKKIGRPASNSDLADYLSGSLEGEFARDGGDISSLWSRARIATRRSKTRLALVWKYSIHRDELVVTLRGSRGRSVTVGPDARAQIIRRLRAAIQESYAEQLARKPDQGKVFQVSSRASVSNHFVRGGNFTRFADWRFVHRARLDVLPLNGTRRWGNGDRRCRRCGEALESLPHVLCHCRPHAAAWQMRHDAVVERIARASRLPGALSVNKRVEGVDGDLGGLRPDIVIRHEPSRTVTIVDVTVAFENQNIAFEEARGRKHVKYEPLAEQLRGHGYGVTVAAIVVGALGSWDPANEAVLKALKVSPRYAKLMRRLIVSETIRWSRDIYVEHVSGIRQYKTNATAGTENSNPAASPPPASVNGGVGE

SEQ ID NO: 15669 - protein, 1663 aa, Anoplius nigerrimus
MELIFDFPFPETFPCPECFMPGSASKHNGSYKTANDLLKHARKYHPGFTAQYRCGVCGFIGTGRYPIKSVKTHHADEHENLNNTVSIQARPGNNTRSCREGRVAGGLTGSASRGGSRSNNNTSNLNSYFASATGTERRSSGSPTTTTTPASQTTAERSTEPATGAPAAETARTRPGGAARAAQSPREGSPREEGSRTTRAGRARSVPVEVRPPGRAERRVAAATTRNLTGTRGPAAATRARRTPASAAAAATSTAAATTTAAPTTRRTTRLGSQTAANATYAAVTAGATVVSPAEGLDTAARRGLRSRRSSSLPPGEVGGSDRSPPTRDVRSPPSALTVIPEERGALASVPPGTPTMPVTMTTTTVTTSVSGGPIMSTGVPRGRATNITTNTFSGRLTLSPPEVVVNVAGLAGAATTWEQQRPSSPPTPPLPRITASDDDDDNIAREGAGEPWRTVEARRRRSQPATPTPSGHPSPPPPTPRPSTTPTTAAATAATPSPTSAAATPPPPPAAPTRHRLPPTAALTMRRRSNSSTSPTNSRRRPERAAREDTPETCSTTGRGRRLSDFLSPRGNPRRCGTGVGEGVGASLPTGRAAPPGGIGGATSRPRGSRVPARRPPVPVDQPSLRGAERSPRGSVDPVEMREQLIGRAGAVANAADLEDVAVAAASFFRGSMEPAGGGESGGRRDRREQLTRRGGGTAARGPRDRAGHRHRLRRDADVNRDSDVNNNRRNADIRRDTTARPLTDEVGGGGRGPPVRRSRVEEATYIQRLFRSNRRRAVQRVLGGSPPRCTVPKERVAEYFERVHARSGTTGSWQPPPPPYGDPDEASSGALVRPFTASEVDLRLRRTSNSAPGPDGLTYRDLRRGDPDCRLLASIYNACLRLGSVPECWKDSNTVLVHKKGDRNDLANWRPLALGDTTPKLFAAVLADRLLGWCTTNKRLSDAQKGFLQCEGCYEHNFVLQEALNDARRGGREVVVAWLDLTNAFGSVPHATIRRALADAGVPAPITSIIKNFYINCTTRVRTAEGFTRKININAGVKQGCPLSPAVFNLAIDPLLRAVGGGGDGYNLRGRRTAILAYADDLVLLSDSASKMQCLLNKVEAAAGGLGLKFNPSKCAILHQQCRGPRRALPTRLTLQGVELRALAAGESYEHLGVPTGFQISQTPYQTIGGLQRDLRAIDDSLLAPWQKAEAVATFLLPRLDFSLRGAHVAKGPLKTVDLSIRRAAKSWMHLPQRASAEVVYLPPSRGGCGLLPLTDWVDALTIAHAFRLLTSPDAVVRELAWTSLREAVSKKIGRPASNSDLADYLSGSLEGEFARDGGDIATLWSRTRAATRRSKSKLALIWKYSIARKELVVTLRGSRGRETTVGPDARAQIIRRLRAAIHESYSIQLARKPDQGKVFQVSSRSGVSNHFVRGGNFTRFADWRFIHRARLDVLPLNGARRWGNGDRRCRRCGEALESLPHVLCHCRPHAAAWQMRHDAVVERIARASRLPGALSVNKRVEGVDGDLGGLRPDIVIRHEPSRTVTIVDVTIAFENQYPAFEEARGRKHVKYEPLADQLRGHGYEVAVAAIVVGALGSWDPANEAVLRSLKVSPRYAKLMRRLIVSETIRWSRDIYVEHVSGIRQYSTNLNNDTNSFVPAPSASENGGVGERVPPLAERTF

SEQ ID NO: 15670 - protein, 1654 aa, Anoplius nigerrimus
MELIFDFPFPETFPCPECFMPGSASKHNGSYKTANDLLKHARKYHPGFTAQYRCGVCGFIGVGRYPIKSVKTHHADEHENLNNSVSIQARPGNNTRSCREGRVAGGLTGSASRGGSRTNNTNRNLNVYFPSATDTERRSSGSPTTTTTPASQTTAERSTEPATGAPAAETARVRPGGAARAAQSPREGSPREEGSRTTRAGRARSVPVEVRPPGRAERRVAAATTRNLTGATRGPAAATRARRTPASAAAAATTSAAATTTAAPERRRTTRLGSQTAANATYAAVTAGATVVSPAEGLDTAARRGLRSRRSSSLPPGEVGGNDRSPPPRDVRSPPSALTVIPEERGALASVPPGTPTMPVTMTTTTVTTSISGGPIMSTGLPRGRATNITTPTFSGRLTLSPPEVVVNVAGLAGAATSWEQQRPSSPPTPPLPRITTTSDDDDDNYAREGAGEPWQTVPARRRRSLPATPTTPGHSSPPAPSPRPSTPPTTAAATAVTPPPTTAAATPPPPPAAPTRHRLPPTAAFSMRRSLNSSTSPTNSRGRPERAAREETPETCSTTGRGRRLSDFLSPRGNPRRCGTGVGEGVGASLPTGRATPPGGIGGATSRPRGSRVAARRPPVPVDQPSLRGAERSPRGSVDPVEMREQLVGRAEAVANAADLEDVAVAAASFFRESSEPAGGGESGGRRDRRGQPTRRGGGTAARGLGGRAGHRPRQRRDADRDRDIDTNNNRRDLDDRRNTADRPRTEVSGDGRGPPVRRSRVEEATYIQRLFRSNRRRAVQRVLGGSPPRCTVPKERVAEYFERVHARSGTTGSWQPPPPPYGDPDEASSGALVRPFTASEVDLRLRRTSNSAPGPDGLTYRDLRRGDPDCRLLASIYNACLRLGSVPECWKDSNTVLVHKKGDRGDLSNWRPLALGDTTPKLFAAVLADRLLGWCTANKRLSDAQKGFLQCEGCYEHNFVLQEALNDARRGGREVVVAWLDLTNAFGSVPHATIRRALADAGVPAPITNIIKNLYINCSTRVRTAEGFTRKININAGVKQGCPLSPAVFDLAIDPLLRAVGGEEDGYNLRGRRTAVLAYADDLVLLSDSAGKMQDMLNRVEAAAGGLGFSFNPSKCATLHQNCRGTRRALPTRLSLQGVELRALAAGESYEHLGVPTGFQVNQTPYHTIDGLSRDLRAIDESLLAPWQKAEAVASFLLPRLDFSLRGSRVEKRPLKTVDLAIRRMAKSWMNLPQRASAEVVYLPPSRGGMGLLPLSDWVDALTIAHAFRLLTSPDAVVRELAWTSLRESAAKKIGRPASNRDLAEYLSGSLEGDFARVGGDISTLWTRTRTATRRSKARLGLVWTYSIAREEMVVTLRGSRGRKTTVGPDARVQIIRRLRAAVHEYYAEQLANKPDQGKVFQVSSRSGVSNHFVRGGNFTRFADWRFVHRARLDVLPLNGTRRWENGDRRCRRCGEALESLPHVLCHCRPHAAAWQLRHDSVVERIGKASRLPGTLSINKRVEGVEGDLVELRPDIVVRHEPTRSVAIVDVTIAFENQYLAFEEARARKHAKYEPLANALRGRGYDVTVAAIVVGALGSWDPANEAVLKALKISPRYAKLMRRLIVSETIRWSRDIYVEHVSGVRQYTLSINNDTNSSVPAPSASENGGVGE

SEQ ID NO: 15671 - protein, 1662 aa, Anoplius nigerrimus
MELIFDYPFPETFPCPVCFVPGSASKHNGSYKTANDLLKHARKYHPGFTAQYRCGVCGFIGVGRYPIKSVKTHHADEHGILNSPNNSVQAGPGNTRTTRSYREGRVAGGLTGSASRGGSRSNNNNSNLNSYVSSATGTERRSSGSPSTTTTPASQTTAERTSTEPATGAPAAETARVRPGGAARTAQSPREGSPREEGSRTTRAGRARSVPVDVRPPGRAERRVAAATTRNLTGVTRGPAAATRARRTPASAAAAATTTAAATTTAAPERRRTTRLGSQTAANATYAAVTAGATVVSPAEGLDTAARRGLRSRRSSSLPPGEVGGSDRSPPTRDARSPPSTLTIIEEERGALASVPPGTPTMPVTMTTTTVTTSISGGPIMSTGVPRGRATNLTFVPFSDRPTLSPPEVVVNVAGLAGAASSWEQQRLSSPPTPPLPRITTASDDDDDNNAREGAGEPWRTVEARRRRSQPATPTSSGHPSPPPPTPRPSTPSTFAAATAVTPPPTTAAATPPPPPAAPTRHRLPPTAALTMRRRSNSSTSPTNSRGRPERAARYNTPETRSTTGRGRRLSDFLSPRGSPRRCGTGDGEGVGASLPTGRAAPPGGVGGATSRPRGSRVPARRPPVPVDQPSLRGAERSPRGSVDPVEMREQLIGRAGAVANAADLEDVAVAAASFFRGSMEPAGGGESGGRRDRREQLTRRGGGTAARGPRDRAGHRHRLRRDADVNRDSDVDNNRRDADNRRNRSDRPLTDEVSGDGRGPPVRRSRVEEATYIQRLFRSNRRRAVQRVLGGSPPRCTVPKERVAEYFERVHARSGTTGGWQPPPPPYGDPDEASGGALARPFTASEVDLRLRRTSNSAPGPDGLTYRDLRRGDPDCRLLASIYNACLRLGSVPECWKDSNTVLVHKKGDRNDLANWRPLALGDTTPKLFAAVLADRLLGWCTANKRLSDAQKGFLQCEGCYEHNFVLQEALNDARRGGREVVVAWLDLTNAFGSVPHATIRRALADAGVPAPITNIIKNLYINCTTRVRTAEGFTRKINIEAGVKQGCPLSPVVFNLAIDPLLRVVGGGEDGYNLRGRRTAILAYADDLVLLSDSAGNMQTLLNKVEAAAGGLGFTFNPAKCATLHQQCRGPRRALPTRLTLQGVELRALAAGESYEHLGVPTGFQINQTPYQTISGLQRDLRAIDDSLLAPWQKAEAVATFLLPRLEFSLRGSHVAKGPLKTVDLSIRRAAKSWMHLPQRASAEVVYLPPSRGGCGLLPLTDWVDALTIAHAFRLLTSPDAVVRELAWTSLREAVSKKIGRPASNSDLADYLSGSLVGEFARDGGDIATLWSRARAATRRSKPKLALVWKYSSPRDELVVTLRGSRERETTVGPDARAQIIRRLRAAIHEFYSLQLARKPDQGKVFQVSSRSGVSNHFVRGGNFTRFADWRFIHRARLDVLPLNGARRWGNGDRRCRRCGGALESLPHVLCHCRPHAAAWQMRHDAVVERIARASRLPGALSVNKRVEGVDGDLGGLRPDIVIRHEPSRTVTIVDVTIAFENQYPAFEEARGRKHVKYEPLAEQLRGHGYEVAVAAIVVGALGSWDPANEAVLKTLKISPRYAKLMRRLVVSETIRWSRDIYVEHVSGIRQYNTNVTPGSDNPNVTAPAPPDSETRDVGE

SEQ ID NO: 15672 - protein, 1650 aa, Anoplius nigerrimus
MELIFDFPFPETFPCPECFMPGSASKHNGSYKTANDLLKHARKYHPGFTAQYRCGVCGFIGVGRYPIKSVKTHHADEHENLNNSNSIQARPGNNTRSCREGRVAGGLTGPASRGGRRNTNINSNGALHVPAAERRSSGSPTTTNTSPATRTTAEQTTEPATGAPAAETARARPGGAANTALSPREGSPREEGSRTTRAGRARSVPVDVRPPGRAERRVAAATTRNLTGATRGPAAATRARRTPASAAAAATTSAAATTTAAPTSRRTTRLGSQTAANVTYAAVTAGATVVSPAEGLDTAARRGLRSRRSSSLPPGEVGGNDRSPPPRDVRSPPSALTVIPEERGALASVPPGTPTMPVTMTTTTVTTSVSGGPIMSTGLPRGRATNITTPTFSGRLTLSPPEVVVNVAGLAGAATSWEHQRMSSPPTPPLPRITTSDDDDDINAREGAGEPWRTVPARRRRSLPATPTTSGHSSPPAPSPRPSTPSTFAAAATPSPTSAAATPPPPPAAPVRHRLPPTAAFSMRRSLNSSTSPTNSRGRPERAAREETPETCSTTGRGRRLSDFLSPRGSPRRCGIGVGVGVGASLPTGRAAPPGGIGGATSRPRGSRVAARRPPVPVDRPSLRGAERSPRGSVDPVEMREQLIGRAGAVANAADLEDVAVAAASFFRESSEPASGGESGGRRDRREQLTRRGGGTAARGPRDRAGHRHRPRRDADVNRDSDVDNNRRDADNRRNRSDRPLTDEVSGDGRGPPVRRSRVEEATYIQRLFRSNRRRAVQRVLGGSPPRCTVPKERVAEYFERVHARSGTTGSWQPPPPPYGDPDEASSGALVRPFTASEVDLRLRRTSNSAPGPDGLTYRDLRRGDPDCRLLASIYNACLRLGSVPECWKDSNTVLVHKKGDRGDLSNWRPLALGDTTPKLFAAVLADRLLGWCTANKRLSDAQKGFLQCEGCYEHNFVLQEALNDARRGGREVVVAWLDLTNAFGSVPHATIRRALADAGVPAPITNIIKNLYINCSTRVRTAEGFTRKININAGVKQGCPLSPAVFDLAIDPLLRAVGGEEDGYNLRGRRTAVLAYADDLVLLSDSAGKMQDMLNRVEAAAGGLGFSFNPSKCATLHQNCRGTRRALPTRLSLQGVELRALAAGESYEHLGVPTGFQVNQTPYHTIDGLSRDLRAIDESLLAPWQKAEAVASFLLPRLEFSLRGSHVEKRPLKTVDLAIRRMAKSWMNLPQRASAEVVYLPPSRGGMGLLPLSDWVDALTIAHAFRLLTSPDAVVRELAWTSLRESAAKKIGRPASNRDLAEYLSGSLEGDFARVGGDISTLWTRTRTATRRSKARLGLVWTYSIAREEMVVTLRGSRGRKTTVGPDARVQIIRRLRAAVHEYYAEQLANKPDQGKVFQVSSRSGVSNHFVRGGNFTRFADWRFVHRARLDVLPLNGTRRWENGDRRCRRCGEALESLPHVLCHCRPHAAAWQLRHDSVVERIGKASRLPGTLSINKRVEGVEGDLVELRPDIVVRHEPTRSVAIVDVTIAFENQYLAFEEARARKHAKYEPLANALRGRGYDVTVAAIVVGALGSWDPANEAVLKALKISPRYAKLMRRLIVSETIRWSRDIYVEHVSGVRQYTLSINNDTNSSVPAPSASENGGVGE

SEQ ID NO: 15673 - protein, 1660 aa, Anoplius nigerrimus
MELIFDFPFPETFPCPECFMPGSASKHNGSYKTANDLLKHARKYHPGFTAQYRCGVCGFIGVGRYPIKSVKAHHADEHSNLNNSNNSIQAGPGNTRSTRSCREGRVAGGLTGSASRGGSRSNNISNLNSYISSAAGTQRRSSGSPTTTTTSPATRTTAEQTSTEPATGAPAAETARARPGGAARAAQSPREGSPREEGSRTTRAGRARSVPVEVRPPGRAERRVAAATTRNLTGATRGPAAATRARRTPASAAAAATTSAAATTTAAPTNRRTTRLGSQTAANATYAAVTAGATVVSPAEGLDTAARRGLRSRRSSSLPPGEVGGSDRSPPTRDVRSPPSALTAIPEERGALASVPPGTPTMPVTMTTTTVTTTVSGGPIMSTGVPRGRATTLISPVFSDRPTLSPPEVVVNVAGLAGAATSWEHQRMSSSPTPPLPTITTSDDDDDINARQGAGEPWRTVPARRRRSLPATPTPSGHSSPPAPLPRPSTPPTTAAATATPPPPTIAAATPPPPPAAPTRHRLPPTAALTMRRSLNSSTSPTNSRGRPERAAREETPETCSTTGRGRRLSDFLSPRGNPRRCGTGVGEGVGASLPTGRAAPPGGIGGATSRPRGSRVAARRPPVPVDQPSLRGAERSPRGSVGPVEMREQLIGRAGAVANAADLEDVAVAAASFFRESSEPASGGESGGRRDRRGQPTRRGGGTAARGLGGRAGHRPRQRRDVDRDRDIDTNNNRRDLDDRRNTADRPRTEVSGDGRGPPVRRSRVEEATYIQRLFRSNRRRAVQRVLGGSPPRCTVPKERVAEYFERVHARSGTTGSWQPPPPPYGDPDEASSGALVRPFTASEVDLRLRRTSNSAPGPDGLTYRDLRRGDPDCRLLASIYNACLRLGSVPECWKDSNTVLVHKKGDRGDLSNWRPLALGDTTPKLFAAVLADRLLGWCTANKRLSDAQKGFLQCEGCYEHNFVLQEALNGARRGGREVVVAWLDLTNAFGSVPHATIRRALADAGVPAPITNIIKNLYINCTTRVRTAEGFTRKIKIEAGVKQGCPLSPVVFNLAIDPLLRVVGGGEDGYNLRGRRTAILAYADDLVLLSDSADNMQNLLNKVEAAAGGLGFTFNPAKCATLHQHCRGPRRALPTRLSLQGVELRALAAGESYEHLGVPTGFQIDQTPYKTIDGLHRDLRAIDNSLLAPWQKAEAVATFLLPRLDFSLRGSHVEKRSLKTVDLAIRRLAKSWLHLPQRASAEVVYLPPSRGGVGLLPLSDWVDALTIAHAFRLLTSPDAVVRELAWTSLRESASRKIGRPATNWDLAEFLSGSLEGDFARVGGDISTLWTRARAAARRSGRKLDLKWKYSTARRELVVTLRGSRGRLTTIGPDARAQIIRRLRAAIHEFYSLQLENKPDQGKVFQVSSRSSVSNHFVRGGNFTRFADWRFVHRARLDVLPLNGTRRWGKGDRRCRRCGEALESLPHVLCHCRPHAAAWQLRHDAVVERLAKASRLPGVLSVNRRVEGVDGDLGGLRPDIVVRQESSRTVTIVDVTVAFENEYIAFEEARGRKHVKYEPLADQLRGHGYEVTVAAIVVGALGSWDPANEAVLKTLKISPKYAKLMRRLIVSETIRWSRDIYVEHVSGVRQYKTNATPGIDSPNVAAPTPSDSETRDVGE

SEQ ID NO: 15674 - protein, 1666 aa, Anoplius nigerrimus
MELFFDFPFPETFPCPECFMPGSASKHNGSYKTANDLLKHARKYHPGFTAQYRCGVCGFIGVGRYPIKSVKTHHADEHSNLNNSNNSIQAGPGNTRSTRSCREGRVAGGLTGSASRGGSRSNNISNLNSYISSAAGTQRRSSGSPTTTTTSPATRTTAEQTSTEPATGAPAAETARARPGGAARAAQSPREGSPREEGSRTTRAGRARSVPVEVRPPGRAERRVAAATTRNLTGTRGPAAATRARRTPASAAAAASTTAAATTTTAPATRRTTRLGSQTAANATYAAVTAGATVVSPAEGLDTAARRGLRSRRSSSLPPGEVGGSDRSPPTRDVRSPPSALTAIPEERGALASVPPGTPTMPVTMTTTTVTTTVSGGPIMSTGVPRGRATTLISPVFSDRPTLSPPEVVVNVAGLAGAATSWEHQRMSSSPTPPLPTITTSDDDDDINARQGAGEPWRTVPARRRRSLPATPTPPGHSSPPAPLPRPSTPPTTAAATATPPPPTIAAATPPPPPAAPTRHRLPPTAALTMRRSLNSSTSPTNSRGRPERAAREETPEKCSTTGRGRRLSDFLSPRGNPRRCGTGVGEGVGASLPTGRATPPGGIGDATSRPRGSRVAARRPPVPVDQPSLRGTGRSPRGSVDPVEMREQLIGRAEAVANAADLEGVAVAAASFFRESSEPAGGGESGGRRDRRGQPTRRGGGTAARGLGGRAGHRPRQRRDVDRDRDIDTNNNRRDLDDRRNTADRPRTEVSGGGRGPPVRRSRVEEATYIQRLFRSNRRRAVQRVLGGSPPRCTVPKERVAEYFERVHARSGTTGSWQPPPPPYGDPDEASSGALVRPFTASEVDLRLRRTSNSAPGPDGLTYRDLRRGDPDCRLLASIYNACLRLGSVPECWKDSNTVLVHKKGDRNDLANWRPLALGDTTPKLFAAVLADRLLGWCTTNKRLSSAQKGFLQCEGCYEHNFVLQEALNDARRGGREVVVAWLDLTNAFGSVPHATIRRALADAGVPAPITSIIKNFYINCTTRVRTAEGLTRKININAGVKQGCPLSPAVFNLAIDPLLRVVGGEGEGYNLKGRRTAILAYADDLVLLSDSAGNMQRLLNKVEAAAGGLGLKFNPSKCAILHQQCRGPRRALPTRLTLQGVELRALAAGESYEHLGVPTGFQNSQTPYHTIDGLQRDLRAVDESLLAPWQKAEAVAAFVLPRLDFLLRGARVEKGPLKVIDLSIRRAAKSWMHLPQRASAEVVYLPPSRGGVGLLPLSDWADALTIAHAFRLLTSPDAVVRELAWTSLREAASKKIGRPASNSDLADYLSGSLEGEFARDGGDISSLWSRARGATRRSKARLALVWKYSTIRDELVVALRGSRGRETTVGPDARAQIIRRLRAAIHEFYSLQLSRKPDQGKVFQVSSRTSVSNHFVRGGNFTRFADWRFLHRARLDVLPLNGARRWGNSDRRCRRCGEALESLPHVLCHCRPHAAAWQLRHDAVVERIAKASRLPGALSVNKRVEGVDGDLGGLRPDIVVRHEPSRTVAIVDVTIAFENTYTAFEEARGRKHVKYEPLADQLRGHGYEVTVAAIVVGALGSWDPANEAVLRSLKVSPRYAKLMRRLIVSETIRWSRDIYVEHVSGIRQYSTNLNNDTNSFVPAPSASENGGVGERVPPLAERTS

SEQ ID NO: 15675 - protein, 1658 aa, Anoplius nigerrimus
MEIIFKYPFPERFPCPECFVPSRAGIHKGSYGTTNDLIKHARLHHPGHTVQYQCGVCGFIGAGRYPIKAVKVHHAALHGNNNSANNSISINSSAQAGLVETTSRREGRVAGEVTGSASRGGRRNTNNNLNDYFHGATDDTERRSSGSPTNTTTSPATRTAERSTEPATGAPAAETARARPGGAARTAESPREGSPREEGSRTTRPGRAPSVSVDVRPPGRAERRVAAATTRNLTGTRRPAAATRARRTPASAAAAETTTAAAITTAAHTGRRTTRLGSQTAANATYAAVTAGATVVSPAEGLDTAARRGLRSRRSSSPPPGEVGGNDRSPPTRDVRSPPSALTIIEEERGALASVPPSTPTMPVTMTTTTVTTTVSGGPIMSTGVPRGRATDFTNHIFSGRPTLSPPEVVVNVAGLAGAATSWEQLQPSSPPTPPLPITNGYDGDNAREGAEEPWRTVLARRRRSLPATPAPSGHPSPPAPSPRPSTPPTTAAATAITPPSTIAAATPPPPPAAPTRHRLPPAAALTMRRSINSSTSPTNSRGRPERAAREETPETCSTTGRGRRLSDFLSPRGNPRRCGTGVGEGVGASLPTGRATPPGGIGGATSRPRGSRVAARRPPVPVDQPSLRGAERSPRGSVDPVEMREQLIGRAGAVANAADLEDVAVAAASFFRESSEPASGGESGGRRDRREQLTRRGGGTAARGPRDRAGHRHRPRRDADVNRDSDVDNNRRDADNRRNRSDRPLTDEVSGDGRGPPVRRSRVEEATYIQRLFRSNRRRAVQRVLGGSPPRCTVPKEGVAEYFERVHARSGTTGSWQPPPPPYGDPDEVSSGALVRPFTASEVDLRLRRTSNSAPGPDGLTYRDLRRGDPDCRLLASIYNACLRLGSVPECWKDSNTVLVHKKGDRGDLSNWRPLALGDTTPKLFAAVLADRLLGWCTANKRLSDAQKGFLQCEGCYEHNFVLQEALNDARRGGREVVVAWLDLTNAFGSVPHATIRRALADAGVPAPITNIIKNLYINCTTRVRTAEGFTRKIKIEAGVKQGCPLSPVVFNLAIDPLLRVVGGGEDGYNLRGRRTAILAYADDLVLLSDSAGNMQNLLNKVEAAAGGLGFTFNPAKCATLHQHCRGPRRALPTRLSLQGVELRALAAGESYEHLGVPTGFQIDQTPYKTIDGLHRDLRAIDNSLLAPWQKAEAVATFLLPRLDFSLRGSHVEKRSLKTVDLAIRRLAKSWLHLPRRASAEVVYLPPSRGGVGLLPLSDWVDALTIAHAFRLLTSPDAVVRELAWTSLRESASRKIGRPATNWDLAEFLSGSLEGDFARVGGDISTLWTRARAAARRSGRKLDLKWKYSTARRELVVTLRGSRGRLTTIGPDARAQIIRRLRAAIHEFYSLQLENKPDQGKVFQVSSRSGVSNHFVRGGNFTRFADWRFVHRARLDVLPLNGTRRWGNGDRRCRRCGEALESLPHVLCHCRPHAAAWQLRHDAVVERLAKASRLPGVLSVNRRVEGVDGDLGGLRPDIVVRQESSRTVTIVDVTVAFENEYIAFEEARGRKHVKYEPLADQLRGHGYEVTVAAIVVGALGSWDPANEAVLKTLKISPKYAKLMRRLIVSETIRWSRDIYVEHVSGVRQYKTNATPGIDSPNIAAPTPPDSETRDVGE

SEQ ID NO: 15676 - protein, 1650 aa, Anoplius nigerrimus
MELFFDFPFPETFPCPECFMPGSASKHNGSYKTANDLLKHARKYHPGFTAQYRCGVCGFIGVGRYPIKSVKTHHADEHENLNNSNSIQARPGNNTRSCREGRVAGGLTGPASRGGRRNTNINSNGALHVPAAERRSSGSPTTTTTSPATRTAERSTEPATGAPAAETARTRPGGAARAAQSPREGSPREEGSRTTRAGRARSVPVDVRPPGRAERRVAAATTRNLTGTRGPAAATRARRTPASAAAAASTSAAATTTAAPATRRTTRLGSQTAANTTYAAVTAGATVVSPAEGLDTAARRGLRSRRSSSLPPGEVGGSDRSPPTRDVRSPPSALTVIPEERGALASVPPGTPTMPVTMTTTTVTTTVSGGPIMSTGVPRGRATNITTPTFSGRLTLSPPEVVVNVAGLAGAATSWEHQRMSSPPTPPLPRITTSDDDDDINAREGAGEPWRTVPARRRRSLPATPTTSGHSSPPAPSPRPSTPSTFAAAATPSPTSAAATPPPPPAAPVRHRLPPTAAFSMRRSLNSSTSPTNSRGRPERAAREETPETCSTTGRGRRLSDFLSPRGSPRRCGTGVGVGVGASLPTGRAAPPGGIGGATSRPRGSRVAARRPPVPVDQPSLRGAGRSPRGSVDPVEMREQLIGRAEAVANAADLEDVAVAAASFFRESSEPAGGGESGGRRDRSGQPTRRGGGTAARGLGGRAGHRPRQRRDADRDRDSDSNNNRRDADNRRNTADRPQTEVSGDGRGPPVRRSRVEEATYIQRLFRSNRRRAVQRVLGGSPPRCTVPKERVTGYFERVHARSGTTGSWQPPPPPYGDPDEVSSGALVRPFTASEVDLRLRRTSNSAPGPDGLTYRDLRRGDPDCRLLASIYNACLRLGSVPECWKDSNTVLVHKKGDRGDLSNWRPLALGDTTPKLFAAVLADRLLGWCTANKRLSDAQKGFLQCEGCYEHNFVLQEALNDARRGGREVVVAWLDLTNAFGSVPHATIRRALADAGVPAPITNIIKNLYINCTTRVRTAEGFTRKIKIEAGVKQGCPLSPVVFNLAIDPLLRVVGGGEDGYNLRGRRTAILAYADDLVLLSDSAGNMQSLLNKVEAAAGGLGFTFNPAKCATLHQHCRGPRRALPTRLSLQGVELRALAAGESYEHLGVPTGFQIDQTPYKTIDGLHRDLRAIDNSLLAPWQKAEAVATFLLPRLDFSLRGSHVEKRSLKTVDLAIRRLAKSWLHLPQRASAEVVYLPPSRGGVGLLPLSDWVDALTIAHAFRLLTSPDAVVRELAWTSLRESASRKIGRPATNWDLAEFLSGSLEGDFARVGGDISTLWTRARAAARRSGRKLDLKWKYSTARRELVVTLRGSRGRLATIGPDARAQIIRRLRAAIHQFYSLQLENKPDQGKVFQVSSRSSVSNHFVRGGNFTRFADWRFVHRARLDVLPLNGTRRWGNGDRRCRRCGEALESLPHVLCHCRPHAAAWQLRHDAVVERLAKASRLPGVLSVNRRVEGVDGDLGGLRPDIVVRHESSRTVTIVDVTVAFENEYIAFEEARGRKHVKYEPLADQLRGHGYGVTVAAIVVGALGSWDPANEAVLKTLKISPKYAKLMRRLIVSETIRWSRDIYVEHVSGVRQYKTNATPGIDSPNIAAPTPSDSETRDVGE

SEQ ID NO: 15677 - protein, 1640 aa, Anoplius nigerrimus
MELIFDYPFPETFPCPECFMPGSASKHNGSYKTANDLLKHARKYHPGFTAQYRCGVCGFIGTGRYPIKSVKTHHADEHENLNNSNSIQARPGNNTRSCREGRVAGGLTGPASRGGSRTNNNNRNLNSYLSSATGTERRSSGNPTTTTTSPPATRTAERSTEPATGASAAETARARPGGAARTAESPREGSPREEGSRTTRAGRARSVPVDVRPPGRADRRVAAATTRNLTGTRGPAAATRARRTPASAAAAATSTAAATTTAAPTTRRTTRLGSQTAANATYAAVTAGATVVSPAEGLDTAARRGLRSRRSSSLPPGEVGGNDRSPPPRDVRSPPSALTVIPEERGALASVPPGTPTMPVTMTTTTVTTTVSGGPIMSTGLPRGRATNTTTPTFSGRLTLSPPEVVVNVAGLAGAATSWEHRYSSSPPTPPLPLITGEDDDDDNVREGAGESWRTVPARRRRSLPATPTTSGHSSPPAPSPRPATPPTTAAATPPPPPAAPTRNRLPPTAAFSMRRSLNSSTSPTNSRGRPERAAREDTPETCSTTGRGRRLSDFLSPRGNPRRCGTGVGEGVGASLPTGRAAPPGGIGGATSRPRGSRVAARRPPVPVDQPSLRGAERSPRGSVDPVEMREQLIGRAEAVANAADLEDVAVAAASFFRESSEPAGGGESGGRRDRRGQPTRRGGGTAARGLGGRAGHRPRQRRDADRDRDIDTNNNRRDLDDRRNTADRPRTEVSGDGRGPPVRRSRVEEATYIQRLFRSNRRRAVQRVLGGSPPRCTVPKERVAEYFERVHARSGTTGSWQPPPPPYGDPDEASSGALVRPFTASEVDLRLRRTSNSAPGPDGLTYRDLRRGDPDCRLLASIYNACLRLGSVPECWKDSNTVLVHKKGDRGDLSNWRPLALGDTTPKLFAAVLADRLLGWCTANKRLSDAQKGFLQCEGCYEHNFVLQEALNDARRGGREVVVAWLDLTNAFGSVPHATIRRALADAGVPAPITNIIKNLYINCSTRVRTAEGFTRKININAGVKQGCPLSPAVFNLAIDPLLRAVGGEEDGYNLRGRRTAVLAYADDLVLLSDSAGKMQDMLNRVEAAAGGLGFSFNPSKCATLHQNCRGTRRALPTRLSLQGVELRALAAGESYEHLGVPTGFQVNQTPYHTIDGLSRDLRAIDESLLAPWQKAEAVASFLLPRLDFSLRGSHVEKRPLKTVDLAIRRMAKSWVNLPQRASAEVVYLPPSRGGMGLLPLSDWVDALTIAHAFRLLTSPDAVVRELAWTSLRESAAKKIGRPASNRDLAEYLSGSLEGDFARVGGDISTLWTRTRTATRRSKARLGLVWTYSIAREEMVVTLRGSRGRKTTVGPDARVQIIRRLRAAVHEYYAEQLANKPDQGKVFQVSSRSGVSNHFVRGGNFTRFADWRFVHRARLDVLPLNGTRRWENGDRRCRRCGEALESLPHVLCHCRPHAAAWQLRHDSVVERIGKASRLPGTLSINKRIEGVEGDLVELRPDIVVRHEPTRSVAIVDVTIAFENQYLAFEEARARKHAKYEPLANALRGRGYDVTVAAIVVGALGSWDPANEAVLKALKISPRYAKLMRRLIVSETIRWSRDIYVEHVSGVRQYTLSINNDTNSSVPAPSASENGGVGE

SEQ ID NO: 15678 - protein, 1654 aa, Anoplius nigerrimus
MEFIFDYPFPETFPCPVCFVPGSASKHNGSYKTANDLLKHARKYHPGFTAQYRCGVCGFIGIGRYPIKSVKTHHADEHENLNNSISIQARPGNNTRSCREGRVAGGLTGPASRGGRRETNINSNTRLHASTDGAERRSSGSPTTTTTSPATRTAERSTEPATGAPAAETARTRPGGAARAAQSPREGSPREEGSRTTRAGRARSVPVDVRPPGRAERRVAAATTRNLTGTRGPAAATRARRTPASAAAAASTSAAVTTTAAPATRRTTRLGSQTAANISYAAVTAGATVVSPAEGLDTAARRGLRSRRSSSLPPGEVGGSDRSPPTRDVRSPPSALTVIPEERGALASVPPGTPTMPVTMTTTTVTTSTSGGPIMSTGVPRGRAAILTSFAFSDSRTLSPPEVVVNVAGLAGAATPWELQRTSSPPTPPLPTINGDDDDDDNEREGAGEPWRTVPARRRRSTPATPTTPGHPSPPAPSPRPSTPSTPAAATATPPPPTIAAATPPPPPAAPVRHRLPPTAAFSMRRSLNSSTSPTNSRGRPERAARDDTPETCSTTGRGRRLSDFLSPRGDPRRCGTGVGEGVGASLPTGRAAPPGGIGGATSRPRGSRVAARRPPVPVDQPSLRGAERSPRGSVDPVEMREQLIGRAGAVANAADLEDVAVAAASFFRESSEPAGGGESGGRRDRREQLTRRGGGTAARGPRDRAGHRHRLRRDADVNTDSDVDNNRRDADNRRNRLDRPLTDEVSGDGRGPPVRRSRVEEATYIQRLFRSNRRRAVQRVLGGSPPRCTVPKERVAEYFERVHARSGTTGSWQPPPPPYGDPDEASSGALVRPFTASEVDLRLRRTSNSAPGPDGLTYRDLRRGDPDCRLLASIYNACLRLGSVPECWKDSNTVLVHKKGDRNDLANWRPLALGDTTPKLFAAVLADRLLGWCTTNKRLSDAQKGFLQCEGCYEHNFVLQEALNDARRGGREVVVAWLDLTNAFGSVPHATIRRALADAGVPAPITSIIKNLYTNCTTRVRTAEGFTRKINIEAGVKQGCPLSPVVFNLAIDPLLRVVGGGEDGYNLRGRRTAILAYADDLVLLSDSAGKMQQLLNKVEAAAGGLGLTFNPAKCAILHQMCRGPRRALPTRLTLQGVELRTLAAGEFYEHLGVPTGFQVNQTPHHTIGGLQRDLRAVDESLLAPWQKAEAVAAFLLPRLDFSLRGSHVEKGPLKIIDLAIRRAAKSWLHLPQRASAEVVYLPPSRGGCGLLPLTDWVDALTIAHAFRLLTSPDAVVRGLAWTSLREAASKKIGRPASNMDLADYLSGSLEGEFARDGGDIATLWSRARMATRRSKARLALVWKYSIIREELVVTLRGSRDRETTVGPDARGQIIRRLRAAIHESYALQLANKPDQGKVFQVSSRSSVSNHFVRGGNFTRFADWRFVHRARLDVLPLNGTRRWGNGDRRCRRCGEALESLPHVLCHCRPHAAAWQLRHDAVVERIAGASRLPGALSVNKRVEGVDGDLGGLRPDIVIRHEPSRTVTIVDVTVAFENKYTAFQEARGRKHAKYEPLADQLRGHGYEVAVAAIVVGALGSWDPANEAVLKALKISPRYAKLMRRLVVSETVRWSRDIYVEHVSGIRQYKTNATPVSEETNATVTAPSDSETRDVGE

SEQ ID NO: 15679 - protein, 1664 aa, Anoplius nigerrimus
MELFFDFPFPETFPCPECFMPGSASKHNGSYKTANDLLKHARKYHPGFTAQYRCGVCGFIGTGRYPIKSVKTHHADEHENLNNSNSIQARPGNNTRSCREGRVAGGLTGPASRGGRRNTNINSNGALHVPAAERRSSGSPTTTNTSPATRTTAERTSTEPATGAPAAETARVRPGGAARAAQSPREGSPRDEGSRTTRAGRARSVPVEVRPPGRAERRVAAATTRNLTGATRGPAAATRARRTPASAAAAASTSAAATTTAAPATRRTTRLGSQTAANTTYAAVTAGATVVSPAEGLDTAARRGLRSRRSSSLPPGEVGGSDRSPPTRDVRSPPSALTIIEEERGVLASVPPGSPTMPVTMTTTTVTTSISGGPIMSTGVPRGRATNLTFVPFSDRPTLSPPEVVVNVAGLAGAATSWEQLRPSSPPTPPLPRITTASDDDDDNNAREGAGEPWRTVEARRRRSQPATPIPSGHPSPPPPTPRPSTTPTTAAATAATPSPTSAAATPPPPPAAPTRHRLPPTAALTMRRRSNSSTSPTNSRRRPERAAREDTPETCSTTGRGRRLSDFLSPRGNPRRCGTGVGEGVGASLPTGRATPPGGIGGATSRPRGSRVAARRPPVPVDQPSLRGAGRSPRGSVDPVEMREQLIGRAEAVANAADLEDVAVAAASFFRESSEPAGGGESGGRRDRREQLTRRGGGTAARGARDRAGHRHRLRRDADVNTDSDVDNNRRNADIRRDMTARPLTDDVSGGGRGPPVRRSRVEEATYIQRLFRSNRRRAVQRVLGGSPPRCTVPKERVAEYFERVHARSGTTGSWQPPPPPYGDPDEASSGALVRPFTASEVDLRLRRTSNSAPGPDGLSYRDLRRGDPDCRLLASIYNACLRLGSVPECWKDSNTVLVHKKGDRNDLANWRPLALGDTTPKLFAAVLADRLLGWCTTNKRLSSAQKGFLRCEGCYEHNFVLQEALNDARRGGREVVVAWLDLTNAFGSVPHATIRRALADAGVPAPITNIIKNLYINCSTRVRTAEGFTRKININAGVKQGCPLSPAVFNLAIDPLLRAVGGEEDGYNLRGRRTAVLAYADDLVLLSDSAGKMQDMLNRVEAAAGGLGFSFNPSKCATLHQNCRGTRRALPTRLSLQGVELRALAAGESYEHLGVPTGFQVNQTPYHTIDGLSRDLRAIDESLLAPWQKAEAVASFLLPRLDFSLRGSHVEKRPLKTVDLAIRRMAKSWLNLPQRASAEVVYLPPSRGGMGLLPLSDWVDALTIAHAFRLLTSPDAVVRELAWTSLRESAAKKIGRPASNRDLAEYLSGSLEGDFARVGGDISTLWTRTRTATRRSKARLGLVWTYSIAREEMVVTLRGSRGRKTTVGPDARVQIIRRLRAAVHEYYAEQLANKPDQGKVFQVSSRSSVSNHFVRGGNFTRFADWRFVHRARLDVLPLNGTRRWENGDRRCRRCGEALESLPHVLCHCRPHAAAWQLRHDSVVERIGKASRLPGTLSINKRVEGVEGDLVELRPDIVVRHEPTRSVAIVDVTIAFENQYLAFEEARARKHAKYEPLANALRGRGYDVTVAAIVVGALGSWDPANEAVLKALKISPRYAKLMRRLIVSETIRWSRDIYVEHVSGLRQYATNTGNAINSIVPPPSASENGDVGEQVPPLAERTN

SEQ ID NO: 15680 - protein, 1643 aa, Anoplius nigerrimus
MELIIDYPFPETFPCPECFVPGRAGKHVGSYKAANDLLKHARKHHPGFTVQYRCGVCGFIGEGRYPIKSVKAHHADEHCELNNSNSNAQAGPRNTRSCREGRVAGGLTGSASRGGLRANNNRTLNSYLPSATGTERRSSGSPGTTTTTTSPATRTAERISTEPATGAPAAETARARPGGAARTAESPREGSPREEGSRTTRAGRARSVPVDVRPPGRAERGVAAATTRNLTGATRGPAAATRARRTPASAAAAASTTAAATTTAAPTRRRTTRLGSQTAANVSYAAVTAGATVVSPAEGLDTAARRGLRSRRSSSLPPGEVGGSDRSPPTRDVRSPPSALTIIEEERGALASVPPGTPTMPVTMTTTTVTTTVSGGPIMSTGVPRGRATDSTNSLFSGRLTLSPPEVVVNVAGLAGAATSWEHRYSSSPPTPPLPLITGEDDDDDNVREGAGEPWRTVPARRRRSLPATPTTSGHSSPPALSPRPTTPPITAAATPPPPPAAPTRNRLPPTAAFSMRRSLNSSTSPTNSRGRPERAAREDTPETCSTTGRGRRLSDFLSPRGNPRRCGTGVGEGVGASLPTGRAAPPGGIGGATSRARGSRVPARRPPVPVDQPSLRGAERSPRGSVDPVEMREQLIGRAGAVANAADLEDVAVAAASFFRGSMEPAGGGGSGGRRDRRGQLTRRGGGTAARGPRDRAGHRHRLRRDADVNRDSDVNNNRRNADIRRDTTARPLTDEVSGGGRGPPVRRSRVEEATYIQRLFRSNRRRAVQRVLGGSPPRCTVPKERVAEYFERVHARSGTTGSWQPPPPPYGDPDEASSGALVRPFTASEVDLRLRRTSNSAPGPDGLTYSDLRRGDPDCRLLASIYNACLRLGSVPECWKGSNTVLVHKKGDRNDLANWRPLALGDTTPKLFAAVLADRLLGWCTTNKRLSDAQKGFLRCEGCYEHNFVLQEALNDARRGGREVVVAWLDLTNAFGSVPHATIRRALADAGVPAPINNIIKNLYINGTTRVRTAEGFTRKINIEAGVKQGCPLSPVVFNLAIDPLLRVVGGGEDGYNLRGRRTAILAYADDLVLLSDSAGNMQNLLNKVEAAAGGLGLTFNPAKCATLHQHCRGPRRALPTRLSLQGVELRALAAGESYEHLGVPTGFQIDQTPYTTIGGLHRDLRAIDDSLLAPWQKAEAVATFLLPRLDFSLRGSHVEKRPLKTVDLAIRRMAKSWMHLPQRASAEVVYLPPSRGGVGLLPLSDWVDALTIAHAFRLLTSPDAVVRELAWTSLRESASRKIGRPATNWDLAEFLSGSLEGDFARVGGDIATLWTRARAAARRTGRKLDLKWKYSTAREELVITLRGSRGRSTTVGPDARAQIIRRLRAAIHEFYSVQLENKPDQGKVFQVSSRSGVSNHFVRGGNFTRFADWRFVHRARLDVLPLNGTRRWGNGDRRCRRCGEALESLPHVLCHCRPHAAAWQMRHDAVVERLAKASRLPGALSVNKRVEGVDGDLGGLRPDIVIRHEPSRTVTIVDVTIAFENQYIAFEEARGRKHVKYEPLAEQLRGHGYEVTVAAIVVGALGSWDPANEAVLKLLKVSPKYAKLMRRLIVSDTLRWSRDIYVEHVSGVRQYKTNNAISTNTGAPSPPVSENGGVGE

SEQ ID NO: 15681 - protein, 1656 aa, Anoplius nigerrimus
MELIFDYPFPETFPCPECFTPGSASKHNGSYKTANDLLKHARKYHPGFTAQYRCGVCGFIGVGRYPIKSVKTHHADEHSNLNNSNNSIQAGPGNTRSTRSCREGRVAGGLTGPASRGGPRGTNNNSNLNSYFTSATGTERRSSGSPTTTTTSPATRTTAEQTTEPATGAPAAETARARPGGAARAAQSPREGSPREEGSRTTRAGRARSVPVDVRPPGRAERRVAAATTRNLTASRGPAAATRARRTPASAAAAATTSVAATTTAAPTMTRRTTRLGSQTAANVTYAAVTAGATVVSPAEGLDTAARRGLRSRRSSSLPPGEVGGSDRSPPTRDVRSPPSALTVIPEERGALASVPPGTPTMPVTMTTTTVTTSTSGGPIMSTGVPRGRAAILTSFAFSDRRTLSPPEVVVNVAGLAGAATPWEHQRTSSPPTPPLPIINGDDNAREGAGEPWRTVPARRRRSTPATPTTPGHPSPPAPSPRPSTTPTSAAATATPPPPTIAAATPPPPPAAPTRHRLPPTAALTMRRSLNSSTSPTNSRGRPERAAREETPETCSTTGRGRRLSDFLSPRGGPRRCGTGVGEGVGASLPTGRAAPPGGIGGATSRPRGSRVPARRPPVPVDQPSLRGAERSPRGSVDPVEMREQLIGRAGAVANAADLEDVAVAAASFFRGSMEPAGGGESGGRRDRREQLTRRGGGTAARGARDRAGHRHRLRRDADVNTDSDVDNNRRNADIRRDMTARPLTDDVSGDGRGPPVRRSRVEEATYIQRLFRSNRRRAVQRVLGGSPPRCTVPKERVAEYFERVHARSETTGSWQPPPPPYGDPDEASSGALVRPFTASEVDLRLRRTSNSAPGPDGLTYRDLRRGDPDCRLLASIYNACLRLGSVPECWKGSNTVLVHKKGDRSDLANWRPLALGDTTPKLFAAVLADRLLGWCTTNKRLSNAQKGFLQCEGCYEHNFVLQEALNDARRGGREVVVAWLDLTNAFGSVPHATIRRALADAGVPAPITNIINNLYINCTTRVRTAEGFTRKISINAGVKQGCPLSPAVFNLAIDPLLRVVGGEGDGYNLKGRRTAILAYADDLVLLSDSAGKMQNLLNKVEAAAGGLGLTFNPAKCAILHQQCRGPRRALPTRLTLQGVELRALAAGESYEHLGVPTGFQVNQTPYHTIGGLQRDLRAVDESLLAPWQKAEAVAAFVLPRLDFLLRGAHVEKGPLKVIDLSIRRAAKSWMHLPQRASAEVVYLPPNRGGVGLLPLSDWVDALTIAHAFRLLTSPDAVMRELAWTSLREAASKKIGRPASNSDLADYLSGSLEGEFARDGGDISSLWSRARIATRRSKTRLALVWKYSIHRDELVVTLRGSRGRSVTVGPDARAQIIRRLRAAIQESYAEQLARKPDQGKVFQVSSRASVSNHFVRGGNFTRFADWRFVHRARLDVLPLNGTRRWGNGDRRCRRCGEALESLPHVLCHCRPHAAAWQMRHDAVVERIARASRLPGALSVNKRVEGVDGDLGGLRPDIVIRHEPSRTVTIVDVTVAFENQNIAFEEARGRKHVKYEPLAEQLRGHGYGVTVAAIVVGALGSWDPANEAVLKALKVSPRYAKLMRRLIVSETIRWSRDIYVEHVSGIRQYKTNATAGTENSNPAASPPPASVNGGVGE

SEQ ID NO: 15682 - protein, 1127 aa, Anoplius nigerrimus
MRRRSNSSTSPTNSRRRPERAAREETPETCSTTGRGRRLSDFLSPRGSPRRCGTGVGVGVGASLPTGRAAPPGGIGGATSRPRGSRVAARRPPVPVDQPSLRGAERSPRGSVDPVEMREQLIGRAEAVANAADLEDVAVAAASFFRESSEPAGGGESGGRRDRRGQPTRRGGGTAARGLGGRAGHRPRQRRDADRDRDIDTNNNRRDLDDRRNTADRPRTEVSGDGRGPPVRRSRVEEATYIQRLFRSNRRRAVQRVLGGSPPRCTVPKEGVAEYFERVHARSGTTGSWQPPPPPYGDPDEASSGALVRPFTASEVDLRLRRTSNSAPGPDGLTYRDLRRGDPDCRLLASIYNACLRLGSVPECWKDSNTVLVHKKGDRGDLSNWRPLALGDTTPKLFAAVLADRLLGWCTANKRLSDAQKGFLQCEGCYEHNFVLQEALNDARRGGREVVVAWLDLTNAFGSVPHATIRRALADAGVPAPITNIIKNLYINCSTRVRTAEGFTRKININAGVKQGCPLSPAVFNLAIDPLLRAVGGEEDGYNLRGRRTAVLAYADDLVLLSDSAGKMQDMLNRVEAAAGGLGFSFNPSKCATLHQNCRGTRRALPTRLSLQGVELRALAAGESYEHLGVPTGFQVNQTPYHTIDGLSRDLRAIDESLLAPWQKAEAVASFLLPRLEFSLRGSHVEKRPLKTVDLAIRRMAKSWMNLPQRASAEVVYLPPSRGGMGLLPLSDWVDALTIAHAFRLLTSPDAVVRELAWTSLRESAAKKIGRPASNRDLAEYLSGSLEGDFARVGGDISTLWTRTRTATRRSKARLGLVWTYSIAREEMVVTLRGSRGRKTTVGPDARVQIIRRLRAAVHEYYAEQLANKPDQGKVFQVSSRSGVSNHFVRGGNFTRFADWRFVHRARLDVLPLNGTRRWENGDRRCRRCGEALESLPHVLCHCRPHAAAWQLRHDSVVERIGKASRLPGTLSINKRVEGVEGDLVELRPDIVVRHEPTRSVAIVDVTIAFENQYLAFEEARARKHAKYEPLANALRGRGYDVTVAAIVVGALGSWDPANEAVLKALKISPRYAKLMRRLIVSETIRWSRDIYVEHVSGVRQYTLSINNDTNSSVPAPSASENGGVGE

SEQ ID NO: 15683 - protein, 1656 aa, Anoplius nigerrimus
MELIFDFPFPETFPCPECFMPGSASKHNGSYKTANDLLKHARKYHPGFTAQYRCGVCGFIGTGRYPIKSVKTHHADEHEIINNSNNSLQAGPGNARNTRSCREGRVAGGLTGSASRGGPRSNNNSNLNSYFSSAAGTQRRSSGSSTTTTTSPATRTTAEQSTEPATGAPAAETARVRPGGAARAAQSPREGSPREEGSRTTRAGRARSVPVDVRPPGRAERRVAAATTRNLTGTRGPAAATRARRTPASAAEAAPTTAVATNTTAHTGRRTTRLGSQTAANATYAAVTAGATVVSPAEGLDTAARRGLRSRRSSSLPPGEVGGNDRSPPTRDVRSPPSALTIIEEERGALANVPPSTPTMPVTMTTTTVTTTVSGGPIMSTGVPRGRATDFTNHIFSGRPTLSPPEVVVNVAGLAGAATSWEQLQPSSPPTPPLPITNGYDGDNAREGAEEPWRTVLARRRRSLPATPAPSGHPSPPAPSPRPSTPPTTAAATAITPPSTIAAATPPPPPAAPTRHRLPPAAALTMRRSINSSTSPTNSRGRPERAARDDTPGTCSATGRGRRLSDFLSPRGSPRRCGTGVGEGVGASLPTGRAAPPGGIGGATSRPRGSRVAARRPPVPVDQPSLRGAERSPRGSVDPVEMREQLIGRAGAVANAADLEDVAVAAASFFRESSEPASGGESGGRRDRRGQLTRRGGGTAARGPRDRAGHRHRPRRDADVNRDSDVDNNRRNADIRRDMTARPLTDDVSGDGRGPPVRRSRVEEATYIQRLFRSNRRRAVQRVLGGSPPRCTVPKERVAEYFERVHARSGTTGGWQPPPPPYGDPDEASSGALVRPFTASEVDLRLRRTSNSAPGPDGLTYRDLRRGDPDCRLLASIYNACLRLGSVPECWKDSNTVLVHKKGDRNDLANWRPLALGDTTPKLFAAVLADRLLGWCTTNKRLSSAQKGFLQCEGCYEHNFVLQEALNDARRGGREVVVAWLDLTNAFGSVPHVTIRRALADAGVPAPITSIIKNLHINCTTRVRTAEGFTRKINIEAGVKQGCPLSPVVFNLAIDPLLRVVGGGEDGYNLRGRRTAILAYADDLVLLSDSAGKMQQLLNKVEAAAGGLGLTFNPAKCAILHQMCRGPRRALPTRLTLQGVELRALAAGEFYEHLGVPTGFQVNQTPHHTIGGLRRDLRAVDESLLAPWQKAEAVAAFLLPRLDFSLRGSHVEKGPLKIIDLAIRRAAKSWMHLPQRASAEVVYLPPSRGGCGLLPLTDWVDALTIAHAFRLLTSPDAVVRELAWTSLREAASKKIGRPASNMDLADYLSGSLEGEFARDGGDIATLWSRARMATRRSKARLALVWKYSINREELVVTLRGSRGRETTVGPDARGQIIRRLRAAIHESYALQLANKPDQGKVFQVSSRSSVSNHFVRGGNFTRFADWRFVHRARLDVLPLNGTRRWGNGDRRCRRCGEALESLPHVLCHCRPHAAAWQLRHDAVVERIAGASRLPGALSVNKRVEGVDGDLGGLRPDIVVRHEPSRTVTIVDVTVAFENKYTAFQEARGRKHAKYEPLADQLRGHGYEVTVAAIVVGALGSWDPANEAVLKALKISPRYAKLMRRLVVSETVRWSRDIYVEHVSGIRQYKTNVTPVSEETNATVTAPPDSETRDVGE

SEQ ID NO: 15684 - protein, 1655 aa, Anoplius nigerrimus
MELIFDYPFPETFPCPECFMPGSASKHNGSYKTANDLLKHARKYHPGFTAQYRCGVCGFIGVGRYPIKSVKTHHADEHSNLNNSNNSIQAGPGNTRNTRSCREGRVAGGLTGSASRGGSRTNNTNRNLNVYFPSATGTERRSSGSPTTTTTSPATRTTAEQTTEPATGAPAAETARVRPGGAARAAQSPREGSPREEGSRTTRAGRARSVPVEVRPPGRAERRVAAATTRNLTGATRGPAAATRARRTPASAAAAATTSAAATTMAAPTTRRTTRLGSQTAANVTYAAVTAGASVVSPAEGLDTAARRGLRSRRSSSLPPGEVGGSDRSPPTRDVRSPPSALTIIEEERGALASVPPSTPTMPVTMTTTTVTTTVSGGPIMSTGLPRGRATNTTTPTFSGRLTLSPPEVVVNVAGLAGAATSWEQQRPSSPPTPPLPRVTASDDDDDNNARVGAGEPWRTVPARRRRSLPATPTTPGHSSPPAPSPRPSTPSTFAAAATPSPTSAAATPPPPPAAPVRHRLPPTAAFSMRRSLNSSTSPTNSRGRPERAAREETPETCSTTGRGRRLSDFLSPRGSPRRCGTGVGEGVGASLPTGRAAPPGGVGGATSRPRGSRVPARRPPVPVDQPSLRGAERSPRGSVDPVEMREQLIGRAGAVANAADLEDVAVAAASFFRGSMEPAGGGESGGRRDRRGQLTRRGGGTAARGLGGRAGHRPRQRRDVDRDRDSDTNNNRRDLDDRRNTADRPRTEVSGGGRGPPARRSRVEEATYIQRLFRSNRRRAVQRVLGGSPPRCTVPKERVAEYFERVHARSGTTGSWQPPPPPYGDPDEASSGALVRPFTASEVDLRLRRTSNSAPGPDGLTYRDLRRGDPDCRLLASIYNACLRLGSVPECWKGSNTVLVHKKGDRNDLANWRPLALGDTTPKLFAAVLADRLLGWCTTNKRLSDAQKGFLRCEGCYEHNFVLQEALNDARRGGREVVVAWLDLTNAFGSVPHATIRRALADAGVPAPINNIIKNLYINGTTRVRTAEGFTRKINIEAGVKQGCPLSPVVFNLAIDPLLRVVGGGEDGYNLRGRRTAILAYADDLVLLSDSAGNMQNLLNKVEAAAGGLGLTFNPAKCATLHQHCRGPRRALPTRLSLQGVELRALAAGESYEHLGVPTGFQIDQTPYTTIGGLHRDLRAIDDSLLAPWQKAEAVATFLLPRLDFSLRGSHVEKRPLKTVDLAIRRMAKSWMHLPQRASAEVVYLPPSRGGVGLLPLSDWVDALTIAHAFRLLTSPDAVVRELAWTSLRESASRKIGRPATNWDLAEFLSGSLEGDFARVGGDIATLWTRARAAARRTGRKLDLKWKYSTAREELVITLRGSRGRSTTVGPDARAQIIRRLRAAIHEFYAVQLENKPDQGKVFQVSSRSSVSNHFVRGGNFTRFADWRFVHRARLDVLPLNGTRRWGNGDRRCRRCGEALESLPHVLCHCRPHAAAWQMRHDAVVERLAKASRLPGALGVNKRVEGVDGDLGGLRPDIVIRHEPSRTVTIVDVTIAFENQYIAFEEARGRKHVKYEPLAEQLRGHGYEVTVAAIVVGALGSWDPANEAVLKLLKVSPKYAKLMRRLIVSDTLRWSRDIYVEHVSGVRQYKTNNAISTNTGASSPPVSENGGVGE

SEQ ID NO: 15685 - protein, 1656 aa, Anoplius nigerrimus
MELIFDFPFPETFPCPECFMPGSASKHNGSYKTANDLLKHARKYHPGFTAQYRCGVCGFIGTGRYPIKSVKTHHADEHEIINNSNNSLQAGPGNARNTRSCREGRVAGGLTGSASRGGPRSNNNSNLNSYFSSAAGTQRRSSGSSTTTTTSPATRTTAEQSTEPATGAPAAETARVRPGGAARAAQSPREGSPREEGSRTTRAGRARSVPVDVRPPGRAERRVAAATTRNLTGTRGPAAATRARRTPASAAEAAPTTAVATNTTAHTGRRTTRLGSQTAANATYAAVTAGATVVSPAEGLDTAARRGLRSRRSSSLPPGEVGGNDRSPPTRDVRSPPSALTIIEEERGALANVPPSTPTMPVTMTTTTVTTTVSGGPIMSTGVPRGRATDFTNHIFSGRPTLSPPEVVVNVAGLAGAATSWEQLQPSSPPTPPLPITNGYDGDNAREGAEEPWRTVLARRRRSLPATPAPSGHPSPPAPSPRPSTPPTTAAATAITPPSTIAAATPPPPPAAPTRHRLPPAAALTMRRSINSSTSPTNSRGRPERAARDDTPGTCSATGRGRRLSDFLSPRGSPRRCGTGVGEGVGASLPTGRAAPPGGIGGATSRPRGSRVAARRPPVPVDQPSLRGAERSPRGSVDPVEMREQLIGRAGAVANAADLEDVAVAAASFFRESSEPASGGESGGRRDRRGQLTRRGGGTAARGPRDRAGHRHRPRRDADVNRDSDVDNNRRDADNRRNRSDRPLTDEVSGDGWGPPVRRSRVEEATYIQRLFRSNRRRAVQRVLGGSPPRCTVPKERVAEYFERVHARSGTTGGWQPPPPPYGDPDEASSGALVRPFTASEVDLRLRRTSNSAPGPDGLTYRDLRRGDPDCRLLASIYNACLRLGSVPECWKDSNTVLVHKKGDRGDLSNWRPLALGDTTPKLFAAVLADRLLGWCTTNKRLSDAQKGFLQCEGCYEHNFVLQEALNGARRGGREVVVAWLDLTNAFGSVPHATIRRALADAGVPAPITSIINNFYINCTTRVRTAEGLTRKININAGVKQGCPLSPAVFNLAIDPLLRAVGGEGDGYNLRGRRTAILAYADDLVLLSDSADKMQRLLNKVEAAAGGLGFTFNPAKCATLHQHCRGPRRALPTRLSLQGVELRALAAGESYEHLGVPTGFQIVQTPYNTIDGLHRDLRAIDNSLLAPWQKAEAVASFLLPRLDFSLRGSHVEKRPLKTVDLAIRRMAKSWLHLPQRASAEVVYLPPSRGGVGLLPLSDWVDALTIAHAFRLLTSPDAVVRELAWTSLRESATRKIGRPATNRDLAEFLSGSLEGDFARVGGDISTLWTRARAAARRTGEKLDLEWKYSTARRELVVTLRGSRGRLTTIGPDARAQIIRRLRAAIHEFYSLQLGNKPDQGKVFQVSSRSSVSNHFVRGGNFTRFADWRFVHRARLDVLPLNGTRRWGNGDRRCRRCGEALESLPHVLCHCRPHAAAWQLRHDAVVERLAKASRLPGALSVNKRVEGVDGDLGGLRPDIVVRHESSRTVTIVDVTVAFENEYIAFEEARGRKHVKYEPLAEQLRGRGYEVTVAAIVVGALGSWDPANEAVLKTLKISPKYAKLMRRLIVSETIRWSRDIYVEHVSGVRQYKTNATPGIDSPNIAAPTPPDSETRDVGE

SEQ ID NO: 15686 - protein, 1655 aa, Anoplius nigerrimus
MELFFDFPFPETFPCPECFMPGSASKHNGSYKTANDLLKHARKYHPGFTAQYRCGVCGFIGVGRYPIKSVKTHHADEHSNLNDSNNSIQAGPGNTRSTRSCREGRVAGGLTGPASRGGSRTNNNSNLNSHFSSAAGTQRRSSGSPTTTTTSPATRTTAEQTTEPATGAPAAETARARPGGAARAAQSPREGSPREEGSRTTRAGRARSVPVDVRPPGRAERRVAAATTRNLTGATRGPAAATRARRTPASAAAAATTSAAATTTAAPTSRRTTRLGSQTAANVTYAAVTAGATVVSPAEGLDTAARRGLRSRRSSSLPPGEVGGNDRSPPPRDVRSPPSALTVIPEERGALASVPPGTPTMPVTMTTTTVTTSVSGGPIMSTGLPRGRATNITTPTFSGRLTLSPPEVVVNVAGLAGAATSWEHQRMSSPPTPPLPRITTSDDDDDINAREGAGEPWRTVPARRRRSLPATPTTSGHSSPPAPSPRPSTPSTFAAAATPSPTSAAATPPPPPAAPVRHRLPPTAAFSMRRSLNSSTSPTNSRGRPERAAREETPETCSTTGRGRRLSDFLSPRGSPRRCGTGVGVGVGASLPTGRAAPPGGIGGATSRPRGSRVAARRPPVPVDQPSLRGAERSPRGSVDPVEMREQLIGRAEAVANAADLEDVAVAAASFFRESSEPAGGGESGGRRDRREQLTRRGGGTAARGARDRAGHRHRLRRDADVNTDSDVDNNRRNADIRRDMTARPLTDDVSGDGRGPPVRRSRVEEATYIQRLFRSNRRRAVQRVLGGSPPRCTVPKERVAEYFERVHARSGTTGSWQPPPPPYGDPDEASSGALVRPFTASEVDLRLRRTSNSAPGPDGLSYRDLRRGDPDCRLLASIYNACLRLGSVPECWKDSNTVLVHKKGDRNDLANWRPLALGDTTPKLFAAVLADRLLGWCTTNKRLSSAQKGFLQCEGCYEHNFVLQEALNDARRGGREVVVAWLDLTNAFGSVPHATIRRALADAGVPAPIMSIIKNLYINCSTRVRTAEGFTRKININAGVKQGCPLSPAVFNLAIDPLLRAVGGEEDGYNLRGRRTAVLAYADDLVLLSDSAGKMQDMLNRVEAAAGGLGFSFNPSKCATLHQNCRGTRRALPTRLSLQGVELRALAAGESYEHLGVPTGFQVNQTPYHTIDGLSRDLRAIDESLLAPWQKAEAVASFLLPRLDFSLRGSHVEKRPLKTVDLAIRRMAKSWMNLPQRASAEVVYLPPSRGGMGLLPLSDWVDALTIAHAFRLLTSPDAVVRELAWTSLRESAAKKIGRPASNRDLAEYLSGSLEGDFARVGGDISTLWTRTRTATRRSKARLGLVWFYSIAREEMVVTLRGSRGRTTTVGPDARVQIIRRLRAAVHESYAEQLANKPDQGKVFQVSSRSGVSNHFVRGGNFTRFADWRFVHRARLDVLPLNGTRRWENGDRRCRRCGEALESLPHVLCHCRPHAAAWQLRHDSVVERIGKASRLPGSLSINKRVGGVEGDLVELRPDIVVRHEPTRSVAIVDVTIAFENQYLAFEEARARKHAKYEPLANALRGRGYDVTVAAIVVGALGSWDPANEAVLKALKISPRYAKLMRRLIVSETIRWSRDIYVEHVSGIRQYTLSSNIDANSFVPAPSVSENGGVGE

SEQ ID NO: 15687 - protein, 1660 aa, Anoplius nigerrimus
MELIFDYPFPETFPCPECFMPGSASKHNGSYKTANDLLKHARKYHPGFTAQYRCGVCGFIGTGRYPIKSVKTHHADEHENINNSNNSVQAGPGNARNTRSCREGRVAGGLTGSASRGGTRPNNNSNLNSYFPSAAGTQRRSNGSPTTTTTSPATRTTAEQTTEPATGAPAAETARTRPGGAARAAQSPREGSPREEGSRTTRAGRARSVPVEVRPPGRAERRVAAATTRNLTGVTRGPAAATRARRTPASAAAAATTSAAATTTAAPTSRRTTRLGSQTAANVSYAAVTAGATVVSPAEGLDTAARRGLRSRRSSSLPPGEVGGSDRSPPTRDVRSPPSALTVIPEERGALASVPPGTPTMPVTMTTTTVTTSVSGGPIMSTGVPRGRATNITTNTFSGRLTLSPPEVVVNVAGLAGAATTWEQQRPSSPPTPPLPRITASDDDDDNIAREGAGEPWRTVEARRRRSQPATPTPSGHPSPPPPTPRPSTTPTTAAATAATPSPTSAAATPPPPPAAPTRHRLPPTAALTMRRRSNSSTSPTNSRRRPERAAREETPETCSTTGRGRRLSDFLSPRGGPRRCGTGVEEGVGASLPTGRAAPPGGIGGATSRPRGSRVPARRPPVPVDQPSLRGAERSPRGSVDPVEMREQLIGRAGAVANAADLEDVAVAAASFFRGSMEPAGGGESGGRRDRREQLMRRGGGTAARGSRDRAGHRHRLRRDADVNTDSDVDNNRRDADIRRDTTARPLTDEVSGGGRGPPVRRSRVEEATYIQRLFRSNRRRAVQRVLGGSPPRCTVPKERVAEYFERVHARSGTTGSWQPPPPPYGDPDEASSGALVRPFTASEVDLRLRRTSNSAPGPDGLTYRDLRRGDPGCRLLASIYNACLRLGSVPECWKDSNTVLVHKKGDRNDLANWRPLALGDTTPKLFAAVLADRLLGWCTTNKRLSSAQKGFLQCEGCYEHNFVLQEALNDARRGGREVVVAWLDLTNAFGSVPHATIRRALADAGVPAPITSIIKNLYINCTTRVRTAEGFTRKINIEAGVKQGCPLSPVVFNLAIDPLLRVVGGGEDGYNLRGRRTAILAYADDLVLLSDSAGKMQQLLNKVEAAAGGLGLTFNPAKCAILHQMCRGPRRALPTRLTLQGVELRALAAGEFYEHLGVPTGFQVNQTPHHTMGGLRRDLRAVDESLLAPWQKAEAVAAFLLPRLDFSLRGSHVEKGPLKIIDLAIRRAAKSWMHLPQRASAEVVYLPPSRGGCGLLPLTDWVDALTIAHAFRLLTSPDAVVRELAWTSLREAASKKIGRPASNMDLADYLSGSLEGEFARDGGDIATLWSRARMATRRSKARLALVWKYSINREELVVTLRGSRDRETTVGPDARGQIIRRLRAAIHESYALQLANKPDQGKVFQVSSRSSVSNHFVRGGNFTRFADWRFVHRARLDVLPLNGTRRWGNGDRRCRRCGEALESLPHVLCHCRPHAAAWQLRHDAVVERIAGASRLPGALSVNKRVEGVDGDLGGLRPDIVVRHEPSRTVTIVDVTVAFENKYTAFQEARGRKHAKYEPLADQLRGHGYEVTVAAIVVGALGSWDPANEAVLKALKISPRYAKLMRRLVVSETVRWSRDIYVEHVSGIRQYKTNVTPVSEETNATVTAPPDSETRDVGE

SEQ ID NO: 15688 - protein, 1663 aa, Anoplius nigerrimus
MELIFEYPFPEEFRCPECYVPNRVSKHRSSYKTTNDLLKHARLHHPGFTVQYKCGVCDFVGSGRYPIKSVKVHHAALHNSENNLNESNNTANAQAGLVEARSCRERRVASGVTGSASRGGPRSNRANINLNSYFASATAGAERRSSGSPTTNTSPAAPTVRRTSTEPATGAPAADSALTRPGGAANTALSPREGSPRDEDRRMTRSGRARSVPVDVRPPGRAVRRVAAATTRNTTTRGTAAATRARRTPASAAAAAATTAAATTTAAPTGRRTTRLGSQTAANVSYAAVTAGATVVSPAEGLDTAARRGLRSRRSSSLPPGEVGGSDRSPPTRDVRSPPSALTVILEERGALASVPPGTPTMPVTMTTTTVTTTVSGGPIMSTGVPRGRATNSISPILSGRPTLSPPEVVVNVAGLAGAATSWEYQPSSSPPTPPLPVIDGNDDDDNEREGAGEPWRTVPARRRRSLPATPTTSGHSSPPAPSPRLSTPPITAAAATPSPTSAAATPPPPPAAPVRHRLPPTAAFSMRRSLNSSTSPTNSRGRPERAARDDTPGTCSTTGRGRRLSDFLSPRGSPRRCGTGVGVGVGASLPTGREAPPVGTGGGAARPRDSRVAARRPPVPVDQPSLRGAERSPRGSVDPVEMREQLIGRAEAVANAADLEDVAVAAASFFRESSEPAGGGESGGRRGRREQLPRRGGGTAARGLGDRAGHRPRQRRDADRDRDRDTNNNRRDLDDRRYTADRPQTGVGGDVRGPPVRRSRVEEATYIQRLFRSNRRRAVQRVLGGSPPRCTVPKERVAGYFERVHARSGTTGSWQPPPPPYGEPDEASNGALVRPFAASEVDLRLRRTSNSAPGPDGLSYRDLRRGDPECRLLASLFNACLRLGSVPDCWKDSSTVLVHKKGDRGDLSNWRPLALGDTTPKLFAAVLADRLLGWTTANKRLSDAQKGFLRCEGCLEHNFVLQEALNDARRGGREVVVAWLDLTNAFGSVPHATIHRALADAGVPAPITSIIKNFYINCSTRVRTAEGLTRKIQINAGVKQGCPLSPAIFNLAIDPLLRAVGGGEDGYNLRGRRTAVLAYADDLVLLSDSADKMQHLLNKVEAVAGGLGFTFNPAKCATLHQHCRGPRRALPTRLSLQGVELRALAAGESYEHLGVPTGFQNDQTPHDTIGGLHRDLRAIDNSLLAPWQKAEAVATFLLPRLDFSLRGSHVEKRPLKTVDLAIRRLAKSWMHLPQRASAEVVYLPPSRGGMGLLPLSDWVDALTIAHAFRLLTSPDAVVRELAWTSLRESASRKIGRPATNRDLAEFLSGSLEGDFARVGGDISTLWTRARAAARRSGGKLKLEWKYSNARGELVVTLRDSRGRLTTVGPDARGQIIRRLRAAVHEFYAEHLANKPDQGKAFQVSSRSSVSNHFVRGGNFTRFADWRFVHRARLDVLPLNGTRRWGNGDRRCRRCGEALESLPHVLCHCRPHAAAWQLRHDAVVERLAKASRLPGALSVNKRVEGVGGDLGGLRPDIVVRHEPSRTVTIVDVTIAFENTYTAFEEARGRKHVKYEPLAEQLRGHGYGVTVAAIVVGALGSWDPANEAVLKSLKVSPRYAKLMRRLVVSETIRWSRDIYVEHVSGVRQYTTMPVNETNSTVPAPPASENGGVGEQEPPLAERTN

SEQ ID NO: 15689 - protein, 1658 aa, Anoplius nigerrimus
MELIFDFPFPETFPCPECFMPGSASKHNGSYKTANDLLKHARKYHPGFTAQYRCGVCGFIGVGRYPIKSVKTHHADEHSNLNNSNNSIQARPGNTRNTRSCREGRVAGGLTGSASRGGPRPNNNSNLNSYFPSAAGTQRRSNGSPTTTTTSPATRTTAEQTTEPATGAPAAETARARPGGAARAAQSPREGSPREEGSRTTRAGRARSVPVEVRPPGRAERRVAAATTRNLTGTRGPAAATRARRTPASAAAAASTSAAVTTTAAPATRRTMRLGSQTAANISYAAVTAGATVVSPAEGLDTAARRGLRSRRSSSLPPGEVGGSDRSPPTRDVRSPPSALTVIPEERGALASVPPGTPTMPVTMTTTTVTTSTSGGPIMSTGVPRGRAAILTSFAFSDSRTLSPPEVVVNVAGLAGAATPWELQRTSSPPTPPLPTINGDDDDDDNEREGAGEPWRTVPARRRRSTPATPTTPGHPSPPAPSPRPSTPSTPAAATATPPPPTIAAATPPPPPAAPVRHRLPPTAAFSMRRSLNSSTSPTNSRGRPERAARDDTPETCSTTGRGRRLSDFLSPRGDPRRCGTGVGEGVGASLPTGRAAPPGGVGGATSRPRGSRVPARRPPVPVDQPSLRGAERSPRGSVDPVEMREQLIGRAEAVANAADLEDVAVAAASFFRGSSEPASGGESGGRRDRRGQLTRRGGGTAARGPRDRAGHRHRPRRDADVNRDSDVDNNRRDADNRRNRSDRPLTDEVSGDGRGPPVRRSRVEEATYIQRLFRSNRRRAVQRVLGGSPPRCTVPKEGVAEYFERVHARSGTTGSWQPPPPPYGDPDEASSGALVRPFTASEVDLRLRRTSNSAPGPDGLTYRDLRRGDPDCRLLASIYNACLRLGSVPECWKDSNTVLVHKKGDRGDLSNWRPLALGDTTPKLFAAVLADRLLGWCTTNKRLSDAQKGFLQCEGCYEHNFVLQEALNDARRGGREVVVAWLDLTNAFGSVPHATIRRALADAGVPAPITNIIKNLYINCTTRVRTAEGFTRKIKIEAGVKQGCPLSPVVFNLAIDPLLRVVGGGEDGYNLRGRRTAILAYADDLVLLSDSAGNMQSLLNKVEAAAGGLGFTFNPAKCATLHQHCRGPRRALPTRLSLQGVELRALAAGESYEHLGVPTGFQIDQTPYKTIDGLHRDLRAIDNSLLAPWQKAEAVATFLLPRLDFSLRGSHVEKRSLKTVDLAIRRLAKSWLHLPQRASAEVVYLPPSRGGVGLLPLSDWVDALTIAHAFRLLTSPDAVVRELAWTSLRESASRKIGRPATNWDLAEFLSGSLEGDFARVGGDISTLWTRARAAARRSGRKLDLKWKYSTARRELVVTLRGSRGRLTTIGPDARAQIIRRLRAAIHEFYSLQLENKPDQGKVFQVSSRSSVSNHFVRGGNFTRFADWRFVHRARLDVLPLNGTRRWGNGDRRCRRCGEALESLPHVLCHCRPHAAAWQLRHDAVVERLAKASRLPGVLSVNRRVEGVDGDLGGLRPDIVVRHESSRTVTIVDVTVAFENEYIAFEEARGRKHVKYEPLADQLRGHGYEVTVAAIVVGALGSWDPANEAVLKTLKISPKYAKLMRRLIVSETIRWSRDIYVEHVSGVRQYKTNATPGIDSPNIAAPTPSDSETRDVGE

SEQ ID NO: 15690 - protein, 1654 aa, Anoplius nigerrimus
MELIIDFPFPETFPCPECFVPGRAGKHLGSYKAANDLLKHARKHHPGFTVQYRCGVCGFIGEGRYPIKSVKAHHADEHCELNNSNSNAQAGPRNTRSCREGRVAGGLTGSASRGGSRANNNNRNLNSYFPSATGTERRSSGSPTTTTTSPATRTTAEQTTEPATGAPAAETARARPGGAARAAQSPREGSPREEGSRTTRAGRARSVPVEVRPPGRAERRVAAASTRNLTGTTRGPAAATRARRTPASAAAAATTPAAATTMAAQTTRRTTRLGSQTAANTTYAAVTAGATVVSPAEGLDTAARRGLRSRRSSSLPPGEVGGNDRSPPPRDVRSPPSALTVIPEERGALASVPPGTPTMPVTMTTTTVTTTVSGGPIMSTGVPRGRATEISIIPFSGRLTLSPPEVVVNVAGLAGAATSWEQLRPSSPPTPPLPRISASDDDDDNNAREGAGEPWRTVEARRRRSQPATPTPPGHPSPPPPTPRPSTPPTTAAATAVTPPPTTAAATPPPPPAAPTRHRLPPTAALTMRRRSNSSTSPTNSRRRPERAAREETPETCSTTGRGRRLSDFLSPRGSPRRCGTGVGEGVGASLPTGRAAPPGGVGGATSRPRGSRVPARRPPVPVDQPSLRGAERSPRGSVDPVEMREQLIGRAGAVANAADLEDVAVAAASFFRGSMEPAGGGESGGRRDRRGQLTRRGGGTAARGLGGRAGHRPRQRRDVDRDRDSDTNNNRRDLDDRRNTADRPRTEVSGGGRGPPARRSRVEEATYIQRLFRSNRRRAVRRVLGGSPPRCTVPKERVAEYFERVHARSGTTGSWQPPPPPYGDPDEASSGALVRPFTASEVDLRLRRTSNSAPGPDGLTYRDLRRGDPDCRLLASIYNACLRLGSVPECWKGSNTVLVHKKGDRNDLANWRPLALGDTTPKLFAAVLADRLLGWCTTNKRLSDAQKGFLRCEGCYEHNFVLQEALNDARRGGREVVVAWLDLTNAFGSVPHATIRRALADAGVPAPINNIIKNLYINGTTRVRTAEGFTRKINIEAGVKQGCPLSPVVFNLAIDPLLRVVGGGEDGYNLRGRRTAILAYADDLVLLSDSAGNMQNLLNKVEAAAGGLGLTFNPAKCATLHQHCRGPRRALPTRLSLQGVELRALAAGESYEHLGVPTGFQIDQTPYTTIGGLHRDLRAIDDSLLAPWQKAEAVATFLLPRLDFSLRGSHVEKRPLKTVDLAIRRMAKSWMHLPQRASAEVVYLPPSRGGVGLLPLSDWVDALTIAHAFRLLTSPDAVVRELAWTSLRESASRKIGRPATNWDLAEFLSGSLEGDFARVGGDIATLWTRARAAARRTGRKLDLKWKYSTAREELVITLRGSRGRSTTVGPDARAQIIRRLRAAIHEFYAVQLENKPDQGKVFQVSSRSSVSNHFVRGGNFTRFADWRFVHRARLDVLPLNGTRRWGNGDRRCRRCGEALESLPHVLCHCRPHAAAWQMRHDAVVERLAKASRLPGALGVNKRVEGVDGDLGGLRPDIVIRHEPSRTVTIVDVTIAFENQYIAFEEARGRKHVKYEPLAEQLRGHGYEVTVAAIVVGALGSWDPANEAVLKLLKVSPKYAKLMRRLIVSDTLRWSRDIYVEHVSGVRQYKTNNAISTNTGASSPPVSENGGVGE

SEQ ID NO: 15691 - protein, 1640 aa, Anoplius nigerrimus
MELIFDYPFPETFPCPECFMPGSASKHNGSYKTANDLLKHARKYHPGFTAQYRCGVCGFIGTGRYPIKSVKTHHADEHENLNNSNSIQARPGNNTRSCREGRVAGGLTGPASRGGSRTNNNNRNLNSYLSSATGTERRSSGNPTTTTTSPPATRTAERSTEPATGASAAETARARPGGAARTAESPREGSPREEGSRTTRAGRARSVPVDVRPPGRADRRVAAATTRNLTGTRGPAAATRARRTPASAAAAATSTAAATTTAAPTTRRTTRLGSQTAANATYAAVTAGATVVSPAEGLDTAARRGLRSRRSSSLPPGEVGGNDRSPPPRDVRSPPSALTVIPEERGALASVPPGTPTMPVTMTTTTVTTTVSGGPIMSTGLPRGRATNTTTPTFSGRLTLSPPEVVVNVAGLAGAATSWEHRYSSSPPTPPLPLITGEDDDDDNVREGAGESWRTVPARRRRSLPATPTTSGHSSPPAPSPRPATPPTTAAATPPPPPAAPTRNRLPPTAAFSMRRSLNSSTSPTNSRGRPERAAREDTPETCSTTGRGRRLSDFLSPRGNPRRCGTGVGEGVGASLPTGRAAPPGGIGGATSRPRGSRVAARRPPVPVDQPSLRGAERSPRGSVDPVEMREQLIGRAEAVANAADLEDVAVAAASFFRESSEPAGGGESGGRRDRRGQPTRRGGGTAARGLGGRAGHRPRQRRDVDRDRDSDTNNNRRDLDDRRNTADRPRTEVSGDGRGPPVRRSRVEEATYIQRLFRSNRRRAVQRVLGGSPPRCTVPKERVAEYFERVHARSGTTGSWQPPPPPYGDPDEASSGALVRPFTASEVDLRLRRTSNSAPGPDGLTYRDLRRGDPDCRLLASIYNACLRLGSVPECWKDSNTVLVHKKGDRGDLSNWRPLALGDTTPKLFAAVLADRLLGWCTANKRLSDAQKGFLQCEGCYEHNFVLQEALNDARRGGREVVVAWLDLTNAFGSVPHATIRRALADAGVPAPITNIIKNLYINCSTRVRTAEGFTRKININAGVKQGCPLSPAVFNLAIDPLLRAVGGEEDGYNLRGRRTAVLAYADDLVLLSDSAGKMQDMLNRVEAAAGGLGFSFNPSKCATLHQNCRGTRRALPTRLSLQGVELRALAAGESYEHLGVPTGFQVNQTPYHTIDGLSRDLRAIDESLLAPWQKAEAVASFLLPRLEFSLRGSHVEKRPLKTVDLAIRRMAKSWMNLPQRASAEVVYLPPSRGGMGLLPLSDWVDALTIAHAFRLLTSPDAVVRELAWTSLRESAAKKIGRPASNRDLAEYLSGSLEGDFARVGGDISTLWTRTRTATRRSKARLGLVWTYSIAREEMVVTLRGSRGRKTTVGPDARVQIIRRLRAAVHEYYAEQLANKPDQGKVFQVSSRSGVSNHFVRGGNFTRFADWRFVHRARLDVLPLNGTRRWENGDRRCRRCGEALESLPHVLCHCRPHAAAWQLRHDSVVERIGKASRLPGTLSINKRVEGVEGDLVELRPDIVVRHEPTRSVAIVDVTIAFENQYLAFEEARARKHAKYEPLANALRGRGYDVTVAAIVVGALGSWDPANEAVLKALKISPRYAKLMRRLIVSETIRWSRDIYVEHVSGVRQYTLSINNDTNSSVPAPSASENGGVGE

SEQ ID NO: 15692 - protein, 1654 aa, Anoplius nigerrimus
MELIIDFPFPETFPCPECFVPGRAGKHLGSYKAANDLLKHARKHHPGFTVQYRCGVCGFIGEGRYPIKSVKAHHADEHCELNNSNSNAQAGPRNTRSCREGRVAGGLTGSASRGGSRANNNNRNLNSYFPSATGTERRSSGSPTTTTTSPATRTTAEQTTEPATGAPAAETARARPGGAARAAQSPREGSPREEGSRTTRAGRARSVPVEVRPPGRAERRVAAASTRNLTGTTRGPAAATRARRTPASAAAAATTPAAATTMAAQTTRRTTRLGSQTAANTTYAAVTAGATVVSPAEGLDTAARRGLRSRRSSSLPPGEVGGNDRSPPPRDVRSPPSALTVIPEERGALASVPPGTPTMPVTMTTTTVTTTVSGGPIMSTGVPRGRATEISIIPFSGRLTLSPPEVVVNVAGLAGAATSWEQLRPSSPPTPPLPRISASDDDDDNNAREGAGEPWRTVEARRRRSQPATPTPPGHPSPPPPTPRPSTPPTTAAATAVTPPPTTAAATPPPPPAAPTRHRLPPTAALTMRRRSNSSTSPTNSRRRPERAAREETPETCSTTGRGRRLSDFLSPRGSPRRCGTGVGEGVGASLPTGRAAPPGGVGGATSRPRGSRVPARRPPVPVDQPSLRGAERSPRGSVDPVEMREQLIGRAGAVANAADLEDVAVAAASFFRGSMEPAGGGESGGRRDRRGQLTRRGGGTAARGLGGRAGHRPRQRRDVDRDRDSDTNNNRRDLDDRRNTADRPRTEVSGGGRGPPARRSRVEEATYIQRLFRSNRRRAVRRVLGGSPPRCTVPKERVAEYFERVHARSGTTGSWQPPPPPYGDPDEASSGALVRPFTASEVDLRLRRTSNSAPGPDGLTYRDLRRGDPDCRLLASIYNACLRLGSVPECWKGSNTVLVHKKGDRNDLANWRPLALGDTTPKLFAAVLADRLLGWCTTNKRLSDAQKGFLRCEGCYEHNFVLQEALNDARRGGREVVVAWLDLTNAFGSVPHATIRRALADAGVPAPINNIIKNLYINGTTRVRTAEGFTRKINIEAGVKQGCPLSPVVFNLAIDPLLRVVGGGEDGYNLRGRRTAILAYADDLVLLSDSAGNMQNLLNKVEAAAGGLGLTFNPAKCATLHQHCRGPRRALPTRLSLQGVELRALAAGESYEHLGVPTGFQIDQTPYTTIGGLHRDLRAIDDSLLAPWQKAEAVATFLLPRLDFSLRGSHVEKRPLKTVDLAIRRMAKSWMHLPQRASAEVVYLPPSRGGVGLLPLSDWVDALTIAHAFRLLTSPDAVVRELAWTSLRESASRKIGRPATNWDLAEFLSGSLEGDFARVGGDIATLWTRARAAARRTGRKLDLKWKYSTAREELVITLRGSRGRSTTVGPDARAQIIRRLRAAIHEFYAVQLENKPDQGKVFQVSSRSSVSNHFVRGGNFTRFADWRFVHRARLDVLPLNGTRRWGNGDRRCRRCGEALESLPHVLCHCRPHAAAWQMRHDAVVERLARASRLPGALGVNKRVEGVDGDLGGLRPDIVIRHEPSRTVTIVDVTIAFENQYIAFEEARGRKHVKYEPLAEQLRGHGYEVTVAAIVVGALGSWDPANEAVLKLLKVSPKYAKLMRRLIVSDTLRWSRDIYVEHVSGVRQYKTNNAISTNTGASSPPVSENGGVGE

SEQ ID NO: 15693 - protein, 1657 aa, Anoplius nigerrimus
MELIIDYPFPETFPCPECFVPGRAGKHVGSYKAANDLLKHARKHHPGFTVQYRCGVCGFIGDGRYPIKSVKAHHADEHCELNISNSNAQAGPRNTRSCREGRVAGGLTGSASRGGSRANNNNRNLNSYFPSATGTERRSSGSPTTTTTSPPATRTAERTTEPATGAPADDTALTRPGGAASDAYSPREGSPREEGRRTTRAGRARSVPVDVRPPGRADRRVAAATTRILTGATRGPAAATRARRTPASAAAAATTSAAATTMAAPTTRRTTRLGSQTAANVTYAAVTAGASVVSPAEGLDTAARRGLRSRRSSSLPPGEVGGSDRSPPTRDVRSPPSALTIIEEERGALASVPPGTPTMPVTMTTTTVTTTVSGGPIMSTGVPRGRATEISIIPFSGRLTLSPPEVVVNVAGLAGAATSWEQLRPSSPPTPPLPRISASDDDDDNNAREGAGEPWRTVEARRRRSQPATPTPSGHPSPPPPTPRPSTPPTTAAATAVTPPPTTAAATPPPPPAAPTRHRLPPTAALTMRRRSNSSTSPTNSRRRPERAAREETPETCSTTGRGRRLSDFLSPRGSPRRCGTGVGEGVGASLPTGRAAPPGGIGGATSRPRGSRVAARRPPVPVDQPSLRGAERSPRGSVDPVEMREQLIGRAEAVANAADLEDVAVAAASFFRESSEPAGGGESGGRRDRREQPTRRGGGTAARGLGGRAGHRPRQRRDAHRDRDIDTNNNRRDLDDRRNTADRPRTEVSGDGRGPPVRRSRVEEATYIQRLFRSNRRRAVQRVLGGSPPRCTVPKEGVAEYFERVHARSGTTGSWQPPPPPYGDPDEASSGALVRPFTASEVDLRLRRTSNSAPGPDGLTYRDLRRGDPDCRLLASIYNACLRLGSVPECWKDSNTVLVHKKGDRGDLSNWRPLALGDTTPKLFAAVLADRLLGWCTANKRLSDAQKGFLQCEGCYEHNFVLQEALNDARRGGREVVVAWLDLTNAFGSVPHATIRRALADAGVPAPITNIIKNLYINCTTRVRTAEGFTRKIKIEAGVKQGCPLSPVVFNLAIDPLLRVVGGGEDGYNLRGRRTAILAYADDLVLLSDSAGNMQSLLNKVEAAAGGLGFTFNPAKCATLHQHCRGPRRALPTRLSLQGVELRALAAGESYEHLGVPTGFQIDQTPYKTIDGLHRDLRAIDNSLLAPWQKAEAVATFLLPRLDFSLRGSHVEKRSLKTVDLAIRRLAKSWLHLPQRASAEVVYLPPSRGGVGLLPLSDWVDALTIAHAFRLLTSPDAVVRELAWTSLRESASRKIGRPATNWDLAEFLSGSLEGDFARVGGDISTLWTRARAAARRSGRKLDLKWKYSTARRELVVTLRGSRGRLTTIGPDARAQIIRRLRAAIHEYYSLQLENKPDQGKVFQVSSRSGVSNHFVRGGNFTRFADWRFVHRARLDVLPLNGTRRWGNGDRRCRRCGEALESLPHVLCHCRPHAAAWQLRHDAVVERLAKASRLPGALSVNKRVEGVDGDLGGLRPDIVVRHESSRTVTIVDVTVAFENEYIAFEEARGRKHVKYEPLADQLRGHGYEVTVAAIVVGALGSWDPANEAVLKTLKISPKYAKLMRRLIVSETIRWSRDIYVEHVSGVRQYKTNATPGIDSPNIAAPTPSDSETRDVGE

SEQ ID NO: 15694 - protein, 1652 aa, Anoplius nigerrimus
MELIIDFPFPETFPCPECFVPGRAGKHLGSYKAANDLLKHARKHHPGFTVQYRCGVCGFIGEGRYPIKSVKAHHADEHCELNNSNSNAQAGPRNTRSCREGRVAGGLTGSASRGGSRANNNNRNLNSYFPSATGTERRSSGSPTTTTTSPATRTTAEQTTEPATGAPAAETARARPGGAARAAQSPREGSPREEGSRTTRAGRARSVPVEVRPPGRAERRVAAATTRNLTGATRGPAAATRARRTPASAAAAATTSAAATTTAAPTSRRTTRLGSQTAANVTYAAVTAGATVVSPAEGLDTAARRGLRSRRSSSLPPGEVGGNDRSPPPRDVRSPPSALTVIPEERGALASVPPGTPTMPVTMTTTTVTTTVSGGPIMSTGVPRGRATDSTNSLLSGRLTLSPPEVVVNVAGLAGAATSWEHQRMSSPPTPPLPRITTSDDDDDINAREGAGEPWRTVPARRRRSLPATPTTPGHSSPPAPSPRPSTPSTFAAAATPSPTSAAATPPPPPAAPVRHRLPPTAAFSMRRSLNSSTSPTNSRGRPERAAREETPETCSTTGRGRRLSDFLSPRGSPRRCGTGVGEGVGASLPTGRATPPGGIGGATSRPRGSRVAARRPPVPVDQPSLRGAERSPRGSVDPVEMREQLIGRAEAVANAADLEDVAVAAASFFRESSEPAGGGESGGRRDRRGQLTRRGGGTAARGLGGRAGHRPRQRRDADRDRDSDSNNNRRDADNRRNTADRPQTEVSGDGRGPPVRRSRVEEATYIQRLFRSNRRRAVQRVLGGSPPRCTVPKERVAEYFERVHARSGTTGSWQPPPPPYGDPDEASSGALVRPFTASEVDLRLRRTSNSAPGPDGLTYRDLRRGDPDCRLLASIYNACLRLGSVPECWKASNTVLVHKKGDRGDLSNWRPLALGDTTPKLFAAVLADRLLGWCTANKRLSDAQKGFLRCEGCYEHNFVLQEALNDARRGGREVVVAWLDLTNAFGSVPHATIRRALADAGVPAPITSIIKNFYINCSTRVRTAEGYTRKININAGVKQGCPLSPAVFNLAIDPLLRAVGGGEDGYNLRGRRTAVLAYADDLVLLSDSAGKMQDMLNRVEAAAGGLGFSFNPSKCATLHQNCRGTRRALPTRLSLQGVELRALAAGESYEHLGVPTGFQINQTPFHTIDGLRRDLRAIDESLLAPWQKAEAVASFLLPRLDFSLRGSHVEKRPLKTVDLAIRRMAKSWMNLPQRASAEVVYLPPSRGGMGLLPLSDWVDALTIAHAFRLLTSPDAVVRELAWTSLRESAAKKIGRPASNRDLAEYLSGSLEGDFARVGGDISTLWTRTRTATRRSKARLDLVWTYSSSREEMVVTLRGSRGRKTTVGPDARVQIIRRLRAAVHESYAEQLANKPDQGKVFQVSSRSGVSNHFVRGGNFTRFADWRFVHRARLDVLPLNGTRRWESGDRRCRRCGGALESLPHVLCHCRPHAAAWQLRHDSVVERIGKASRLPGSLSINKRVEGVEGDLVELRPDIVVRHEPTRSVAIVDVTIAFENQYLAFEEARARKHAKYEPLANALRGRGYDVAVAAIVVGALGSWDPANEAVLKMLKISPKYAKLMRRLIVSETIRWSRDIYVEHVSGVRQYTLSTNNEPNSSVPAPSASENGGMGE

SEQ ID NO: 15695 - protein, 1655 aa, Anoplius nigerrimus
MELFFDFPFPETFPCPECFMPGSASKHNGSYKTANDLLKHARKYHPGFTAQYRCGVCGFIGVGRYPIKSVKTHHADEHSNLNDSNNSIQAGPGNTRSTRSCREGRVAGGLTGPASRGGSRTNNNSNLNSHFSSAAGTQRRSSGSPTTTTTSPATRTTAEQTTEPATGAPAAETARARPGGAARAAQSPREGSPREEGSRTTRAGRARSVPVDVRPPGRAERRVAAATTRNLTGATRGPAAATRARRTPASAAAAATTSAAATTTAAPTSRRTTRLGSQTAANVTYAAVTAGATVVSPAEGLDTAARRGLRSRRSSSLPPGEVGGNDRSPPPRDVRSPPSALTVIPEERGALASVPPGTPTMPVTMTTTTVTTSVSGGPIMSTGLPRGRATNITTPTFSGRLTLSPPEVVVNVAGLAGAATSWEHQRMSSPPTPPLPRITTSDDDDDINAREGAGEPWRTVPARRRRSLPATPTTSGHSSPPAPSPRPSTPSTFAAAATPSPTSAAATPPPPPAAPVRHRLPPTAAFSMRRSLNSSTSPTNSRGRPERAAREETPETCSTTGRGRRLSDFLSPRGSPRRCGTGVGVGVGASLPTGRAAPPGGIGGATSRPRGSRVAARRPPVPVDQPSLRGAERSPRGSVDPVEMREQLIGRAGAVANAADLEDVAVAAASFFRESSEPASGGESGGRRDRREQLTRRGGGTAARGPRDRAGHRHRPRRDADVNRDSDVDNNRRDADNRRNRSDRPLTDEVSGDGRGPPVRRSRVEEATYIQRLFRSNRRRAVQRVLGGSPPRCTVPKERVAEYFERVHARSGTTGSWQPPPPPYGDPDEASSGALVRPFTASEVDLRLRRTSNSAPGPDGLTYRDLRRGDPDCRLLASIYNACLRLGSVPECWKDSNTVLVHKKGDRGDLSNWRPLALGDTTPKLFAAVLADRLLGWCTANKRLSDAQKGFLRCEGCYEHNFVLQEALNDARRGGREVVVAWLDLTNAFGSVPHATIRRALADAGVPAPITSIIKNFYINCSTRVRTAEGYTRKININAGVKQGCPLSPAVFNLAIDPLLRAVGGGEDGYNLRGRRTAILAYADDLVLLSDSAGNMQRLLNKVEAAAGGLGLKFNPSKCAILHQQCRGPRRALPTRLSLQGVELRALAAGESYEHLGVPTGFQISQTPYHTIGGLQQDLRAIDNSLLAPWQKAEAVATFLLPRLDFSLRGAHVAKGPLKTVDLSIRRAAKSWMHLPQRASAEVVYLPPSRGGCGLLPLTDWVDALTIAHAFRLLTSPDAVVRELAWTSLREAVSKKIGRPASNSDLADYLSGSLEGEFARDGGDIATLWSRARAATRRSKSKLALIWKYSIARKELVVTLRGSRERETTVGPDARAQIIRRLRAAIHEFYSIQLARKPDQGKVFQVSSRSGVSNHFVRGGNFTRFADWRFIHRARLDVLPLNGARRWGNGDRRCRRCGEALESLPHVLCHCRPHAAAWQMRHDAVVERIARASRLPGTLSVNKRVEGVDGDLGGLRPDIVIRHEPSRTVTIVDVTIAFENQYPAFEEARGRKHVKYEPLAEQLRGHGYEVAVAAIVVGALGSWDPANEAVLRALKVSPRYAKLMRRLIVSETIRWSRDIYVEHVSGVRQYTTNLVNDTNSGAPAPPASENGNVGE

SEQ ID NO: 15696 - protein, 1654 aa, Anoplius nigerrimus
MELIIDFPFPETFPCPECFVPGRAGKHVGSYKAANDLLKHARKHHPGFTVQYRCGVCGFIGEGRYPIKSVKAHHADEHCELNNSNSNAQAGPRNTRSCREGRVAGGLTGSASRGGLRANNNRTLNSYLPSTTGTERRSSGSPGTTTTTTSPATRTAERISTEPATGAPAAETARARPGGAARAAQSPREGSPREEGSRTTRAGRARSVPVEVRPPGRAERRVAAATTRNLTGATRGPAAATRARRTPASAAAAATTSAAATTTAAPTSRRTTRLGSQTAANATYAAVTAGATVVSPAEGFDTAARRGLRSRRSSSLPPGEVGGNDRSPPPRDVRSPPSALTVIPEERGALTSVPPGTPTMPVTMTTTTVTTTVSGGPIMSTGVPRGRATDSTNSLFSGRLTLSPPEVVVNVAGLAGAATSWEHQRMSSPPTPPLPRITTSDDDDDINAREGAGEPWRTVPARRRRSLPATPTTSGHSSPPAPSPRPSTPSTFAAAATPSPTSAAATPPPPPAAPVRHRLPPTAAFSMRRSLNSSTSPTNSRGRPERAAREETPETCSTTGRGRRLSDFLSPRGSPRRCGTGVGEGVGASLPTGRAAPPGGIGGATSRPRGSRVAARRPPVPVDQPSLRGAERSPRGSVDPVEMREQLIGRAEAVANAADLEDVAVAAASFFRESSEPASGGESGGRRDRRGQPTRRGGGTAARGLGGRAGHRPRQRRDVDRDRDIDTNNNRRDLDDRRNTADRPRTEVSGDGRGPPVRRSRVEEATYIQRLFRSNRRRAVQRVLGGSPPRCTVPKERVAEYFERVHARSGTTGSWQPPPPPYGDPDEASSGALVRPFTASEVDLRLRRTSNSAPGPDGLTYRDLRRGDPDCRLLASIYNACLRLGSVPECWKDSNTVLVHKKGDRNDLANWRPLALGDTTPKLFAAVLADRLLGWCTTNKRLSDAQKGFLQCEGCYEHNFVLQEALNDARRGGREVVVAWLDLTNAFGSVPHATIRRALADAGVPAPITSIINNFYINCTTRVRTAEGLTRKININAGVKQGCPLSPAVFNLAIDPLLRAVGGEGDGYNLRGRRTAILAYADDLVLLSDSADKMQRLLNKVEAAAGGLGFTFNPAKCATLHQHCRGPRRALPTRLSLQGVELRALAAGESYEHLGVPTGFQNNQTPYNTIDGIHRDLRAIDNSLLAPWQKAEAVATFLLPRLDFSLRGSHVEKRPLKTVDLAIRRLAKSWLHLPQRASAEVVYLPPSRGGVGLLPLSDWVDALTIAHAFRLLTSPDAVVRELAWTSLRESATRKIGRPATNRDLAESLSGSLEGDFARVGGDISTLWTRARAAARRTGEKLDLEWKYSTARKELVVTLRGSRGRLTTIGPDARAQIIRRLRAAIHEFYLLQLGNKPDQGKVFQVSSRSSVSNHFVRGGNFTRFADWRFVHRARLDVLPLNGTRRWGNGDRRCRRCGEALESLPHVLCHCRPHAAAWQLRHDAVVERLAKASRLPGALSVNKRVEGVDGDLGGLRPDIVVRHESSRTVTIVDVTIAFENEYIAFEEARGRKHAKYEPLAEQLRGHGYEVAVAAIVVGALGSWDPANEAVLKLLKVSPKYAKLMRRLIVSDTLRWSRDIYVEHVSGVRQYKTNNNAISTNTGAPSSSVPEYGGVGE

SEQ ID NO: 15697 - protein, 1658 aa, Anoplius nigerrimus
MELIFNYPFPETFPCPECFVPGRAGKHVGSYKAANDLLKHARKHHPGFTVQYRCGVCGFIGEGRYPIKSVKTHHADEHSEINNSINSAQAGTRNSRSCREGRVAGGLTGSASRGGSRANNNNRNLNSYFSSATGTERRASGSPTTTTTSPPATRTAERTSTEPATGAPAAETARARPGGAASDAYSPREGSPREEGRRTTRAGRARSVPVDVRPLGRADRRVAAATTRNTTATRGPAAATRARRTPASAAAAATTSAAATTMAAPTTRRTTRLGSQTAANTTYAAATAGATVVSPAEGLDTAARRGLRSRRSSSLPPGEVGGSDRSPPTRDVRSPPSALTIILEERGALASVPPSTPTMPVTMTTTTVTTTISGGPIMSTGLPRGRATNIITPTFSGRRTLSPPEVVVNVAGLAGAATSWEQLRPSSPPTPPLPRISASDDDDDNNAREGAGEPWRTVEARRRRSQPATPTPSGHPSPPPPTPRPSTTPTTAAATAATPSPTSAAATPPPPPAAPTRHRLPPTAALTMRRRSNSSTSPTNSRRRPERAAREETPETCSTTGRGRRLSDFLSPRGGPRRCGTGVEEGVGASLPTGRAAPPGGIGGATSRPRGSRVPARRPPVPVDQPSLRGAERSPRGSVDPVEMREQLIGRAGAVANAADLEDVAVAAASFFRGSMEPAGGGESGGRRDRRGQLTRRGGGTAARGSRDRAGHRHRLRRDANVNTDSDVDNNRRNADIRRDMTARPLTDDVSGDGRGPPVRRSRVEEATYIQRLFRSNRRRAVQRVLGGSPPRCTVPKERVAEYFERVHARSGTTGSWQPPPPPYGDPDEASSGALVRPFTASEVDLRLRRTSNSAPGPDGLTYRDLRRGDPDCRLLASIYNACLRLGSVPECWKDSNTVLVHKKGDRNDLANWRPLALGDTTPKLFAAVLADRLLGWCTANKRLSDAQKGFLQCEGCYEHNFVLQEALNDARRGGREVVVAWLDLTNAFGSVPHATIRRALADAGVPAPITSIIKNLYINSTTRVRTAEGFTRKININAGVRQGCPLSPAVFNLAIDPLLRVVGGGGDGYNLRGRRTAILAYADDLVLLSDSAGKMQEMLIKVEAAAGGLGLTFNPAKCAILHQMCRGPRRALPTRLTLQGVELRALAAGESYEHLGVPTGFQNSQTPYHTIGGLQRDLRAVDESLLAPWQKAEAVAAFVLPRLDFLLRGAHVEKGPLKVIDLSIRRAAKSWMHLPQRASAEVVYLPPSRGGVGLLPLSDWVDALTIAHAFRLLTSPDAVVRELAWTSLREAASKKIGRPASNLDLADYLSGSLEGEFARDGGDIATLWSRARAATRRSKARLALVWKYSILREELVVTLRGSRGRETTVGPDARAQIIRRLRAAIHESYTLQLANKPDQGKVFQVSSRSSVSNHFVRGGNFTRFADWRFVHRARLDVLPLNGARRWGNGDRRCRRCGEALESLPHVLCHCRPHAAAWQMRHDAVVERIARASRLPGILSVNKRVEGVDGDLGGLRPDIVIRHEPSRTVTIVDVTVAFENKYIAFEEARGRKHVKYEPLAEQLRGHGYEVAVAAIVVGALGSWDPANEAVLKTLKISPQYAKLMRRLIVSETVRWSRDIYVEHVSGIRQYKTNATPVNDIPNTAVLAPSDSETRGVGE

SEQ ID NO: 15698 - protein, 1137 aa, Anoplius nigerrimus
MRRSLNSSTSPTNSRGRPERAAREDTPETCSTTGRGRRLSDFLSPRGNPRRCGTGVGEGVGASLPTGRATPPGGIGGATSRPRGSRVPARRPPVPVDQPSPRGAERSPRGSVDPVGMREQLIGRAGAVANAADLEDVAVAAASFFRGSMEPAGGGESGGRRDRRGQLTRRGGGTAARGLGGRAGHRPRQRRDVDRDRDSDTNNNRRDLDDRRNTADRPRTEVSGGGRGPPVRRSRVEEATYIQRLFRSNRRRAVQRVLGGSPPRCTVPKERVAEYFERVHARSGTTGSWQPPPPPYGDPDEASSGALVRPFTASEVDLRLRRTSNSAPGPDGLTYRDLRRGDPDCRLLASIYNACLRLGSVPECWKDSNTVLVHKKGDRNDLANWRPLALGDTTPKLFAAVLADRLLGWCTTNKRLSDAQKGFLQCEGCYEHNFVLQEALNDARRGGREVVVAWLDLTNAFGSVPHATIRRALADAGVPAPITNIIKNLYINCSTRVRTAEGFTRKININAGVKQGCPLSPAVFNLAIDPLLRAVGGEEDGYNLRGRRTAVLAYADDLVLLSDSAGKMQDMLNRVEAAAGGLGFSFNPSKCATLHQNCRGTRRALPTRLSLQGVELRALAAGESYEHLGVPTGFQVNQTPYHTIDGLSRDLRAIDESLLAPWQKAEAVASFLLPRLDFSLRGSHVEKRPLKTVDLAIRRMAKSWLNLPQRASAEVVYLPPSRGGMGLLPLSDWVDALTIAHAFRLLTSPDAVVRELAWTSLRESAAKKIGRPASNRDLAEYLSGSLEGDFARVGGDISTLWTRTRTATRRSKARLGLVWTYSIAREEMVVTLRGSRGRKTTVGPDARVQIIRRLRAAVHEYYAEQLANKPDQGKVFQVSSRSSVSNHFVRGGNFTRFADWRFVHRARLDVLPLNGTRRWENGDRRCRRCGEALESLPHVLCHCRPHAAAWQLRHDSVVERIGKASRLPGTLSINKRVEGVEGDLVELRPDIVVRHEPTRSVAIVDVTIAFENQYLAFEEARARKHAKYEPLANALRGRGYDVTVAAIVVGALGSWDPANEAVLKALKISPRYAKLMRRLIVSETIRWSRDIYVEHVSGLRQYATNTGNAINSIVPPPSASENGDVGEQVPPLAERTN

SEQ ID NO: 15699 - protein, 1653 aa, Anoplius nigerrimus
MELIFDYPFPETFPCPVCFVPGSASKHNGSYKTANDLLKHARKYHPGFTAQYRCGVCGFIGVGRYPIKSVKTHHADEHENLDNSVSIQARPGNNTRSCREGRVAGGLTGSASRGGLRANNNRTLNSYLPSATGTERRSSGSPGTTTTSPATRTAERISTEPATGAPAAETARARPGGAARTAESPREGSPREEGSRTTRAGRARSVPVDVRPPGRADRRVAAATTRNLTGTRGPAAATRARRTPASAAAATTSTAAATTTAAPTTRRTTRLGSQTAANVTYAAVTAGATVVSPAEGLDTAARRGLRSRRSSSLPPGEVGGNDRSPPPRDVRSPPSALTVIPEERGALASVPPGTPTMPVTMTTTTVTTSISGGPIMSTGLPRGRATNITTPTFSGRLTLSPPEVVVNVAGLAGAATSWEQQRPSSPPTPPLPRITTTSDDDDDNYAREGAGEPWQTVPARRRRFLPATPTTPGHSSPPAPSPRPSTPPTTAAATAVTPPPTTAAATPPPPPAAPTRHRLPPTAAFSMRRSLNSSTSPTNSRGRPERAAREETPETCSTTGRGRRLSDFLSPRGNPRRCGTGVGEGVGASLPTGRATPPGGIGGATSRPRGSRVAARRPPVPVDQPSLRGAERSPRGSVDPVEMREQLIGRAEAVANAADLEDVAVAAASFFRESSEPAGGGESGGRRDRRGQPTRRGGGTAARGLGGRAGHRPRQRRDADRDRDIDTNNNRRDLDDRRNTADRPRTEVSGDGRGPPVRRSRVEEATYIQRLFRSNRRRAVQRVLGGSPPRCTVPKERVAEYFERVHARSGTTGSWQPPPPPYGDPDEASSGALVRPFTASEVDLRLRRTSNSAPGPDGLTYRDLRRGDPDCRLLASIYNACLRLGSVPECWKDSNTVLVHKKGDRGDLSNWRPLALGDTTPKLFAAVLADRLLGWCTANKRLSDAQKGFLQCEGCYEHNFVLQEALNDARRGGREVVVAWLDLTNAFGSVPHATIRRALADAGVPAPITNIIKNLYINCSTRVRTAEGFTRKININAGVKQGCPLSPAVFNLAIDPLLRAVGGEEDGYNLRGRRTAVLAYADDLVLLSDSAGKMQDMLNRVEAAAGGLGFSFNPSKCATLHQNCRGTRRALPTRLSLQGVELRALAAGESYEHFGVPTGFQVNQTPYHTIDGLSRDLRAIDESLLAPWQKAEAVASFLLPRLDFSLRGSHVEKRPLKTVDLAIRRLAKSWMNLPQRASAEVVYLPPSRGGVGLLPLSDWVDALTIAHAFRLLTSPDAVVRELAWTSLRESASRKIGRPATNWDLAEFLSGSLEGDFARVGGDISTLWTRARAAARRSGEKLDLQWKYSTTRRELVVTLRGSRGRLTTIGPDARAQIIRRLRAAIHEFYSLKLENKPDQGKVFQVSSRSGVSNHFVRGGNFTRFADWRFVHRARLDVLPLNGTRRWGNGDRRCRRCGEALESLPHVLCHCRPHAAAWQMRHDAVVERLAKASRLPGALSVNKRVEGVDGDLGGLRPDIVVRHEPSRTVTIVDVTIAFENQYIAFEEARGRKHVKYEPLAEQLRGHGYEVTVAVIVVGALGSWDPANEAVLKLLKVSPKYAKLMRRLIVSDTLRWSRDIYVEHVSGARQYKTNNAISTNTGAPSPPVSENGGVGE

SEQ ID NO: 15700 - protein, 1649 aa, Anoplius nigerrimus
MELIFDFPFPETFPCPECFMPGSASKHNGSYKTANDLLKHARKYHPGFTAQYRCGVCGFIGVGRYPIKSVKAHHADEHSNLNNSISIQARPGNNTRSCREGRVAGGLTGSASRGGSRTNNNNRNLNSYLSSATGTERRSSGSPTTNTTSPPATRTAERISTEPATGAPAAETARARPGGAARTAESPREGSPREEGSRTTRAGRARSVPVVVRPPGRAERGVAAATTRNLTGATRGPAAATRARRTPASAAAAASTTAAPTRRRTTRLGSQTAANVSYAAVTAGATVVSPAEGLDTAARRGLRSRRSSSLPPGEVGGNDRSPPTRDVRSPPSALTVIPEERGALASVPPGTPTMPVTMTTTTVTTTVSGGPIMSTGVPRGRATNITTNTFSGRLTLSPPEVVVDVAGLAGAATSWENQRPSSPPTPPLPRITTSDDDDDNNAREGAGEPWRTVEARRRRSQPATPTPPGHPSPPPPTPRPSTPPTTAAATIATPSPTPAAATPPPPPAAPTRHRLPPTAALTMRRRSNSSTSPTNSRRRPERAAREETPETCSTTGRGRRLSDFLSPRGGPRRCGTGVEEGVGASLPTGRAAPPGGVGGATSRPRGSRVPARRPPVPVDQPSLRGAERSPRGSVDPVEMREQLIGRAEAVANAADLEDVAVAAASFFGGSSEPAGGGESGGRRDRREQLTRRGGGTAARGLGGRAGHRPRQRRDVDRDRDSDTNNNRRDLDDRRITADRPRTEVSGDGRGPPVRRSRVEEATYIQRLFRSNRRRAVQRVLGGSPPRCTVPKERVAEYFERVHARSGTTGSWQPPPPPYGDPDEASSGALVRPFTASEVDLRLRRTSNSAPGPDGLTYRDLRRGDPDCRLLASIYNACLRLGSVPECWRDSNTVLVHKKGDRSDLANWRPLALGDTTPKLFAAVLADRLLGWCTANKRLSDAQKGFLQCEGCYEHNFVLQEALNDARRGGREVVVAWLDLTNAFGSVPHATIRRALADAGVPAPITSIIKNFYINCTTRVRTAEGYTRKININAGVKQGCPLSPAVFNLAIDPLLRAVGGGGDGYNLRGRRTAILAYADDLVLLSDSAGKMQCLLNKVEAAAGGLGLKFNPSKCAILHQQCRGPRRALPTRLTLQGVELRALAAGESYEHLGVPTGFQISQTPYQTIGGLQRDLRAIDESLLAPWQKAEAVATFLLPRLDFSLRGAHVAKGPLKTVDLSIRRAAKSWMHLPQRASAEVVYLPPSRGGCGLLPLTDWVDALTIAHAFRLLTSPDAVVRELAWTSLREAVSKKIGRPASNSDLADYLSGSLEGEFARDGGDIATLWSRARAATRRSKSKLALIWKYSIARKELVVTLRGSRGRETTVGPDARAQIIRRLRAAIHEFYSFQLARKPDQGKVFQVSSRSGVSNHFVRGGNFTRFADWRFIHRARLDVLPLNGARRWGNGDRRCRRCGEALESLPHVLCHCRPHAAAWQMRHDAVVERIARASRLPGTLSVNKRVEGVDGDLGGLRPDIVIRHEPSRTVTIVDVTIAFENQYPAFEEARGRKHVKYEPLAEQLRGHGYEVAVAAIVVGALGSWDPANEAVLRALKVSPRYAKLMRRLIVSETIRWSRDIYVEHVSGIRQYTTNLVNDTNSGAPAPPASENGNVGE

SEQ ID NO: 15701 - protein, 1655 aa, Anoplius nigerrimus
MELIFDFPFPETFPCPECFMPGSASKHNGSYKTANDLLKHARKYHPGFTAQYRCGVCGFIGVGRYPIKSVKTHHADEHSNLNNSNNNVQAGPGNTRNSRSYREGRVAGGLTGSASRGGLRANINNNLNSYLSATGTERRLSGSPTNTTTSPAVRTAERSTEPATGAPAAETARTRPGGAARAAQSPREGSPREEGSRTTRAGRARSVPVDVRPPGRAERRVAAATTRNLTGATRGPAAATRARRTPASAAAAATTSAAATTTAAPTSRRTTRLGSQTAANVTYAAVTAGATVVSPAEGLDTAARRGLRSRRSSSLPPGEVGGSDRSPPTRDVRSPPSALTAIPEERGALASVPPGTPTMPVTMTTTTVTTTVSGGPIMSTGVPRGRATEISIIPFSGRLTLSPPEVVVNVAGLAGAATSWEQLRPSSPPTPPLPRISASDDDDDNNAREGAGEPWRTVEARRRRSQPATPTPSGHPSPPPPTPRPSTPPTTAAATAVTPPPTTAAATPPPPPAAPTRHRLPPTAALTMRRRSNSSTSPTNSRRRPERAAREDTPETCSTTGRGRRLSDFLSPRGNPRRCGTGVGEGVGASLPTGRATPPGGIGGATSRPRGSRVAARRPPVPVDQPSLRGAGRSPRGSVDPVEMREQLIGRAGAVANAADLEDVAVAAASFFRESSEPAGGGESGGRRDRREQLTRRGGGTAARGARDRAGHRHRPRRDADVNTDSDVDNNRRNADIRRDMTARPLTDDVSGGGRGPPVRRSRVEEATYIQRLFRSNRRRAVQRVLGGSPPRCTVPKERVAEYFERVHARSGTTGSWQPPPPPYGDPDEASSGALVRPFAASEVDLRLRRTSNSAPGPDGLTYRDLRRGDPDCRLLASIYNACLRLGSVPECWKGSNTVLVHKKGDRGDLSNWRPLALGDTTPKLFAAVLADRLLGWCTTNKRLSDAQKGFLQCEGCYEHNFVLQEALNDARRGGREVVVAWLDLTNAFGSVPHATIRRALADAGVPAPITSIIKNFYINCTTRVRTAEGFTRKININAGVKQGCPLSPAVFNLAIDPLLRAVGGGGDGYNLRGRRTAILAYADDLVLLSDSASKMQCLLNKVEAAAGGLGLKFNPSKCAILHQQCRGPRRALPTRLTLQGVELRALAAGESYEHLGVPTGFQISQTPYQTIGGLQRDLRAIDDSLLAPWQKAEAVATFLLPRLDFSLRGAHVAKGPLKTVDLSIRRAAKSWMHLPQRASAEVVYLPPSRGGCGLLPLTDWVDALTIAHAFRLLTSPDAVVRELAWTSLRGAVSKKIGRPASNSDLADYLSGSLEGEFARDGGDIATLWSRARAATRRSKSKLALIWKYSIARKELVVTLRGSRERETTVGPDARAQIIRRLRAAIHEFYSIQLARKPDQGKVFQVSSRSGVSNHFVRGGNFTRFADWRFIHRARLDVLPLNGARRWGNGDRRCRRCGEALESLPHVLCHCRPHAAAWQMRHDAVVERIARASRLPGTLSVNKRVEGVDGDLGGLRPDIVIRHEPSRTVTIVDVTIAFENQYPAFEEARGRKHVKYEPLAEQLRGHGYEVAVAAIVVGALGSWDPANEAVLRALKVSPRYAKLMRRLIVSETIRWSRDIYVEHVSGVRQYTTNLVNDTNSGAPAPPASENGNVGE

SEQ ID NO: 15702 - protein, 1655 aa, Anoplius nigerrimus
MELIFDYPFPETFPCPECFMPGSASKHNGSYKTANDLLKHVRKYHPGFTAQYRCGVCGFIGTGRYPIKSVKTHHADEHENLNNSNSIQARPGNDTRSCREGRVAGGLTGSASRGGSRTNNTNRNLNVYFPSATDTGRRSSGSPTTTTTPASQTTAERSTEPATGAPAAETARVRPGGAARAAQSPREGSPREEGSRTTRAGRARSVPVDVRPPGRADRRVAAATTRNLTGTRGPAAATRARRTPASAAAAATTSAAATTTAAPTTRRTTRLGSQTAANVTYAAVTAGATVVSPAEGLDTAARRGLRSRRSSSLPPGEVGGSDRSPPTRDVRSPPSALTVIPEERGALASVPPGTPTMPVTMTTTTVTTSVSGGPIMSTGVPRGRATNITTNTFSGRLTLSPPEVVVNVAGLAGAATTWEQQRPSSPPTPPLPRITASDDDDDNIAREGAGEPWLTVEARRRRSQPATPTPSGHPSPPPPTPRPSTTPTTAAATAATPSPTSAAATPPPPPAAPTRHRLPPTAALTMRRRSNSSTSPTNSRRRPERAAREETPETCSTTGRGRRLSDFMSPRGGPRRCGTGVEEGVGASLPTGRAAPPGGIGGATSRPRGSRVPARRPPVPVDQPSLRGAERSPRGSVDPVEMREQLIGRAGAVANAADLEDVAVAAASFFRESSEPASGGESGGRRDRRGQPTRRGGGTAARGLGGRAGHRPRQRRDADRDRDSDSNNNRRDADNRRNTADRPQTEVSGDGRGPPVRRSRVEEATYIQRLFRSNRRRAVQRVLGGSPPRCTVPKERVAEYFERVHARSGTTGSWQPPPPPYGDPDEASSGALVRPFTASEVDLRLRRTSNSAPGPDGLTYRDLRRGDPDCRLLASIYNACLRLGSVPECWKDSNTVLVHKKGDRNDLANWRPLALGDTTPKLFAAVLAGRLLGWCTTNKRLSSAQKGFLQCEGCYEHNFVLQEALNDARRGGREVVVAWLDLTNAFGSVPHATIRRALADAGVPAPITSIIKSLYINSATRVRTAEGYTRKININAGVRQGCPLSPAVFNLAIDPLLRVVGGGEDGYNLRGRRTAILAYADDLVLLSDSAGKMQEMLNKVEAAAGGLGLTFNPAKCAILHQMCRGPRRALPTRLTLQGVELRALAAGESYEHLGVPTGFQNSQTPYHTIGGLQRDLRAVDESLLAPWQKAEAVAAFVLPRLDFLLRGAHVEKGPLKVIDLSIRRAAKSWMHLPQRASAEVVYLPPSRGGVGLLPLSDWVDALTIAHAFRLLTSPDAVVRELAWTSLREAASKKIGRPASNLDLADYLSGSLEGEFARDGGDIATLWSRARAATRRSKARLALVWKYSILREELVVTLRGSRGRETTVGPDARAQIIRRLRAAIHESYILQLANKPDQGKVFQVSSRSSVSNHFVRGGNFTRFADWRFVHRARLDVLPLNGARRWGNGDRRCRRCGEALESLPHVLCHCRPHAAAWQMRHDAVVERIARASRLPGALSVNKRVEGVDGDLGGLRPDIVIRHEPSRTVTIVDVTVAFENKYIAFEEARGRKHVKYEPLAEQLRGHGYEVAVAAIVVGALGSWDPANEAVLKMLKISPRYAKLMRRLVVSETIRWSRDIYVEHVSGIRQYKTNATPVSEETNATATAPPDSETRDVGE

SEQ ID NO: 15703 - protein, 1651 aa, Anoplius nigerrimus
MELIFNFPFPETFPCPECYTPGRASKNNGSYKNANDLIKHARIHHPGYSVQYRCGVCGFIGVGRYPIKAVKTHHAEEHSILNTLNNSAQAGPGNRRSCREGRVADGLTGSVSRGGPRETNSNSNVRFHDTINGAERRSSGSPTNTNITPATQTTAERSTEPATGAPAAETARVRPGGAARAAQSPREGSPREEGSRTTRAGRARSVPVEVRPPGRAERRVAAATTRNLTGTTRGPAAATRARRTPASAAAAATTSAAATTTAAPTSRRTTRLGSQTAANVTYAAVTAGATVVSPAEGLDTAARRGLRSRRSSSLPPGEVGGNDRSPPPRDVRSPPSALTVIPEERGALASVPPGTPTMPVTMTTTTVTTTVSGGPIMSTGVPRGRATETTNSLFSGRLTLSPPEVVVNVAGLAGAATSWEHRYSSSPPTPPLPLITGEDDDDDNVREGAGEPWRTVPARRRRSLPATPTTSGHSSPPAPSPRPTTPPTTAAATPPPPPAAPTRNRLPPTAAFSMRRSLNSSTSPTNSRGRPERAAREETPDTCSATGRGRRLSDFLSPRGNPRRCGTGVGEGVGASLPTGRATPPGGIGGATSRPRGSRVAARRPPVPVDQPSLRGAERSPRGSVDPVEMREQLIGRAEAVANAADLEDVAVAAASFFRESSEPAGGGESGGRRDRREQLTRRGGGTAARGPRDRAGHRHRLRRDADVNTDSDVDNNRRNADIRRDTTARPLTDDVSGGGRGPPVRRSRVEEATYIQRLFRSNRRRAVRRVLGGSPPRCTVPRERVAEYFERVHARSGTTGSWQPPPPPYGDPDEASSGALVRPFTASEVGLRLRRTSNSAPGPDGLSYRDLRRGDPDCRLLASIYNACLRLGSVPECWKDSNTVLVHKKGDRNDLANWRPLALGDTTPKLFAAVLADRLLGWCTTNKRLSSAQKGFLRCEGCYEHNFVLQEALNDARRGGREVVVAWLDLTNAFGSVPHATIRRALADAGVPAPITNIIKNLYINCSTRVRTAEGFTRKININAGVKQGCPLSPAVFNLAIDPLLRAVGGEEDGYNLRGRRTAVLAYADDLVLLSDSAGKMQDMLNRVEAAAGGLGFSFNPSKCATLHQNCRGTRRALPTRLSLQGVELRALAAGESYEHLGVPTGFQVNQTPYHTIDGLSRDLRAIDESLLAPWQKAEAVASFLLPRLDFSLRGSHVEKRPLKTVDLAIRRMAKSWLNLPQRASAEVVYLPPSRGGMGLLPLSDWVDALTIAHAFRLLTSPDAVVRELAWTSLRESAAKKIGRPASNRDLAEYLSGSLEGDFARVGGDISTLWTRTRTATRGSKARLGLVWTYSIAREEMVVTLRGSRGRKTTVGPDARVQIIRRLRAAVHEYYAEQLANKPDQGKVFQVSSRSSVSNHFVRGGNFTRFADWRFVHRARLDVLPLNGTRRWENGDRRCRRCGEALESLPHVLCHCRPHAAAWQLRHDSVVERIGKASRLPGTLSINKRVEGVEGDLVELRPDIVVRHEPTRSVAIVDVTIAFENQYLAFEEARARKHAKYEPLANALRGRGYDVTVAAIVVGALGSWDPANEAVLKALKISPRYAKLMRRLIVSETIRWSRDIYVEHVSGLRQYATNTGNAINSIVPPPSASENGDVGEQVPPLAERTN

SEQ ID NO: 15704 - protein, 1015 aa, Anoplius nigerrimus
MREQLIGRAGAVANAADLEDVAVAAASFFRGSMEPAGGGESGGRRDRREQLTRRGGGTAARGARDRAGHRHRLRRDADVNTDSDVDNNRRNADIRRDTTARPLTDDVSGDGRGPPVRRSRVEEATYIQRLFRSNRRRAVQRVLGGSPPRCTVPKERVAEYFERVHARSETTGSWQPPPPPYGDPDEASSGALVRPFTASEVDLRLRRTSNSAPGPDGLTYRDLRRGDPDCRLLASIYNACLRLGSVPECWKGSNTVLVHKKGDRSDLANWRPLALGDTTPKLFAAVLADRLLGWCTTNKRLSNAQKGFLQCEGCYEHNFVLQEALNDARRGGREVVVAWLDLTNAFGSVPHATIRRALADAGVPAPITNIINNLYINCTTRVRTAEGFTRKISINAGVKQGCPLSPAVFNLAIDPLLRVVGGEGDGYNLKGRRTAILAYADDLVLLSDSAGKMQNLLNKVEAAAGGLGLTFNPAKCAILHQQCRGQRRALPTRLTLQGVELRALAAGESYEHLGVPTGFQVNQTPYHTIGGLQRDLRAVDESLLAPWQKAEAVAAFVLPRLDFLLRGAHVEKGPLKVIDLSIRWAAKSWMHLPQRASAEVVYLPPNRGGVGLLPLSDWVDALTIAHAFRLLTSPDAVVRELAWTSLREAASKKIGRPASNSDLADYLSGSLEGEFARDGGDISSLWSRARIATRRSKTRLALVWKYSIHRDELVVTLRGSRGRSVTVGPDARAQIIRRLRAAIQESYAEQLARKPDQGKVFQVSSRAGVSNHFVRGGNFTRFADWRFVHRARLDVLPLNGTRRWGNGDRRCRRCGEALESLPHVLCHCRPHAAAWQMRHDAVVERIAGASRLPGALSVNKRVEGVDGDLGGLRPDIVIRHEPSRTVTIVDVTVAFENQNIAFEEARGRKHVKYEPLAEQLRGHGYGVTVAAIVVGALGSWDPANEAVLKALKVSPRYAKLMRRLIVSETIRWSRDIYVEHVSGIRQYKTNATAGTENSNPAASPPPASVNGGVGE

SEQ ID NO: 15705 - protein, 1650 aa, Anoplius nigerrimus
MELIFDFPFPETFPCPECFMPGSASKHNGSYKTANDLLKHARKYHPGFTAQYRCGVCGFIGVGRYPIKSVKTHHADEHENLNNSNSIQARPGNNTRSCREGRVAGGLTGPASRGGRRNTNINSNGALHVPAAERRSSGSPTTTTTSPATRTAERSTEPATGAPAAETARARPGGAARTAESPREGSPREEGSRTTRAGRARSVPVDVRPPGRAERRVAAATTRNLTGTRGPAAATRARRTPASAAAAASTTAAATTTAAPATRRTTRLGSQTAANISYAAVTAGATVVSPAEGLDTAARRGLRSRRSSSLPPGEVGGSDRSPPTRDVRSPPSALTIILEERGALASVPPSTPTMPVTMTTTTVTTTISGGPIMSTGLPRGRATNIITPTFSGRRTLSPPEVVVNVAGLAGAATSWEHQRTSSPPTPPLPRITTSDDDDDNNAREGAGEPWRTVPARRRRSLPATPTTPGHSSPPAPSPRPSTPSTFAAAATPSPTSAAATPPPPPAAPVRHRLPPTAAFSMRRSLNSSTSPTNSRGRPERAARDDTPETCSTTGRGRRLSDFLSPRGNPRRCGTGVGEGVGASLPTGRAAPPGGIGGATSRPRGSRVAARRPPVPVDQPSLRGAERSPRGSVDPVEMREQLIGRAEAVANAADLEDVAVAAASFFRESSEPAGGGESGGRRDRRGQPTRRGGGTAARGLGGRAGHRPRQRRDADRDRDRDSNNNRRDADNRRNTADRPQTEVSGDGRGPPVRRSRVEEATYIQRLFRSNRRRAVQRVLGGSPPRCTVPKERVAEYFERVHARSGTTGSWQPPPPPYGDPDEAGSGALVRPFTASEVDLRLRRTSNSAPGPDGLTYRDLRRGDPDCRLLASIYNACLRLGSVPECWKDSNTVLVHKKGDRGDLANWRPLALGDTTPKLFAAVLADRLLGWCTTNKRLSSAQKGFLQCEGCYEHNFVLQEALNDARRGGREVVVAWLDLTNAFGSVPHATIRRALADAGVPAPITNIIKNLYINCTTRVRTAEGFTRKIKIEAGVKQGCPLSPVVFNLAIDPLLRVVGGGEDGYNLRGRRTAILAYADDLVLLSDSAGNMQSLLNKVEAAAGGLGFTFNPAKCATLHQHCRGPRRALPTRLSLQGVELRALAAGESYEHLGVPTGFQIDQTPYKTIDGLHRDLRAIDNSLLAPWQKAEAVATFLLPRLDFSLRGSHVEKRSLKTVDLAIRRLAKSWLHLPQRASAEVVYLPPSRGGVGLLPLSDWVDALTIAHAFRLLTSPDAVVRELAWTSLRESASRKIGRPATNWDLAEFLSGSLEGDFARVGGDISTLWTRARAAARRSGRKLDLKWKYSTARRELVVTLRGSRGRLTTIGPDARAQIIRRLRAAIHEFYSLQLENKPDQGKVFQVSSRSSVSNHFVRGGNFTRFADWRFVHRARLDVLPLNGTRRWGNGDRRCRRCGEALESLPHVLCHCRPHAAAWQLRHDAVVERLAKASRLPGVLSVNRRVEGVDGDLGGLRPDIVVRHESSRTVTIVDVTVAFENEYIAFEEARGRKHVKYEPLADQLRGHGYEVTVAAIVVGALGSWDPANEAVLKTLKISPKYAKLMRRLIVSETIRWSRDIYVEHVSGVRQYKTNATPGIDSPNIAAPTPSDSETRDVGE

SEQ ID NO: 15706 - protein, 1666 aa, Anoplius nigerrimus
MELIFDFPFPETFPCPECFMPGSASKHNGSYKTANDLLKHARKYHPGFTAQYRCGVCGFIGVGRYPIKSVKTHHADEHSNLNNSNNSIQAGPGNTRSTRSCREGRVAGGLTGSASRGGSRSNNISNLNSYISSAAGTQRRSSGSPTTTTTSPATRTTAEQTSTEPATGAPAAETARARPGGAARAAQSPREGSPREEGSRTTRAGRARSVPVDVRPPGRAERRVAAATTRNLTGATRGPAAATRARRTPASAAAAATTSAAATTTAAPTSRRTTRLGSQTAANVTYAAVTAGATVVSPAEGLDTAARRGLRSRRSSSLPPGEVGGNDRSPPPRDVRSPPSALTVIPEERGALASVPPGTPTMPVTMTTTTVTTSVSGGPIMSTGLPRGRATNITTPTFSGRLTLSPPEVVVNVAGLAGAATSWEHQRMSSPPTPPLPRITTSDDDDDINAREGAGEPWRTVPARRRRSLPATPTTPGHSSPPAPSPRPSTPSTFAAAATPSPTSAAATPPPPPAAPVRHRLPPTAAFSMRRSLNSSTSPTNSRGRPERAAREETPETCSTTGRGRRLSDFLSPRGNPRRCGTGVGEGVGASLPTGRATPPGGIGGATSRNRGPRVAARRPPVPVDQPSLRGAERSPRGSVDPVGMREQLIGRAEAVANAADLEDVAVAAASFFRESSEPAGGGESGGRRDRREQLTRRGGGTAARGPRDRAGHRHRLRRDADVNTDSDVDNNRRNADIRRDMTARPLTDDVSGDGRGPPVRRSRVEEATHIQRLFRSNRRRAVQRVLGGSPPRCTVPKERVAEYFERVHARSGTTGSWQPPPPPYGDPDEASSGALVRPFTASEVDLRLRRTSNSAPGPDGLTYRDLRRGDPDCRLLASIYNACLRLGSVPECWKDSNTVLVHKKGDRNDLANWRPLALGDTTPKLFAAVLADRLLGWCTTNKRLSSAQKGFLQCEGCYEHNFVLQEALNDARRGGREVVVAWLDLTNAFGSVPHATIRRALADAGVPAPITSIIKNFYINCTTRVRTAEGLTRKININAGVKQGCPLSPAVFNLAIDPLLRVVGGEGEGYNLKGRRTAILAYADDLVLLSDSAGNMQRLLNKVEAAAGGLGLKFNPSKCAILHQQCRGPRRALPTRLTLQGVELRALAAGESYEHLGVPTGFQNSQTPYHTIDGLQRDLRAVDESLLAPWQKAGAVAAFVLPRLDFLLRGARVEKGPLKVIDLSIRRAAKSWMHLPQRASAEVVYLPPSRGGVGLLPLSDWADALTIAHAFRLLTSPDAVVRELAWTSLREAASKKIGRPASNSDLADYLSGSLEGEFARDGGDISSLWSRARGATRRSKARLALVWKYSTIRDELVVTLRGSRGRETTVGPDARAQIIRRLRAAIHEFYSLQLSRKPDQGKVFQVSSRTSVSNHFVRGGNFTRFADWRFLHRARLDVLPLNGARRWGNSDRRCRRCGEALESLPHVLCHCRPHAAAWQLRHDAVVERIAKASRLPGALSVNKRVEGVDGDLGGLRPDIVVRHEPSRTVAIVDVTIAFENTYTAFEEARGRKHVKYEPLADQLRGHGYEVTVAAIVVGALGSWDPANEAVLRSLKVSPRYAKLMRRLIVSETIRWSRDIYVEHVSGIRQYSTNLNNDTNSFVPAPSASENGGVGERVPPLAERTS

SEQ ID NO: 15707 - protein, 1660 aa, Anoplius nigerrimus
MELIFDYPFPETFPCPECFMPGSASKHNGSYKTANDLLKHARKYHPGFTAQYRCGVCGFIGVGRYPIKSVKTHHADEHSNLNNSNNSIQAGPGNTRSTRSCREGRVAGGLTGPASRGGPRGTNNNSNLNSYFTSATGTERRSSGSPTTTTTSPATRTTAEQTTEPATGAPAAETARARPGGAARAAQSPREGSPREEGSRTTRAGRARSVPVDVRPPGRAERRVAAATTRNLTASRGPAAATRARRTPASAAAAATTSVAATTTAAPTMTRRTTRLGSQTAANVTYAAVTAGATVVSPAEGLDTAARRGLRSRRSSSLPPGEVGGSDRSPPTRDVRSPPSALTVIPEERGALASVPPGTPTMPVTMTTTTVTTSTSGGPIMSTGVPRGRAAILTSFAFSDRRTLSPPEVVVNVAGLAGAATPWEHQRTSSPPTPPLPIINGDDDDDDNAREGAGEPWRTVPARRRRSTPATPTTPGHPSPPAPSPRPSTTPTSAAATATPPPPTIAAATPPPPPAAPTRHRLPPTAALTMRRSLNSSTSPTNSRGRPERAAREETPETCSTTGRGRRLSDFLSPRGGPRRCGTGVGEGVGASLPTGRAAPPGGIGGATSRPRGSRVPARRPPVPVDQPSLRGAERSPRGSVDPVEMREQLIGRAGAVANAADLEDVAVAAASFFRGSMEPAGGGESGGRRDRREQLTRRGGGTAARGARDRAGHRHRLRRDADVNTDSDVDNNRRNADIRRDMTARPLTDDVSGDGRGPPVRRSRVEEATYIQRLFRSNRRRAVQRVLGGSPPRCTVPKERVAEYFERVHARSETTGSWQPPPPPYGDPDEASSGALVRPFTASEVDLRLRRTSNSAPGPDGLTYRDLRRGDPDCRLLASIYNACLRLGSVPECWKGSNTVLVHKKGDRSDLANWRPLALGDTTPKLFAAVLADRLLGWCTTNKRLSNAQKGFLQCEGCYEHNFVLQEALNDARRGGREVVVAWLDLTNAFGSVPHATIRRALADAGVPAPITNIINNLYINCTTRVRTAEGFTRKISINAGVKQGCPLSPAVFNLAIDPLLRVVGGEGDGYNLKGRRTAILAYADDLVLLSDSAGKMQNLLNKVEAAAGGLGLTFNPAKCAILHQQCRGPRRALPTRLTLQGVELRALAAGESYEHLGVPTGFQVNQTPYHTIGGLQRDLRAVDESLLAPWQKAEAVAAFVLPRLDFLLGGAHVEKGPLKVIDLSIRRAAKSWMHLPQRASAEVVYLPPNRGGVGLLPLSDWVDALTIAHAFRLLTSPDAVVRELAWTSLREAASKKIGRPASNSDLADYLSGSLEGEFARDGGDISSLWSRARIATRRSKTRLALVWKYSIHRDELVVTLRGSRGRSVTVGPDARAQIIRRLRAAIQESYAEQLARKPDQGKVFQVSSRASVSNHFVRGGNFTRFADWRFVHRARLDVLPLNGTRRWGNGDRRCRRCGEALESLPHVLCHCRPHAAAWQMRHDAVVERIARASRLPGALSVNKRVEGVDGDLGGLRPDIVIRHEPSRTVTIVDVTVAFENQNIAFEEARGRKHVKYEPLAEQLRGHGYGVTVAAIVVGALGSWDPANEAVLKALKVSPRYAKLMRRLIVSETIRWSRDIYVEHVSGIRQYKTNATAGTENSNPAASPPPASVNGGVGE

SEQ ID NO: 15708 - protein, 1653 aa, Anoplius nigerrimus
MELIFDYPFPETFPCPECFMPGSASKHNGSYKTANDLLKHARKYHPGFTAQYRCGVCGFIGVGRYPIKSVKTHHADEHENINNSNNSVQAGPGNARNTRSCREGRVAGGLTGSASRGGTRPNNNSNLNSYFPSAAGTQRRSNGSPTTTTTSPATQTTAEQTTEPATGAPAAETARVRPGGAARAAQSPREGSPRDEGSRTTRAGRARSVPVEVRPPGRAERRVAAATTRNLTGTRGPAAATRARRTPASAAAAATTTAAATTTAAPTSRRTTRLGSQTAANVTYAAVTAGATVVSPTEGLDTAARRGLRSRRSSSLPPGEVGGNDRSPPPRDVRSPPSALTVIPEERGALASVPPGTPTMPVTMTTTTVTTTVSGGPIMSTGVPRGRATDSTNSLFSGRLTLSPPEVVVNVAGLAGAATSWEHQRMSSPPTPPLPRITTSDDDDDINAREGAGEPWRTVPARRRRSLPATPTTPGHSSPPAPSPRPSTPSTFAAAATPSPTSAAATPPPPPAAPVRHRLPPTAAFSMRRSLNSSTSPTNSRGRPERAAREETPETCSATGRGRRLSDFLSPRGCPRRCGTGVGEGVGASLPTGRATPPGGIGGATSRPRGSRVAARRPPVPVDQPSLRGAERSPRGSVDPVEMREQLIGRAEAVANAADLEDVAVAAASFFRESSEPAGGGESGGRRDRRGQPTRRGGGTAARGLGGRAGHRPRQRRDADRDRDIDTNNNRRDLNDRRNTADRPRTEVSGDGRGPPVRRSRVEEATYIQRLFRSNRRRAVQRVLGGSPPRCTVPKEGVAEYFERVHARSGTTGSWQPPPPPYGDPDEVSSGALVRPFTASEVDLRLRRTSNSAPGPDGLTYRDLRRGDPDCRLLASIYNACLRLGSVPECWKDSNTVLVHKKGDRGDLSNWRPLALGDTTPKLFAAVLADRLLGWCTANKRLSDAQKGFLQCEGCYEHNFVLQEALNDARRGGREVVVAWLDLTNAFGSVPHATIRRALADAGVPAPITSIIKNFYINCSTRVRTAEGYTRKININAGVKQGCPLSPAVFNLAIDPLLRAVGGGEDGYNLRGRRTAVLAYADDLVLLSDSAGKMQDMLNRVEAAAGGLGFSFNPSKCATLHQNCRGTRRALPTRLSLQGVELRALAAGESYEHLGVPTGFQINQTPFHTIDGLRRDLRAIDESLLAPWQKAEAVASFLLPRLDFSLRGSHVEKRPLKTVDLAIRRMAKSWMNLPQRASAEVVYLPPSRGGMGLLPLSDWVDALTIAHAFRLLTSPDAVVRGLAWTSLRESAAKKIGRPASNRDLAEYLSGSLEGDFARVGGDISTLWTRTRTATRRSKARLDLVWTYSSSREEMVVTLRGSRGRKTTVGPDARVQIIRRLRAAVHESYAEQLANKPDQGKVFQVSSRSGVSNHFVRGGNFTRFADWRFVHRARLDVLPLNGTRRWESGDRRCRRCGEALESLPHVLCHCRPHAAAWQLRHDSVVERIGKASRLPGSLSINKRVEGVEGDLVELRPDIVVRHEPTRSVAIVDVTIAFENQYLAFEEARARKHAKYEPLANALRGRGYDVAVAAIVVGALGSWDPANEAVLKMLKISPKYAKLMRRLIVSETIRWSRDIYVEHVSGVRQYTLSTNNEPNSSVPAPSASENGGMGE

SEQ ID NO: 15709 - protein, 1119 aa, Rotaria sp.
MIAVVDEESETDEAVDRVLQHQTSKNIKKHRHSSSVVPKNKSKMQKSDSEYDIESDDDEDKSGTQNSTVVGMKETGLTNKKKTLDEKDNKYYCNLCAAGGWDKSVSLSQHMRHMHKVEYNASIEVPMTKRRWTKDEVLILAEFEAKIPPGGGKSINQILVEKFSTRTLESIKSRRKMKEYRNLVQQLRDCHASQTIEGLECTEGSSDVNNLTVVNDSIIVEEDNETNPDDRDITVLGTDGTTYPNIQQYIKEKIIEGRVRMCTTMVEALSHYVNDDVRTDPVEESLNGIREALESIHSSKTHIDEKVNAGSKLRSIKTKQKVHKFSHYQRLFKKDKSKLASEIFDGVDDSAVKPPMSVAHEYFRKIWEADTKDTGTLEYKASVGADVLLGPITREEIAWAIDQTKNQTAVGPDHVSLSDVRSIAKNELWCAYNIWIGLRKIPESLKLNRTVLLPKGKDGLENIKNWRPITIASIILRIYNKILARRMQSVFRTSSKQTGFKPVNGVGQNVAILHNLLRHARTHKNNLFVCLLDVSKAFDSVPHTSIIRALARNGCPSEFIDIIKNEYENSYTALSCADGNSPLVYIKRGVKQGDPMSSILFNLVIDELFGIIGDRFGYELEGVGRVNARAFADDIALISGSEIGMQELLSTTEEFLSARGLELNVDKCIAIGLRKAGKVKKSQIVDSSVKNPPSFTVKNKPIRLLGIKEQCRYLGVRFTPFGAVDPREPVAELKSALASLKKAPLKPQQKVLMLRMYLIPRFIFSFINTECYPKLIGQQDRLIRRWLKEILRLPQSVCTEFFYQPIKDGGLGVGKLYDTIGIAKVRLHGSFTRAGDECLRFLVETQGSSMHARWCHAMKLSTRPSAVDINARSVLTIDESRVRLSETVHGSGSEIFRNSPITNQWLSGHTRIMKGSTFIRAIQMRTNTTPTLVSTTRGRDVNKTCRRCGLADETLIHILQTCPITQGMRCRRHNNVCRKVSDKLRSKGFQVFQEQGIPSPQLQTNISRPDLIATRGEQALVLDVTCVFESNNNSFQDAYRRKVDRYKCLAETIKVKYKVNDVTFHGLCIGSRGAYDPRHLSIWHSIGFSGAELAILAIGVIEDSLRTITLFNNANRLHI

SEQ ID NO: 15710 - protein, 1244 aa, Rotaria macrura
MGNRDNSAETSNQQSQEKSYCLYYPLDANSTCPDCKNLLGVKLASIEQHLRSHNVQNLEYRCGVCKKLWPSWRSVIAHYSKSSCHEQTSTTTDSSTKANINSQISSKNVIDPKEKRVAQKESTMKAVIDEESETDEAVDSVLQKHQQTDEGVQEHRHSSSVIPKNTIIESDSERVIKMDDEKGMTSTTNTTTRKTVVGMKETELNNNKTLEGKNKYYCNYCASDGWEKSVGLSQHIRHMHKSEYNASIEVPMTKRRWTQDEVLLLAEFEAKIPSSDGIFINQILVKKFPTRTLESIKSRRKMEEYRRLVQQLRDCHASQTIEELECTDESSIVNSHTIVNDRIIVEDNNETNSDDRNNRVQGTDGTTYPNIRQYIKEKIIDGRVRMCTTMGEALSHYVNDVLNTDPVEESLKGIREALESVHSSKTHKDEKLSAGSKFRGIKTKQKVHKYAHYQRLFKKDKSKLASEIFDGVDDSAVKPPTSVAYEHFRKIWETDTKDTGTLEYKASVGADVLLGPITREEIAWAIDQTKNGTAVGPDHVSLSDVQSIARSELWCAYNIWIGSRRIPDELKINRTVLLPKGKDNLENIKNWRPITIASIMIRVYNKILARRMQSVFRTSSKQTGFKPVNGVGQNVAILHNLLRHARAHKNNLFVCLLDVSKAFDSVPHNSIIRALVRNGSPSEFIDIIKNEYENSYTSISCADGNSPLVYIKRGVKQGDPLSSILFNLVTDELFEKIGDRFGYELEGVGRVNARAFADDIALFSGSEIGMQELLSTTEEFLSARGLELNVDKCIGIGLRKAGKVKKSQIADSSVKNPPKFTVKDKPIRLLGINEKCRYLGIQFTPFGAVDSREPVSEIKSALESLRKAPLKPQQKLLMLRAYLIPRFIFSFINTECYPKQIGQIDGLIKRWIKQTLRLPQSVCSEFFYQSIKDGGLGVGKLYDTIGIAKIRLHGSFLRAGDECLRFLVETQGSSMHARWCHAMKLSNRPSAADINARTALAIDESRVRLSETVHGSGSEIFRKSPITNQWLSGQTRIMKGNTFIRALQMRTNTTPTLVSTTRGRDVNKTCRRCGLADETLIHILQMCPITQGMRCHRHNNVCRKVSDKLRSKGFQVFQEQGIPSPQLQTNISRPDLIATRGEQALVLDVTCVFESNNNSFQDAYRRKVERYKSLAETIKEKYEVKDVTFHGLCIGSRGAYDPRHLAIWHSIGFSGAELAVLAIGVIEDSLRTITLFNNANKLHI

SEQ ID NO: 15711 - protein, 1077 aa, Rotaria magnacalcarata
MEKSDDDDNTAEDLCTQDITTGVGMKETGSTNKTLDKRKDNKYYCNLCASGSWDKSVSLSQHMRHMHKSEYNASIEVPLTKRRWTKDEILILAEFEAKIPSSDGIFINQILAKKFPTRTLESIKSRRKTREYRELLQQLRDCRASQNIEGLECTDESSDVHSDIVENDDVINNNNNDEDYDNNNPNDIITTTVRGTDGTTYPNVQQYIKDKIIDGRVQMCTTMADALSHYVDDVLYSDPVEESLNGIREALESVHSSKKHKDEKLNAGSKLRSDKSKRKVHKFAHYQRLFKKDKSKLASEIFDGVDNSALKPPMSVAYEHFRKIWETDTKDTGTLDEIASVGTDVLLGPISREEIALAIDQTKNDTAVGPDHVSLNDVKRIARSELWSAYNIWIGSRRVPEKLKVNRTVLLPKGKDGLDNIKNWRPITIASILIRLYNKILTRRMQSVFRTSSKQTGFKPVNGVGQNVAILHNLLRHARTNKSNLFVCLLDVSKAFDSVPHESIIRALVRNGCPSEFIEIIKNEYKNSYTALSCADGDSPLVYIKRGVKQGDPMSSVLFNLVIDELFEIIGDRFGYELPGVGRVNARAFADDIALFSGSEIGMQELLSVTEEFLRARGLELNADKCVAICLRKAGKVKKSQIADSSVKNPPSFTVQNKPIRLLGINEQCRYLGVLFTPFGAVDPRATVTELRSALESLKKAPLKPQQKLLMLRSYLIPRFIFSFINTECYPKLIGQQDRLIRRWLKEILRLPKSVCSEFFYLPIKDGGLGVGKLYDIIGIAKVRLHASCTRPSDECLRFLMETQGSSMHARWCHAMKLSNRPSAIDINTRKVLSIDESRSRLLETVHGSGSEIFRKSPITNQWLSGQTRIMKGNTFIKALHMRTNTTPTLVSTSRGREVDKKCRRCGLVDETLIHILQTCPITQGMRCHRHNNVCRKVSEKLRVKGFQVFQEQGVPSPHLQTNISRPDIIAIRGDQALVLDVTCVFESHDNSFQDAYRRKVDRYKTLDETIKQLYKVDNVVFHGLCIGSRGAYDPRHLSIWHSIGFSGAELAILAVGVIEDSLRTITFFNNANRLRI

SEQ ID NO: 15712 - protein, 1198 aa, Rotaria sordida
MANIEQHLRSHNVQNLEYKCGVCKKLWPSWRSVITHYSKSSCHKQTSTTPSSSTSANNNTQISSNNVIDPKRKRVTKIKESTMIAVIDEESETDEIVDSVLQHRTSKNVRKHRYSSSVIPKSKLRESDSECDIESGDDEDKRCTQNTTTMVVGMKETGLDNNKTLDKEKYYCNLCAAGGWDKSVSLSQHMRHMHKAEYNASIEVPMIKRRWTKDEVLILAEFEAKIPSTDGIFINQVLVKKFTTRTLESIKGRRKMKEYRKLVQQLRDCRASQAIEGLECTDESSVVNSPTVVNDSIIVDEDNETNPDDRDFTVQGTDGTTYPNVQQYIKEKIIDGRVRMCTTMAEALSHYVNDVFNTDPVEESLNGIREALENVHSSKTHKDEKLNAGSKLRSIKTKQEVHKYARYQRLFKKDKSKLASEIFDGVDNSAVKPPMSVAYEHFRKIWETDTKDTGMLEYKASVGTDVLLGPITREEIALAIDQTKNESAVGPDHVSLDDVRSIARSELWCAYNIWIGLRKIPESLKINRTVLLPKGKDGLENIKNWRPITIASIMIRIYNKILARRMQSVFRTSSKQTGFKPVNGVGQNVAILHNLLRHARTHKNNLSVCLLDVSKAFDSVPHTSIIRALARNGCPSEFIDIIKNEYENSYTALSCADGNSPLVYIKRGVKQGDPLSSILFNLVIDELFEIIGDRFGYELEGVGKVNARAFADDIALFSGSEIGMQELLSATEKFLHARGLELNVDKCIAIGLRKAGKVKKSQIVDSSVKNPPSFTVKNKPIRLLGIEEQCRYLGVRFTPFGAVDPRESVAELKSALESLRKAPLKPQQKVLMLRAYLIPRFIFTFINTECYPKLIGQQERLIRRWLKVILRLPQSVCSEFFYQPIKDGGLGVVKLYDTIGIAKVRLHGSFIRAGDECLRFLVETQGSSMHARWCHAMKLSNRPSAVDINTRKVLAIDESRVRLSETVHGSGSEIFRNSPITNQWLSGQTRIMKGNTYIKAIHMRTNTTPTLVSTTRGRDVSKTCRRCGLADETLIHILQTCPITQGMRCRRHNNVCRKVSEKLRSKGFQVFQEQGIPSPHLQTNISRPDIIATRGDQALVLDVTCIFESHNNSFQDAYRRKVDRYKCLAETIKEKYKVNDVTFHGLCIGSRGAYDPRHLSIWHSIGFSGAELAVLAIGVIEDSLRTITLFNNANRLHI

SEQ ID NO: 15713 - protein, 1107 aa, Rotaria sordida
MTAIIVDRVLQHQTSKNVKKHRYSSSVIPKSKLRKSDSEYDIESDDDEDKRCTQNTTTMVVGMKETGLDNNKTLDKDKYYCNLCAAGGWDKSVSLSQHMRHMHKAEYNASIEVPMIKRRWTKDEVLILAEFEAKIPSTDGIFINQVLVKKFTTRTLESIKGRRKMKEYRELVQQLRDCRASQAIEGLECTDESSVVNSPTVVNDSIIVDEDNETNPDDRDITVQGTDGTTYPNVQQYIKEKIIDGRVRMCTTMAEALSHYVNDVFNTDPVEESLNGIREALENVHSSKTHKDEKLNAGSKLRSIKTKQEVHKYARYQRLFKKDKSKLASEIFDGVDNSAVKPPMSVAYEHFRKIWETDTKDTGMLEYKASVGTDVLLGPITREEIALAIDQTKNESAVGPDHVSLDDVRSIARSELWCAYNIWIGLRKIPESLKINRTVLLPKGKDGLENIKNWRPITIASIMIRIYNKILARRMQSVFRTSSKQTGFKPVNGVGQNVAILHNLLRHARTHKNNLSVCLLDVSKAFDSVPHTSIIRALARNGCPSEFIDIIKNEYENSYTALSCADGNSPLVYIKRGVKQGDPLSSILFNLVIDELFEIIGDRFGYELEGVGKVNARAFADDIALFSGSEIGMQELLSATEKFLHARGLELNVDKCIAIGLRKAGKVKKSQIVDSSVKNPPSFTVKNTPIRLLGIEEQCRYLGVRFTPFGAVDPRESVAELKSALESLRKAPLKPQQKVLMLRAYLIPRFIFTFINTECYPKLIGQQERLIRRWLKVILRLPQSVCSEFFYQPIKDGGLGVTRLYDTIGIAKVRLHGSFIRAGDECLRFLVETQGSSMHARWCHAMKLSNRPSAVDINTRKVLAIDESRVRLSETVHGSGSEIFRNSPITNQWLSGQTRIMKGNTYIKAIHMRTNTTPTLVSTTRGRDVSKTCRRCGLADETLIHILQTCPITQGMRCRRHNNVCRKVSEKLRSKGFQVFQEQGIPSPQLQTNISRPDIIATRGDQALVLDVTCIFESHNNSFQDAYRRKVDRYKCLAETIKEKYKVNDVTFHGLCIGSRGAYDPRHLSIWHSIGFSGAELAVLAIGVIEDSLRTITLFNNANRLHI

SEQ ID NO: 15714 - protein, 1203 aa, Adineta steineri
MTNIEEHLKSHDITLLEYKCGACHKPWRSWRAAIAHYSRSNCRHSTSATPTFLTADPPSSTNVIDQSTTTIEQLQNTTTNSAVNEESEAEEQIQTIGNQSSDETTQQLGNDGNAHSPSVIPKTQKIADVQNVDIPANDGKQSDDEQINGDHGIISNTRKENNVEMKETDEKYYCEFCASGGFNKKAGLSQHKRHMHPNEYNATIEVPMKKRLWTRDDILILAELEANLTSSEAGNPNSALALKLPSRSREAIKKRRQTTEYKTLLQQVRESKAAITIEESDDSEKSIIVNSLTIANDSINNNVNNSGNHNSNDRSQGTQVGTNNESYPDIRQYTKTNIMKGRIRLCQTMCDAMTHYVNDVPNSDPVNESLNGIHQAINSVQSSQSRKDDKQTIGSKLRSAKSIAKAQKYAHYQCLFKKDKSKLASEIFDGVDNSAVKPPMSVAYEHYKKIWTIDTKDAEITGRKASVGTDVLLAPITREEIAWAIDQTNTKTALGPDRLPLVTIKAIAKNELWCAFNIWLGYRRIPDSLKINRTVLLPKGKDNLDNIKNWRPITIASLLLRLYNKILARRMQNVFRTNSKQKGFKPLNGVGQNVALLHNLLRHARTNKNNLFVCLLDVSKAFDSVPHESIKRALLRNGCPLEFIDLFNNQYENSYTALSYADRSSRLIALRRGVKQGDPMSSILFNLVIDELFEILGDRFGYELDGVGSVNARAFADDIALMSGSELGMQKLLSETEAFLGARGLVLNADKCISICLRKAGKVKKSQIADSSVKNPPQFTVKNQPIQLLGVDKSCRYLGVQFSPLGAVDPRVTVSAIKSALSSLSKAPLKPQQKVVMLRTYLIPRFIFAFTHTECYPKLMGQQDRLIRRWLKETLKLPPSVCSDFFYLPVKEGGLGIGKLYDIIGIAKVRLHSSFHRANDMCLQFLVDTQGSAMHSRWCNAMKLSDRPSAADINQRNVLSINESRIRLAETVHGSGSTVFRESPITNQWLSGYTRIMKGRTYIKAIQMRTNTTPTRVSTTRGQNTNKACRRCGLADETLIHILQTCPLTQGMRCRRHNNVCRKVSDKLRSKGFQVYSEQGLPSPGLQTNISRPDIIAVQGEKALVLDITCVYESNSNSFPDAYRRKVNRYSPLEETVKQKFQVRKVEFQGLVIGSRGAYDPKHLAIWHSMGFSGTELGMLAIGVIEDSLRTITLFNNANRLRI

SEQ ID NO: 15715 - protein, 930 aa, Chrysoperla carnea
MNQHLIQVFPGRTLESIKGRRRSASYKEMVQDEVQALRVRTLEAQPLAHDAHTQELDPLTNSQHLTESIRSHLCTLIEGIDENRGDHGSRLKQIALSAIAGSDVSDQIYSWLCAAFPAPKTTVQMAPNHKLKKQNDRGQSKKLKRRAEYGRIQSLYRNNVADAAREVLDGASESGQIDSTVFGDYWASIFETPSAPGQAGRLFPHKDHPEGTLDSIWSPIHVRDVKNQKVNIKSAAGPDGIKPLKWNTVSPLIRTIIFNIFLLNAKIDHRMLNTRTIFIPKIKMAKLPSDFRPISIGSVVIRQFNKILAHRLQNLPLHDARQAAFMPGDGLAGNLYLLQSLLVASRRNCKSLHIASLDVAKAFDTVSHSALFQVLREARLPELFVNYVEGLYNEARTSLVHDGRICRNVKLRRGVRQGDPLSPLLFNLVISCALNQLNPEVGFRLDGSTIVGGLAFADDVLLISSTTAGLQDSLDRFTGILDVMGLHLNTKKSFATSQIASGRDKKVKHIAEPLFTFAGDYLPQKSVLDLWSYLGINFSSNKVRFGDKHLEEDLIKLTKGPLKPQQRIKILTSVLLPRHYHVWVLGRTTVGYLNQLDLQVRKYVRLWLRLPKDTKVEYYHTPVKQGGIGIPCLRMAIPLMRKRRLESLEKSSSPYFQAASRSWLVCNQLEWCSRVLRGYGVQMTSKVIVNNTMAKALHGSVDGGGLKDSHRVPASSDWVSRRSSCLTGRDYVDFHHIRANTIPTRARTSRGRDYDRQCRAGCQASETAHHVIQKCFRTHGGRVARHDKVVSIAAAELRRIGWDVVCERAFLTNQGKRKPDIIASRDRRVVVIDAQIVGDGYPLDESHRRKVSKYKDYCNLSELVAAEYSVEHVSFYSVTVSYRGIWSALSAGAFMGLGVGRRTLSTISECALRGSHMNWVRFNQMTDRYA

SEQ ID NO: 15716 - protein, 885 aa, Chrysoperla carnea
MNQHLIQVFPGRTLESIKGRRRSASYKEMVQDEVQALRVRTLEAQPLAHDAHTQELDPLTNSQHLTESIRSHLCTLIEGIDENRGDHGSRLKQIALSAIAGSDVSDQVYSWLCAAFPAPKTTVQMAPNHKLKKQNDRGQSKKLKRRAEYGRIQSLYRNNVADAAREVLDGASESGQIDSTVFGDYWASIFETPSAPGQAGRLFPHKDHPEGTLDSIWSPIHVRDVKNQKVNIKSAAEPDGIKPLKWNTVSPLIRTIIFNIFLLNAKIDHRMLNTRTIFIPKIKMAKLPSDFRPISIGSVVIRQFNKILAHRLQNLPLHDARQAAFMPGDGLAGNLYLLQSLLVASRRNCKSLHIASLDVAKAFDTVSHSALFQVLREARLPELFVNYVEGLYNEARTSLVHDGRICRNVKLRRGVRQGDPLSPLLFNLVISCALNQLNPEVGFRLDGSTIVGGLAFADDVLLISSTTAGLQDSLDRFTGILDVMGLHLNTKKSFATSQIASGRDKKVKHIAEPLFTFAGDYLPQKSVLDLWSYLGINFSSNKVRFGDKHLEEDLIKLTKGPLKPQQRIKILTSVLLPRHYHVWVLGRTTVGYLNQLDLQVRKYVRLWLRLPKDTKVEYYHTPVKQGGIGIPCLRMGIPLMRKRRLESLEKSSSPYFQAASRSWLVCNHLEWCSRVLRGYGVQMTSKVIVNNTMAKALHGSVDGGGLKDSHRVPASSDWVSRRSSCLTGRDYVDFHHIRANTIPTRARTSRGRDYDRQCRAGCQASETAHHVIQKCFRTHGGRVARHDKVVSIAAAELRRIGWDVVCERAFLTNQGKRKPDIIASRDRRVVVIDAQIVGDGYPLDESHRRKVSKYKDYCNLSELVAAEYSVEHVSFYSVTVSYRGI

SEQ ID NO: 15717 - protein, 992 aa, Chrysoperla carnea
MCELCNKNYNTERGLKVHFSKAHPIEANAAINVDRIKARWSPEECRLLAAAEAEATVSGVKFMNQHLIQVFPGRTLESIKGRRRSASYKEMVQDEVQALRVRTLEAQPLAHDAHTQELDPLTNSQHLTESIRSHLCTLIEGIDENRGDHGSRLKQIALSAIAGRDVSDQVYSWLCAAFPAPKTTVQMAPNHKLKKQNDRGQSKKLKRRAEYGRIQSLYRNNVADAAREVLDGASESGQIDSTVFGDYWASIFETPSAPGQAGRLFPHKDHPEGTLDSIWSPIHVRDVKNQKVNIKSAAGPDGIKPLKWNTVSPLIRTIIFNIFLLNAKIDHRMLNTRTIFIPKIKMAKLPSDFRPISIGSVVIRQFNKILAHRLQNLPLHDARQAAFMPGDGLAGNLYLLQSLLVASRRNCKSLHIASLDVAKAFDTVSHSALFQVLREARLPELFVNYVEGLYNEARTSLVHDGRICRNVKLRRGVRQGDPLSPLLFNLVISCALNQLNPEVGFRLDGSTIVGGLAFADDVLLISSTTAGLQDSLDRFTGILDVMGLHLNTKKSFATSQIASGRDKKVKHIAEPLFTFAGDYLPQKSVLDLWSYLGINFSSNKVRFGDKHLEEDLIKLTKGPLKPQQRIKILTSVLLPRHYHVWVLGRTTVGYLNQLDLQVRKYVRLWLRLPKDTKVEYYHTPVKQGGIGIPCLRMAIPLMRKRRLESLEKSSSPYFQAASRSWLVCNQLEWCSRVLRGYGVQMTSKVIVNNTMAKALHGSVDGGGLKDSHRVPASSDWVSRRSSCLTGRDYVDFHHIRANTIPTRARTSRGRDYDRQCRAGCQASETAHHVIQKCFRTHGGRVARHDKVVSIAAAELRRIGWDVVCERAFLTNQGKRKPDIIASRDRRVVVIDAQIVGDGYPLDESHRRKVSKYRDYCNLSELVASEYSVEHVSFYSVTVSYRGIWSALSAGAFMGLGVGRRTLSTISECALRGSHMNWVRFNQMTDRYA

SEQ ID NO: 15718 - protein, 961 aa, Anthocharis cardamines
MYSSLNSEPSTSFELVECPICADRKLYKGSRGLAIHNSRRHIPRTVSQPFSNSEHIEKSALEAQTDVTIGTRLANLKKNCKVIKRIPRGARTSVAHSLAKAIDEVVAFNTTQSWENLFNFSYSVLNIPKNSKNSLTNLIKANSIKFPNIPVLNSSLENCSATNTVQNKIRYIENKISDGNINGAAKLIFSNDTLASNSAATFAALQDKHPSPSIAQHLPEPPSSETDFQTTEESVAVAILSFPNGSASGLDGLSPQHLKDLTGPFVGDVARLLIKSLTSLINLMLTGKINSEITPILYGANLIGLKKKDGGIRPIAVGSTLRRLTSKICSHEVQKKLSQKFEPRQLGFGVKGGSEGAVHAARTFLNSSDYEVFLKLDVKNEFNSVYRGFLLTEIKKEIPEIFRYLWQCYGTPSKLLFGENEISSSVGCQQGDPLGPAIFSLVIDPIISSLCSRFNLWYLDDGSLGGDVLTVLQDLKTVIKSFSEIGLTLNFSKCEIYIHESIPENIYRDILTNFNIHAPNITVLDKTSATLLGAPLFDVGIAHIINSKLDHFCQKSDLLYKINSHMALYVLRLCLFTPKFIYLLRCSPIWKFPLVISSIETCLKSVISKILNTQFDDRSWTQATLPILFGGLGIRLPSDLALPAFLSSTYSSLPLIGKILNQTNLADDLAVGLVEARLAWTASHSEATVPECPKIQKLWDTPTIKLKYENLIADAIDSTDRARLIASYEKESGHWLHALPSYHLGTVLDADTLRTAVCLRLGLKICEPHRCHCGRSVDSFGRHGLSCVKSAGRIYRHGALNDLVRRALVSASIPASLEPAGMSRDDGKRPDGATLVPWSLGRVLVWDVTCVDTLAPSHVGTTCQRPGAAADQAQILKCRKYSSLMGSYEFAALAFETLGPWSAHTKKFVKDLSMRLVHASGEPRAGTYFAQRISLAIQRGNSASILGTIPHGSFLEGVYIL

SEQ ID NO: 15719 - protein, 961 aa, Anthocharis cardamines
MYSSLNSEPSTSFELVECPICADRKLYKGSRGLAIHNSRRHIPRTVSQPFSNSEHIEKSALEAQTDVTIGTRLANLKKNCKVIKRIPRGARTSVAHSLAKAIDEVVAFNTTQSWENLFNFSYSVLNIPKNSKNSLTNLIKANSIKFPNIPVLNSSLENCSATNTVQNKIRYIENKISDGNINGAAKLIFSNDTLASNSAATFAALQDKHPSPSIAQHLPEPPSSETDFQTTEESVAVAILSFQNGSASGLDGLSPQHLKDLTGPFVGDVARLLIKSLTSLINLMLTGKINSEITPILYGANLIGLKKKDGGIRPIAVGSTLRRLTSKICSHEVQKKLSQKFEPRQLGFGVKGGSEGAVHAARTFLNSSDYEVFLKLDVKNAFNSVDRGFLLTEIKKEIPEIFRYLWQCYGTPSKLLFGENEISSSVGCQQGDPLGPAIFSLVIDPIISSLCSRFNLWYLDDGSLGGDALTVLQDLKTVIKSFSEIGLTLNFSKCEIYIHESIPENIYRDILTNFNIHAPNITVLDKTSAKLLGAPLFDVGIAHIINSKLDHFCQKSDLLYKINSHMALYVLRLCLFTPKFIYLLRCCPIWKFPLVISPIETCLKSVISKILNTQFDDRSWTQATLPILFGGLGIRLPSDLALPAFLSSTYSSLPLIGKILNQTNLADDLAVGLVEARLAWTASHSEATVPECSKIQKLWDTPTIKLKYENLIADAIDSTDRARLIASYEKESGHWLHALPSYHLGTVLDADTLRTAVCLRLGLKICEPHRCHCGRSVDSFGRHGLSCVKSSGRIYRHGALNDLVRRALVSASIPASLEPAGMSRDDGKRPDGATLVPWSLGRVLVWDVTCVDTLAPSHVGTTCQRPGPAADQAQILKCRKYSSLMGSYEFAALAFETLGPWSAHTKKFVKDLSMRLVHASGEPRAGTYFAQRISLAIQRGNSASILGTIPHGSFLECVYIL

SEQ ID NO: 15720 - protein, 961 aa, Anthocharis cardamines
MYSSLNSEPSTSFELVECPICADRKLYKGSRGLAIHNSRRHIPRTVSQPFSNSEHIEKSALEAQTDVTIGTRLANLKKNCKVIKRIPRGARTSVAHSLAKAIDEVVAFNTTQSWENLFNFSYSVLNIPKNSKNSLTNLIKANSIKFPNIPVLNSSLENCSATNTVQNKIRYIENKISDGNINGAAKLIFSNDTLASNSAATFAALQDKHPSPSIAQHLPEPPSSETDFQTTEESVAVAILSFPNGSASGLDGLSPQHLKDLTGPFVGDVARLLIKSLTSLINLMLTGKINSEITPILYGANLIGLKKKDGGIRPIAVGSTLRRLTSKICSHEVQKKLSQKFEPRQLGFGVKGGSEGAVHAARTFINSSDYEVFLKLDVKNAFNSVDRGFLLTEIKKEIPEIFRYLWQCYGTPSKLFFGENEISSSVGCQQGDPLGPAIFSLVIDPIISSLCSRFNLWYLDDGSLGGDALTVLQDLKTVIKSFSEIGLTLNFSKCEIYIHESIPENIYRDILTNFNIHAPNITVLDKTSATLLGAPLFDVGIAHIINSKLDHFCQKSDLLYKINSHMALYVLRLCLFTPKFIYLLRCCPIWKFPLVISPIETCLKSVISKILNTQFDDRSWTQATLPILFGGLGIRLPSDLALPAFLSSTYSSLPLIGKILNQTNLADDLAVGLVEARLAWTASHSEATVPECPKIQKLWDTPTIKLKYENLIADAIDSTDRARLIASYEKESGHWLHALPSYHLGTVLDADTLRTAVCLRLGLKICEPHRCHCGRSVDSFGRHGLSCVKSAGRIYRHGALNDLVRRALVSASIPASLEPAGMSRDDGKRPDGATLVPWSLGRVLVWDVTCVDTLAPSHVGTTCQRPGAAADQAQILKCRKYSSLMGSYEFAALAFETLGPWSAHAKKFVKDLSMRLVHASGEPRAGTYFAQRISLAIQRGNSASILGTIPHGSFLEGVYIL

SEQ ID NO: 15721 - protein, 961 aa, Anthocharis cardamines
MYSSLNSEPSTSFELVECPICADRKLYKGSRGLAIHNSRRHIPRTVSQPFSNSEHIEKSALEAQTDVTIGTRLANLKKNCKVIKRIPRGARTSVAHSLAKAIDEVVAFNTTQSWENLFNFSYSVLNIPKNSKNSLTNLIKANSIKFPNIPVLNSSLENCSATNTVQNKIRYIENKISDGNINGAAKLIFSNDTLASNSAATFAALQDKHPSPSIAQHLPEPPSSETDFQTTEESVAVAILSFPNGSASGLDGLSPQHLKDLTGPFVGDVARLLIKSLTSLINLMLTGKINSEITPILYGANLIGLKKKDGGIRPIAVGSTLRRLTSKICSHEVQKKLSQKFEPRQLGFGVKGGSEGAVHAARTFLNSSDYEVFLKLDVKNAFNSVDRGFLLTEIKKEIPEIFRYLWQCYGTPSKLLFGENEISSSVGCQQGDPLGPAIFSLVIDPIISSLCSRFNLWYLDDGSLGGDALTVLQDLKTVIKSFSEIGLTLNFSKFEIYIHESIPENIYRDILTNFNIHAPNITVLDKTSATLLGAPLFDVGIAHIINSKLDHFCQKSDLLYKINSHMALYVLRLCLFTPKFIYLLRCCPIWKFPLVISPIETCLKSVISKILNTQFDDRSWTQATLPILFGGLGIRLPSDLALPAFLSSTYSSLPLIGKILNQTNLADDLAVGLVEARLAWTASHSEATVPECPKIQKLWDTPTIKLKYENLIADAIDSTDRARLIASYEKESGHWLHALPSYHLGTVLDADTLRTAVCLRLGLKICEPHRCHCGRSVDSFGRHGLSCVKSAGRIYRHGALNDLVRRALVSASIPASLEPAGMSRDDGKRPDGATLVPWSLGRVLVWDVTCVDTLALSHVGTTCQRPGAAADQAQILKCRKYSSLMGSYEFAALAFETLGPWSAHTKKFVKDLSMRLVHASGEPRAGTYFAQRISLAIQRGNSASILGTIPHGSFLEGVYIL

SEQ ID NO: 15722 - protein, 1090 aa, Blastobasis lacticolella
MSPPQQYEGSSSVATPSGGTIVNVVRETGAGASTPRSWNFTAGTPINENYAGTSTTAQEMEGSSRNSIPAPQSGQSGSDCASSITHQCQMCGRGFNTKTGLGVHKKRAHPLEMNAESAPREAKRRWRDEEVSLMAKTEARLTGEFGICGNMELMRELPNFGRTLEAIKGQRRKPAYKALVLRYMEQLSSQGQEEISEHQEMTADPQISPVPVPRIDGRSSDPPVANVGVEHIYVPSSETQGSQIVAQLLERAAARRGSSGFARRRRDPQDAAESASLSKRKLRRREYAKVQELYRKCRRRAATEIIDGSFREVRHELEELDAYWRPILEGVSQAPGPTPEALRAFNKRKEQDGGEHNRNLSELWKPFTEDEVKACQIDLQTAPGPDGIRAEDWRAVPAAQKAEIYNAWIKRGEIPPELRECRTVFVPKKDDPAGPGDYRPISIASIPLRHMHTILARRLLACRPPDARQRGFICADGTLENTAVLDAVLGDSRRKLRECHTAVLDFSKAFDTVSHAALVQLLRGGGLPVEFCDYIARLYTTSTTVFDVRGRTSPSVKVGCGVRQGDPLSPLLFNMAMDVILASLPKEIGYGLNAERVSALAYADDLVLFAGSKVGMQEAIDTVDRVGRMMGLYINRAKSSVLSMIPDGKRKKIHYITGHTFKVHGKWISQVNCVERWRYLGVDFDSSGCAILEQNIATALENIKKAPLKPQQRVELVRGHLLPRFLHGFVLGNISADRLRQLDIQIRKAVRGWLRLPKDVPIAYFHASIRDGGLGVPALSSMVPDLVVRRFGCLSTSSWGAARAAARTERIRRKLDWARKQVDRFSKEDPSTKAMSITQYWRETLHASTDGYALRETSRVPASTKWVRERCEQVSGRDYVQFVRTHINALPSRVRSSRGCRIGGETQLRCRAGCMVKETTAHTIQQCHRTHGGRIKRHDRVVEFIAEQMGKGKWSTTKEPNIRTELGLRKPDIIAKRDGVGIILDVQVVSGQRPLDDDHRDKRNKYGKHDELVEKVADILGLQKSDVRTTTCTISWRGVWSRNSHRDLRTHIQLTKAALELVPIMVLRGSHTNWSRFNQMTCMKGYERPE

SEQ ID NO: 15723 - protein, 1090 aa, Blastobasis lacticolella
MSPPQQYEGSSSVATPSGGTIVNVVRETGAGASTPRSWNFTAGTPINENYAGTSTASQEMEGSSRNSIPAPQSGQSGSDCASSITHQCQMCGRGFNTKTGLGVHKKRAHPLEMNAESAPREAKRRWRDEEVSLMAKTEARLTGEFGICGNMELMRELPNFGRTLEAIKGQRRKPAYKALVLRYMEQLSSQGQEEISEHQEMTADPQISPVPVPRIDGRSSDPPVANVGAEHIYVPSSETQGSQIVAQLLERAAARRGSSGFARRRRDPQDAAESASLSKRKLRRREYAKVQELYRKCRRRAATEIIDGSFREVRHELEELDAYWRPILEGVSQAPGPTPEALRAFNKRKEQDGGEHNRNLSELWKPFTEDEVKACQIDLQTAPGPDGIRAEDWRAVPAAQKAEIYNAWIKRGEIPPELRECRTVFVPKKDDPAGPGDYRPISIASIPLRHMHTILARRLLACRPPDARQRGFICADGTLENTAVLDAVLGDSRRKLRECHTAVLDFSKAFDTVSHAALVQLLRGGGLPVEFCDYIARLYTTSTTVFDVRGRTSPSVKVGCGVRQGDPLSPLLFNMAMDVILASLPKEIGYGLNAERVSALAYADDLVLFAGSKVGMQEAIDTVDRVGRMMGLYINRAKSSVLSMIPDGKRKKIHYITGHTFKVHGKWISQVNCVERWRYLGVDFDSSGCAILEQNIATALENIKKAPLKPQQRVELVRGHLLPRFLHGFVLGNISADRLRQLDIQIRKAVRGWLRLPKDVPIAYFHASIRDGGLGVPALSSMVPDLVVRRFGCLSTSSWGAARAAARTERIRRKLDWARKQVDRFSKEDPSTKAMSITQYWRETLHASTDGYTLRETSRVPASTKWVRERCEQVSGRDYVQFVRTHINALPSRVRSSRGCRIGGETQLRCRAGCMVKETTAHTIQQCHRTHGGRIKRHDRVVEFIAEQMGKGKWSTTKEPNIRTELGLRKPDIIAKRDGVGIILDVQVVSGQRPLDDDHRDKRNKYGKHDELVEKVADILGLQKSDVRTTTCTISWRGVWSRNSHRDLRTHIQLTKAALELVPIMVLRGSHTNWSRFNQMTCMKGYERPE

SEQ ID NO: 15724 - protein, 953 aa, Blastobasis lacticolella
MTLLTGEFGICGNMELMRELPNFGRTLEAIKGQRRKPAYKALVLRYMEQLSSQGQEEISEHQEMAADPQISPVPVPRIDGRSSDPPVANVGVEHIYVPSSETQGSQIVAQLLERAAARRGSSGFARRRRDPQDAAESASLSKRKLRRREYAKVQELYRKCRRRAATEIIDGSFREVRHELEELDAYWRPILEGVSQAPGPTPEALRAFNKRKEQDGGEHNRNLSELWKPFTEDEVKACQIDLQTAPGPDGIRAEDWRAVPAAQKAEIYNAWIKRGEIPPELRECRTVFVPKKDDPAGPGDYRPISIASIPLRHMHTILARRLLACRPPDARQRGFICADGTLENTAVLDAVLGDSRRKLRECHTAVLDFSKAFDTVSHAALVQLLRGGGLPVEFCDYIARLYTTSTTVFDVRGRTSPSVKVGCGVRQGDPLSPLLFNMAMDVILASLPKEIGYGLNAERVSALAYADDLVLFAGSKVGMQEAIDTVDRVGRMMGLYINRAKSSVLSMIPDGKRKKIHYITGHTFKVHGKWISQVNCVERWRYLGVDFDSSGCAILEQNIATALENIKKAPLKPQQRVELVRGHLLPRFLHGFVLGNISADRLRQLDIQIRKAVRGWLRLPKDVPIAYFHASIRDGGLGVPALSSMVPDLVVRRFGCLSTSSWGAARAAARTERIRRKLDWARKQVDRFSKEDPSTKAMSITQYWRETLHASTDGYALRETSRVPASTKWVRERCEQVSGRDYVQFVRTHINALPSRVRSSRGCRIGGETQLRCRAGCMVKETTAHTIQQCHRTHGGRIKRHDRVVEFIAEQMGKGKWSTTKEPNIRTELGLRKPDIIAKRDGVGIILDVQVVSGQRPLDDDHRDKRNKYGKHDELVEKVADILGLQKSDVRTTTCTISWRGVWSRNSHRDLRTHIQLTKAALELVPIMVLRGSHTNWSRFNQMTCMKGYERPE

SEQ ID NO: 15725 - protein, 1090 aa, Blastobasis lacticolella
MSPPQQYEGSSSVATPSGGTIVNVVRETGAGASTPRSWNFTAGTPINENYAGTSTASQEMEGSSRNSIPAPQSGQSGSDCASSITHQCQMCGRGFNTKTGLGVHKKRAHPLEMNAESAPREAKRRWRDEEVSLMAKTEARLTGEFGICGNMELMRELPNFGRTLEAIKGQRRKPAYKALVLRYMEQLSSQGQEEISEHQEMTADPQISPVPVPRIDGRSSDPPVANVGAEHIYVPSSETQGSQIVAQLLERAAARRGSSGFARRRRDPQDAAESASLSKRKLRRREYAKVQELYRKCRRRAATEIIDGSFREVRHELEELDAYWRPILEGVSQAPGPTPEALRAFNKRKEQDGGEHNRNLSELWKPFNEDEVKACQIDLQTAPGPDGIRAEDWRAVPAAQKAEIYNAWIKRGEIPPELRECRTVFVPKKDDPAGPGDYRPISIASIPLRHMHTILARRLLACRPPDARQRGFICADGTLENTAVLDAVLGDSRRKLRECHTAVLDFSKAFDTVSHAALVQLLRGGGLPVEFCDYIARLYTTSTTVFDVRGRTSPSVKVGCGVRQGDPLSPLLFNMAMDVILASLPKEIGYGLNAERVSALAYADDLVLFAGSKVGMQEAIDTVDRVGRMMGLYINRAKSSVLSMIPDGKRKKIHYITGHTFKVHGKWISQVNCVERWRYLGVDFDSSGCAILEQNIATALENIKKAPLKPQQRVELVRGHLLPRFLHGFVLGNISADRLRQLDIQIRKAVRGWLRLPKDVPIAYFHASIRDGGLGVPALSSMVPDLVVRRFGCLSTSSWGAARAAARTERIRRKLDWARKQVDRFSKEDPSTKAMSITQYWRETLHASTDGYALRETSRVPASTKWVRERCEQVSGRDYVQFVRTHINALPSRVRSSRGCRIGGETQLRCRAGCMVKETTAHTIQQCHRTHGGRIKRHDRVVEFIAEQMGKGKWSTTKEPNIRTELGLRKPDIIAKRDGVGIILDVQVVSGQRPLDDDHRDKRNKYGKHDELVEKVADILGLQKSDVRTTTCTISWRGVWSRNSHRDLRTHIQLTKAALELVPIMVLRGSHTNWSRFNQMTCMKGYERPE

SEQ ID NO: 15726 - protein, 1090 aa, Blastobasis lacticolella
MSPPQQYEGSSSVATPSGGTIVNVVRETGAGASTPRSWNFTAGTPINENYAGTSTASQEMEGSSRNSIPAPQSGQSGSDCASSITHQCQMCGRGFNTKTGLGVHKKRAHPLEMNAESAPREAKRRWRDEEVSLMAKTEARLTGEFGICGNMELMRELPNFGRTLEAIKGQRRKPAYKALVLRYMEQLSSQGQEEISEHQEMAADPQISPVPVPRIDGRSSDPPVANVGVEHIYVPSSETQGSQIVAQLLERAAARRGSSGFARRRRDPQDAAESASLSKRKLRRREYAKVQELYRKCRRRAATEIIDGSFREVRHELEELDAYWRPILEGVSQAPGPTPEALRAFNKRKEQDGGEHNRNLSELWKPFTEDEVKACQIDLQTAPGPDGIRAEDWRAVPAAQKAEIYNAWIKRGEIPPELRECRTVFVPKKDDPAGPGDYRPISIASIPLRHMHTILARRLLACRPPDARQRGFICADGTLENTAVLDAVLGDSRRKLRECHTAVLDFSKAFDTVSHAALVQLLRGGGLPVEFCDYIARLYTSSTTVFDVRGRTSPSVKVGCGVRQGDPLSPLLFNMAMDVILASLPKEIGYGLNAERVSALAYADDLVLFAGSKVGMQEAIDAVDRVGRMMGLYINRAKSSVLSMIPDGKRKKIHYITGHTFKVHGKWISQVNCVERWRYLGVDFDSSGCAILEQNIATALENIKKAPLKPQQRVELVRGHLLPRFLHGFVLGNISADRLRQLDIQIRKAVRGWLRLPKDVPIAYFHASIRDGGLGVPALSSMVPDLVVRRFGCLSTSSWGAARAAARTERIRRKLDWARKQVDRFSKEDPSTKAMSITQYWRETLHASTDGYALRETSRVPASTKWVRERCEQVSGRDYVQFVRTHINALPSRVRSSRGCRIGGETQLRCRAGCMVKETTAHTIQQCHRTHGGRIKRHDRVVEFIAEQMGKGKWSTTKEPNIRTELGLRKPDIIAKRDGVGIILDVQVVSGQRPLDDDHRDKRNKYGKHDELVEKVADILGLQKSDVRTTTCTISWRGVWSRNSHRDLRTHIQLTKAALELVPIMVLRGSHTNWSRFNQMTCMKGYERPE

SEQ ID NO: 15727 - protein, 1090 aa, Blastobasis lacticolella
MSPPQQYEGSSSVATPSGGTIVNVVRETGAGASTPRSWNFTAGTPINENYAGTSTASQEMEGSSRNSIPAPQSGQSGSDCASSITHQCQMCGRGFNTKTGLGVHKKRAHPLEMNAESAPREAKRRWRDEEVSLMAKTEARLTGEFGICGNMELMRELPNFGRTLEAIKGQRRKPAYKALVLRYMEQLSSQGQEEISEHQEMAADPQISPVPVPRIDGWSSDPPVANVGVEHIYVPSSETQGSQIVAQLLERAAARRGSSGFARRRRDPQDAAESASLSKRKLRRREYAKVQELYRKCRRRAATEIIDGSFREVRHELEELDAYWRPILEGVSQAPGPTPEALRAFNKRKEQDGGEHNRNLFELWKPFTEDEVKACQIDLQTAPGPDGIRAEDWRAVPAAQKAEIYNAWIKRGEIPPELRECRTVFVPKKDDPAGPGDYRPISIASIPLRHMHTILARRLLACRPPDARQRGFICADGTLENTAVLDAVLGDSRRKLRECHTAVLDFSKAFDTVSHAALVQLLRGGGLPVEFCDYIARLYTTSTTVFDVRGRTSPSVKVGCGVRQGDPLSPLLFNMAMDVILASLPKEIGYGLNAERVSALAYADDLVLFAGSKVGMQEAIDTVDRVGRMMGLYINRAKSSVLSMIPDGKRKKIHYITGHTFKVHGKWISQVNCVERWRYLGVDFDSSGCAILEQNIATALENIKKAPLKPQQRVELVRGHLLPRFLHGFVLGNISADRLRQLDIQIRKAVRGWLRLPKDVPIAYFHASIRDGGLGVPALSSMVPDLVVRRFGCLSTSSWGAARAAARTERIRRKLDWARKQVDRFSKEDPSTKAMSITQYWRETLHASTDGYALRETSRVPASTKWVRERCEQVSGRDYVQFVRTHINALPSRVRSSRGCRIGGETQLRCRAGCMVKETTAHTIQQCHRTHGGRIKRHDRVVEFIAEQMGKGKWSTTKEPNIRTELGLRKPDIIAKRDGVGIILDVQVVSGQRPLDDDHRDKRNKYGKHDELVEKVADILGLQKSDVRTTTCTISWRGVWSRNSHRDLRTHIQLTKAALELVPIMVLRGSHTNWSRFNQMTCMKGYERPE

SEQ ID NO: 15728 - protein, 1090 aa, Blastobasis lacticolella
MSPPQQYEGSSSVATPSGGTIVNVVRETGAGASTPRSWNFTAGTPINENYAGTSTASQEMEGSSRNSIPAPQSGQSGSDCASSITHQCQMCGRGFNTKTGLGVHKKRAHPLEMNAESAPREAKRRWRDEEVSLMAKTEARLTGEFGICGNMELMRELPNFGRTLEAIKGQRRKPAYKALVLRYMEQLSSQGQEEISEHQEMTADPQISPVPVPRIDGRSSDPPVANVGAEHIYVPSSETQGSQIVAQLLERAAARRGSSGFARRRRDPQDAAESASLSKRKLRRREYAKVQELYRKCRRRAATEIIDGSFREVRHELEELDAYWRPILEGVSQAPGPTPEALRAFNKRKEQDGGEHNRNLSELWKPFTEDEVKACQIDLQTAPGPDGIRAEDWRAVPAAQKAEIYNAWIKRGEIPPELRECRTVFVPKKDDPAGPGDYRPISIASIPLRHMHTILARRLLACRPPDARQRGFICADGTLENTAVLDAVLGDSRRKLRECHTAVLDFSKAFDTVSHAALVQLLRGGGLPVEFCDYIARLYTTSTTVFDVRGRTSPSVKVGCGVRQGDPLSPLLFNMAMDVILASLPKEIGYGLNAERVSALAYADDLVLFAGSKVGMQEAIDTVDRVGRMMGLYINRAKSSVLSMIPDGKRKKIHYITGHTFKVHGKWISQVNCVERWRYLGVDFDSSGCAILEQNIATALENIKKAPLKPQQRVELVRGHLLPRFLHGFVLGNISADRLRQLDIQIRKAVRGWLRLPKDVPIAYFHASIRDGGLGVPALSSMVPDLVVRRFGCLSTSSWGAARAAARTERIRRKLDWARKQVDRFSKEDPSTKAMSITQYWRETLHASTDGYALRETSRVPASTKWVRERCEQVSGRDYVQFVRTHINALPSRVRSSRGCRIGGETQLRCRAGCMVKETTAHTIQQCHRTHGGRIKRHDRVVEFIAEQMGKGKWSTTKEPNIRTELGLRKPDIIAKRDGVGIILDVQVVSGQRPLDDDHRDKRNKYGKHDELVEKVADILGLQKSDVRTTTCTISWRGVWSRNSHRDLRTHIQLTKAALELVPIMVLRGSHTNWSRFNQMTCMKGYERPE

SEQ ID NO: 15729 - protein, 1090 aa, Blastobasis lacticolella
MSPPQQYEGSSSVATPSGGTIVNVVRETGAGASTPRSWNFTAGTPINENYAGTSTASQEMEGSSRNSIPAPQSGQSGSDCASSITHQCQMCGRGFNTKTGLGVHKKRAHPLEMNAESAPREAKRRWRDEEVSLMAKTEARLTGEFGICGNMELMRELPNFGRTLEAIKGQRRKPAYKALVLRYMEQLSSQGQEEISEHQEMAADPQISPVPVPRIDGRSSDPPVANVGVEHIYVPSSETQGSQIVAQLLERAAARRGSSGFARRRRDPQDAAESASLSKRKLRRREYAKVQELYRKCRRRAATEIIDGSFREVRHELEELDAYWRPILEGVSQAPGPTPEALRAFNKRKEQDGGEHNRNLSELWKPFTEDEVKACQIDLQTAPGPDGIRAEDWRAVPAAQKAEIYNAWIKRGEIPPELRECRTVFVPKKDDPAGPGDYRPISIASIPLRHMHTILARRLLACRPPDARQRGFICADGTLENTAVLDAVLGDSRRKLRECHTAVLDFSKAFDTVSHAALVQLLRGGGLPVEFCDYIARLYTTSTTVFDVRGRTSPSVKVGCGVRQGDPLSPLLFNMAMDVILASLPKEIGYGLNAERVSALAYADDLVLFAGSKVGMQEAIDTVDRVGRMMGLYINRAKSSVLSMIPDGKRKKIHYITGHTFKVHGKWISQVNCVERWRYLGVDFDSSGCAILEQNIATALENIKKAPLKPQQRVELVRGHLLPRFLHGFVLGNISADRLRQLDIQIRKAVRGWLRLPKDVPIAYFHASIRDGGLGVPALSSMVPDLVVRRFGCLSTSSWGAARAAARTERIRRKLDWARKQVDRFSKEDPSTKAMSITQYWRETLHASTDGYALRETSRVPASTKWVRERCEQVSGRDYVQFVRTHINALPSRVRSSRGCRIGGETQLRCRAGCMVKETTAHTIQQCHRTHGGRIKRHDRVVEFIAEQMGKGKWSTTKEPNIRTELGLRKPDIIAKRDGVGIILDVQVVSGQRPLDDDHRDKRNKYGKHDELVEKVADILGLQKSDVRTTTCTISWRGVWSRNSHRDLRTHIQLTKAALELVPIMVLRGSHTNWSRFNQMTCMKGYERPE

SEQ ID NO: 15730 - protein, 1090 aa, Blastobasis lacticolella
MSPPQQYEGSSSVATPSGGTIVNVVRETGAGASTPRSWNFTAGTPTNENYAGTSTTSQEMEGSSRNSIPAPQSGQSGSDCASSITHQCQMCGRGFNTKTGLGVHKKRAHPLEMNAESAPREAKRRWRDEEVSLMAKTEARLTGEFGICGNMELMRELPNFGRTLEAIKGQRRKPAYKALVLRYMEQLSSQGQEEISEHQEMTADPQISPVPVPRIDGRSSDPPVANVGVEHIYVPSSETQGSQIVAQLLERAAARRGSSGFARRRRDPQDAAESASLSKRKLRRREYAKVQELYRKCRRRAATEIIDGSFREVRHELEELDAYWRPILEGVSQAPGPTPEALRAFNKRKGQDGGEHNRNLSELWKPFTEDEVKACQIDLQTAPGPDGIRAEDWRAVPAAQKAEIYNAWIKRGEIPPELRECRTVFVPKKDDPAGPGDYGPISIASIPLRHMHTILARRLLACRPPDARQRGFICADGTLENTAVLDAVLGDSRRKLRECHTAVLDFSKAFDTVSHAALVQLLRGGGLPVEFCDYIARLYTTSTTVFDVRGRTSPSVKVGCGVRQGDPLSPLLFNMAMDVILASLPKEIGYGLNAERVSALAYADDLVLFAGSKVGMQEAIDTVDRVGRMMGLYINRAKSSVLSMIPDGKRKKIHYITGHTFKVHGKWISQVNCVERWRYLGVDFDSSGCAILEQNIATALENIKKAPLKPQQRVELVRGHLLPRFLHGFVLGNISADRLRQLDIQIRKAVRGWLRLPKDVPIAYFHASIRDGGLGVPALSSMVPDLVVRRFGCLSTSSWGAARAAARTERIRRKLDWARKQVDRFSKEDPSTKAMSITQYWRETLHASTDGYALRETSRVPASTKWVRERCEQVSGRDYVQFVRTHINALPSRVRSSRGCRIGGETQLRCRAGCMVKETTAHTIQQCHRTHGGRIKRHDRVVEFIAEQMGKGKWSTTKEPNIRTELGLRKPDIIAKRDGVGIILDVQVVSGQRPLDDDHRDKRNKYGKHDELVEKVADILGLQKSDVRTTTCTISWRGVWSRNSHRDLRTHIQLTKAALELVPIMVLRGSHTNWSRFNQMTCMKGYERPE

SEQ ID NO: 15731 - protein, 1090 aa, Blastobasis lacticolella
MSPPQQYEGSSSVATPSGGTIVNVVRETGAGASTPRSWNFTAGTPTNENYAGTSTTSQEMEGSSRNSIPAPQSGQSGSDCASSITHQCQMCGRGFNTKTGLGVHKKRAHPLEMNAESAPREAKRRWRDEEVSLMAKTEARLTGEFGICGNMELMRELPNFGRTLEAIKGQRRKPAYKALVLRYMEQLSSQGQEEISEHQEMTADPQISPVPVPRIDGRSSDPPVANVGVEHIYVPSSETQGSQIVAQLLERAAARRGSSGFARRRRDPQDAAESASLSKRKLRRREYAKVQELYRKCRRRAATEIIDGSFREVRHELEELDAYWRPILEGVSQAPGPTPEALRAFNKRKEQDGGEHNQNLSELWKPFTEDEVKACQIDLQTAPGPDGIRAEDWRAVPAAQKAEIYNAWIKRGEIPPELRECRTVFVPKKDDPAGPGDYRPISIASIPLRHMHTILARRLLACRPPDARQRGFICADGTLENTAVLDAVLGDSRRKLRECHTAVLDFSKAFDTVSHAALVQLLRGGGLPVEFCDYIARLYTTSTTVFDVRGRTSPSVKVGCGVRQGDPLSPLLFNMAMDVILASLPKEIGYGLNAERVSALAYADDLVLFAGSKVGMQEAIDTVDRVGRMMGLYINRAKSSVLSMIPDGKRKKIHYITGHTFKVHGKWISQVNCVERWRYLGVDFDSSGCAILEQNIATALENIKKAPLKPQQRVELVRGHLLPRFLHGFVLGNISADRLRQLDIQIRKAVRGWLRLPKDVPIAYFHASIRDGGLGVPALSSMVPDLVVRRFGCLSTSSWGAARAAARTERIRRKLDWARKQVDRFSKEDPSTKAMSITQYWRETLHASTDGYALRETSRVPASTKWVRERCEQVSGRDYVQFVRTHINALPSRVRSSRGCRIGGETQLRCRAGCMVKETTAHTIQQCHRTHGGRIKRHDRVVEFIAEQMGKGKWSTTKEPNIRTELGLRKPDIIAKRDGVGIILDVQVVSGQRPLDDDHRDKRNKYGKHDELVEKVADILGLQKSDVRTTTCTISWRGVWSRNSHRDLRTHIQLTKAALELVPIMVLRGSHTNWSRFNQMTCMKGYERPE

SEQ ID NO: 15732 - protein, 1090 aa, Blastobasis lacticolella
MSPPQQYEGSSSVATPSGGTIVNVVRETGAGASTPRSWNFTAGTPTNENYAGTSTTSQEMEGSSRNSIPAPQSGQSGSDCASSITHQCQMCGRGFNTKTGLGVHKKRAHPLEMNAESAPREAKRRWRDEEVSLMAKTEARLTGEFGICGNMELMRELPNFGRTLEAIKGQRRKPAYKALVLRYMEQLSSPGQEEISEHQEMTADPQISPVPVPRIDGRSSDPPVANVGVEHIYVPSSETQGSQIVAQLLERAAARRGSSGFARRRRDPQDAAESASLSKRKLRRREYAKVQELYRKCRRRAATEIIDGSFREVRHELEELDAYWRPILEGVSQAPGPTPEALRAFNKRKEQDGGEHNRNLSELWKPFTEDEVKACQIDLQTAPGPDGIRAEDWRAVPAAQKAEIYNAWIKRGEIPPELRECRTVFVPKKDDPAGPGDYRPISIASIPLRHMHTILARRLLACRPPDARQRGFICADGTLENTAVLDAVLGDSRRKLRECHTAVLDFSKAFDTVSHAALVQLLRGGGLPVEFCDYIARLYTTSTTVFDVRGRTSPSVKVGCGVRQGDPLSPLLFNMAMDVILASLPKEIGYGLNAERVSALAYADDLVLFAGSKVGMQEAIDTVDRVGRMMGLYINRAKSSVLSMIPDGKRKKIHYITGHTFKVHGKWISQVNCVERWRYLGVDFDSSGCAILEQNIATALENIKKAPLKPQQRVELVRGHLLPRFLHGFVLGNISADRLRQLDIQIRKAVRGWLRLPKDVPIAYFHASIRDGGLGVPALSSMVPDLVVRRFGCLSTSSWGAARAAARTERIRRKLDWARKQVDRFSKEDPSTKAMSITQYWRETLHASTDGYALRETSRVPASTKWVRERCEQVSGRDYVQFVRTHINALPSRVRSSRGCRIGGETQLRCRAGCMVKETTAHTIQQCHRTHGGRIKRHDRVVEFIAEQMGKGKWSTTKEPNIRTELGLRKPDIIAKRDGVGIILDVQVVSGQRPLDDDHRDKRNKYGKHDELVEKVADILGLQKSDVRTTTCTISWRGVWSRNSHRDLRTHIQLTKAALELVPIMVLRGSHTNWSRFNQMTCMKGYERPE

SEQ ID NO: 15733 - protein, 1090 aa, Blastobasis lacticolella
MSPPQQYEGSSSVATPSGGTIVNVVRETGAGASTPRSWNFTAGTPINENYAGTSTASQEMEGSSRNSIPAPQSGQSGSDCASSITHQCQMCGRGFNTKTGLGVHKKRAHPLEMNAESAPREAKRRWRDEEVSLMAKTEARLTGEFGICGNMELMRELPNFGRTLEAIKGQRRKPAYKALVLRYMEQLSSQGQEEISEHQEMTADPQISPVPVPRIDGRSSDPPVANVGAEHIYVPSSETQGSQIVAQLLERAAARRGSSGFARRRRDPQDAAESASLSKRKLRRREYAKVQELYRKCRRRAATEIIDGSFREVRHELEELDAYWRPILEGVSQAPGPTPEALRAFNKRKEQDGGEHNRNLSELWKPFTEDEVKACQIDLQTAPGPDGIRAEDWRAVPAAQKAEIYNAWIKRGEIPPELRECRTVFVPKKDDPAGPGDYRPISIASIPLRHMHTILARRLLACRPPDARQRGFICADGTLENTAVLDAVLGDSRRKLRECHTAVLDFSKAFDTVSHAALVQLLRGGGLPVEFCDYITRLYTTSTTVFDVRGRTSPSVKVGCGVRQGDPLSPLLFNMAMDVILASLPKEIGYGLNAERVSALAYADDLVLFAGSKVGMQEAIDTVDRVGRMMGLYINRAKSSVLSMIPDGKRKKIHYITGHTFKVHGKWISQVNCVERWRYLGVDFDSSGCAILEQNIATALENIKKAPLKPQQRVELVRGHLLPRFLHGFVLGNISADRLRQLDIQIRKAVRGWLRLPKDVPIAYFHASIRDGGLGVPALSSMVPDLVVRRFGCLSTSSWGAARAAARTERIRRKLDWARKQVDRFSKEDPSTKAMSITQYWRETLHASTDGYALRETSRVPASTKWVRERCEQVSGRDYVQFVRTHINALPSRVRSSRGCRIGGETQLRCRAGCMVKETTAHTIQQCHRTHGGRIKRHDRVVEFIAEQMGKGKWSTTKEPNIRTELGLRKPDIIAKRDGVGIILDVQVVSGQRPLDDDHRDKRNKYGKHDELVEKVADILGLQKSDVRTTTCTISWRGVWSRNSHRDLRTHIQLTKAALELVPIMVLRGSHTNWSRFNQMTCMKGYERPE

SEQ ID NO: 15734 - protein, 672 aa, Pieris napi
MLCGEINQAIAPILYGANLVALTKKDGGVRPIAVGSTFRRLTSKIAVKHIISKLNKIFEPTQLGFGTKGGCEAAIHALRTLFSNEKFDVLLKVDVKNAFNSISRDTLLTKSFENIPEIYNYLLQCYSEPSKLTYKSYELSSEVGCQQGDPLGPAIFSLAINSCIQNLKSNFNVWYLDDGTLGGNADVVLSDLSKIISDFSSMGLTLNFDKCEIYLHGENMDTDHTIKKINTLAPNIKIINKKSLYLLGAPIFKEGFEEYINSTISKFKDLSHRLLDITAHSALFILKFCLFVPKLTYVLRCSPLWNHSVFLSDLDNLLKTSLESILNVRFDTPSWNQASLPVRFGGLGVRKITSVALPAFLSSAHKSSSLVGKILRSYSTNYEIADLTDARNVWIASNPGLSLPSGVNFQRNWDDPLCKSEFKKLLGHIPITDRARLMAVGSREAGHWLNAYPSPNTGTLLDPESLRIAISLRLGVPICTPHKCPCGFEVSSLGHHGLHCQKSAGRFSRHAALNDIIRRSLASVNVPAILEPTGIARDDGKRPDGMSLIPWKMGRALVWDATCVDTFAPSHLLRTSQKAGAAAEQAENNKRHKYKSLSSNFNFVPFEVETLGPWGSSAQALIKDLSWRLVDSTGDRRAGTFLAQRISLAIQRGNVASVKGTLPQGPNFLNLF

SEQ ID NO: 15735 - protein, 1284 aa, Boloria selene
MPLPTWLTIPKPTIPNPLFYDMKNNENRYNLRPLPGVRRGAPGADAGCFSLRAVGDEELSRRALIGRDPEDNTAESSSSSLASQSSYDPCSSISSSNYSYPSSPSVSLVTNSMVLEDVVQEANAVLPASTTSYPKKRNKWTIEMNKFIMRLYFQLTMLDTDTKTYLFPLHQKFVEKFPEMQVSRQRVGDQRRAIVRNKLLPLVEIDKIYEEVKREFQTSNTLQNKNMPSSQIGQRMKWTEELNETIIRAYYKITELETNKTIYRKHLHQDFISKFPHLSHISEQRIADQRRSIIKNKLMCSNKIEKIRREVASELQVRASKIESSCNNTENIVSILSPEVQDNAENQIIEQPSTVNRNEKIDNIFKTCLEYYINIEPTNRNYIPKQRPSKKLAEIINYVNTVILPEKLHSTTNFKSFQTVFYCAAWTAAKANGAKIEIKPQGNTPKIFERKKPKWQIRLEKKVEDLRAKIGRLTQYIQGNRSKKVVKHVNAIRNHYKIHSIHEEPNSQISHFLDTLKQKLALTNSRLQRYKLCTLRKNQNNHFISNEKQFYRDLKSSTSSRINQSNNNNIEHLTSSAPTENVFYRYWSTIWENPVSHNDNAEWITSEKLKNLSTPSMEYNSITLEILHTVIKKLKNWKAPGSDFIHNYWYKHFTHAHSYLHKFINHFIQNPHDMPEYIATGITYMIPKDYSDLGNPEKYRPITCLQTIYKIITSCLTELLYTHLMNSNILTEEQKGCRKHSQSCKEQLIIDSVILKKVQKEKKDIFTLYIDYKKAYDSVPHSWLLQILDIYKIHPQIINFLKNTMTNWKTTLKLSIQNNNINTEPIKIQRGIYQGDALSPLWFCLALNPLSNMLNLTNTGYKLWFDNGLVKSPTSELKIVNHLLYMDDIKLYAQSKEELNYLADLTDTFSQDINMEFGIDKCKVNAIKAGQNLKHEYQLRNGECILPLIESETYKYLGYIQSKLIHHKEIKHNLTQHFKHRLNSILKSSLNAKNTTKAINTFAIPALTYSFGVINWSKTELKNLQRVISTTMTKNRKHHPRSCTQRMTLPRLDGGRGIIDILNLHNKQISTLRKYFYSKTNTSTLHNAVVQNDKNFTPLNLVQQVPQNNEIQIDKLSKILEWTQKSLHGRHQNELNQNNVDKTASNEWLRRGELFPETEGFMIAIQDQVIETRNYQKYIIKKPNSHTDICRRCNGASETIQHITGACKSIAQTDYKHRHDQVAFIIHQKLAIKYNLTSAPPLPYYKYTPESVIENESYRLYFDRAILTDKTVPYNRPDITFVDK

SEQ ID NO: 15736 - protein, 1383 aa, Boloria selene
MPLPTWLTIPKPTIPNPLFYDMKNNEKRYNLRPLPGVRRGAPGADAGCFSLRAVGDEELSRRALIGRDPEDNTAESSSSSLASQSSYDPCSSISSSNYSYPSSPSVSLVTNSMVLEDVVQEANAVLPAPTTSYPKKRNKWTIEMNTFIMRLYFQLTMLDTDTKTYLFPLHQKFVEKFPEMQVSRQRVGDQRRAIVRNKLLPLVEIDKIYEEVKREFQTSNTLQNKNMPSSQIGQRMKWTEELNETIIRAYYKITELETNKTIYRKHLHQDFISKFPHLSHISEQRIADQRRSIIKNKLMCSNKIEKIRREVASELQVRASKIESSCNNTENVVSILSPEVQDNAENQIIEQPSTVNRNEKIDNIFKTCLEYYINIEPTNRNYIPKQRPSKKLAEIINYVNTVILPEKLHSTTNYKSFQTVFYCAAWTAAKANGAKIEIKSQGNTPKIFERKKPKWQIRLEKKVEDLRAKIGRLTQYIQGNRSKKVVKHVNAIRNHYKIHSIHEEPNSQISHFLDTLKQKLALTNSRLQRYKLCTLRKNQNNHFISNEKQFYRDLKSSTSSRINQPNNNNIEHLTSSAPTENVFYRYWSTIWENPVSHNDNAEWITSEKLKNLSTPSMEYNSITLEILHTVIKKLKNWKAPGSDFIHNYWYKHFTHAHSYLHTFINHFIQNPHDMPEYIATGITYMIPKDYSDLGNPEKYRPITCLQTIYKIITSCLTELLYTHLINSNILTEEQKGCRKHSQGCKEQLIIDSVILKKVQKEKKDIFTLYIDYKKAYDSVPHSWLLQILDIYKIHPQIINFLKNTMTNWKTTLKLSIQNNNINTEPIKIQRGIYQGDALSPLWFCLALNPLSNMLNLANTGYKLWFDNGLVKSPTSELKIVNHLLYMDDIKLYAQSKEELNYLADLTDTFSQDINMEFGIDKCKVNAIKAGQNLKHEYQLRNGECILPLIESETYKYLGYIQSKLIHHKEIKLNLTQQFKHRLNSILKSPLNAKNTTKAINTFAIPALTYSFGVINWSKTELKNLQRVISTTMTKNRKHHPRSCTQRMTLPRLDGGRGIIDILNLHNKQISTLRKYFYSKTNTSTLHNAVVQNDKNFTPLNLVQQVPQNNEIQIDKLSKILEWTQKSLHGRHQNELNQNNVDKTASNEWLRRGELFPETEGFMIAIQDQVIETRNYQKYIIKKPNSHTDICRRCNGASETIQHITGACKSIAQTDYKHRHDQVAFIIHQKLAIKYNLTSAPPLPYYKYTPESVIENESYRLYFDRAILTDKTVPYNRPDITFVDKLNNTATIIDIAIPNSHNLHNTFIEKLTKYQDLKDEITRMWKIKTVTIVPIIISTTGVVPKNLHQSIKVLGLPPFTYVQLQKAAILNTCRLVRKFLNNNP

SEQ ID NO: 15737 - protein, 1367 aa, Heliconius numata
MKKSNHRYNLRPLPGVRRGAPGADAGCLSIRAVGDEELSRRALIGLDPENNTAEQSPSLSPISSLHPFSSPSSSNYSYTSSPTSSSSHSGRNMILEDVVQEANANVSVPTFMIPKVRNKWSREMNEFILRTYLHLTLLETHTNTYLLPLYTKFIEKYPHMKVTRQRVGDQRRAIVRNKLLPQNIIDKIYQEVKKELENIISTDQQLPTNNNMLNSQDGQRMEWNEQYNEAILRAYFKITRLETNKTAYRKYLHQDFITRFPHLSHISEQRIADQRRSIVKNKLLSTEKIEDIRIQIAEELQIEVQNYQSEINVANTNNTNNEELDYFDNYTDELLNNTNNCNPDQQTSLERNIEIDNTFNECLAYFTNTEPTKRNHIPRQRSSKKLARIIEYINTILLPEYINRDTTFQSFQTVIYCAAWTAAKMNGAKLRTTPNVIVTKSKVKKPKWQTRLEKKVKDLRTKIARLTQFIKGNRSKKLIHHVNLIKSNYKIHSTHEEPNTELFHFLDTLKQKLTLTNSRLQRYKICTLRKTQNNQFSSNEKQFYRNLKNSTKNDIENSVQTTPTADDFHKYWTSIWENPVEHNFSADWINYEQMQNQIKTDMKFDEITLGMLQLTIEKLSNWKAPGSDFIHNFWYKKFTYIHKHLLKHINHFIQNPHDMPEYITVGITYMIPKDSNSLNDPSKYRPITCLQSIYKIITSCLAKIIYNYLEDNKILAEEQKGCKKFTQGCKEQLIVDSVILKQAHQKKKDIFTMYIDYRKAYDSIPHSWLLQVLDIYKIHPTIQQFLKNTISQWTTKLKLTNLDNTIDTVPIKIKRGIFQGDALSPLWFCLALNPLSNILNSVQAGYKLKFNNDSVNKTKYKIINHLLYMDDIKLYAETKEDLNKLVNLTETFSQDICMEFGIDKCKINSSKAGQNYMHDYLLKNGEHIESLMENETYKYLGYIQSKLTHHKEVKANLTKQFKHRLNSILKSKLNSKNTIKAINSYAIPILTYSFGIISWNKTDLKNLQRIINTTLTKNRKHHPRSCVQRMTLQRIDGGRGLIDIVNLHNKQITNLRKYFHFKSNTSTFHESIVENDLKLSTLNLKDKNLLENDPHTERRTKIQEWARKSLHGRHLSELSQNYVDKTASNEWLRHGELFPETEGFMVAIQDQVIETKNYQKYIIKKSNLNTDICRRCNRASETIQHITGACMSIGQTDYKHRHDQVAHIIHQKLAIKYKLSSALPVPYYKYTPECILENEFYRLYFDRAILTDKTVPYNRPDITFIDKINKTAQIIDIAIPNSHNLQTTFSEKLTKYEELKDEIIRMWKLKKVTIVPVVISSTGVIPKNLHQSIKTLDLPPYTYALLQKAAILNTCRIVRKFLSITNC

SEQ ID NO: 15738 - protein, 1365 aa, Dryas iulia
MKKSNHRYNLRPLPGVRRGAPGADAGCLSLRAVGDEELSRRALIGLDPECNTAGNSLSLSPISSSRCFSSPSSSNHSYTTSPSSSSIHTNHNMILEDVVQEANADMPVPTFRIPKVRNKWSREMNEFILRTYFHITLLESNTNTYLLPLYKKFNEKYPHMEVSRQRVGDQRRAIIRNKLLPEATIHQIYEEVKKELESLTDTDQQNLVNIDILNSQEGQRMKWSEQYNEAIMRAYFKITHLETNKTTYRKHLHQDFISRFPHLSHITEQRVADQRRSIVNNKLLSTQKIENIRNEIALELQVETHQSEIEIVNINGEIDGNQFENYTDKVQHNIDTYDPEPPNVKERNAEIDNTFNDCLAYFTNTEPTKRNYIPRQRSSKKFSRIVEYINTILLPENINESTSFQSLQVIVYCAAWTAAKVNGAKLRTTPDVTLRKSKFKKPKWQTRLEKKVADLRTKIARLTQYIQGNRSKKIIYHVNLIKQNYKIHSTHEEPNTQLFHFLDTLKQKLTLTSSRLQRYKICTERKIQNNQFITNEKQFYRKLKSSTNNNIENSKQTIATVDDFRKYWSSVWENPVTHNFNAEWINSEQIQNQSKTGMQFENISLEILQLTINKLNNWKAPGSDFIHNFWYKKFTYTHLHYLKHINHFIHNPQDMPEYITAGVTYMIPKDSNNLDDPSKYRPITCLQSIYKIITSCLTETIYKYLTDNNILTEEQKGCKRFSQGCKEQLIVDSVILKQAKKNKKDIFTMYIDYRKAYDSIPHSWLYQVLEIYKIHPTIQNFLKITMNHWTTKLKLTTLDSIADSESIKIKRGIYQGDALSPLWFCLALNPLSNILNSTATGYKLKYNNNSTHTIEYQVVNHLLYMDDIKLYAEKKEDLNKLADLTEKFSQDICMEFGIDKCKINAVKARQNYIHEYLMRNGESIQSLMENETYKYLGYIQSKLTHHKEIKSNLTRQFKHRLNSILKSKLNSKNTIKAINTFAIPVLTYSFGIIPWNKTELKNLQRVINTTLTKNRKHHPRSCVQRMTLQRLDGGRGLIDILNLHNKQITNLRKYFHFKSNTSTLHNAIVENDQKLTPLNLKEKTSRQNEVILDRLTKIQEWAQKSLHGRHRSELSQNNVDTMASNEWLRRGELFPETEGFMIAIQDQVIETKNYQKYIIKKSNLQSDICRRCNRVPETIQHITGACASIAQTDYKHRHDQVAHIIHQKLVIKYKLSSAPPVPYYKYTPETIVENEFYKLYFDRAILTDKTVPYNRPDITIIDKRNKTVQLIDIAIPNSHNLQTTFSEKLRKYEDLKDEITRMWKLKKVTIVPIVISTTGVIPKNLHQSIKTLDLPPYTYVLLQKAAILNTCRIVRKFLSIPQFLN

SEQ ID NO: 15739 - protein, 1366 aa, Heliconius numata
MKKSNHRYNLRPLPGVRRGAPGADAGCLSIRAVGDEELSRRALIGLDPENNTAEQSPSLSPISSLHPFSSPSSSSYSYTSSPTSSSSHSGCNMILEDVVQEANANVSVPTFMIPKVRNKWSREMNEFILRTYLHLTLLETHTNTYLLPLYNKFIEKYPHMKVTRQRVGDQRRAIVRNKLLPQNIIDKIYQEVKKELENIISTDQQLPTNNNMLNSQDGQRMKWNEQYNEAILRAYFKITRLETNKTAYRKYLHQDFITRFPHLSHISEQRIADQRRSIVKNKLLSTEKIEDIRIQIAEELQIEVQNYQSESNVANTNNTNNEELDYFDNYTDELLNNTNNCNPDQQTNLERNIEIDNTFNECLAYFTNTEPTKRNHIPRQRSSKKLARIIEYINTILLPEYINKDTTFQSFQTVIYCAAWTAAKMNGAKLRTTPNVIVTKSKAKKPKWQTRLEKKVNDLRTKIARLTQFIKGNRSKKLIHHVNLIKSNYKIHSTHEEPNTELFHFLDTLKQKLTLTNSRLQRYKICTLRKTQNNQFSSNEKQFYRNLKNSTKNDIENSVQTTPTADDFHKYWTLIWESPVEHFSADWINYEQMQNQIKTDMKFDEITLGMLQLTIEKLSNWKAPGSDFIHNFWYKKFTYIHKHLLKHINHFIQNPHDMPEYITVGITYMIPKDSNSLNDPSKYRPITCLQSIYKIITSCLAKIIYKYLEDNKILAEEQKGCKKFSQGCKEQLIVDSVILKQAHQKKKDIFTMYIDYRKAYDSIPHSWLLQVLDIYKIHPTIQQFLKNTISQWTTKLKLTNLDNTIDTVPIKITRGIFQGDALSPLWFCLALNPLSNILNSVQAGYKLKFNNDSVNKTKYKIINHLLYMDDIKLYAETKEDLNKLVNLTETFSQDICMEFGIDKCKINSSKAGQNYMHDYLLKNGEHIESLMENETYKYLGYIQSKLTHHKEVKANLTKQFKHRLNSILKSKLNSKNTIKAINSYAIPILTYSFGIISWNKTELKNLQRIINTTLTKNRKHHPRSCVQRMTLQRIDGGRGLIDIVNLHNKQITNLRKYFHFKTNTSTFHESIVENDLKLSTLNLKDKNLLENDPHTERRTKIQEWARKSLHGRHLSELSQNYVDKTASNEWLRRGELFPETEGFMLAIQDQVIETKNYQKYIIKKANLNTDICRRCNRASETIQHITGACMSIAQTDYKHRHDQVAHIIHQKLAIKYKLSSALPVPYYKYTPECILENEFYRLYFDRAILTDKTVPYNRPDITFIDKINKTAQIIDIAIPNSHNLQTTFSEKLTKYEELKDEIIRMWKLKKVTIVPVVISSTGVIPKNLHQSIKTLDLPPYTYALLQKAAILNTCRIVRKFLSITNC

SEQ ID NO: 15740 - protein, 1367 aa, Heliconius numata
MKKSNHRYNLRPLPGVRRGAPGADAGCLSIRAVGDEELSRRALIGLDPENNTAEQSPSLSPISSLHPFSSPSSSNYSYTSSPTSSSSHSGRNMILEDVVQEANANVSVPTFMIPKVRNKWSREMNEFILRTYLHLTLLETHTNTYLLPLYTKFIEKYPHMKVTRQRVGDQRRAIVRNKLLPQNIIDKIYQEVKKELENIISTDQQLPTNNNMLNSQDGQRMKWNEQYNEAILRAYFKITRLETNKTAYRKYLHQDFITRFPHLSHISEQRIADQRRSIVKNKLLSTEKIEDIRIQIAEELQIEVQNYQSEINVANTNNTNNEELDYFDNYTDELLNNTNNCNPDQQTSLERNIEIDNTFNECLAYFTNTEPTKRNHIPRQRSSKKLARIIEYINTILLPEYINRDTTFQSFQTVIYCAAWTAAKMNGAKLRTTPNVIVTKSKVKKPKWQTRLEKKVKDLRTKIARLTQFIKGNRSKKLIHHVNLIKSNYKIHSTHEEPNTELFHFLDTLKQKLTLTNSRLQRYKICTLRKTQNNQFSSNEKQFYRNLKNSTKNDIENSVQTTPTADDFHKYWTSIWENPVEHNFSADWINYEQMQNQIKTDMKFDEITLGMLQLTIEKLSNWKAPGSDFIHNFWYKKFTYIHKHLLKHINHFIQNPHDMPEYITVGITYMIPKDSNSLNDPSKYRPITCLQSIYKIITSCLAKIIYNYLEDNKILAEEQKGCKKFSQGCKEQLIVDSVILKQAHQKKKYIFTMYIDYRKAYDSIPHSWLLQVLDIYKIHPTIQQFLKNTISQWTTKLKLTNLDNTIDTVPIKITRGIFQGDALSPLWFCLALNPLSNILNSVQAGYKLKFNNDSVNKTKYKIINHLLYMDDIKLYAETKEDLNKLVNLTETFSQDICMEFGIDKCKINSSKAGQNYMHDYLLKNGEHIESLMENETYKYLGYIQSKLTHHKEVKANLTKQFKHRLNSILKSKLNSKNTIKAINSYAIPILTYSFGIISWNKTDLKNLQRIINTTLTKNRKHHPRSCVQRMTLQRIDGGRGLIDIANLHNKQITNLRKYFHFKSNTSTFHESIVENDLKLSTLNLKDKNLLENDPHTERRTKIQEWARKSLHGRHLSELSQNYVDKTASNEWLRRGELFPETEGFMVAIQDQVIETKNYQKYIIKKSNLNTDICRRCNRASETIQHITGACMSIAQTDYKHRHDQVAHIIHQKLAIKYKLSSALPVPYYKYTPECILENEFYRLYFDRAILTDKTVPYNRPDITFIDKINKTAQIIDIAIPNSHNLQTTFSEKLTKYEELKDEIIRMWKLKKVTIVPVVISSTGVIPKNLHQSIKTLDLPPYTYALLQKAAILNTCRIVRKFLSITNC

SEQ ID NO: 15741 - protein, 1367 aa, Heliconius numata
MKKSNHRYNLRPLPGVRRGAPGADAGCLSIRAVGDEELSRRALIGLDPENNTAEQSPSLSPISSLHPFSSPSSSNYSYTSSPTSSSSHSGRNMILEDVVQEANANVSVPTFMIPKVRNKWSREMNEFILRTYLHLTLLETHTNTYLLPLYTKFIEKYPHMKVTRQRVGDQRRAIVRNKLLPQNIIDKIYQEVKKELENIISTDQQLPTNNNMLNSQDGQRMKWNEQYNEAILRAYFKITRLETNKTAYRKYLHQDFITRFPHLSHISEQRIADQRRSIVKNKLLSTEKIEDIRIQIAEELQIEVQNYQSEINVANTNNTNNEELDYFDNYTDELLNNTNNCNPDQQTNLERNIEIDNTFNECLTYFTNTEPTKRNHIPRQRSSKKLARIIEYINTILLPEYINKDTTFQSFQTVIYCAAWTAAKMNGAKLRTTPNVIVTKSKVKKPKWQTRLEKKVKDLRTKIARLTQFIKGNRSKKLIHHVNLIKSNYKIHSTHEEPNTELFHFLDTLKQKLTLINSRLQRYKICTLRKTQNNQFSSNEKQFYRNLKNSTKNDIENSVQTTPTADDFHKYWTSIWENPVEHNFSADWINYEQMQNQIKTDMKFDEITLGMLQLTIEKLSNWKAPGSDFIHNFWYKKFTYIHKHLLKHINHFIQNPHDMPEYITVGITYMIPKDSNNLNDPSKYRPITCLQSIYKIITSCLAKIIYKYLEDNKILAEEQKGCKKFSQGCKEQLIVDSVILKQAHQKKKDIFTMYIDYRKAYDSIPHSWLLQVLDIYKIHPTIQQFLKNTISQWTTKLKLTNLDNTIDTVPIKITRGIFQGDALSPLWFCLALNPLSNILNSVQAGYKLKFNNDSVNKTKYKIINHLLYMDDIKLYAETKEDLNKLVNLTETFSQDICMEFGLDKCKINSSKAGQKYMHDYLLKNGEHIESLMENETYKYLGYIQSKLTHHKEVKANLTKQFKHRLNSILKSKLNSKNTIKAINSYAIPILTYSFGIISWNKTELKNLQRIINTTLTKNRKHHPRSCVQRMTLQRIDGGRGLIDIVNLHNKQITNLRKYFHFKSNTSTFHESIVENDLKLSTLNLKDKNLLENDPHTERRTKIQEWARKSLHGRHLSELSQNYVDKTASNEWLRRGELFPETEGFMLAIQDQVIETKNYQKYIIKKTNLNTDICRRCNRASETIQHITGACMSIAQTDYKHRHDQVAHIIHQKLAIKYKLSSALPVPYYKYTPECILENEFYRLYFDRAILTDKTVPYNRPDITFIDKINKTAQIIDIAIPNSHNLQTTFSEKLTKYEELKDEIIRLWKLKKVTIVPVVISSTGVIPKNLHQSIKTLDLPPYTYALLQKAAILNTCRIVRKFLSITNC

SEQ ID NO: 15742 - protein, 1311 aa, Heliconius numata
MKKSNHRYNLRPLPGVRRGAPGADAGCLSIRAVGDEELSRRALIGLDPENNTAEQSPSLSPISSLHPFSSPSSSNYSYTSSPTSSSSHSGRNMILEDVVQEANANVSVPTFMIPKVRNKWSREMNEFILRTYLHLTLLETHTNTYLLPLYTKFIEKYPHMKVTRQRVGDQRRAIVRNKLLPQNIIDKIYQEVKKELENIISTDQQLPTNNNMLNSQDGQRMKWNEQYNEAILRAYFKITRLETNKTAYRKYLHQDFITRFPHLSHISEQRIADQRRSIVKNKLLSTEKIEDIRIQIAEELQIEVQNYQSEINVANTNNTNNEELDYFDNYTDELLNNTNNCNPDQQTNLERNIEIDNIFNECLAYFTNTEPTKRNHIPRQRSSKKLALIIEYINTILLPEYINKDTTFPSFQTVIYCAAWTAAKMNGAKLRTTPNVIVTKSKVKKPKWQTRLEKKVNDLRTKIARLTQFIKGNRSKKLIHHVNLIKSNYKIHSTHEEPNTELFHFLDTLKQKLTLTNSRLQRYKICTLRKTQNNQFSSNEKQFYRNLKNSTKNDIENSVQTTPTADDFHKYWTSIWENPVEHNFSADWINYEQMQNQIKTDMKFDEITLGMLQLTIEKLSNWKAPGSDFIHNFWYKKFTYIHKHLLKHINHFIQNPHDMPEYITVGITYMIPKDSNSLNDPSKYRPITCLQSIYKIITSCLAKIIYKYLEDNKILAEEQKGCKKFSQGCKEQLIVDSVILKQAHQKKKDIFTMYIDYRKAYDSIPHSWLLQVLDIYKIHPTIQQFLKNTISQWTTKLKLTNLDNTIDTVPIKITRGIFQGDALSPLWFCLALNPLSNILNSVQAGYKLKFNNDSVNKTKYKIINHLLYMDDIKLYAETKEDLNKLVNLTETFSQDICMEFGIDKCKINSSKAGQNYMHDYLLKNGEHIESLMENETYKYLGYIQSKLTHHKEVKANLTKQFKHRLNSILKSKLNSKNTIKAINSYAIPILTYSFGIISWNKTELKNLQRIINTTLTKNRKHHPRSCVQRMTLQRIDGGRGLIDIVNLHNKQITNLRKYFHFKTNTSTFYESIVENDLKLSTLNLKDKNLLENDPHTERRTKIQEWARKSLHGRHLSELSQNYVDKTASNEWLRRGELFPETEGFMLAIQDQVIETKNYQKYIIKKSNLNTDICRRCNRASETIQHITGACMSIAQTDYKHRHDQVAHIIHQKLAIKYKLSSALPVPYYKYTPECILENEFYRLYFDRAILTDKTVPYNRPDITFIDKINKTAQIIDIAIPNSHNLQTTFSEKLTKYEELKDEIIRMWKLKK

SEQ ID NO: 15743 - protein, 1365 aa, Heliconius atthis
MKKSNHRYNLRPLPGVRRGAPGADAGCLSIRAVGDEELSRRALIGLDPENNTAEQSPSLSPISSLHPFSSPSSSNYSYTSSPTSSSSHSGRNMILEDVVQEANANVSVPTFMIPKVRNKWSREMNEFILRTYLHLTLLETHTNTYLLPLYTKFIEKYPHMKVTRQRVGDQRRAIVRNKLLPQNIIDKIYQEVKKELENVISTAQQLPTNMLNSQDGQRMKWNEQYNETILRAYFKITRLETNKTAYRKYLHQDFITRFPHLSHISEQRIADQRRSIVKNKLLSTEKIEDIRIQITEELQIEVQNYQSEINVANTNNTNNEELDYFDNYTDELLNNTNNCNPDQQTNLERNIEIDNTFNECLAYFTNTEPTKRNHIPRQRSSKKLARIIEYINTILLPEYINKDTTFQSFQTVIYCAAWTAAKMNGAKLRTTPNVIVTKSKVKKPKWQTRLEKKVKDLRTKIARLTQFIKGNRSKKLIHHVKLIKSNYKIHSTHEEPNTELFHFLDTLKQKLTLTNSRLQRYKICTLRKTQNNQFSSNEKQFYRNLKNSTKNDIENSVQTTPTADDFHKYWTSIWENPVEHNFSADWINYEQIQNQIKTDMKFDEITLGMLQLTIEKLSNWKAPGSDFIHNFWYKKFTYIHKHLLKHINHFIQNPHDMPEYITVGITYMIPKDSNSLNDPSKYRPITCLQSIYKIITSCLAKIIYNYLEDNKILAEEQKGCKKFSQGCKEQLIVDSVILKQAHQKKKDIFTMYIDYRKAYDSIPHSWLLQVLDIYKIHPTIQQFLKNTISQWTTKLKLTNLDNTIDTVPIKITRGIFQGDALSPLWFCLALNPLSNILNSVQAGYKLKFNNDSVNKTKYKIINHLLYMDDIKLYAETKEDLNKLVNLTETFSQDICMEFGIDKCKINSSKAGQNYMHDYLLKNGEHIESLMENETYKYLGYIQSKLTHHKEVKANLTKQFKHRLNSILKSKLNSKNTIKAINSYAIPILTYSFGIISWNKTELKNLQRIINTTLTKNRKHHPRSCVQRMTLQRIDGGRGLIDIVNLHNKQITNLRKYFHFKSNTSTFHESIVENDLKLSTLNLKDKNLLENDPHTERRTKIQEWARKSLHGRHLSELSQNYVDKTASNEWLRRGELFPETEGFMLAIQDQVIETKNYQKYIIKKSNLNTDICRRCNRASETIQHITGACMSIAQTDYKHRHDQVAHIIHQKLAIKYKLSSALPVPYYKYTPECILENEFYRLYFDRAILTDKTVPYNRPDITFIDKINKTAQIIDIAIPNSHNLQTTFSEKLTKYEELKDEIIRMWKLKKVTIVPVVISSTGVIPKNLHQSIKTLDLPPYTYALLQKAAILNTCRIVRKFLSITNC

SEQ ID NO: 15744 - protein, 927 aa, Cataglyphis niger
MLARKEVQLMTQDRPPRFINQELLKAFPHRTLEAIKGRRKRLDYKELIEAFQQESEPQGSPDQQSEEEEDHPDDPFLTFLEALSRPRNQDFQALRLHKIALEARMHGKASTLQKLALYLREIFPPPHTKRKQKQPRVPEIIELSNRQIRRKKFAETQRMWRKNRQRCITSILEDLDSVTHPPREIMEPYWSKVMITHSDAAPSFRRERHVDGIWQPITSEDLKWGRVQRASAAGPDGVSPRLFRAIPAETLIRIYNLLLWCGKLPEELLKSRTVFLPKKKDATEPGDFRPITIPSVLVRGLHKILAKRMESNLDIDARQRAFRNTDGCADNTFLLDVLLRTHRRKFKSLYMASLDISKAFDSVSHPAIAAALTEIGIPEPMISYLIEIYKESRTYLEEDTWTSAPIHPKRGVRQGDPLSPVIFNIVTHQLLQKLSNDVGVRLGETTVNATAFADDLLLFATTPQGLQQLINQVAAYLGNCGMAINPAKSLTLSIKAAPHIKKTAVDATTTFMCEGQHLPSLQRTDKWRYLGVIFTPEGRTLCRPGETLTPLLENITRAPLKPQQRLFALRTMVVPKLYHQLALGSVTIGTLNKVDKMIRATVRKWLALPHDVPSAYFHAAIKDGGLGVPSLRWSAPLQRRGRILARNTHYQRGFDDYANEELARCTKRLTDHGKILNSTDLVNQRWANALYEKIDGGGLKESRKTLHQHQWVADGTAFLSGKDYINCNRLRIGALPTKSRSSRGRTQDRRCRAGCFAQETLNHVLQQCHRTHASRIKRHDAILNYMERGIRRSGYEIHREPHYHTTIGLRKPDMTAILGQTAVVIDAQVVSEQADLDKAHKKKVDYYKQIQQDIKKKHNIRTIKFTSATLSWKGVWSSNSAQELQTLGLLRSTDLKIVSTRVLVGGIAAYRTFNATTSCLEWRSGIG

SEQ ID NO: 15745 - protein, 903 aa, Sinella curviseta
MSVLHQFEVRLREILELEEMDDEKLAQFTTILEEMTEAAKKELKLPPPPTTNKTITALDLHDCKFIQKLYSRNRRRAIRLITQGDSESCPVDPVAVEQFFTQRRGPKQMDPTFYNTPEEDTRQPVRLSPFTSEEVIKRLKKFENTAPGDDRIIYRHWASLDPSGDIMSLIFNICLKFRKIPAAWKTSRTILIFKKGDVTNLANWRPISILRTIYKWYCGLLTTRLSKWLVENNILSDAQKGFMPYDGVFEHNFMLQYYMNEARRTKTDICIAWLDFSDAFGSVPHQAPVAALTHYGAGQHICDIVADMYQNATTQVCTPLGTTNPIHLQSGVHQGDPLSGILFNMVINPILERVDEGVQDKHSVLAFADDVTPLGWTEEELQRRIDIIINEGKRISIHPNPDKCVSLHLSGKTPVGARNTTFMVDGEFIKFLNDGESTKFLGKPVGYMVVPSDAQLQKYIETGTKILESRLSPWQKIDAMKTFFYSSLTFAMRTGQFPKTDWNKLDEALRPLFKQVLYVPPRATNHYLYGSTRAGTCGIPIAAEDCDLFAIDNAYKLLTCPDPIVQAAAELELNETVKARLARAVTRDDELDFLSGENEGEYRSRSNAHKNSWTTARMASTHMQISWVKEGAEIRLNCGEYKPIITPKQRLTVASTIRNSRRMDRNTELIRMPDQGKAMECVALSTASHSFIRNGTYVRFADWRFIHRARLNLCPVNAAIRWDPNSNKSCRRCGFPRETLAHVLDHCMGFSGTSYTRRHNDIVGRIKAAAESRFTLVSENKAVDNSGLRPDLVIRNGRDAYIIDVTIPFDNRMEAFEEAANLKKTKYEPLITRFQRHYYYKNVTVVPFIIGALGSWWPGNDTFMKKLCAKSYGAQMRKLCVTDVIRWSRDIYMHHITGKQQFT

SEQ ID NO: 15746 - protein, 1360 aa, Sinella curviseta
MRQPTRDESTLTIFHPPPGTFSCTEDPCPSHFQANNWTASRRSLERHLETVHEIRITSTINLCDQCSANMGDRPANHPCYDAHGANNTSQQEEQVHRFACIICPRTFPTKVGLRNHLQWHKKEGIQQTTKPSPATSDSATGARRNSTGNPPPPPPPTSTNTGAPPPARRRSLADAQQPNTSTTAAASSSRSRRASAHSQQLDSDVNPAPPSNTRNSRGSSRSEAPVVGEAAGSSSQQSAEVAMPNPRRRIRSSTDTPAPPAASSSSPPPAATTRSRRASTRLQQQDSDVDNASNPNNQNGGTSRSDASVVVDEVASSLPRQREPPQPNQTRRGTLRLPTRTTNNTSPTTTPWGPLNRAISPSLLSLVSNTNEAPPPVSPVFQEPEADPPINNPPGPVTGEGQQNDILNSSTTSSSDSGNDGDGAPPPEDGEEGDIVINPTQPEETSTTSPNHINPEDMSVLHQFEDRLREILELEEMDDEKWAQFTTILEEMTEAAKKELKLPPPPTTNKTITALDLHDCKFIQKLYSRNRRRAIRLITQGDCVSCPVDPVSVEQFFTQRRGPKQMDPTFYNTPEEDTRQPVRLSPFTSEEVIKRLKKFENTAPGDDRITYRHWASLDPSGDIMSLLFNICLKFRKIPAAWKTSRTILIFKKGDVTNLANWRPISILRTIYKWYCGLLTTRLSKWLVENNILSDAQKGFMPYDGVFEHNFMLQYYMNEARRTKTDICIAWLDFSDAFGSVPHQAPVAALTHYGAGQHICDIVADMYQNATTQVCTPLGTTNPIHLQSGVHQGDPLSGILFNMVINPILERVDDVVQDKHTVLAFADDVTPLGWTEEELQRRIDIIINEGKRISIHPNPDKCVSLHLSGKTPVGARNTTFMVDGEFIKFLNDGESTKFLGKPVGYMVVPSDAQLQKYIETGTKILESRLSPWQKIDAMKTFFYSSLTFAMRTGQFPKTDWNKLDEALRPLFKQVLYVPPRATNHYLYGSTRAGTCGIPIAAEDCDLFAIDNAYKLLTCPDPIVQAAAELELNETVKARLARAVTRDDELDFLSGENEGEYRRRSNAHKNSWTTARMASTHMQISWVKEGAEIRLNCGEYKPVITPKQRLTVASTIRNSRRMDRNTELIRMPDQGKVMECVALSTASHSFIRNGTYVRFADWRFIHRARLNLCPVNAAIRWDPNSNKSCRRCGFPRETLAHVLDHCMGFSGTSYTRRHNAIVDRIKAAAESRFTLVSENKAVDNSGLRPDLVIRNGRDAYIIDVTIPFDNRMEAFEEASNLKKTKYEPLITRFQRHYYYKNVTVVPFIIGALGSWWPGNDTFMKKLCAKSYGAQMRKLCVTDVIRWSRDIYMHHITGKQQFT

SEQ ID NO: 15747 - protein, 1069 aa, Sinella curviseta
MPPIPITKRRHSRSDASVVVDEVASSSPRQREPPQPNQTRRGTLRLPTSTTNNTSPTTTPWGPLNRAISPSLLSLVSNTNEAPPPVSPVFPEPEADPPINNPPGPVTGEGQQNDTLNSSTTSSSDSGNDGDGAPPPEDGEEGDIVINPTQPEETSTTSPNHINPEDMSVLHQFENRLREILELEEMDDEKWAQFTTILEEMTEAAKKELKLPPPPTTNKTITALDLHDCKFIQKLYSRNRRRAIRLITHGDSESCPVDPVSVERFFTQRRGPKQMDPTFYNTPEEDTRQPVRLSPFTSEEVIKRLKKFENTAPGDDRITYRHWASLDPSGDIMSLIFNICLKFRKIPAAWKTSRTILIFKKGDVTNLANWRPISILRTIYKWYCGLLTTRLSKWLVENNILSDAQKGFMPYDGVFEHNFMLQYYMNEARRTKTDICVAWLDFSDAFGSVPHQAPVAALTHYGAGQHICDIVADMYQNATTQVCTPLGTTNPIHLQSGVHQGDPLSGILFNMVINPILERVDEGVQDKHSVLAFADDVTPLGWTEEELQRRIDIIINEGKRISIHPNPDKCVSLHLSGKTPVGARNTTFMVDGEFIKFLNDGESTKFLGKPVGYMVVPSDAQLQKYIETGTKILESRLSPWQKIDAMKTFFYSSLTFAMRTGQFPKTDWNKLDEALRPLFKQVLYVPPRATNHYLYGSTRAGTCGIPIAAEDCDLFAIDNAYKLLTCPDPIVQAAAELELNETVKARLARAVTRDDELDFLSGENEGEYRMRSNAHKNSWTTARMASTHMQVAWVKEGAEIRLDCGEHKPTITPKQRLTVASTIRNARRMDRNTELIRMPDQGKVMECVALSTASHSFIRNGTYVRFADWRFIHRARLNLCPVNAAIRWDPNSNKSCRRCGFPRETLAHVLDHCMGFSGTSYTRRHNAIVDRIKAAAESRFTLVSENKAVDNSGLRPDLVIRNGRDAYIIDVTIPFDNRMEAFEEAANLKKTKYEPLITRFQRHYYYKNVIVVPFIIGALGSWWPGNDTFMKKLCAKSYGAQMRKLCVTDVIRWSRDIYMHHITGKQQFT

SEQ ID NO: 15748 - protein, 1074 aa, Aurelia aurita
MKALTVLGLVLVLTICDYCGKDFQVLGRHRWRCRGKLNNSRQGDNHGNGYESVIREASYSISDNNSILSQNQQTITKCCCGKVCKGLRGLKIHQRSCRVILGLGQEITDAIIDAENEEDHATVSDTEGQIYDENNEPILKAGVKLPKSAQQWKAAEDHFRETLASREISPNCLNENIEEMNRSLYDYFAGKYGKENDKCPSELAERYKDKTKNDLKRILKTLKNSPPENVDSAEIKYVAKLLRQKIKDNAENQVPFSTSEDHNILVQKNVWNYAKKFITKRLEILPTFPKIDCIEYFKKTFSVINPRKLFRVPDHIPKFDKPSTEFDLKEPTYQEVTRIIRRMKTSGSPCPLDQISIICLQRMPYLRTYIHRILVEAWKAGSVPSTWKKAVTVLIHKKGDPHVPANFRPITLESVPLKVFTSLIRNRMFDFLLKNKYLEHDIQKGFIPKLSGTYEHTAQMAFLINQARLKQRSLFITLLDLRNAFGEVHHNLIQETLRFHHVPVEIQSLIKDLYTDFKTSIITAGYATPFIPVTKGVLQGDCLSPLTFNMIFNIFIQLIGKEEYTQLGYKHDAFLRPRNWLQFADDACVVTGQEYENQILLNCFTAFCSWANMEARPDKCKAFGMMKVNTNCSQVSPKVFVSNQRIPPVSSTDSFTYLGRSFNFKMDNEEHKKKLLETSNLLLEAISRLPLHPKNKILLYSTYFMSKVSWDLTIADLDITWVKQNLDSLAHRYIRLWLEIPISGTLDIIGLTKEKCGLGIIDPSTKFSQCQVSLRNCLKKSPNEDIQSLHKVTSRDKNVQYDTYANGKEVIKENRKKKVHRITQELTSQGLILKAILEHTTNKITSIWSEAQKLLPKNIFNFSVRYLNNSLPTKKNMKLWGRVESESCNFCQLPQTLLHVVSGCKSMLEGKRYTWRHNSVLLTIGNFLTGIRNITVYADDIPGFRPSAIITGNSKRPDLLVIKEGVLYVLELSVGFETNIGKNEAHKNRRYEHLLKDLSSSYLRVEYINLSMGAIGTIGINGHKAFMNMLEQLSTNKQEQLYLEKKIITICIRCTYYIFCKRDSEWTSPELLTF

SEQ ID NO: 15749 - protein, 981 aa, Tuta absoluta
MSQRSQPLSSDPSNSQTHPQGISNFLCNLCTDLPRYFRTKRGLNSHIAKTHKPGPDKPNESVINPITASVHPFPQSTPRSTPSHDSKPLWQQLSEWKNNIPVIKRIPRGARLSVASALKAAIDRVVSSNCRVKWEELLSFSYRILHVNKNDDTKISLTQKVKNNCSEPPDSPISRQTSPKNSSSKNQRTVYKKVEEKVGDGDLRGASQLLFSNDMIAPNNEETVHSLRCKHPLPSSSTQIPDITQSSSSLPRVTPEDILAAITSFKNGSSGGLDGLSPQHLKDLICYSTGDAARALATSLASLADLMLSGSVNEEVTEILYGANLCALKKKDGGIRPIAVGTTFRRLVSKMSCKHIMPSLASRFQPIQVGFGSKGGCEAAVHATRTFLNESDDGCVLLKVDVKNAFNSIDRATLLSQIKEHIPAVYPYLWQCYSRPSKLLYKEHLLHSSVGCQQGDPLGPAIFSLGIHPTISSLGSKFNVWYLDDGTLGGQPDTVLDDLKTLIHGFADIGLELNFSKCELYIHPSATPNARQEILSKFNAVAPDIQIATEATLRLLGAPLLDDAIPCFIDEQVFKFRDSLGRLLEINPHMAITIIKFCLFVPKFTYVLRCCHLWKFKNLLAEMDDHIYNLLIKILNCHLTPEAWTQASLPIRFGGIGIRRISSVSLPAFLASASGCMSLFHKIIGTSLGRVDVSFLSEAVNEWKSFTSCDLPSSLHSQGQWDEPLCKRVQSDLLDSCVSTPDRARLLAAFERESGLWLNALPSANIGTLLDSCSLSLVIGLRLGLRTNQPHDCGCGAHVNHFGHHGLSCRKSAGRIPRHSALNDIIRRALVSANVPAKLEPNGIVRSDGKRPDGVTLIPWQHGRSLVWDVTCVDTLASSHLQATSAQAGSAAANAEGAKVRKYAEIAESYMFAPIGFETLGPWGPEAKKFVKDVSVRIYKTSGDRRAGSFLAQRISLAIQRGNAASMLGTMSSGYASEGLI

SEQ ID NO: 15750 - protein, 981 aa, Tuta absoluta
MSQRSQPLSSDPSNSQTHPQGISNFLCNLCTDLPRYFRTKRGLNSHIAKTHKPGPDKPNESVINPITASVHPFPQSTPRSTPSHDSKPLWQQLSEWKNNIPVIKRIPRGARLSVASALKAAIDRVVSSNCRVKWEELLSFSYRILHVNKNDDTKISLTQKVKNNCSEPPDSPISRQTSPKNSSSKNQRTVYKKVEEKVGDGDLRGASQLLFSNDMIAPNNEETVHSLRCKHPLPSSSTQIPDITQSSSSLPRVTPEDILAAITSFKNGSSGGLDGLSPQHLKDLICYSTGDAARALATSLASLADLILSGSVNEEVTEILYGANLCALKKKDGGIRPIAVGTTFRRLVSKMSCKHIMPSLASRFQPIQVGFGSKGGCEAAVHATRTFLNESDDGCVLLKVDVKNAFNSIDRATLLSQIKEHIPAVYPYLWQCYSRPSKLLYKEHPLHSSVGCQQGDPLGPAIFSLGIHPTISSLGSKFNVWYLDDGTLGGQPDTVLDDLKTLIHGFADIGLELNFSKCELYIHPSATPNARQEILSKFNAVAPDIQIATEATLRLLGAPLLDDAIPCFIDEQVFKFRESLGRLLEINPHMAITIIKFCLFVPKFTYVLRCCHLWKFKNLLAEMDDHIYNLLIKILNCHLTPEAWTQASLPIRFGGIGIRRISSVSLPAFLASASGCMSLFHKIIGTSLGRVDVSFLSEAVNEWKSFTSCDLPSSLHSQGQWDEPLCKRVQSDLLDSCVSTPDRARLLAAFERESGLWLNALPSANIGTLLDSCSLSLVIGLRLGLRTNQPHDCGCGAHVNHFGHHGLSCRKSAGCIPRHSALNDIIRRALVSANVPAKLEPNGIVRSDGKRPDGVTLIPWQHGRSLVWDVTCVDTLASSHLQATSAQAGSAAANAEGAKVRKYAEIAQSYMFAPIGFETLGPWGPEAKKFVKDVSVRIYKTSGDRRAGSFLAQRISLAIQRGNAASMLGTMSSGYASEGLI

SEQ ID NO: 15751 - protein, 982 aa, Tuta absoluta
MSQRSQPLSSDPSNSQTHPQGISNFLCNLCTDLPRYFRTKRGLNSHIAKTHKPGPDKPNESVINPITASVHPFPQSTPRSTPSHDSKPLWQQLSEWKNNIPVIKRIPRGARLSVASALKAAIDRVVSSNCRVKWEELLSFSYRILHVNKNDDTKISLTQKVKNNCSEPPDSPISRQTSPKNSSSKNQRTVYKKVEEKVGDGDLRGASQLLFSNDMIAPNNEETVHSLRCKHPLPSSSTQIPDITQSSSSLPRVTPEDILAAITSFKNGSSGGLDGLSPQHLKDLICYSTGDAARALATSLASLADLMLSGSVNEEVTEILYGANLCALKKKDGGIRPIAVGTTFRRLVSKMSCKHIMPSLASRFQPIQVGFGSKGGCEAAVHATRTFLNESDDGCVLLKVDVKNAFNSIDRATLLSQIKEHIPAVYPYLWQCYSRPSKLLYKEHLLHSSVGCQQGDPLGPAIFSLGIHPTISSLGSKFNVWYLDDGTLGGQPDTVLDDLKTLIHGFADIGLELNFSKCELYIHPSATPNARQEILSKFNAVAPDIQIATEATLRLLGAPLLDDAIPCFIDEQVFKFRDSLGRLLEINPHMAITIIKFCLFVPKFTYVLRCCHLWKFKNLLAEMDDHIYNLLLNCHLTPEAWTQASLPIRFGGIGIRRISSVSLPAFLASASGCMSLFHKIIGTSLGRVDVSFLSEAVNEWKSFTSCDLPSSLHSQGQWDEPLCKRVQSDLLDSCVSTPDRARLLAAFERESGLWLNALPSANIGTLLDSCSLSLVIGLRLGLRTNQPHDCGCGAHVNHFVHHGLSCRKSAGRIPRHSALNDIIRRALVSANVPAKLEPNGIVRSDGKRPDGVTLIPWQHGRSLVWDVTCVDTLASSHLQATSAQAGSAAANAEGAKVRKYAEIAESYMFAPIGFETLGPWGPEAKKFVKDVSVRILVRIYKTSGDRRAGSFLAQRISLAIQRGNAASMLGTMSSGYASEGLI

SEQ ID NO: 15752 - protein, 1152 aa, Osmia bicornis
MATNDEASNAELPGPGSSVTDLSVSQGTLDDDMALNKDTTIITVPFGDDGTLCPICLQKQLNLSFLAVRDMAKHIEKHHLLNSILWMCKFCGKSFTRVHGWSVHTSRCKGQTNNEEYEYKCDACGDTFEKQVGLSIHELHRHPAIRNAKRKALAEKPKLTGGRKLSVWSEEEIALLQSLEETYGQSRYPNKEMVRFFSNKSIKQISDKRKDLRKQKGTNINEEVEEENINTEEGNREEVETEQQVRNTDNLRGENESTNDDENVVTVDRHEVVYRRWLNVFLLDSIDVPEIVSELYAKLKLLWSNYIESSIELNKEIEKYIENELIPFLSKSVNDNNRNGKENKTNRRVIRRKRRKNNHVNRKRFSYTRCQTIYNECPKKLADMVVKGDFSLLEMPQSGPSASDVENLYKTLWGTPGPNQETVSVLNPTQAEEFSPISPYDVRVRINKLQNKSAAGLDGLQKKHLLVNGIEIILAIVYNIVLYKSYYPKIWKINRATLIPKSGQDLSRAENWRPITVSSVLSRILSALIDNRLRGIITQSPRQKGFTSENGCKNNIMLLNNAIKLAKVMNGGVVSVLDVSKAFDTIPHQAIKNNLIRKGVPAVICDLVENMYTEGMTKIKTQDGYVEIKLKRGVKQGDPLSPLLFNLCMEELLDDLQDKTTGLSISVINDYKVAILAFADDFALLSENKEEAQVQLDRVHQYLNRLGMSLSPSKCLTFEIKQCGDTWYTLDPNVSVAGDKIPNAEPDKIFKYLGAKIGPWKGIESGIVVPDIVYIIKRARKLPLKPYQKVEIITSYIIPRFIYGLLTYPPGDSTLKLLDSEIRQQIKEILHLTPSTTINFFYARKVDGGLELPRLEYIVKLGVLRNAIKMKTSIDIAVRDVANEGSTDKMLKAIANSLRINWPATLEDIEAAKKRLKAQSTKDWKLLHIQGQGVSEFCNDPIGNKWLKYPAMLKASRFIDAIRLRTNTFGTKVTLSKASKSTDTICRKCKMQPETLGHVIGQCTYTKGLRIKRHNEIRDLLVKKLGTENEVTVEPSLTVSGKLLKPDIIVKNEKQVFVVDITVRYEHREYLKNAASEKINKYTPCLKLLKQKYKLNEGKVVPIVIGCRGAIPKFTKENWKKILGISINDLLTASLIALRSSIETANIFIDYN

SEQ ID NO: 15753 - protein, 1209 aa, Alatina alata
MERIKRRWDQQFPERKNVSKQNLRDNALRFRNEFQRHSPSRSTEGEKVSQSGEIENGQTEKTNTEWTNEMKINLIRIDREERGKGRGFMKRMKEAWDLLYSDKSMSAQCLRDNAIRFKKNKALLNLIEVRDRTDLGATELVEEQCIRAIGGEEYQIKDEMVDETNENGVERNENWGNEVEELKTEFMRNMAKLTSTTKDTIETRERLIKVKARIKTKEIENANKVLEDYLKNVDDMCTIVDATYAMARTMEERLGLKRRTKRVTTKKNENRRIRRMKKKLKDTRQLLARISNDIHRRKLKRKATEKEKKILEDLKEKARSPLTSKEQLVITKEKWLEELRYMKIKIIKITTRDAKIRNNNMFKEDEGKLYRNTSIEEERTGSVPVMEKFVEFWAGIWEDDTRTPHRKWMETISEKIRRKITNILELDINEKSLHETVRKRKNWSTPGIDCIPNFWWKKLQGTWKALVKSINKWIEQPENIPKWITYGRTVLLPKLKDLSNERDYRPITCLNTCYKIFSGIIASYMKDHADRNNIWDRNQLGTCSDVLGTVDQLLVDNAIMDEVRVRKRNLAVAYYDYQKAYDMVRHDWMERVYIWMGIPEKVLKVLRTLMKGWKTRLEIQDNGKVKTSRWINILKGFLQGDSYSPVGFCLTEVPIAMLLEETDGYKMGQPGERHIKRTHSFFIDDLKVYQEDHRKLEVANEIIVKASMDTGACYGVKKCAEVVFREGKMIKGEGLTVLENKMKALDPNQNDNYKFLGCEQGDKICVKGVMERVKKEIRKRLAQLVKMNLYDANLIKAINSRVIPVAGYVMNVCKLTKGEIEELDKLVKGELRKKGFHGRQSSDERLYMKREDGGRGLKSFKDVYVETKVRVACYMATSTNEWIRAAWENEYRKEQTTIKREAEVAMCKVGKDVKFEIGYVEINNERFESWKEIWVKLSKYLKDGTKKNRMESLMNKSLQSEIPSGYDYQDHGWLQCNTDPQKTASIFSLQEQMIETRAWKKLRGLEDQDSCRLCGGYRETVQHLLAGCQQLAGTEYVRRHDNALKVLAVEWCIQEGLLPAETKWSKEKWEKGKVIEKNGKKMYWDWEHKMRMHCAARRPDLTLEDPEKRIIYIVDMACPSEANKNAKRTEKIQKYQPLCFEIRERREKFKVKVIPAIIGCLGGGMKQLLSDTGELFHENALGKICREMQKVVLWESETIIRKTMSGLIQ

SEQ ID NO: 15754 - protein, 920 aa, Paragonimus westermani
MHRRRNDRVQDVDAQHATVFDCADCDRTFPTKIGLSQHRRHAHPVERNRENLNHMKSAGTNWSQQESASLLKYADELAPSCPTRRELHNRLLSLFPGRTVESIRTRLYTLSWQRNPVPTANPVTVSQTNVTSGTESQAAENPEWFACLIQTVITQLESNSEASLQTDGLLAIARGLQAGIFTMVQAKSLLNMHAAQAFPYTWRLTTRRRARINVGALVTSKQIRRANYAAIQTLYHQRRKDAAFAVFSGNWRTAYKMNRGLPDSSNEYWSEVLSAHPHPDERPSRTILPPDWSLVDPITGDEVSRTLKQMENTAPGLDKLLPKHLKRMKADALAGYFNLFLLTQGCPIHLCRSRITLVPKVNNPSSPTELRPIAVSSTLIRCFHKILADRWNARLHLPALQFAFLHRDGCLEATSLLHALLRNSCATSSSLCAAFIDVSKAFDSISQDCIIRSAQAFGAPPPLTHYIADSYRNASVTLGSTVLRSQRGVRQGDPLSPLLFIMAMDEVLALSRPELGYQFHDTLVSGFAYADDLILLAENPTRLSEKLAAAASALELSGLQINTRKTKLMVIRGDHKHNVTAISNESIQFGPDTIRSLSAIDTVTYLGIPFTWKGKAFTNHRLQLRTMLDETTRAPLKPHQRLDLLRQHLIPKMNHSLILSRVHRNTLKAMDCTVRQFVRQWLRLPKDTPISYIHTPIRLGGLGIPSLSTTIPISRKSRLERLLSSQCPVLRNVVKDHSFGPILREVNVPVRVQGVVVTSKEEAHSAWSNKLYHSLDGCGLREVSRSPLSNRWLFNPDRIFPRIFIRAIQLRCSLLRTKVRNSRGDRSGQSVLCRGNCGQPESLAHILQSCWITHDARCARHNRVAKDLARRLRNLDYTVFEELRVPTASSFIKPDVIAVRGGAAVVLDVSIVDDYRCQLA

SEQ ID NO: 15755 - protein, 1006 aa, Paragonimus skrjabini
MHRRRNGAEQEVDSQPATIFDCANCDRSFPTKIGLSQHRRHAHPVERNNEKLISMKTAGSNWSQQESASLIRCADALAPLCPTRRELHHRLLLHFPGRTLESIRTRLYALNWQRNTAPAANPTTVPQINTTSDIESQAADHSEWFTCLIQTVITQLESNSEASLHSDELLAIARGLQAGIFTVVQAKSLLNKHASLAFPYTWRFVTRRRGRVYVGTHLTTKQIRKANYAAIQTLYHQRKKDAAFAVFSGNWRTAYKMNRGLPDNSNEYWSEVLSAHAHIDERPPRAILPPDWSLVDPISGEEVSRALKHMGNTAPGLDKLLPKHLKRMKADALAGYFNLFLLTQGCPVHFCRSRITLVPKVNNPSSPTGLRPIAVSSTLIRCFHKILADRWNSRLQLPALQFAFLHRDGCLEATSLLHAMLRNSCITSSSLCAAFTDVSKAFDSISQDSIIRSARAFGAPPPLTHYIADSYRNASVTLNGPVLRSQRGVRQGDPLSPLLFIMAMDEVLELSRPELGYQFHDTLVSGFAYADDLILLAENPTHLSEKLAAAASVLELSGLKINTQKTKLMVIRCDHKHNATAISDESIHFGPDVIHSLSASDTVTYLGIPFTWKGKAFTHHRQQLRTMLDETTKAPLKPHQRLELLRQHLIPKMNHSLVLSRVHRNTLKAMDCTVRQFVRQWLRLPKDTPISYIHTPIRLGGLGIPSLSTTIPISRKSRVERLLSSQCPVLRNVVRDNSFGPILREINIPVRVQGVVVTNKEEAHAAWMHKLYHSLDGRGLQEVSRSPLSNRWLFNPDRIFPRIFIRAIQLRCNLLRTKVRNSRGGRSDHSVLCRGNCGQPESLAHILQSCWITHDARCARHNRVAKDLAKRLRNSGYTVFEELRVPTASSFIKPDVIVVRDSAAVVLDVSIVEDYRSQFAWTDKIAKYGTDSHNAAIQSVLHTLGCDVNSVSHSPVIISFRGIIFPSSSNAILRLGLPSYAVTDLCLLTVLGSLKTYDTFMRGTWR

SEQ ID NO: 15756 - protein, 1012 aa, Paragonimus westermani
MHRRRNDREKDVDAQYATVFDCVNCDRTFSNKIGLSQHRRHAHPVERNRENLNHMKSAGTNWSQQESASLLKYADELAPSCPTRRELHNRLLSLFPGRTVESIRTRLYTLSWQRNPVPTANPVTVSQTNVTSGTESQAAENPEWFACLIQTVITQLESNSEASLQTDGLLAIARGLQAGIFTMVQAKSLLNMHAAQAFPYTWRLNTRRRARINVGALVTSKQIRRANYAAIQTLYHQRRKDAAFAVFSGNWRTAYKMNRGLPDSSNEYWSEVLSAHPHPDERPSRTILPPDWSLVDPITGDEVSRTLKQMENTAPGLDKLLPKHLKRMKADALAGYFNLFLLTQGCPIHLCRSRITLVPKVNNPSSPTELRPIAVSSTLIRCFHKILADRWNARLHLPALQFAFLHRDGCLEATSLLHALLRNSCATSSSLCAAFIDVSKAFDSISQDCIIRSAQAFGAPPPLTHYIADSYRNASVTLGSTVLRSQRGVRQGDPLSPLLFIMAMDEVLALSRPELGYQFHDTLVSGFAYADDLILLAENPTRLSEKLAAAASALELSGLQINTRKTKLMVIRGDHKHNVTAISNESIQFGPDTIRSLSAIDTVTYLGIPFTWKGKAFTNHRLQLRTMLDETTRAPLKPHQRLDLLRQHLIPKMNHSLILSRVHRNTLKAMDCTVRQFVRQWLRLPKDTPISYIHTPIRLGGLGIPSLSTTIPISRKSRLERLLSSQCPVLRNVVKDHSFGPILREVNVPVRVQGVVVTGKEEAHAAWTDKLYYSLDGCGLREVSRSPLSNRWLFNPDHIFSKIFIRAIQLMCSLLQTKFRNSRGDLGGQSVLCRGNCGQLESLVHILRSCWITHDARCARHNRVAKDMARRLCKLDYTVIEELRVPTASSFIKPDVIAVRGGAAVVLDVSIVDDYGCQLAWTDKIAKYGTDSHKAAILSTLYTMSCGVKYIFHSPVIISFIEIMFPSLCSAILRLGLPSYAVTDLCLLTVLGSLKTYDTYMRGTWRWLLPPP

SEQ ID NO: 15757 - protein, 878 aa, Trichomonas gallinae
MFMEDQVIQEKEKEKKKHIKKIQMLYPEDASRTYKFYIVGANYPTCPLNPQEVRDVLAQRYTEDLEYVAPTDDSLWYNAFTLNNNNREEMLIRLTDKNFFEEIIKERSSMSANGPDGLNYSVFKMQPEIAAECMAFISKMIIEHKQLPTSWKKSRTIMIYKGKGEAEQLGSWRPITISPCAYRIWSCAIARCLQDINSSHPLFHPSQKGFIKEVDGCLEHTVITTELFCDANRNRKDLYTLQIDLKDAFGSIPHNLLYETMKECGIPDAIRGAIMDAYNNDSTNIIIGNEKSEDLFLRRGVKQGCPLSPLLFNLCLNPLLKAINDANRGYHAGVHCISCQAYADDIILFAQSRQGMEDIIAILNQFLNYSKLKINASKCRSLAYILHPEHGRIFDTTPFTINGEAIPVATLADSLEYLGAAAAASVIIRAKHTDERIAATINEVRNIDLSGLKFNQKVDALKRFVIPKLDYLLTMGDPRLEDLKNMDKKIRKLISNSLNTTNIPKCFTDVAWQDGGLSIQPLYRRSLALKVKSLVSLLNSKNPQTKQLMHYFVESERRYRDIETDEESEFLDWALDENGAPRQRRNGTSSLVSKCLQAARKLNIAILKLDGKVYVRSQDGCAVNEKTAVIKLIMEQCREESRKKLENLPMHGHPFRNLKDNKNCNFFVGNRACRLPDKIVKFTVAARLNLLYDGYMHGRKNLPEDTGPSCPYCGATRSDTLEHKLNGCNFRAMTIRHNNIVNEISKDLKFKYPRMRISYNSTVRILNAPRITGESANLKPDIIAFDTRRIILIDITCPYDDFHANSNKTSMQLAYEEKLHKYDDLATQCQRRIGLKTTLIPVVVSSLGVMYHKSISDIKNISCTEMRNEKVTGFTCQI

SEQ ID NO: 15758 - protein, 987 aa, Muscidifurax raptorellus
MKLREFTARSLDSIKGQRKRADYKTLVEKFIREIRAQSVRQGETARSRETQARPVAVAPIASSSREPAVQTQPPPAGRVLRSHVKHVPATEVSATESDRDSSEDELFVDAEPVRLSDLPPDKFSLYFSGLEQPNTEHAHAHRLHTICLMTSWRSKEEVRIELGLFLKDLFRDTKERPQSRKNPPAPRNRVERRREEYKKCQDLWRRNKSTCVQRILKEDLSQGECLPRELMEPFWNATFTQNPGTAPVLPPPVEMYPSIKGNYPPQNTAVGVDGLSVGDLKEVSREMLARIFNLFMWCGKLPEHLCASRTILLPKKPEAKAPGEFRPITVSSVLIRTFHKVLAERLKVIPLDPRQRGFRESDGCAENVMLLDMTIRYHHERRRKMFLALLDMAKAFDSVSFESMKEVLTTKGLPTPFIDYFMTHLDDSFTVLQHGDWQSGKIHPTCGVKQGDPLSPPIFNFIMDEMLRRLPDEIGVNLDGLFVNSMAFADDLSLVANTERGLQVLINEATSFLGLCGLRANPSKCVTLAIKTIPKEKKTAIDPSSRFKIGNALIPSLKRTDEWVYLGIKFNANGRLISDAKPKLIKDLELLTKAPLKPQQRMWALKVIVIPGILYRGTLGNSTAGYLRSLDCVIRSYARRWLRLPGDCPNGYFHAAVADGGLGIYPIRYKAMLDRLTRLQKLEKSAYITGLEAARYLQRQISIAENRLRDGDNRIMCDAEMLRKFLKELLYKCYDGRPLENSSKVPGQHRWIEEPTRFLSGADYINCIRARIAALPTAARCARGRLKDKQCRGGCGNVETLNHVLQFCHRTHGTRIGRHDAVVKYVQRGLEKKGYAVTEEPKFVTKDAVYKPDLVATKEGCTLVLDAQVLGDQRDMKMAHDDKIRKYGALELKGKILNATGSTTIKILSITLNWRGLWGSDSVDGLLREGVILRKDLKIVSTRVLIGAIAGWRRFNERTSMARTGGMEAVTSRKVRRWKRKERAGVG

SEQ ID NO: 15759 - protein, 1048 aa, Eupelmus urozonus
MNVELQKFSTRPVDGIKGQRRRADYKDQVQKFVDELRSSEIPPAPPRPRTRAKKPAAEEADSQTAPRREGGYAAALRSGTRSRPPLTRSKAQGGDAAAVRLEKPSTSPVTDPTVPNPEILEKSLADLSLADSDPEPPVCSTGVNSGGEESSDEDLFEDAEPVRLSELPPDDFSSYFSSLAPPTTDDDWKTHRLYTISQMIFYRSKEDVSLELALFLKDLFPCPGNKEPGRKTKPAEPQNRVERRRMEYKRVQDLWRKNKTTCIKRILNEDLSQDEQLPREIMEPYWNATFTRNPGSAPVLPPPTMMYNSIWLPIHPNEIKGCYPPHNTAVGLDGLKVGDLKKMSRDLLAGIFNLFMWCGKLPEHLCASRTILIPKKKEAKAPGEFRPITVSSVLVRAFHKVLANRLKVVPLDPRQRGFREADGCAENVMLLDLIIRYHNERRRRMSMAMLDMAKAFDSVSFESMREVLTTKGIPPAFIDYFMGHLEDSYTVLQHGDWQSGRIHPTCGVKQGDPLSPPIFNFVMDEMLKRLPKDVGVNLDGLFVNAMAFADDLSLVATTEQGLQILINEATSFLGLCGLSANPQKCHTFTIKVIPKEKKTAVDPTCRFKIGSALIPALKRTDEWVYLGIQFTANGRLISDVKPKLLKNLELLTKAPLKPQQRMWALRVMLIPGILYQGTLGRTTLGYLRSLDVVIRANIRKWLRLPGDCPNGYSHAAIEDGGLGVQPLRYKTMIDRLARLRKLQDSSFLTGLAAGRYLEREASIVESRLRDESNIVLKDGAMVKEFLKKRLYASFDGRPLENSSKVSGQHRWVGEPTRFLTGADYINCIRARIAALPTAARVARGRLKDKQCRAGCGNVESMNHVLQFCHRTHGTRIRRHDAVVKYVQKGLEKRGFAVTYEPQYVVNDVRYKPDLVATKADRTYIVDAQVLGDQRDMRLAHQDKAKKYGGVELKNKILGETGSATIKVKSVTLNWRGVWGPESASELLQEGLILKKDLKTISTRVLIGALAGWRMFNERTSVTSGRREREHVASRMVRRWRRKERVGVG

SEQ ID NO: 15760 - protein, 878 aa, Pteromalus puparum
MFTEYFAALPTPDSDNDVAVRLHTICLMTSWRTKEEVLLELSLFLKETFPDKSQTNRPKRYKRPVPEPKNRVIRRREEYKRVQDLWRKNKSTCVRRILNEDLTQDECLPRELMEPFWTATFIQDPGTAPILPPPDTIFESIWSPIKPMDIKGHFPPHNTSAGLDGVRVGDLKRVPLELLARIFNLFMWCGKLPEHLCASRTIFLPKKKGVKTPGEFRPITMTSVLVRTFHKVLAERLKVVPLDPRQRGFREADGCAENVMLLDMTLKYHQEKRRKMFLAILDMAKAFDSVAFEAMRRVLDTKGIPAAFIDYFMGVLDDSYTVLQHGDWQSGRIHPTCGVKQGDPLSPIIFNFVMDEMLRRLPGEIGVSLDGFFVNAMAFADDLSLVASTKEGLQTLIDEATSFLGLCGLRANPLKCATLALMTVPKEKKTAVDPSCHFKIGNAVIPALARTDEWVYLGINFTANGRKISDAKPKLAKQLELLTKAPLKPQQRMWALRVMVIPGLLYQGALGQTTVGYLRSLDCMIRGAVRRWLRLPGDCPNGYFHAYIEDGGLGIQPIRYKTMLDRLARLQKLMKSSYIVGLEAGRYLERQISMAENRLKDAENRVIKTNTALREFLREFLYRSVDGRPLTSSSTVEGQHRWVGEPTRFLSGADYINCIRARIAALPTAARVARGRLKEKRCRAGCRDVETLNHVLQFCHRTHDSRIKRHDAVVSYIKKGLEKKGYAVSEEPEYLVEDRKFKPDLVATKEGRTVVVDAQVLGDQRDMRRAHEDKVRKYGEVPALRRKIKDTTRSELIKFTSATLNWRGLWSKDSVGDLLREGIILKGDIKTISSRVLIGALSGWRMFNRRTSMASNRPVATRDVRRWRRDGVERVGVG

SEQ ID NO: 15761 - protein, 1002 aa, Pteromalus puparum
MELIKFTTRSLEAVKGQRKRPDHKQQVLRYVRELRSRNQRSRQSGTRRRRGEPVPEPAPPSLAGPAGASLPSPARLSPSEQAPPRRRRVESPTNQSAGDSGDDASVDDLFEDAQPGRESDLPPDMFTEYFAALPTPDSDNDVAVRLHTICLMTSWRTKEEVLLELSLFLKETFPDKSQTNRPKRHKRPVPEAKNRVIRRREEYKRVQDLWRKNKSTCVRRILNEDLTQDECLPRELMEPFWTATFIQDPGTAPILPPPDTIFESIWSPIKPMDIKGHFPPHNTSAGLDGVRVGDLKRVPLELLAQIFNLFMWCGKLPEHLCASRTIFLPKKKGVKTPGEFRPITMTSVLVRTFHKVLAERLKVVPLDPRQRGFREADGCAENVMLLDMTLKYHQEKRRKMFLAILDMAKAFDSVAFEAMRRVLDTKGIPAAFIDYFMGVLDDSYTVLQHGDWQSGRIHPTCGVKQGDPLSPIIFNFVMDEMLRRLPGEIGVSLDGFFVNAMAFADDLSLVASTKEGLQTLIDEATSFLGLCGLRANPLKCATLALMTVPKEKKTAVDPSCHFKIGNAVIPALARTDEWVYLGINFTANGRKISDAKPKLAKQLELLTKAPLKPQQRMWALRVMVIPGLLYQGALGQTTVGYLRSLDCMIRGAVRRWLRLPGDCPNGYFHAYIEDGGLGIQPIRYKTMLDRLARLQKLMKSSYIVGLEAGRYLERQISMAENRLKDAENRVIKTNTALREFLREFLYRSVDGRPLTSSSTVEGQHRWVGEPTRFLSGADYINCIRARIAALPTAARVARGRLKEKRCRAGCRDVETLNHVLQFCHRTHDSRIKRHDAVVSYIKKGLEKKGYAVSEEPEYLVEDRKFKPDLVATKEDRTVVVDAQVLGDQRDMRRAHEDKVRKYGEVPALRRKIKDTTRSELIKFTSATLNWRGLWSKDSVGDLLREGIILKGDIKTISSRVLIGALSGWRMFNRRTSMASNRPVATRDVRRWRRDGVERVGVG

SEQ ID NO: 15762 - protein, 993 aa, Cecidostiba fungosa
MNMELIKFTSRSLESVKGQRKRPEHKQKVQEYVRELRSRNRRGRRSGTRSRRGEVAPETPSSAGEPSEAGSAPTAPRRQSSQRSRTPERDSDGDASVDDPFEDAEPGRESDLPPNVFTAHFAALPTPDNDNDGDMAIRLHTICRMTSWRTKEEVLLELSLFLKEILPNKSQTNRQKRPRRSEPEFKNRGTRRREEYKRIQDLWRKNKSTCVRRILNEDITQDECLPRGLMEPFWTATFTQDPGTAPVLPPSDTVFDSIWIPIKPMEIKGHFPPHNTSAGLDGVKVEDLKKLPLELLAGIFNLIMWCGKLPEHLCASRTIFLPKKKGVKTPGEFRPITMTSVLVRTFHKVLAERLKVIPLDPRQRGFREADGCAENVMLLDMTLKYHQEKRKKMFLAILDMAKAFDSVAFEAMREILTTKGIPAAFIEYFMGMLEDSYTVLQHGDWQSGRIHPTCGVKQGDPLSPPVFNFVMDEMLRRLPGEIGVSLDGLFVNAMAFADDLSLVASTEEGLQVLINEATSFLGLCGLHANPMKCATLAIRTIPKEKKTAVDSSCRFKIGNAVIPALTRTDEWVYLGINFTANGRKICDAKPKLTKQLELLTKAPLKPQQRMWALRVMVIPGLLYQGALGQTTVGYLRSLDSVIRGAIRRWLRLPGDCPNGYFHAQIDDGGLGVQPIRYKTMVDRLARLRKLRKSSYIVGLEAGRYLERQISNAENRLKDAGNRVINTNTELRVFLREPLYRSVDGRPLACSSTVLGQHRWVGEPTRFLSGADYINCIRARISALPTAARVARGRLKEKRCRAGCGDVETLNHVLQFCHRTHDSRLKRHDAVVSYVRRGLEKRGFLVSEEPEYTVEDRKYKPDLVATKEGRTVVVDAQVLGDQRDMKLAHEDKVRKYGGVPGLGRKIKEATRTELLKFTSVTLNWRGLWGQDSVGELLQEGIILRKDIKTISSRVLIGALSGWRMFNQRTVMASSRPVATRDVRRWRNRDRVGVG

SEQ ID NO: 15763 - protein, 892 aa, Tomocerus qinae
MLSHFLITKPDENEFNGVIEKLVLLLQNANDMLPGPKNPAKKYYDMRKRKTFVDTQRTYKKSTNPIRQTKRDKQKRKDKYLYDLIQYQYYNTKKKCVRNILSGDSKPCNIDLKSLHGSFTDRWSNINNLCRPTSCYHEIKAESQAVIDNSYNSTITLDEIKYAISGISSDSSAGSDQILIRTIKFLPCKQILAHIASIILKWNIIPSHFREGKTVLIYKAGDANDCSNWRPISICSFLRRIVERVFDRHLRSFCTFSCHQRGFTSKAGTLINTELLNQCLKKAKSKKEDISIILLDISKAFDYIGHNHLINSLNSIEIPTCLRNTIISLISNNYTFIETKKGRSEKIFLNRGIFQGLPLSPTLFNISIDFMLKSLSEKEISQSYGYSINSDNKLSVLGFADDTCLISDSSVHVHELFEIANNCLTEIGLNLNIEKCVSITLSKGVHIEEEIPIDLTHSIKPLKLGSSVRYLGVMFKDEAIFDENKFIAKFYKDMELLISTPLLNPLQKVTILNVYIWPRLTYSFQVAPLKSLKTKVLQTADKMIRSAIKEIINLPADTPSAMLYSPNKCKGLQLVKLEWEAFIQRYGSFNQLLTCNCPYLTDFNDYFLNEMESCLKKLKIDDIKSIETSIIPVKSNCSTITQKLRNYMREISFIEWTQLKQKGQGVILFKEYPQANKWISTQFGLSSNEWTTAIKMNCNVDAVRAIPGRSPENIQCRHCHTETETLAHVLGKCSKGELLRNNRHNKVRSLIADSFRKTNLWEVHEELHCILDNGSTGRIDILVINRKVNQAFILDPTVRMESDSDQPHNVNLEKTNKYSPAIGFFKNKFKIDDIHIVGLFVGARGTIPKFFSDFVKEFNLPLSLISDVVVTVIRGSINILHYHLYSDYKPHN

SEQ ID NO: 15764 - protein, 1067 aa, Tomocerus qinae
MDISNESEPPAINENTCYLCGNLFSDDDELAKYVQCDKCNGWYHTNCTDLKDLDLHEIESLDWECYYCHTGLPDVSGFLKIHLEGDSESNCQSNNKLSIPDTPCPICGFMCRGNRGVAAHKRARHQNDHRSDLLVTITNTSENSSNIDTESPPIDEKQKNEPLDSVKLELQCIESMLSQFLTTKPNEIEFNGVIEKLVLLLQNANDILPGPKNPAKKYYDMRKRKIFVDTQRSYKNNTNPIRQTKRDKQKRKDKYLYDLIQYQYYNTRKKCVRNILSGDSKPCNIDLKTLHRSFTDRWSNINNLCRPTSCYHKIKAESQAVIDSSYNSTITLDEIKYAISGISSDSSAGSDQILIRTIKFLPCKQILAHIASIILKWNIIPSHFREGKTVLIYKSGDTNDCSNWRPISICSFLRRIVERVFDRHLRSFCKFSCHQRGFTSKAGTLINTELLNQCLKKAKSKKEDISIILLDISKAFDSIGHNHLINSLNSLEIPTYLRNTIISLISHNYTFIETKKGRSEKIYLNRGIFQGLPLSPTLFNISIDFMLKSLSEKEISQSYGYSINSDNKLSVLGFADDTCLISDSSAHVHELFEIANNCLTEIGLNLNIEKCVSITLSKGIHVEEEIPIDSKVSIKPLKLGSSVRYLGVMFKDEAIFDEKKFIAKFYKDMELLISTPLLNPLQKVTILNVYIWPRLTYSFQVAPLKSLKTKLLQTADKMIRSAIKEIINLPADTPSAMLYSPNKCKGLQLVKLEWEAFIQRYGSFNQLLTCNCPYLAEFNDYFLNEMESCLRKLKIDDITSIETSIIPVKSNCSAITQKLRNYMRENSFIEWTQLKQKGLGVVLFKEYPQANKWISTQFGLSSTEWTTAIKMNCNVAAVRAIPGRSSENIQCRHCHTETETLAHVLGKCSKGELLRNNRHNKVRSLIADSFRKSNLWEVHEELHCILDNGSTGRIDILVINRKVNQAFILDPTVQMESNIDQPHNVNLEKTNKYSPAIGFFKNKFKIDDIHIIGLFVGARGTIPKFFSDFVKEFNLPLSLISDVVVTVIRGSINILHYHLYSDYKPHN

SEQ ID NO: 15765 - protein, 971 aa, Adoxophyes honmai
MFAIQNNDNLPRNQTPSHSSQIEFIQCPHCPAPKLLKGRRGLHVHIGKVHKFTNSQPNPTDAPALTPSAPPPEPLHYTLSRLKHSVPVLKRIPRGARFTVANSLSRVIDACIVENSPSSWENLFTFSYNIIHISDKDPKISLTSKIKSNCSKTHSTSTSHPSSSSPNFIRKHNSTCRLVESKINDGDLKGAAQLLFSSDTSAPDSPETLTALEAKHPPAPSHPNLPDPPDSGFPCLQASEDAVLAAINSFKNGSAGGLDGISPQHLKDLTSGLPGGQGQQNGLLCSLTRLTNMMLAGKMHPDIVPVLYGANLCALKKKDGGIRPIAIGSTFRRLTSKICCKIIFSVLQSKFQPVQLGFGSKGGCEAAVHACRTFLQNPANQVLLKVDVKNAFNSIDRGSFLKEIKKNVPSLYPFLWQCYSLPTKLLYNQNNIMSSVGCQQGDPLGPAIFSLAIHPIISELNSKFNVWYLDDGCLGGEANVVIDDLSSIISKFKSVGLEVNRDKCEIFISDDTINREEIMAKFQNICPGIKVLCKRSLHLLGSPIFEESFPDFIQNKISRFSDCSSRLLEINSHMAFSILRYCLFVPKFTYSLRCSPLWKSVQLCESIDKTLHLQFEKILNIKFNHQHFLQATLPVSFGGLGVRQICSVALPAFLSSVHSVLPLIGKILNPSLCDHDYEVAFLSDAENAWKVACPGEDPPYNKQVQRLWDYPVCQQIKTHLLDTCSSPSEKARLLASSEKESGFWLHAFPSKHFYTLLDDISFRIAVGLRLGADILVPHICPCGAAVDRLGHHGLSCSKSAGRLSRHACLNDVIRRALSSINVPALLEPAGLSRNDGKRPDGLTLVPWEKGRPLVWDATCVDTLAPSHLASSSLKAGGAAAQAEAAKRRKYTDLSGDYVFAAFAVETLGPWSQDAHKLFGKIKSKLYQITHDHRAGAFLAQRIGLAIQRGNAASVMGTLPQGGDLGDICTYN

SEQ ID NO: 15766 - protein, 971 aa, Adoxophyes honmai
MFAIQNNVNLPRNRTPSHSSQIELIQCPHCPAPKLLKGRRGLHVHIGKVHKFTNSQPNPTHASAPTPSAPTPEPLHCTLSRLKHSVPVLKRIPRGARFTVANSLSRVIDACVVENSPSSWENLFTFSYNIIHISDKDPKISLTSKIKLNCSKTHSASTSHPSSSSPNFISKHSSTCRLVESKINDGDLKGAAQLLFSSDTSAPDSPETLTALENKHPPAPSHPNLPDPPDSAFPCLQASEDAVLAAINSFKNGSAGGLDGISPQHLKDLTSGLPGGQSQQNGLLCSLTRLTNMMLAGKVHPDIVPILYGANLCALKKKDGGIRPIAIGSTFRRLTSKICCKIIFSVLQSKFQPVQLGFGSKGGCEAAVHACRTFLQNPANQVLLKVDVKNAFNSIDRGSFLKEIKKNVPSLYPFLWQCYSLPTKLLYNQNNIMSSVGCQQGDPLGPAIFSLAIHPIVSELNSKFNVWYLDDGCLGGEANVVIDDLSSIITKFKSVGLEVNRDKCEIFISDDTINREEIMAKFQNICPGIKVLCKRSLHLLGSPIFEESFPDFIQNKINRFSDCSSRLLEINSHMAFSILRYCLFVPKFTYSLRCSPLWKSVQLCESIDKTLHLQFEKILNIKFNHKHFLQATLPVSFGGLGVRQICSVALPAFLSSVHSVLPLIGKILNPSLCDHDYEVAFLSDAENAWKVACPGEDPPYNKQIQRLWDYPVCQQIKTHLLDTCSSPSEKARLLASSEKESGFWLHAFPSKHFYTLLDDISFRIAVGLRLGADILVPHICPCGAAVDRLGHHGLSCSKSAGRLSRHACLNDVIRRALSSINVPALSEPAGLSRNDGKRPDGLTLVPWEKGRPLVWDATCVDTLAPSHLASSSLKAGGAAAQAEAAKRRKYTDLSGDYVFAAFAVETLGPWSQDAHKLFGKIKSKLYQITHDHRAGAFLAQRIGLAIQRGNAASVMGTLPRGGDLGDICTYS

SEQ ID NO: 15767 - protein, 971 aa, Adoxophyes honmai
MFAIQNNVNLPRNRTPSHSSQIELIQCPHCPAPKLLKGRRGLHVHIGKVHKFTNSQPNPTHASAPTPSAPTPEPLHCTLSRLKHSVPVLKRIPRGARFTVANSLSRVIDACVVENSPSSWENLFTFSYNIIHISDKDPKISLTSKIKLNCSKTHSASTSHPSSSSPNFISKHSSTCRLVESKINDGDLKGAAQLLFSSDTSAPDSPETLTALENKHPPAPSHPNLPDPPDSAFPCLQASEDAVLAAINSFKNGSAGGLDGISPQHLKDLTSGLPGGQSQQNGLLCSLTRLTNMMLAGKVHPDIVPILYGANLCALKKKDGGIRPIAIGSTFRRLTSKICCKIIFSVLQSKFQPVQLGFGSKGGCEAAVHACRTFLQNPANQVLLKVDVKNAFNSIDRDSFLKEIKKNVPSLYPFLWQCYSLPTKLLYNQNNIMSSVGCQQGDPLGPAIFSLAIHPIVSELNSKFNVWYLDDGCLGGEANVVIDDPSSIITKFKSVGLEVNRDKCEIFISDDTINREEIMAKFQNICPGIKVLCKRSLHLLGSPIFEESFSDFIQNKINSFSDCSSRLLEINSHMAFSILRYCLFVPKFTYSLRCSPLWKSVQLCESIDKTLHLQFEKILNIKFNHKHFLQATLPVSFGGLGVRQICSVALPAFLSSVHSVLPLIGKILNPSLCDHDYEVAFLSDAENAWKVACPGEDPPYNKQIQRLWDYPVCQQIKTHLLDTCSSPSEKARLLASSEKESGFWLHAFPSKHFYTLLDDISFRIAVGLRLGADILVPHICPCGAAVDRLGHHGLSCSKSAGRLSRHACLNDVIRRALSSINVPALLEPAGLSRNDGKRPDGLTLVPWEKGRPLVWDATCVDTLAPSHLASSSLKAGGAAAQAEAAKRRKYTDLSGDYVFAAFAVETLGPWSQDAHKLFGKIKSKLYQITHDHRAGAFLAQRIGLAIQRGNAASVMGTLPQGGDLGDICTYS

SEQ ID NO: 15768 - protein, 1264 aa, Steinernema diaprepesi
MSSSSAPASTTPPPWTYEELSRLGRIITLNVDRGRIDWKGVHRDWLDYCQIPRSLNALQRKYKAYGPSGLLQAEEHAGNSIPSSPEHNNNNNAQAGIQYLPRHPEDNTQESIECFSGHEEDNIPERIQYLPRHAEENASGSTQCPSRQEEDNIPERIQYLPRHTEENASGTLNGTHRPTDINGNIIEQNNEENIDPRIPNLVLTRDELAELEQNYSTMYTTLTIHQIRQPIEKPYKLPNEAHRQWINSKLIETVEHMIIGDDRLKSTIDSLYAAAKSVSTLINKPIKEIAKQRKMKVDTEKRSLEALAHVIKETKEIIQIMRRGESLNTDRNILMRRIRHEMSREIDNRPWIVQMSQYLKNKREEYREKWIELKAEIQRIKRNKVRSQTQTDSEKGPADGNINPSRIRDFWMQIVGITQPFTTSEWLKEWEETHAMFTHEVIPRQAWTRDDIKEVLRKASPWKAAGPDGLQNWWWKWIPQAKEELLQFANLKLLTGQAIPAWLPQGKIVTLYKKGDKNDPANYRPISLLNTAYKIITGLLTQDFGNILPKTILPKEQQALIKGKWGCTHAHLLDRLVCVDSNSQKKRDLHIGWIDYAKAFDSVPHKYIQWILNRAGMPRNMNQLVLNLMAKWSVRFEAQIDGRKRLSQPLTIKNGVLQGDCLSPLLFCLSLTPISAWLNKHVPKYICSVGKNDPEIRTEINHIYYMDDLKIFCNNKRELKAALEGIKRESAGIGLKINPTKCAITHQETHNRDNTTTFDERIPILGATETYKYLGIDQRIKTNSISTWNRTLDSIRTQVPRIWKGERTFRQKVEATNAICGGEIRYLAGNLIFGSNKWLTHRKKAEGLDLEVRYILNNLKARYLHCNIERIYLPPEYGGWGLVSFVDITEDSTIYAWCYLHMQDDLRAMQVLDIREAKRNKRTLYKDVQTILSNYRISSMVQTGSYNNIIICGETYTNATKAARAIVGKIKTIRNQQRLDKWKDNNVSPRVIKSTDLDQTRSWLWLKKGHLRSEVVRNMFATQEAQLECRGAAKNVTQTNAECRYGCRTKETAQHIVSSCQKWLHNLYVQRHNAVALVIYNSLAWSLGITPTHYTKTPLEIKTSPKGTIYWDHEIKIANGQYKRRPDIIAVDIINETVTIVEVAISWYSNIQSQRETKIGKYTINSTFPHNYRGPFIPGPNVYEEIQKIYQGYKTTFVPVIIGTCGEIGKDLIKDLKGIKMPMKVLNETIELMSRTACLNTHRIIKNHLSRRTYQNGGDPQTQL

SEQ ID NO: 15769 - protein, 966 aa, Hypothenemus hampei
MARMEAQLLNDPTPPRHMNQALASKLTNRSLDAIKKCRQQQQYRSMVLRHSGEMSGPSSGRSPPSSCSGSCSSLASNDPLRVAPTSSIPQPNTDEFLNALTALMPLNTTSFNAQLLERIIATADPQDRAATLFAVAAYIDQTFMPTQPRLPRKGNGDHEAHLSNRAKRRQLYKRTQQQFNKNKSRCISNILQETGKNTRMPPRGIMEEYWRQTFEQNSILTPGLLEVPRDDLTNIWFPISPDEIQTALPRGRPAPGPDGVTASTIRKLPLAVMAAMANIILWTRKVPTRLLQANTTLIPKTRSGPGPGDYRPITIPSTIIRVIHKVLANRFTKALSLDLRQYAFRPTDGTAQAVSTLELILRERCETFQSTYVAVIDIAKAFDTVTHAAILDSLQSYGAPKPLCDYIKAVYELSNTTLIGDGWTSAPIRPRRGVRQGDPLSPLLFNILMDRLLRGLPEEVGVRFGGTRTNALAYADDMVLFASTPKGLQNLIDNVDEFLSKCGLSLNPAKSFSINIKGQPKQKNIVLEPSLGFLVRGRPIRALARGENWQYLGVTFDALGRVPIHINTLLQPQMNLISKAPLKPQQRLYALRAHVIPSILHTLTLGRTTLGSLRSVDRAIRATVRHWLNLPQDIPTAFIYTAARDGGLGIPSLRCSAPLLRYKRLSSMILPALGGTQAANTFIANEIDQAKRRLLLDGSYITTRLQLHKYWRSRLYISTDGAGLKEAAAVPGAHNWLVEPSRLLSGTDFIHCIKLRIAALPTKSRTSRGRPSMDRACRAGCQQPETCNHVLQICHRTHGQRIRRHDAALGYINGQLLRSGFSTSREPTFSLGNQKFKPDLVAFKNGQGHLIDAQVITDQYSLDLANQNKIKKYNQPDLTQAIKHRFDITALKIHALTLNWRGIWSKHSAQSLLEAKLLTKKDIALMSTRVLVGGLAEWRVFNRSTRWEPPRGRPPDPAQDSSRLLR

SEQ ID NO: 15770 - protein, 1090 aa, Hycleus cichorii
MTLYAHFSTYNGVRQHERQAHGDRYALEQLEIHGEVCTICDSAFANFAGLRQHHRNRHRDIPFEKEIQLIQRVATAEASLGGPMNYRKLIALTKLTHEQLRRLREKPTYKDVLFNIMDRNKVDIREVPVQDEHTSSADLHSDSTRRSVNLHSIRRSIAGSALGDRIAPVITTEPLSTLEAPCSLPGFSNIASDDVASGGSGALNRSQYQEQVNFDIDSNRDSIREYLTRAVINHQDSDLALSLLAAAALTSSQQDLLDSLDEYIRIRFCTPRRNNRVAPRNRRVSRPAYGPGLSGSGRRAENYKKAQDLFLKNRRMLTDIILTGRTFDAPSEVPAISDVEQLYGSIFESDSPPDDAPFDVLNVERRLDDPITEEDVEAAKSGWRCSAPGSDGVPLKTIISCPNSILSILFTIIIYRNCHPSSWCSLRTTLIPKGGDLTLPTNWRPITVGSGLQRLLHRVISFRLARTIDLNWNQRGFTSVDGTLANSLILDYFIRSRIRDTLPFNVISLDIRKAFDTVSHNSIRRALIGHGLSGCWIDYVLKTLDSATTTIKVGSTSSRPIRIRRGVRQGDPLSPFLFNIVVNELLLKLEALGLGGHVNPTNQCSAIAFADDIVLMSDTVSNMESLLDFTQRFFSSRGMALNPVKCHAISSCVVGGKVLATHTPKFFIDNIPIAVVQQTNSFRYLGHEFDCKGILRPCLPNLNIWLRRLNAAPLKPHQKLLILKQHIVPKMLYGLQNPKVSAKVLKEGDRLVRMAVKRFMHLNIHTPDASLHAKLKFGGMGIQELASTIPDTLLRRLQSLQRNTDDSVLSCALNSPEILSLIDRLTTMIGPIPSDIKWRDRIASGPLTKGLEAAEDDSVSRSWIDQKPFGWTGRDFVRAVQLRTANLPTKAIPSNPPGQRRCRGGCQSDETLAHVLQVCPVSHGARVKRHDEIVKKIGINCRRKNMNVEHEPHVRHSDGTLYKPDLAVHLDNSTTVISDVQVTWASDVPLSSVWNRKEKVYNNPKFRQAARRMWPDRSFIFSPIILEARGLWPRANRNAEILLKLDKRTKMSCVQSVLKWGSSIHRIFMKNVWRTGPGPPGGFFRNLTYN

SEQ ID NO: 15771 - protein, 1192 aa, unidentified
MKKRQPQGPTRVGMKEGPARTDRIVTTKASDGLQTTTDKREVVLRICSCGWRKATTYRGLRIHQGRMGCLGRKQHGRSALQLAGQTTEDRGRVANHRPQDLSREAARPSSGDTPMVEGGTCDGHLDPETSLSSLEEGAQSGSGGNEPDGLVTSQDEEREQAGSGEVYPSEPPSRAEVAGREPAVKELHPGRKEKIRWPRTNNKSAWEELDNDLQHVLEQGLKGDVERKLNEFGNLLYAFCSERFGVLEGHRRKHTGELRSRREREIASLVQRRRQLRKRWRKATAEERVGLESLWNDVRARLKVLRRTERLRKKRKRKEKERSQFYKNPYKFARSLLEESKGGSLQVSQEELEQHLSQTYSDLQREQELGSPGYVPRPSEPSTPFDVSTPRWSEIEAAIRKARAAAAPGPNGVPYKVYKQCPKTLRLLWTLFRVAWRKRCVPRSWRRAGGVLIPKEKNSRSINQFRNISLLNVEGKLFFSIVAKRLTAYLMANKYIDSEVQKAGIPGSPGCSEHASMIWEQIQSARRCKQDLHVVWLDLANAYGSVPHNLIYQAMDFFWVPDTIQQMVRNYFRDFRISISTSDFSTNWQQLEKGIPMGCTISPLLFVMGFEILLVGARQVVGGVKLPSGERLPPLRAFMDDVTSVLRTAPCTHRVLRRLEELTQWSRMKFKPCKSRSLSLKKGKVTNRVFTVGGENIPTLHEKPVKSLGRLYTSDLKDTRRGEEITTQACSGLKAIDSCQLLGKLKLWCMQFVLLPRLKWPLKMYEIPLTTVEQIERKMNTYVRKWLGVPRCLSSVALVGQNKLSLPLASITDEFKLEKVRLALELQGSKDQSVKAAYREQRTGRKWRVGDVIQQAVCRLRHKDIVGAVQQGRKGLGWSGKVQRWDRANPKERKQMVVDEVRRMEAEKRRVVAVGQKQQGAWVNWEEAVERRLSWKDLWTITGCRLSFLLRAVYDVLPSPLNVSRWYSKEESCQLCGQENANLKHILSACSTALKQGRYTWRHNNALRVLAAALEEKRGKTPGDPGHTLKHIPFVKEGQRVAPGGRKVQGGGILTRGQWKMEVDLEHRLCFPKEICETTLRPDLVLWTVESRTVFIIELTVPWEENIQAAYERKKAKYLELAQDCALRGWTVRLYPVELGCRGFVGSSLSRLCRDLSLCKKLARSMAEEVEKSSFWLWVQRNSKTWGKKEQA

SEQ ID NO: 15772 - protein, 1192 aa, unidentified
MKKRQPQGPTRVGMQEGPARTDRIVTTEASGGLRTTTDKREVVLRICSCGWRKATTYRGLRIHQGRMGCLGRKQHGRSALQSAGQTTEDRGRVANHRPQDLSREAARPSSGDTPMVEGGTCDGHLDPETNLSSLEEGAQSGSGGNEPDGLVTSQDEEREQAGSGEVYPPEPPSRAEVAGREPAVKELHPGRKEKIRWPRTNNKSAWEELDNDLQHVLEQGLKGDVERKLNEFGNLLYAFCSERFGVLEGHRRKHTGELRSRREREIASLVQRRRQLRKRWRKATAEERVGLESLWKDVRARLKVLRRTERLRKKRKRKEKERSQFYKNPYKFARSLLEESKGGSLQVSQEELEQHLSQTYSDHQREQELGSPGYVPRPSEPSTPFDVSTPRWSEIEAAIRKARAAAAPGPNGVPYKVYKQCPKTLRLLWTLFRVAWRKRCVPRSWRRAGGVLIPKEKNSRNINQFRNISLLNVEGKLFFSIVAKRLTAYLLVNKYIDSEVQKAGIPGSPGCSEHASMIWEQIQSARRCKQDLHVVWLDLANAYGSVPHNLIYQAMDFFWVPDTIQQIVRNYFRDFRISISTTDFSTSWQQLEKGIPMGCTISPLLFVMGFEILLVGARQVVGGVKLPSGERLPPLRAFMDDVTSILRTAPCTHRVLRRLEELTQWSRMKFKPCKSRSLSLKKGKVTNRVFTVGGENIPTLHEKPVKSLGRLYTSDLKDTRRGEEITTQACSGLKAIDSCQLPGKLKLWCMQFVLLPRLKWPLKMYEIPLTTVEQIERKMNTYVRKWLGVPRCLSNVALVGQNKLSLPLASITDEFKLEKVRLALELQGSKDQSVKAAYREQRTGRKWRVGDVIQQAVCRLRHKDIVGAVQQGRKGLGWSGKVQRWDRANPKERKQMVVDEVRRMEAEKRRVVAVGQKQQGAWVNWEEAVERRLSWKDLWTITGCRLSFLLRAVYDVLPSPLNVSRWYSKEESCQLCGQENANLKHILSACSTALKQGRYTWRHNNALRVLAAALEEKRGKTPGDPGHTLKHIPFVKEGQRVAPGGRKVQVGGILTRGQWKMEVDLEHRLCFPKEICETTLRPDLVLWTVESRTVFIIELTVPWEENIQVAYERKKAKYLELAQDCALRGWTVRLYPVELGCRGFVGSSLSRLCRDLSLCKKLARSMAEEVEKSSFWLWVQRNSKTWGKKEQA

SEQ ID NO: 15773 - protein, 1220 aa, Emmelina monodactyla
MEKNIKNKKYSLRNLPNRQLAERDTVECVQTNPGVSITPASSEPVLTANINLTNPTLGVSQVALAAEPTTTKAGKPRIRMKWGNDINEFIMRTYLYITKLETDRTTYCKRLYDRFVQQYPDMNVSEQRIADQRRAILRNKLLSDQSIEKIRQEVSNQLQNEQSQQITQPITPSIDITYSENCSSNSTPSNVNVSEIDTQSASQDNTEIDLDQTIRDEIIFQLNQTIEHFQHSDPTSRPKLPRLRESKKLANFIAIFNQHILPSFFTPESTLKQIHTLIYCSAFTICKLLGFKINGRMSPHIRKNRFSKPKWQIRLEKDIAKLRADVGRVTQFINNNRSTRLVNKVNRIFRNTKVHTSHEKENLRPEEYLDTLKQKLKLKSHRLARYKKSLQRKNNNKMFVANEKMFYRTLKEQEQPTNNNIACEELRNYWTQIWDKREEHNEQAEWIRAEENNWKHIDEMQSEPINLDDLAVIIKKLKNWKAAGIDGIHNFWLKNFTSLHFTLATLITDLLSGKESLPEFLTKGITYMIPKSSRTEDPSQYRPITCLPTLYKLITCCITRQINIHLQKYNILTEEQKGCRQNHMGCKEQLIIDSIILKHVKNRKQNLHIAYIDYRKAFDSVPHTWLIKVLKLYKINPTIISFLEDAMSKWSTSLFLNTTNTTLNIEEIPIRSGIFQGDSLSPLWFCLALNPLSNMLKSSIHGYKLTNDQAITHLMYMDDVKLYSKSEVGLNNLVKVIHNFSKDICMTFGLDKCKTLHIKKGKLSSTSHNFCKEIGINEMEDQEKYKYLGIEQGTSIDHVQIKKHLITEYCKRVKLMCKKLLYAKNLFKGINTYAVPVLTYSFGILTWSKTDLLKLEIKTRSILTKHKYLHPKSAIERMTIKRNEGGRGFIDLHQLKSDQIQNLRKFFYSKMLTSSLHASVIKLDDKFTPLNLNDIEIEFALRSRTTIEKKNKWRSKQLHGRHIKDLEQTHIDIEASNKWLKLGYLFPETEGFAIAIQDQVINTKNYQKYIFKDKSVQNDACRKCHQHPETIQHITGACSHLAQTDYLHRHNQTANIIHQKLAYKHKLLTDDPVPYYKYNAKPVLENKDFKLYYDRAILTDRTIHFNRPDITLIDKTNKQAFLVDIGIPNSHNIQKTITEKINKYTELKDEISRLWNLDKVFIVPLILSSTGLIPKVMKHYLKVLDLPHTTYISMQKAAILNTCRIVRKFLQDSTTDFSYI

SEQ ID NO: 15774 - protein, 1220 aa, Emmelina monodactyla
MEKNIKNKKYSLRNLPNRQLAERDTVECVQTNPGVSITPASSEPVLTANINLTNPTLGVSQVALAAEPTTTKAGKPRIRMKWGNDINEFTMRTYLYITKLETDRTTYCKRLYDRFVQQYPDMNVSEQRIADQRRAILRNKLLSDQSIEKIRQEVSNQLQNEQSQPITQPITPSIDITYSENCSSNSTPSNVNVSEIDTQSASQDNTEIDLEQTIRDEIIFQLNQTIEHFQHSDPTSRPKLPRLRESKKLANFIAIFNQHILPSFFTPESTLKQIHTLIYCSAFTICKLLGFKINGRMSPHIRKNRFSKPKWQIRLEKDIAKLRADVGRVTQFINNNRSTRLVNKVNRIFRNTKVHTSHEKENLRPEEYLDTLKQKLKLKSHRLARYKKSLQRKNNNKMFVANEKMFYRTLKEQEQPTNNNIASEELRNYWTQIWDKREEHNEQAEWIRAEENNWKHIDEMQSEPINLDDLAVIIKKLKNWKAAGIDGIHNFWLKNFTSLHFTLATLITDLLSGKESLPEFLTKGISFMIPKSSRTEDPSQYRPITCLPTLYKLITCCITRQINIHLQKYNILTEEQKGCRQNHMGCKEQLIIDSIILKHVKDRKQNLHIAYIDYRKAFDSVPHTWLIKVLKLYKINPTIISFLEDAMSKWSTSLFLNTTNTTLNIEEIPIRSGIFQGDSLSPLWFCLALNPLSNMLKSSIHGYKLTNDQAITHLMYMDDVKLYSKSEVGLNNLVKVIHNFNKDICMTIGLDKCKTLHIKKGKLSSTSHNFCKEIGINEMEDQEKYKYLGIEQGTSIDHVQIKKHLITEYCKRVKLMCKKLLYAKNLFKGINTYAVPVLTYSFGILTWSKTDLLKLEIKTRSILTKHKYLHPKSAIERMTIKRNEGGRGFIDLHQLKSDQIQNLRKFFYSKMLTSSLHATVIKLDDKFTPLNLNDIEIEFALRSRTTIEKKNKWRSKQLHGRHIKDLEQTHIDIEASNKWLKLGYLFPETEGFAIAIQDQVINTKNYQKYIFKDKSVQNDACRKCHQHPETIQHITGACSHLAQTDYLHRHNQTANIIHQKLAYKHKLLTDDPVPYYKYNAKPVLENKDFKLYYDRAILTDRTIHFNRPDITLIDKTNKQAFLVDIGIPNSHNIQKTITEKINKYTELKDEISRLWNLDKVFIVPLILSSTGLIPKVMKHYLKVLDLPPTTYISMQKAAILNTCRIVRKFLQDSTTDFSYI

SEQ ID NO: 15775 - protein, 1104 aa, Lasioglossum morio
MWVPLPSTSFGGEAKSCLCVLRACSGCQPVQAVMCVGQDNNEIPREIRRRGLRPSRIAGPTQPSSSSPTPPSTSPPPIPVQHPPDVAPQALFPCPQCTGVFGSKIALGVHRSHRHRFEVNEDVNVERRKKRWSDEEKRLMARQEAIAVAAGCKFINAELVAKVPGRTLEAIKGIRRDPRYKALVAAVLEELRTRTPDVAPSTDDPASSPLIPSPPRITSPHSEALERPTSDDLDAYRTCIELLIPEVEQIRGWHANTLVGLATRFLEGIDPRQQITEWVEVVFPPTRTPRHRTERRTPTVEPISNKARKRLAYARIQRAFRVNMAAAARDILDDTPEDEGGPDVRLMSEHWGPFVSLPSAPAPDIPPIPVDPELEWVWSPVSCVEVAKVTMPINAAAGPDGVSVRLWRAVPPSIKALLYNVVLAAGGFPSSMLASRTVFVPKKGDADSPGNYRPISVTSVIVRHLHKLLATRLRASNIVDWRQRCFGDGCNDNIAVLATVLQHSRQHLRECHVASLDVAKAYDSVSHGVVLHNSGLPHDLARYIERLYANSTTCFDVRGERSSPFRLNRGVRQGDPLSSFLFALVVDKILRSLPVEIGYNIGGESVGAIAYADDILLFASSKWGLQTSLEAAERAANGMGLQFNPSKCSVMSLVPSGKDKKIKIVTTPGFHLGRREDHLPQVGPEAMWKYLGVEISPAGPRRVGLEVITYLTRLTRAPLKPQQRMKILRSLLVPRLYHSLVLGRVTLGKLRALDLQIRASVRRWLRLPKDVPVAFIHATTREGGLGIPALSTAIPGFILHRLGTLEHSNAPQIRAVFREEWVQRRLQWARNALTVEGQCLSQKDQRDRWWAQRLHSSVDGWELRECTDTSNISSWWVDAGSLAIPGRDFVQYVHVRANTLPTRIRTSRGAHRGTYPTRCRAGCNVTETAAHVIQGCHRTHGGRIQRHNAVAKTLAAGLRDKGWTVDEEPTLVTTEGKRKPDLVCLRGEAVRVIDVQVVSGATSLDDAHERKTNYYQNNPSLVEALSNKLHVGQESIRFSSCTISWRGIWSSNSVDCLMGMGIKKGLLRGITTRVLQGSHTNWSRWNRMTTMHPDRGMGERHGVG

SEQ ID NO: 15776 - protein, 968 aa, Lasioglossum lativentre
MARQEAIAVAAGCKFVNKELVAKVPGRTLEAIKGARRDPRYKALVAAALEELLSRTTGGAPSTDEPTPSPPRPCPPRHTPPHIETPRSPTSGEPDVFHTHIRLLIPEVERIEGWHSNTLASLANQFLGGLDPKQLIGEWVETVFPPTLTSRRRTNRRTPTVEPISNKARKRLAYARIQRAFRVNMAAAARDIMDATPEDEGCPDVKLMSEHWGPFVSIPSAPTPAIPPKPVEPGLEWVWSPVSCLEVAKVTMPLNAAAGPDGVSVRLWRAVPPPIKALLYNVVLAAGGFPSSMLASRTVFVPKKGNLNSPGDYRPISVTSVIVRLLHKLLAGRLCASNIIDWRQRCFGDGCNDNVAVLATILQHSRRHLRECHVASLDVAKAYDSVSHGAISAVLRSSGLPHDLARYIDHLYANSTTCFEVRGERSKPFRLNRGVRQGDPLSSILFALVVDRILGSIPAEIGYDIGGESVGAIAYADDILLFASTKWGLQSALEAAEGEANRMGLQFNPSKCSVISLVPSGKEKKIKILTTPGFHLGQGECSLPQVGPVDMWKYLGVVISPGGPRRVGLEINTYLSRLTRAPLKPQQRMKILRSFLIPRLYHTLVLGRVTLGKLRALDLQIRASVRRWLRLPNDVPVAFIHATIREGGLGIPSLSTIIPGLMIHRLGALEHSNAPQISAVFRGEWVQRRLQWARNALTVEGECLSQKDQRDRWWAQRLHSSVDGWELRECPGSSNISSWWVDGGSLAIPGRDFVQYVHVRANTLPTRIRTSRGARRGTYPTGCRAGCNVTETAAHVIQGCHRTHGGRIQRHNAVAKTLAAGLRDKGWVVDEEPILVTAEGKRKPDLVCLRGETAKVIDVQIVSGATSLNEAHERKAGYYKNNPSLVEALSKKLSVGQGSIGFSSCTISWRGIWSSNSADYLMGMGITKGLLRGITTRVLQGSHTNWSRWNRMTTVHPDHGLRERQGVG

SEQ ID NO: 15777 - protein, 968 aa, Lasioglossum lativentre
MARQEALAVVAGCRFINNELVAKVPGRSLEAIKGIRRDPRYKALVAAALEELRATTPRGAPSTDEPSSSPPRPSPPRTTPPHVETPESPASGEPDAFRTCIERLIPEVERLEGWHANTLANLANQFLEGLDPQQLIKGWVEDVFPPTQTSQRRTNRRTPTVEPISNKARKRLAYARIQRAFRVNIAAAARDILDATQEDEGGPDVKTMAEHWGPFVSLPSPPAPDIPPTPVDPDLEYVWSPVSCVEVANATMPLNAAAGPDGVSVRLWRAVPPPIKALLYNVVLAAGGFPASMLASRTVFVPKKGDTNSPGDYRPISVTSVIVRHLHKLLAGRLRASNIIDWRQRCFGDGCNDNIAVLATTLQHSRQHLRECHIASLDVAKAYDSVSHGAITAVLRSSGLPHDLARYIDRLYANSTTCFEVRGERSEPFRLNRGVRQGDPLSSILFALVVDKILGSLPAGIGYNIGGESVGAIAYADDILLFASTKWGLQSTLEAAELEANCMGLQFNTSKCSVLSLVPAGKEKKIKIITTPGFHLGRGASHLPQVGPEAMWKYLGVEISPAGPRRVGLEVTTYLSRLTRAPLKPQQRMKILRSFLIPRLYHTLVLGRVTLGKLRALDLQIRASVRRWLRLPKDVPVAFIHAAIREGGLGIPAMSTTIPGLMLHRLGALEHSAAPQIRAVFSEEWVQRRLQWARNALTVEGQCLSQKDLRDRWWAQRLHSSVDGWELRECPDTSNISAWWVDAGSLAIPGRDFVQYVHVRANTLPTLIRTSRGARRGTYPTRCRAGCNVTETAAHVIQGCHRTHGGRIQRHNAVAKTLAAGLRDKGWVVDEEPILVTTEGKRKPDLVCLRGETAKVIDVQIVSGATSLNDAHERKTSYYQNNSSLVEVLSNRLSVGRDSIRFSSCSISWRGIWSSNSVDCLRGMGITKGLLRGITTRVLQGSHTNWTRWNRMTTIHPDQGLRERQGEG

SEQ ID NO: 15778 - protein, 968 aa, Lasioglossum lativentre
MARQEAIAVAAGCKFVNKELVAKVPGRTLEAIKGARRDPRYKALVAAALEELLSRTTGGAPSTDELTPSPPRPCPPRHTPPHIETPRSPTSGEPDVFHTHIRLLIPEVERIEGWHSNTLASLANQFLGGLDPKQLIGEWVETVFPPTLASRRRTNRRTPTVEPISNKARKRLAYARIQRAFRVNMAAAARDIMDATPEDEGCPDVKLMSEHWGPFVSIPSAPTPAIPPTPVEPGLEWVWSPVSCLEVAKVTMPLNAAAGPDGVSVRLWRAVPPPIKALLYNVVLAAGGFPSSMLASRTVFVPKKGNLNSPGDYRPISVTSVIVRLLHKLLAGRLCASNIIDWRQRCFGDGCNDNVAVLATILQHSRRHLRECHVASLDVAKAYDSVSHGAISAVLRSSGLPHDLARYIDHLYANSTTCFEVRGERSKPFRLNRGVRQGDPLSSILFALVVDRILGSIPAEIGYDIGGESVGAIAYADDILLFASTKWGLQSALEAAEVEANCMGLQFNPSKCSVISLVPSGKEKKIKIITTPGFHLGQGECSLPQVGPVDMWKYLGVEISPGGPRRVGLEINTYLSRLTRAPLKPQQRMKILRSFLIPRLYHTLVLGRVTLGKLRALDLQIRASVRRWLRLPNDVPVAFIHATIREGGLGIPSLSTIIPGLMLHRLGALEHSNAPQISAVFRGEWVQRRLQWARNALTVEGECLSQKDQRDRWWAQRLHSSVDGWELRECPGSSNISSWWVDGGSLAIPGRDFVQYVNVRANTLPTRIRTSRGARRGTYPTGCRAGCNVTETAAHVIQGCHRTHGGRIQRHNAVAKTLAAGLRDKGWVVDEEPILVTAEGKRKPDLVCLRGETAKVIDVQIVSGATSLDEAHERKAGYYKNNPSLVEALSKKLSVGQGSIGFSSCTISWRGIWSSNSADYLMGMGITKGLLRGITTRVLQGSHTNWSRWNRITTVHPDHGLRERQGVG

SEQ ID NO: 15779 - protein, 968 aa, Lasioglossum lativentre
MARQEAIAVAAGCKFVNKELVAKVPGRTLEAIKGARRDPRYKALVAAALEELLSRTTGGAPSTDELTPSPPRPCPPRHTPPHIETPRSPTSGEPDVFHTHIRLLIPEVERIEGWHSNTLASLANQFLGGLDPKQLIGEWVETVFPPTLASRRRTNRRTPTVEPISNKARKRLAYARIQRAFRVNMAAAARDIMDATPEDEGCPDVKLMSEHWGPFVSIPSAPTPAIPPTPVEPGLEWVWSPVSCLEVAKVTMPLNAAAGPDGVSVRLWRAVPPPIKALLYNVVLAAGGFPSSMLASRTVFVPKKGNLNSPGDYRPISVTSVIVRLLHKLLAGRLCASNIIDWRQRCFGDGCNDNVAVLATILQHSRRHLRECHVASLDVAKAYDSVSHGAISAVLRSSGLPHDLARYIDHLYANSTTCFEVRGERSKPFRLNRGVRQGDPLSSILFALVVDRILGSIPAEIGYDIGGESVGAIAYADDILLFASTKWGLQSALEAAEVEANCMGLQFNPSKCSVISLVPSGKEKKIKIITTPGFHLGQGECSLPQVGPVDMWKYLGVEISPGGPRRVGLEINTYLSRLTRAPLKPQQRMKILRSFLIPRLYHTLVLGRVTLGKLRALDLQIRASVRRWLRLPNDVPVAFIHATIREGGLGIPSLSTIIPGLMLHRLGALEHSNAPQISAVFRGEWVQRRLQWARNALTVEGECLSQKDQRDRWWAQRLHSSVDGWELRECPGSSNISSWWVDGGSLAIPGRDFVQYVHVRANTLPTRIRTSRGARRGTYPTGCRAGCNVTETAAHVIQGCHRTHGGGIQRHNAVAKTLAAGLRDKGWVVDEEPILVTAEGKRKPDLVCLRGETAKVIDVQIVSGATSLDEAHERKAGYYKNNPSLVEALSKKLSVGQGSIGFSSCTISWRGIWSSNSADYLMGMGITKGLLRGITTRVLQGSHTNWSRWNRITTVHPDHGLRERQGVG

SEQ ID NO: 15780 - protein, 935 aa, Ameiurus melas
MVMAKRMEGRTEGAIRKRLQVLGWTPPVKTEVDEEDGEELVRSRREEEGRDEIPAQQQSTAAVMEAGEEVEVEVWRERLLEKVKDMQLEPRLESTELCEKAEELMSGKRTRAEVIDFLEAHAERVFPAKWKNKVRKGKRGKNLTSKRAIRRACYARIQHLYNTRRKDAATTVLEGRWRESYKDNEGECEGLANFWQEVFSRESVKLPEHLKEEGRGEQEVKWEVMTPITATEVTDALKSMKDSAVGLDKIQAKDLLQWSQPSLAAYLNLLLALEKLPKALRTARVAFLPKIEKPAGPSDFRPIAIASILTRALHKILARRLMNSVEFSPLQFAFLERDGCLEASSLLHTIIRKSHDEMKPISLAFLDLAKAFDTISHDAIIEAAAGSGFPSPLINYLKDLYNHSEVLMGEVISRCGRGVRQGDPLSPILFILAVERVVRAAIPEIGICLSNVKIDALAYADDLILCAERPERLQDKLRGLEKALVDRGMCINIKKSAGLTIAKDGKRKSVALVPWTFETSGGSITPMGVASVQKYLGLYFNWKGKVIPKHTGRLDSMLKEVSEAPLKPYQRVEILRTYLLPKLQHEMVLGNAHRKTIKRMDTLVRAAIRRWFRLPKDTPVAYLHARLEDGGLGIPHLGTAIPLAQKRRFEKLLSAPNNCAAAIVQQKSFKRVERQINIPCRVGSSVVSSKAEAQERWFMELRECVDGRELTEMVVDKASHRWLRKPERVFPRLHLRGIQLRGGVMQTKARGARGRKKMPEELICRGGCGQRETLNHILQVCEVTHNGRCARHNRVMRQAAKLLKRKDMEVWLEPIIPTKDSFIKPDIILDFMDRVIIMDVSIVSARRMEETWTLKVGKYGSPRNESAIKEWTGKEKRVQHLPLLFSNRGLLYRPSGVGLRKRGLSDRDLGDLCMLVVTGSLKCYDGYMRGTGGAM

SEQ ID NO: 15781 - protein, 1136 aa, Pseudomyrmex cubaensis
MNRCKEGASEACGSAPVSGESPAALVANELGDASSALLLPGALPKGRWESTQLLEHTALTVRGDTEYPHRCPNCQNNGHTIECLNARQFSDHMIKEHPGVALRWECTSCLRVFPKLHALRCHAPKCSGPQNDNRGAFKCDQCDLSFATRMGRSQHERHMHPRLRNARRAAEDEPAGLPGRRPTIWNNEDLARLRVLSQEFRGERHINIKLMEFFPGRTNKQISDARRRLLNQEATVNVVNEEEEAQPNVVPCGAEPLEQAIAPVACDAVVNELDEETKRHLITAIEFDYELPGKWEAWAKELSSLAKSETTSDDLDLLYDKFMEVLLWGSNHSSIKKKQHKRRPTNRHQKRKFAYAKCRELMDKCPSRLADIVVSNDLSLLRTHELPGLIETKSLYKNLWGIPGPVQADVCERPMGLIPIGEIFLPLTQTEVAKRIANIAGRSAAGADGVTKQDLSAGGTSAVLAKLFNLLLLKKHYPSAWKVNRTTLIPKAGKDVRDVKNWRPITISSMISRLFSSLLDRRLRQVISQSERQKGFTSENGCHNNIQLLSKAIIAAKKNGGIISVLDVSKAFDTVPHGAIKGCLRCKGVPELVAQYIADSYEDCQTVIKTKDGDLPLQLKRGVKQGDPLAPLLFNLVIEPLLDKIQNDTFGVSISGHNLAAMAFADDIVLLANDKETAAHQIALVDSYLRNRGMSLSIEKSSSFQYVSRGKSWYVKNPEITIRNSVVPFNEPDDVFKYLGAAVSPWKGLVEGEENKIIADVIRRVRVLPIKPMQKIDLLRQYLLPRYFYGLVVRPPSIGVLRQIDSTIREGAKQILHLHESTTTAFFYTPRKQGGLGLIETEKAILIAALRNGIKAMSSSDAIMRDSMKDERSQKQYALYAASLGTEWPTTLEKLDELKRQNKSSYLAQWMAQPVQGQGSRDCAYEPISNKWLSHHSLLSPSRVIDAIKLRTNTFPTRMALKRAYPEMSGMCRACNGSEETLGHIFGKCPTTKAERIKRHNDIVELLQKRLSVSYRTLVEPVVTVKGERYKPDLVFANEEMACALDVTVRYENGDSLFRAAEEKTNKYNQIIPKLREIFKVSKGYVIPIVVGSRGALPSVTIKELKRLGIAKKDWLTISLLALRSSIETINKFMDE

SEQ ID NO: 15782 - protein, 1149 aa, Pseudomyrmex concolor
MSESDSEASEACGFAPVSGGSPAAYVANERGDASSALRLPEALPKGRWESTQLLEHAALTVRGNTEYPHKCPSCQNKGHNIECLTAKQFNDHMTKEHPGIALRWECTSCLRVFPKLHALRCHVPKCNGPKNDGGGAFKCDHCDLGFATRMGRSQHERHAHPRLRNARRAAENEPAGLPGRRPTVWSDEELARLRALNHEFRGERHINVRLVEFFPGRTNKQISDARRRLLNQVPIVNMINESDKDTDGVSTEDEAQPITASQNTEMLGPVPPPTTSDADTNELDEETKRHLMAAIEFDYELPEKWKTWVEELTTLAKNEATDEDLDLLYDKFMEILLRGGNHPNAKKRRRKASKNWPINRHQKRKFAYAKCRELMDKCPSRLADIVASNDLSLLRTHQPPGLVETKNLYENLWGKLGPIQADASERTAGLIPVGEIFLPLTQTEIAKKLAEIAGKSAAGADGVTKQDLSSGNTSAVLAKLFNLLLLKRHYPKAWKVNRTTLIPKAGKDTGDVKNWRPITISSMVSRLFSSLLDRRLRQVISQSERQKGFTSENGCQNNIQLLGKAITAAKRDGGIISVLDISKAFDTVPHGAIEGCLQRKGVPGLVARYISDSYRGCRTVIKTRDGELPIELKRGVKQGDPLAPLLFNLVIESLLDKIQNDTFGVNISNHNLAAMAFADDIVLLASDKETAAYQIALVDSYLRSRDMSLSIEKSSTFQYVPKGKSWYIKNPEIIIRNSIVPFNEPDDVFKYLGAAVSPWRGLIEGKENKIIADVIRRVRVLPIKPMQKIDLLRLYLLPRYFYGLVVRPPSVVVLRQIDSTIREGAKQILHLHESTTTAFFYTPRKQGGLGLIETEKAILIAALRNGVKAMSSSDPIVRDSMVNEQSQKQYASYAALLGTEWPTTLERLDSLKRTTKSAYLSQWMAQPVQGQGSRDCAYEPISNKWLSHHSLLSPSRVIDAIKLRTNTFPTRMTLKRAYPDIAGICRACGDSEETLGHILGKCPITKAARIKRHNDIVELLQKKLSISYRTLVEPVVAVKGERYKPDLVIANEEMACALDVTVRYENGDSLLKAAKEKVDKYNQIIPKLKEIFKVPKGHVIPIVVGSRGALPSVTIKELKKLGIAKKDWLTISLLALRSSIEMINKFMDE

SEQ ID NO: 15783 - protein, 940 aa, Pseudomyrmex cubaensis
MEFFPGKTNKQISDARRRLMNQIAIENGIDIEDRAEAAVAVEAQRDTVSQEDEPLGPAPVAPVTDTGISELDDNTKSRLIAAIEFDYSLPSKWRNLDDELASFARNEVKESALDLLYDKLIEILSTTREGTLPPEKKKARHRTKRNKPANRSQRRRSAYAKCRDLMSNCPTRLADIVVANDLSLLRTHKPLGLLETRNLYKNLWGTSGPEQTDMYNRPMGEIPIGNIFLPFTQAEVAKRIADVAGKSAAGADGITKQDLRHESTGAVLAKLFSLLLLKRHYPKAWKVNRTTLIPKAGKNVADVKNWRPITISSMISRIFSSLLDRRLRCVIPQSERQKGFTSENGCYNNIQLLGKAITAAKKDGGVISVLDISKAFDTVPHGAIEGSLLRKGVPKLVARYISDSYKGCQTVIKTNDGDLQIELKRGVKQGDPLAPLLFNLTIEPLLDKIQGDTFGVNVSGHNLAAMAFADDIVLLVSDRETATHQVSSVDTYLSERGMSLSIDKSSTFQYVPKGKSWYIKNPAIAVRGHIVPFNEPDDVFKYLGATVSPWKGLMEGIEINIFSDILKRVKILSIKPMQKIDLLRLYLLPRYFYGLVVRPPSIGVLRQIDLAIREGAKRILHLHESTTTAFFYTPRKEGGLGLMETEKMILLAALRNGVKAMASDDTITRDSLADEKSQKQYALYAAALNSEWPTTLEKLDALKHSIKSSYLNKWAAQLAQGQGSRDCAHEPVANKWLMHHNLLSSSRVIDAIKLRTNTFPTRSTLKRAYPDMSAECRACKSPEETLGHIFGKCPMTKAERIKRHNDIVKLLSKRLSSSYRILEEPAIAVDGERYKPDLVIANEKMACALDVTVRYENGDSLSRAAKEKINKYEKIMPKIKETFGVTRGRVIPIVIGSRGALPGITIKELRALEIPKKEWLTISLLALRSSIEMINKFIDD

SEQ ID NO: 15784 - protein, 1115 aa, Pseudomyrmex pallidus
MSMSDCDNEASEACGFAPVSNGSPAACVANERGDASSALQLPEALPKGRWESTQLLEHAILMVRGDTEYPHRCPNCQNNGHIIECLTAKQFNDHMIKEHPGVALRWECASCLRIFLKLHALRCHMPKCNGPQNDDGGAFKCDECDMSFATRMGRSQHERHAHPKLRNTRRAAEDVPAGLPGRRPTVWNDEELARLRALSHEFRNERHINVRLMEFFPGRTNKQISDARRRLQNQGAVVNVVGERDEAAGVAAEAEVQLNAVPQGAEPLGPVSAPSALDADIDELDEETKRLLLRAIEFEYELPGKWKTWVEELINLANNETTDEDLDLLYDKFIEILLWGSNHPDKRKKRRGAGKNKPLLRTHQPPGLIETKNLYESLWGKLGPAQAGMYERPTGLIPVGEIFLPFTQTEVAKRTADIAGRSAAGADNVTKQDLSGGGTSAAVAKLFNLLLLKRHYPKAWKVNRTTLIPKSGKDVTDVRNWRPITISSMVSRLFSSLLDRRLRQVIPQSERQKGFTSENGCYNNIQLLDKAISAAKRDGGIISVIDISKAFDTVPHGAIVGCLQRKGVPGLVARYISDSYKGCQTVIKTKDGDLSIELKRGVKQGDPLAPLLFNLTIEPLLDKIQNDTFGVSISGHNLAAMAFADDIVLLASDKETATYQIASVDSYLGDRGMSLSIEKSSAFQYVSRGKRWYIKNPGIIVRNSVVPFNEPDDVFRYLGATVSPWRGVIEGGEIKAITDVINRVRSLPLKPMQKIDFLRLYLLPRYFYGLVVRPPSLGVLQQIDSTIREGAKRILHLHESTTTAFFYTPRKEGGLGLIETQKAILVAALRNGVKAMASGDAIIRDSIANDRVQKQYAFYAATLGTEWPTTLEKLDVVKRKIKSSYLTQWMAQPVQGQGSRDCAFEPVSNKWLSHHSLLSPSRVIDAIKLRTNTFPTRMALKRAYPDMSGICRACNGSEETLGHIFGKCPTTKAERIKRHNDIVELLQKRLSSSHRTLVEPVVAVKGERYKPDLVIANEKMVCALDVTVRYENGDSLLRAAREKTDKYNRIVPKLKKIFKVSEGRVIPIVVGSRGALPSGTIREFKQLGIAKKDWLTISMIALRSSIEMINKFMDE

SEQ ID NO: 15785 - protein, 839 aa, Nilaparvata lugens
MDKFKQRLAALANRCRRYTEAESRRHQATLFSNDERKYYKLLNSNEHGVVQHPGVEDMEKFWKDIWQEPVMHNENTYWIDQVKSKMRDLAGMPQCVISTEDVSIAVKKSHNWKAPGPDGIQNYWLKNFSSLHSKIAGCFNDLLQQRSEIPVGFASGLTFMIPKKEGNLSPGDYRPITCLNSTYKLMTSTLASKIDSHITLNKIMATEQLGCRKGAKGCKELLILDSFIAGQASAKQRNVSIAWIDYAKAFDSVPHSWLLYVLQLYKVDEALVNLMRMIMSQWSVKLKIGSGETQIQTESIQICRGIYQGDSLSPLWFCLALNPLSLMLEESTYGYKIEVSRSLRVSHSFYMDDLKLYARSPEQLQGMIELVSAFSQSICMKFGLSKCAVLHVEKGQMKMQRDELRALDSEISELKQGQSYKYLGLYQHLKISKTEVLTKVEGEFRSRLDRVLKGKLSAKNCIKAVNTWVIPALTYTFGILKWSDTRLEQIDRYVRTRMTKFRMHHPRASVARLYLPRSMGGRGLMRVSRLCVSQETKLRSYFQNADSDLFVKVCQLDNGYTALDLRNQRSSELLSAQDLKEEWRTKELHGRFYGHLNSEPISQELSCMWLTVGSLFPETEGFVQAIQDQVIATNAYRRHVMGDRTISDKCRMCASAVESIQHIVSGCSVLAPREYMLRHNNVAKIVHLEMQIKFGNIAEVPPYYNYQPPPLVEFNHVKIYWDVQMITDRRVVHNKPDILVLDQLEKRAYIIDIAVPSDENAQKTRGEKIRKYQELSFELKEMYGLNTVRVLPIVITVNGLILKSVVEICRSIDLVDEVLKRMQKSVLLDTARIVRKFIK

SEQ ID NO: 15786 - protein, 968 aa, Nilaparvata lugens
MIIIIIIIIIIIIIITLAKHINEINSIADVTDWIYCGALTVFQELGMKISFRKARKGNINNSGAKKKSKWKIRIEGKIGDLRRKIGILTSYLRDPEKASLRQKRLVDEIVVQHIGFAQQNKFNETLALQMDKFKQRLAALANRCRRYTEAESRRHQATLFSNDERKYYKLLNSNEHGVVQHPGVEDMEKFWKDIWQEPVMHNENTYWIDQVKSKMRDLAGMPQCVISTEDVSIAVKKSHNWKAPGPDGIQNYWLKNFSSLHSKIAGCFNDLLQQRSEIPVGFASGLTFMIPKKEGNLSPGDYRPITCLNSTYKLMTSTLASKIDSHITLNKIMATEQLGCRKGAKGCKELLILDSFIAGQASAKQRNLSIAWIDYAKAFDSVPHSWLLYVLQLYKVDEALVNLMRMVMSQWSVKLKIGSGETQIQTESIQICRGIYQGDSLSPLWFCLALNPLSLMLEESTYGYKIEVSRSLRVSHSFYMDDLKLYARSPEQLQGMIELVSAFSRSICMKFGLSKCAVLHVEKGQMKMQRDELRALDSEISELKQGQSYKYLGLYQHLKISKTEVLTKVEGEFRSRLDRVLKGKLSAKNCIKAVNTWVIPALTYTFGILKWSDTRLEQIDRYVRTRMTKFRMHHPRASVARLYLPRSMGGRGLMRVSRLCVSQETKLRSYFQNADSDLFVKVCQLDNGYTALDLRNQRSSELLSAQDLKEEWRTKELHGRFYGHLNSEPISQELSCMWLTVGSLFPETEGFVQAIQDQVIATNAYRRHVMGDRTISDKCRMCASAVESIQHIVSGCSVLAPREYMLRHNNVAKIVHLEMQIKFGNIAEVPPYYNYQPPPLVEFNHVKIYWDVQMITDRRVVHNKPDILVLDQLEKRAYIIDIAVPSDENAQKTRGEKIRKYQELSFELKEMYGLNTVRVLPIVITVNGLILKSVVEICRSIDLVDEVLKRMQKSVLLDTARIVRKFIK

SEQ ID NO: 15787 - protein, 1172 aa, Bradysia coprophila
MKLKVSSKAPGLSRARISTFDVIENAGSGDCLFLSVLDFMQRSKSSFKEISLDVIGLRHRVVEYLFSKNAVGFRSNWERLADNILYNLHTQLPILLSNDTSKEEAKKEAYKAYIKESGNDGTMTELTLIAEMFGFDCSVVRRIGHDEFNCFDLCVSSNGSIDAPRPRMFIYFTGQLTTGHFRNLHPHKANKGPLIEPGQYVFTASSSSENSDLISITNRFDKVTGPPPATANDLTPCPHCPIETRKSFRGQRGLKTHIRRRHPDLLVNTQTSQADHDFTSIGDQLAQLKSRTRLLLRIPKSARKSVAEQLSRTIDTVVKRNDTDSWNDLLLFAYKVLRIPERTGKSLVTSIKDNSTSMTLPILSDQQRTPVSLEKRVEAKLANNDVRGAVKILSSDDTLAPFDDVMHQELIKKHPAPSREVIIPSVEKSDICHLVVSPKDVKCGIASFSHGSAPGLDGFRPQHIKDLTSYSAGDAGPRLLNSITDLCNLMLSGTVDKGICSVLYGAALCALNKKTGGIRPIAIGNYFRRLTAKIGCFKLRNTSAKHLGPHQMGVGIQKGAEAVIHATRTWINSSINRNKILLKIDYSNAFNSTERDSMLIEIKNQVPPLFPFLHQCYSSPSKLYFGDRNLQSQVGAQQGDPAGSLAFSLAIQPIVEEVTTDLNAWYLDDGTVGDSTDIVYENFKMIIERSKALGLMINPSKCELFFCSGTVDERIVEKFNEISPGIQVVDQSSLSLLGSPLFDQGFETAAAEKLRLLQSMTSRLKNLNSHAAYFLLKNCFAIPKLTYFLRTCPSWRFSNFLSGFDIEIRQSLESILNIQFDDKNWIQATLPISQGGIGVRRASDISLPAFLASAFGARPLVANILNNTGNDVSIHHLDEALHLWQTLNASDIPQNPNFQRNWDLLNVKRIVDKELHFDTAKDIARFTALQAPESGKWLNALPVPNNGTMLDNNTIRICIGLRLGARICHPHSCRCGSSVSEDGTHGLSCTKNKSKYSRHFEINNILHRALSSINVPSTLEPPGLSRKDGKRPDGLTLIPWANGKALIWDATVLDTLANSYVPKTSLRIGAAAELGSKLKHKNYAELKAANYIFVPVALESFGPWATEAKDFINTIGSKLNNLTGSKTSCYYLHQRISLAIQRYNASCVMETIPATSPLDEIFYILSKRPLVV

SEQ ID NO: 15788 - protein, 1170 aa, Bradysia odoriphaga
MLKITSKGRLRTSDTSFKVIENFGSGDCLYLSVLDFLRHHKSSFDDIPSDVAGFRQRVVDYMFSRNAIGFQSNYDRFADSIMFNLHHCLPIFLDNDATKADDKKRAYKEYTLKPGNDGTMTELSLIAEMFGFSCRVIRKVNDSDFSCFDPCSNGKTNQQDSKATFFVYFTGPLTSGHFRCLRPSKPTKPTALEVGKYSAVNDNDDDNLISITNCVTKSNDSLTVPTSGSGYIPCPHCHGDRRKSFKGERGLKIHISRKHPDLIPSEDPSLTDFSSIGEQLAHLKSRTRLLLRIPKAARKVIADKLSETINTVVKRNDTASWNELFLFAYKTMRVPERSEKSLVSSIKEMTSSFELPKTSTSNRNKPQRLNKKIEAKLADYDIKGAIKILSSEETLAPFDETTFNELTTKHPAPSRDLNIPDVKADNDCFLIVSQKDVKHGIASFSHGSAPGLDGIRPQHIKDLTSFSAGDAGVRLLTSITDLTNLMLSGKVEKGICSILYGAALCALNKKSGGIRPIAIGNFFRRIAAKVGCFQLRNASAKCLGPHQMGVGIRKGAEAIIHATRSWVNSPANQNKVLLKIDYVNAFNSTERDTMLVEIKKQMPLLYPFLHQCYSAPSTLYFGDKNLKSQVGAQQGDPAGSLAFSLAIQPIVEEISTDLNIWYLDDGTIGDFYEVVFENFKTIIERSRSLGLKINPSKCELFFCSGEVDNAVVEKFNEISPGIQVTDRTNLTLLGSPIYDDGFETSAADKLCSLRRLTSKLNDLNPHVAYFLLKNCFAIPKLTYFLRTCASWKFPDFLNAFDTEIRQCLENIFNMCLDDKQWVQASLPISYGGIGIRRAHDISIPAFLASAFGARFLVANILHSSGNDFSIHHMDEGLTFWQSLNATELPTNPESQKNWDLLNVERIARDDLQFDSTKDIARFTALRAPESGQWLHSIPISNNGTLLDGNTIRICIGLRLGGKICHKHTCRCGAEVREDGTHGLSCMLNISKYQCHSELNNILHRALSSINVPSTLEPPGIFRNDGKRPDGLTLIPWSKGKHLLWDATCLDTLANSYTSKTSKRAGAAAEHGSQLKHKKYSELKSLNYIFVPVAFETLGPWAKEAKDFIGTIGSKLNELTGSNVAGNFLNQRISLAIQRFNASRVMETLPPAARLDEVFYVLAKRPVDKPI

SEQ ID NO: 15789 - protein, 1049 aa, Bradysia odoriphaga
MTELNMMTEMFGFDCCVVRNSDDTKFNCFLLNTSTNGNHSSAKPQMFLYFTGSLDTGHFRCLHPIKSKKKITIEPGQYSKTESSDDDPNFVSITNCIKEFNDSSTASKNDLTPCPHCDIENRKSYKGQRGLKLHINSRHPDLATQPNNLPGDSLPLGEQLAQLKSRTRLLIRIPKNARKSVAEKLSQTIDAVVRLNDTESWNEFLLFAYKVLRVPDRRVNSLAASIKENSTNPSLPPTKANHSFKSLSMEKRVEAKLANNDVRGAVKILSSDDTLAPFDDRTYNELVMKHPAPSRDLQIPKMDKGEDQHLIVSQKEVKHGISSFSHGCAPGLDGFRPQHIKDLTSFSAGDAGSRLLLSITNLCNLMLSGKVNNETCSILYGAALCALNKKSGGIRPIAIGNYFRRLTAKVGCCKLRNASAERLGPHQMGVGIQKGAEAIIHATRSWINSPANRHKIIVKVDYVNAFNSTERDSMLSEIKNQIPSLYPFLHQCYSSPSTLYFGDKNLMSQVGAQQGDPAGSLAFSLAIQPIVEEISTDLNVWYLDDGTIGDLEEIVYQNFKAIIEQSKALGLRINPSKCELFFCSGEIDEAIVDKFSKIAPGIQVVNKSNLTLLGSPLFDECFEMAAEEKLASLRLMTSKLKNMNAHAAYFLLKNCFAIPKLTYFLRTCASWKFSSFLSSFDLEVRRSLEEILNIQLENKQWVQATLPISHGGIGVRRTQDISLPAFLASAFGARSLVASILNSKGSDVSIHHMDEALEQWQSINILHELPSNPEFQRNWDLLNVKRIIEEKLRFDRKKDIARFNALQAPESGKWLTALPIPHNGTHLDNNTIRICIGLRLGANICQAHTCRCGIEVSEDGVHGLSCTKNITKYYRHSEMNNILHRSLSSINVPSTLEPPGLSRKDGKRPDGLTLVPWANGRALIWDATVLDTLANSYVNKTSARVGAAAELGSKTKHRNYADLEASNYLFVPVALESFGPWAKEAKDFINTIGKRLNDLTGSKTSCHYLNQRISLAIQRYNASCVMETLPASSPLDEIYYVLAKRPIAN

SEQ ID NO: 15790 - protein, 914 aa, Listronotus bonariensis
MGYISANRPFTAKIRKIALKLRQKHHTLNRITLQVIKQRCLDRIRSLGVINNSLKKKAKGLRDTNKFVTKPSSFLADPAPTVENPPQANVVEQFWKNVYEDSKPLRRDTPALNNFSAYCADKELNQHESPPITTEEVKRALDGARNYSAPGPDGINNFWWKKFPSTHPHLARIFDSWLNGHTPIPEWFVEGRTILIPKKGDLTQPKNYRPITCLNTSYKAFTRILYSRILSAIDPILSDIGEQRGGKRGINGCKENLLIDRCITQDSIQYKRNLSMAWIDYKKAFDTTSHELILHLLKDLKVARNLIRCTEQLMPLWKSKFSITSGAQKIITDPITFKRGVFQGDSLSPLLFCISLLPVSVSLRKTRGYCCGPPGRRERKVTHLFYMDDLKLYATSERDLQQSLKVVHEYTKDVGMEFGLDKCAKLRLVKGRNGNDLEADQLADSAILRPLKNNETYRYLGIDQNRTQDVKAVKTELRSNYRQRLRKIWKSELSGLNKVAATNMLAVPVLLYSFGVVKWTREELRELDVSTRKMMHLHRSIHPRSSVSRIYLSRHQGGRGLLSLECMHDRLVLSLACQVAKSTDPLLQLVKEHEMANVGAFLFKAAERAAEKFGLRFEIDSNDDQSLIRQESSAVTAAVKRAEQRMLLEDHINKPQHGVFYRNINRLDLSRKLTFGFLKSAELKSETEGFLLACQDGVINTLVYRSQFSNVLDTACRACRQQPETLMHLLSACPVHAVNSYIHRHNDALRVLYYHLRHYYGIDETAILPFAPGDIEAVVENDNCRIYWNYAFPTTHQIQANKPDIVLLDKTNHTMYVIEFSAPAETNIDIKEREKRAKYQDLLGELRRLYPEYTVRLVVLIIGVLGGMKNNILREMRYIPACENTPEQLVMKMQKSVVLGSLRLLRQMNLAEDH

SEQ ID NO: 15791 - protein, 928 aa, Listronotus bonariensis
MDLTRQEASRIQSVMNYISANRPFTEKIRKIALRLRQKHHTLNRVTLQIIRQRCLDRIRSLGVINNSLKKKARGIRDTNKFVTKPSSFLTDPAPTVENPPQANIVEQFWKDVYEDPKPLRRDTPALNTFSAYCADKELDQHESPPITTEEVKRALDGARNYSAPGPDGINNYWWKKFPSTHSHLARIFDSWLNGDTPIPEWFVEGRTILIPKKGDLTQPKYYRPITCLNTSYKAFTRILYSRILSAIDPILSDIGEQRGGKRGINGCKENLLIDRCITQDSIQYKRNLSMAWIDYKKAFDTTSHELILHLLKDLKVPPNLIRCIEQLMPLWKSKFSITSGAQKIITDPITFKRGVFQGDSLSPLLFCISLLPVSVSLRKTRGYCCGPPGRRERKVTHLFYMDDLKLYATSERDLQQSLKVVHEYTKDVGMEFGLDKCAKLRLVKGRYGNDLEADQLADSAILRPLRNNETYRYLGIDQNRTQDVKAVKTELRSNYRQRLRKIWKSELSGLNKVAATNMLAVPVLLYSFGVVKWTREELRELDVSTRKMMHLHRSIHPRSSVSRIYLSRHQGGRGLLSLECMHDRLVLSLACQVAKSTDPLLQLVKEHEMANVGAFLFKAAERAAEKFGLRFEIDSNDDQSLIRQESSAVTAAVKRAEQRMLLEDHINKPQHGVFYRNINRLDLSRKLTFGFLKSAELKSETEGFLLACQDGVINTLVYRSQFSNVLDTACRACRQQPETLMHLLSACPVHAVNSYIHRHNDALRVLYYHLRHYYGIDETAILPFAPGDIEAVVENDNCRIYWNYAFPTTHQIQANKPDIVLLDKTNHTMYVIEFSAPAETNIDIKEREKRAKYQDLLGELRRLYPEYTVRLVVLIIGVLGGMKNNILREMRYIPACQNTPEQLVMKMQKSVVLGSLRLLRQMNLAEDH

SEQ ID NO: 15792 - protein, 914 aa, Listronotus bonariensis
MGYISANRPFTAKIRKIALKLRQKHHTLNRITLQVIKQRCLDRIRSLGVINNSLKKKAKGLRDTNKFVTKPSSFLADPAPTVENPPQANVVEQFWKNVYEDSKPLRRDTPALNNFSAYCADKELNQHESPPITTEEVKRALDGARNYSAPGPDGINNFWWKKFPSTHPHLARIFDSWLNGHTPIPEWFVEGRTILIPKKGDLTQPKNYRPITCLNTSYKAFTRILYSRILSAIDPILSDIGEQRGGKRGINGCKENLLIDRCITQDSIQYKRNLSMAWIDYKKAFDTTSHELILHLLKDLKVPPNLIRCIEQLMPLWKSKFSITSGAQKIITDPITFKRGVFQGDSLSPLLFCISLLPVSVSLRKTRGYCCGPPGRRERKVTHLFYMDDLKLYATSERDLQQSLKVVHEYTKDVGMEFGLDKCAKLRLVKGRNGNDLEADQLADSAILRPLRNNETYRYLGIDQNRTQDVKAVKTELRSNYRQRLRKIWKSELSGLNKVAATNMLAVPVLLYSFGVVKWTREELRELDVSTRKMMHLHRSIHPRSSVSRIYLSRHQGGRGLLSLECMHDRLVLSLACQVAKSTDPLLQLVKEHEMANVGAFLFKAAERAAEKFGLRFEIDSNDDQSLIRQESSAVTAAVKRAEQRMLLEDHINKPQHGVFYRNINRLDLSRKLTFGFLKSAELKSETEGFLLACQDGVINTLVYRSQFSNVLDTACRACRQQPETLMHLLSACPVHAVNSYIHRHNDALRVLYYHLRHYYGIDETAILPFAPGDIEAVVENDNCRIYWNYAFPTTHQIQANKPDIVLLDKTNHTMYVIEFSAPAETNIDIKEREKRAKYQDLLGELRRLYPEYTVRLVVLIIGVLGGMKNNILREMRYIPACENTPEQLVMKMQKSVVLGSLRLLRQMNLAEDH

SEQ ID NO: 15793 - protein, 914 aa, Listronotus bonariensis
MDYISANRPFTAKIRKIAIKLRQKHHTLNRITLQVIKQRCLDRIRSLGVINNSLKKKAKGLRDTNKFVTKPSSFLADPAPTLENPPQANVVEQFWKDVYEDSKPLRRDTSALNNFSAYCADKELNQHESPPITTEEVKRALDGARNYSAPGPDGINNFWWKKFPSTHSHLARIFDSWLNGDTPIPEWFVEGRTILIPKKGDLTQPKYYRPITCLNTSYKAFTRILYSRILSAIDPILSDIGEQRGGKRGINGCKENLLIDRCITQDSIQYKRNLSMAWIDYKKAFDTTSHELILHLLKDLKVPPKLIRCIEQLMPLWKSKFSITSGTQKIITDPITFKRGVFQGDLLSPLLFCISLLPVSVSLRKTRGYCCGPPGRRERKVTHLFYMDDLKLYATSERDLQQSLKVVHEYTKDVGMEFGLDKCAKLRLVKGRYGNDLEADQLADSAILRPLRNNETYRYLGIDQNRTQDVKAVKTELRSNYRQRLRKIWKSELSGLNKVAATNMLAVPVLLYSFGVVKWTREELRELDVSTRKMMHLHRSIHPRSSVSRIYLSRHQGGRGLLSLECMHDRLVLSLACQVAKSTDSLLQLVKEHKMANVGAFLFKAAERAAEKFGLRFEIDSNDDQSLIRLESSAVTAAVKRAEQRMLLEDHINKPQHGVFYRNINRLDLSRKLTFGYLKSAELKSETEGFLLACQDGVINTLVYRSQFSNVLDTACRACRQQPETLMHLLSACPVHAVNSYIHRHNDALRVLYYHLRHYYGIDETAILPFAPGDIEAVVENDNCRIYWNYAFPTTHQIQANKPDIVLLDKTNHTMYVIEFSAPAETNIDIKEREKRAKYQDLLGELRRLYPEYTVRLVVLIIGVLGGMKNNILREMRYIPACENTPEQLVMKMQKSVVLGSLRLLRQMNLAEDH

SEQ ID NO: 15794 - protein, 1091 aa, Listronotus bonariensis
MDAYSLSEPTIRGYMARMHATWCTKHPELSHLSQQRLRDYVAYLNRSGYVRTPRQQEPPQDLDNQDLEQNQPAENMVIEIAPENANNELTERLTNINIKSHIKSRDIAQANNALRDLLSEQTDILALNNAVYEAAKQLVPNRSDSFHQALRKTERRIQQIAKKIDLTRQEASRIQSVMGYISANRPFTAKIRKIASKLRQKHHTLNRITLQVIKQRCLDRIRSLGVINNSLKKKAKGLRDTNKFVTKPSSFLADPAPTVENPPQANVVEQFWKNVYEDSKPLRRDTPALNNFSAYCADKELNQHESPPITTEEVKRALDGARNYSAPGPDGINNFWWKKFPSTHPHLARIFDSWLNGHTPIPEWFVEGRTILIPKKGDLTQPKNYRPITCLNTSYKAFTRILYSRILSAIDPILSDIGEQRGGKRGINGCKENLLIDRCITQDSIQYKRNLSMAWIDYKKAFDTTSHELILHLLKDLKVPPNLNRCIEQLMPLWKSKFSITSGAQKIITDPITFKRGVFQGDSLSPLLFCISLLPVSVSLRKTRGYCCGPPGRRERKVTHLFYMDDLKLYATSERDLQQSLKVVHEYTKDVGMEFGLDKCAKLRLVKGRNGNDLEADQLADSAILRPLRNNETYRYLGIDQNRTQDVKAVKTELRSKYRQRLRKIWKSELSGLNKVAATNMLAVPVLLYSFGVVKWTREELRELDVSTRKMMHLHRSIHPRSSVSRIYLSRHQGGRGLLSLECMHDRLVLSLACQVAKSTDPLLQLVKEHEMANVGAFLFKAAERAAEKFGLRFEIDSNDDQSLIRQESSAVTAAVKRAEQRMLLEDHINKPQHGVFYRNINRLDLSRKLTFGFLKSAELKSETEGFLLACQDGVINTLVYRSQFSNVLDTACRACRQQPETLMHLLSACPVHAVNSYIHRHNDALRVLYYHLRHYYGIDETAILPFAPGDIEAVVENDNCRIYWNYAFPTTHQIQANKPDIVLLDKTNHTMYVIEFSAPAETNIDIKEREKRAKYQDLLGELRRLYPEYTVRLVVLIIGVLGGMKNNILREMRYIPACENTPEQLVMKMQKSVVLGSLRLLRQMNLAEDH

SEQ ID NO: 15795 - protein, 1046 aa, Listronotus oregonensis
MDAYAFSDPTTRGYMRRMHAAWCAKHPDFSHLSEQRLRDYVAYLNRSGYVRTPKQQEPTQDLEPIQEPEQDQPAEDMINEIAPGNADNELTERLVNINIKTYIKPQNIAQADNALRDRLSEHTDILALNNAVYEAAKQLIPNDRADSFHQTLQKTERRIQQIAKKIDLTRQEASRIQSVLEYISSNRPFTGKIRKIAVKLRQKHHTLNRRVLLIIKQRCLDRIRSLGVINNSLKKKARGIRDTKKFVTRPSSFLADSTPTIENPPSANVVEQFWKDVYEVSKPLQRDTPALTNFRAYCVDKQLDQHESAPITPEEVKSALDGVRNYSAPGPDGINNYWWKKFPSTHPHLARIFDSWLNGDTPIPEWFVEGRTILIPKKGDLKLPKNYRPITCLNTCYKAFTRILYSRTLSAVDPILSDVGEQRGGKRGINGCKENLLIDRCITQDSIQYKRNLNMAWIDYKKAFDTTSHELLLHLLKDLKVPLNLIRCIERLMSLWKSKFSITSGAQKIITEPITFKRGVFQGDSLSPLLFCISLLPVSVSLRKTRGYCCGPPGRREHKVTHLFYMDDLKLYATSERDLQQSLKVVHEYTRDVGMEFGLDKCAKLKLNKGRFGNDLEADQLADSALLRPLQNNENYRYLGIDQNRTQDVRAVKTELRSNYRRRLRRIWESELSGINKVLATNMLAVPVLLYSFGVVKWTREELRELDISTRKMMHLHRSIHPRSSTSRIYLPRHQGGRGLLSLECMHDRLVLSLACQVANSTDPLMQLVRAHEMANVGAFLFKAAERAADKFGLRFALDPNDDQSLVRLESKAVKTAVKRAEQQMLLEDHINKPQHGVFYRNIERLNLSRNLTFGFLKSAELKSETEGFLLACQDGVINTLVYRSQFSNIPDTACRACRQQPETLMHLLSACPVHAVSGYIHRHNDALRVLYYHLRHYYGIDETAILPFAPGDIEAVVENDNCRIYWNYAFPTTHQIRANKPDIVLLDKRNNSMYVIEFSAPAETNIDIKEREKRAKYQDLLGELRRLYPEYNVRLVVLIVGVLGA

SEQ ID NO: 15796 - protein, 1011 aa, Listronotus oregonensis
MDAYTFSDPTARGYMRRMHAAWCAKHPEFSHLSEQRLRDYVAYLNRSGYVRTPKQQEPPQDLEPIQDPEQDQPAVDMINEIAPGNADNELTERLVNINIKSYIKPQNIAQADNALRNRLSEHTDILALNNAVYEAAKQLIPNNRSDSFHLTLQKTERRIQQISKKIDLTRQEASRIQSVLEYISSNRPFGGKIRKIALKLRQKHHTLNRRVLLIIKQRCLDRIRSLGVINNSLKKKARGIRDTNKFVTRPSSFLANSTPTIENPPSANVVEQFWKDVYEVSKPLQRDTPALTKFRAYCEDQQLDQHESAPITPEEVKSALDGVKNYSAPGPDGINNVGEQRGGKRGINGCKENLLIDRCITQDSIQYKRNLNMAWIDYKKAFDTTSHELLLHLLKDLKVPLNLIRCIERLMSLGKSKFSITSGAQKVITESITFKRGVFQGDSLSPLLFCISLLPVSVSLRKTRGYCCGPPGRREHKVTHLFYMDDLKLYATSERDLQQSLKVVHEYTRDVGMEFGLDKCAKLKLNKGRFGNDLEADQLADGALLRPLQNNENYRYLGIDQNRTQDVRAVKTELRSNYRRRLRRIWESELSGINKVLATNMLAVPVLLYSFGVVKWTREELRELDISTRKMMHLHRSIHPRSSTSHIYLPRHQGGCGLLSLECMHVRLVLSLACQVANSTDPLMQLVRAHEMANVGAFLFKAAERAADKFGLRFALDPNDDQSLVRLESKAVKTAVKRAEQQMLLEDHINKPQHGVFYRNIERLNLSRNLTFGFLKSAELKSETEGFLLACQDGVINTLVYRSQFSNIPDTACRACRQQPETLMHLLSACPVHAVSGYIHRHNDALRVLYYHLRHYYGIDETAILPFAPGDIEAVVENDNCRIYWNYAFPTTHQIRANKPDIVLLDKRNNSMYVIEFSAPAETNIDIKEREKRAKYQDLLGELRRLYPEYNVRLVVLIVGVLGGIKENVLGELKCIPACQHSPEQLVMKMQKSVVLGSLRLLRQMNLAEDH

SEQ ID NO: 15797 - protein, 1017 aa, Listronotus oregonensis
MINEIAPGNADNELTERLVNINIKTYIKPQNIAQANNALRDRFSEHTDILALNNAVYEAAKQLIPNNRSDSFHQTLQKTERRIQQIAKKIDLTRQEASRIQSVLEYISSNRPFTGKIRKIALKLRQKHHTLNRRALLIIKQRCLDRIRSLGVINNSLKKKARGIRDTNKFVTRPSSFLADSTPTIENPPSANVVEQFWKDVYEVSKPLERDTPALTNFRAYCADKQLDQHESAPITPEEVKSALDGVNNYSAPGPDGINNYWWKKFPSTHPHLARIFDSWLNGDTPIPEWFVEGRTILIPKKGDLKLPKNYRPITCLNTCYKAFTRILYSRTLSAIDSILSDVGEQRGGKRGINGCKENLLIDRCITQDSIQYKRNLNMAWIDYKKAFDTTSHELLLHLLKDLKVPLNLIRCIERLMSLWKSKFSITSEVQKVITEPITFKRGVFQGDSLSPLLFCISLLPVSVSLRKTRGYCCGPPGRREHKVTHLFYMDDLKLYATNERDLQQSLKVVHEYTRDVGMEFGLDKCAKLKLNKGRFGNDLEADQLADSALLRPLQNNENYRYLGINQNRTQDVRAVKTELRGNYRRRLRRIWESELSGINKVLATNMLAVPVLLYSFGVVKWTREELRELDVSTRKMMHLHRSIHPRSSTTRIYLPRHQGGRGLLSLECMHDRLVLSLACQVANSTDPLMQLVRAHETANVGAFLFKATERAAEKFGLRFAIDPNDDQSLVRLESKAVRTAVKRAEQQMLLEDHINRPQHGVFYRNIERLNLSRNLTFGFLKSAELKSETEGFLLACQDGVINTLVYRSQFSNVPDTACRACRQQPETLMHLLSACPVHAVSGYIHRHNDALRVLYYHLRHYYGIDETAILPFAPRDIEAVVENDNCRIYWNYAFTTTHQIRANKPDIVLLDKRNNSMYVIEFSAPAETNIDIKEREKRAKYQDLLGELRRLYPEYNVRLVVLIVGVLGGIKENVLGELKCIPACQHSPEQLVMKMQKSVVLGSLRLLRQMNLAEDH

SEQ ID NO: 15798 - protein, 1079 aa, Listronotus oregonensis
MRRMHAAWCAKHPEFSHLSEQRLRDYVAYLNRFGYVRTPKQQGPTQDLEPIQESEQDQPAEDMINEIAPGNADNELTERLVNINIKTYIKTQNIAQADNALRDRLSEHTDILALNNAVYEAAKQLIPNNRSDSFHQTLQKTERRIQQIAKKIDLTRQEASRIQSVLEYISSNRPFTGKIRKIALKLRQKHHTLNRRVLLIIKQRCLDRIRSLGVINNSLKKKARGIRDTNKFVTRPSSFLADSTPTIENPPSANVVEQFWKDVYEVSKPLERDTPALTNFRAYCVDKQLDQHESAPITPEEVKSALDGVRNYSAPGPDGINNYWWKKFPSTHPHLARIFDSWLNGDTPIPEWFVEGRTILIPKKGDLKLAKNYRLITCLNTCYKAFTRILYSRTLSAVDPILSDVGEQRGGKRGINGCKENLLIDRCITQDSIQYKRNLNMAWIDYKKAFDTTSHELLLHLLKDLKVPLNLIRCIERLMSLWKSRFSITSGAQKIITEPITFKRGVFQGDSLSPLLFCISLLPVSVSLRKTRGYCCGPPGRREHKVTHLFYMDDLKLYATSERDLQQSLKVVHEYTRDVGMEFGLDKCAKLKLNKGRFGNDLEADQLADSALLCPLQNNENYRYLGIDQNRTQDVRAVKTELSSNCRRRLRRIWESELSGINKVLATNMLAVPVLLYSFGVVKWTREELRELDISTRKMMHLPRSIHPRSSTSRIYLPRHQGGRGLLSLECMHDRLVLNLACQVANSTDPLMQLVRAHEMANVGAFLFKAAERAADKFGLRFALDPNDDQSLVRLESKAVKTAVKRAEQQMLLEDHINKPQHGVFYRNIERLNLSRNLTFGFLKSAELKSETEGFLLACQDGVINTLVYRSQFSNIPDTACRACRQQPETLMHLLSACPVHAVSGYIHRHNDALRVLYYHLRHYYGIDETAILPFAPGDIEAVVENDNCRIYWNYAFPTTHQIRANKPDIVLLDKRNNSMYVIEFSAPAETNIDIKEREKRAKYQDLLGELRRLYPEYNVRLVVLIVGVLGGIKEHVMGELKCIPACLHSPEQLVMKMQKSVVLGSLRLLRQMNLAEDH

SEQ ID NO: 15799 - protein, 880 aa, Listronotus oregonensis
MINEIAPGNADNELTERLVNINIKTYIKPQNIAQANNALRDRLSEHTDILALNNAVYEAAKQLIPNNRSDSFHQTLQKTERRIQQIAKKIDLTRQEASRIQSVLEYISSNRPFTGKIRKIALKLRQKHHTLNRRVLLIIKQRCLDRIRSLGVINNSLKKKARGIRDTNKFVTRPSSFLADSTPTIENPPSANVVEQFWKDVYEVSKPLERDTPALTNFRAYCVDKQLDQHESAPITPEEVKSALDGVRNYSAPGPDGINNYWWKKFPSTHPHLARIFDSWLNGDTPIPEWFVEGRTILIPKKGDLKLPKNYRPITCLNTCYKAFTRILYSRTLSAVDPILSDVGEQRGGKRGINGCKENLLIDRCITQDSIQYKRNLNMAWIDYKKAFDTTSHELLLHLLKDLKVPLNLIRCIERLMSLWKSRFSITSGAQKIITEPITFKRGVFQGDSLSPLLFCISLLPVSVSLRKTRGYCCGPPGRREHKVTHLFYMDDLKLYATSERDLQQSLKVVHEYTRDVGMEFGLDKCAKLKLNKGRFGNDLEADQLADSALLRPLQNNENYRYLGIDQNRTQDVRAVKTELRGNYRRRLRRIWESELSGINKVLATNMLAVPVLLYSFGVVKWTREELRELDVSTRKMMHLHRSIHPRSSTSRIYLPRHQGGRGLLSLECMHDRLVLSLACQVANSTDPLMQLVRAHETANVGAFLFKAAERAAEKFGLRFAIDPNDDQSLVRLESKAVRTAVKRAEQQMLLEDHINRPQHGVFYRNIERLNLSRKLTFGFLKSAELKSETEGFLLACQDGVINTLVYRSQFSNIPDTACRACRQQPETLMHLLSACPVHAVSGYIHRHNDALRVLYYHLRHYYGIDETAILPFAPAISRQ

SEQ ID NO: 15800 - protein, 1114 aa, Pissodes strobi
MPDNDPGNGHGRFRWTDELRDDLLDAYEDSEPGRRGYMARMHALWSGKRPELNHISKQHLRDHAAYLRRSGYVRTPRDEPEAPVLAVIEDQIQPEQAPVQIQHVVHENTDNGLSLRNTRINNKCHIKTQDITNMDVALANELPEMSDIVTINNAVYHAACQLMPNANGDPFAGTVRKTERRIERIANKILMARQQASRIQCVVEYIAAKRPFTQKIKRIARQLRQEHHTLNKVTLLTIKQRCIDRIRSLGVIKNSLIKKARGIKDNNTFNTKPSRLLDDPQPVIENPPSANEVENFWRNVYESTTPIKENTPSLIYFRSYCTRLQQDQRYDPQITQEEVRKALEGTRNFSAPGLDGINNFWWKKFPSTHRHLARIFTSWLNGNEPIPEWLVEGRTTLIPKKGNLAEPKNYRPITCLNSCYKVFTRVLYCRLLGSVEPVLNDVVEQRGGKRGFEGCKENLLIDRCITQDSIQYKRNLSMAWIDYKKAFDTTSHELLLHLLQTLSVPMPLVRCIEQLMPLWKSKFSISTGNTKVITEPVAFRRGVFQGDCLSPLLFCISLLPVSVALRKTRGYQCGPPGNRTHKVTHLFYMDDLKLYATSDRDLQQSLKVVQEYTRDIGMEFGLDKCAVLKLQKGRRVDQPENEHLTDGSILRHLEEDETYKYLGVDQHQMHDTNNVKKALRSKYRQRLRKIWESQLSGINKVAATNMLAVPVLLYSFGVLKWRREELRELDRSTRKMMHMNRSIHPRSSVSRIYLPRQQGGRGLLSLERMHNRLTVSLACKVFKSADPLLRLVRDHETTGIGAFLFKAASKAADELGLRFAVDDDQSLTRLAPDQVKRQVKTAEQRLLLEDHVSKPQHGVFYRNIGDLNLSRELTFSFLRSAGLKSETEGFLLACQDGVISTLVYRAQFSNVADTRCRSCQQHPETLMHLLSACPVHAVSSYIYRHNAALRVLYYHLRHHYGIDKTPVLPYAPDEIEAVVENNNCRIYWNYGFPTTTRLQANKPDIVLLDKQNNSMFVIEFSAPAETNILIKEREKRAKYIPLIGELRRLYPECRLKMVVLIVGALGGIKDSMLTELQKIPACRDSSKQLVMRMQKAVVLGSLRLLRQMNLAEDH

SEQ ID NO: 15801 - protein, 1047 aa, Pissodes strobi
MPDNDPGNGNGRFRWTDELRDDLLDAYEDSEPGRRGYMARMHALWSGKRPELNHISKQHLRDHAAYLRRSGYVRTPRDEPEAPVLAVIEDQIQPEHVPVQIQHVVPENADNGLSLRNTRINNKCHIKTQDITNMDVALANELPEMSDIVTINNAVYHAACQLMPNANGDPFAGTVRKTERRIERIANKILMARQQASRIQCVVEYIAAKRPFTQKIKRIARQLRQEHHTLNKVTLLTIKQRCIDRMRSLGVIKNSLIKKARGIKDNNTFNTKPSRIILDDPQPVIENPPSANEVENFWRNVCESTTPIKENTPSLIYFRSYCTRLQQDQRINNFWWKKFPSTHRHLARIFTSWLNGNEPIPEWLVEGRTTLIPKKGNLAEPKNYRPITCLNSCYKVFTRVLYCRLLGSVEPVLNDVVEQRGGKRGFEGCKENLLIDRCITQDSIQYKRNLSMAWIDYKKAFDTTSHELLLHLLQTLSVPMPLVRCIEQLMPLWKSKFSISTGNTKVITEPVAFRRGVFQGDCLSPLLFCISLLPVSVALRKTRGYQCGPPGNRTHKVTHLFYMDDLKLYATSDRDLQQSLKVVQEYTRDIGMEFGLDKCAVLKLQKGRRVDQPENEHLTDGSILRHLEEDETYKYLGVDQHQMHDTNNVKKALRSKYRQRLRKIWESQLSGINKVAATNMLAVPVLLYSFGVLKWKREELRELDRSTRKMMHMNRSIHPRSSVSRIYLPRQQGGRGLLSLERMHNRLTVSLACKVFKSADPLLRLIRDHETTGIGAFLFKAASKAADELGLRFAIDNDQSLTRLAPDQVKRQVKTAEQRLLLEDHVSKPQHGVFYRNIGDLNLSRELTFSFLRSAGLKSETEGFLLACQDGVINTLVYRAQFSNVADTRCRSCQQHPETLMHLLSACPVHAVSSYIYRHNAALRVLYYHLRHHYGIDETPVLPYAPDEIEAVVENNNCRIYWNYGFPTTTRLQANKPDIVLLDKQNNSMFVIEFSAPAETNILIKEREKRAKYIPLIGELRRLYPECGLKMVVLIVGVLGGIKDSML

SEQ ID NO: 15802 - protein, 1114 aa, Pissodes strobi
MPDNDPGNGHGCFRWTDELRDDLLDAYEDSEPGRRGYMARMHALWSGKRPELNHISKQHLRDHAAYLRRSGYVRTPRDEPEAPVLAVIEDQIQPEQGPVQIQHVVHENTDNGLSLRNTRINNKCHIKTQDITNMDVALANELPEMSDIVTINNAVYHAACQLMPNANGDPFAGTVRKTERRIERIANKILMARQQASRIQCVVEYIAAKRPFTQKIKRIARQLRQEHHTLNKVTLLTIKQRCIDRIRSLGVIKNSLIKKARGIKDNKTFNTKPSRLLDDPQPVIENPPSANEVENFWRNVCESTTPIKENTPSLIYFRSYCTRLQQDQRYDPEITQEEVRKALEGTRNFSAPGLDGINNFWWKKFPSTHRHLARIFTSWLNGNEPIPEWLVEGRTTLTPKKGNLAEPKNYRPITCLNSCYKVFTRVLYCRLLGSVEPVLNDVVEQRGGKRGFEGCKENLLIDRCITQDSIQYKRNLSMAWIDYKKAFDTTSHKLLLHLLQTLSVPMPLVRCIEQLMPLWKSKFSISTGNTKVITEPVAFRRGVFQGDCLSPLLFCISLLPVSVALRKTRGYQCGPPGNRTHKVTHLFYMDDLKLYATSDRDLQQSLKVVQEYTRDIGMEFGLDKCAVLKLQKGRRVDQPENEHLTDGSILRHLEEDETYKYLGVDQHQMHDTNNVKKALRSKYRQRLPKIWESQLSGINKVAATNMLAVPVLLYSFGVLKWKREELRELDRSTRKMMHMNRSIHPRSSVSRIYLPRQQGGRGLLSLERMHNRLTVSLACKVFKSADPLLRLIRDHETTDIGVFLFKAASKAADELGLRFAIDDDQSLTRLAPDQVKRQVKTAEQRLLLEDHVSKPQHGVFYRNIGDLNLSRELTFSFLRSAGLKSETDGFLLACHDGVINTLVYRAQFSNVADTRCRSCQQHPETLMHLLSACPVHAVSSYIYRHNAALRVLYYHLRHHYGIDETPVLPYAPDEIEAVVENNNCRIYWNYGFPTTTRLQANKPDIVLLDKQNNSMFVIEFSAPAETNILIKEREKRAKYIPLIGELRRLYPECRLKMVVLIVGVLGGIKASMLTELQKIPACRDSSKQLVMRMQKAVVLGSLRLLRQMNLAEDH

SEQ ID NO: 15803 - protein, 1114 aa, Pissodes strobi
MPDNDPGNGHGRFRWTDELRDDMLDAYEDSEPGRRGYMARMHALWSGKRPELNHISKQHLRDHAAYLRRSGYVRTPRDEPEAPVLAVIEDQIQPERAPVQIQHVVHENTDNGLSLRNTRINNKCHIKAQDITNMDVALADELPEMSDIVTINNAVYHAACQLMPNANGDPFAGTVRKTERRIERIANKILMARQQASRIQCVVEYIAAKRPFTQKIKRIARQLRQEHHTLNKVTLLTIKQRCIARIRSLGVIKNSLIKKARGIKDNNTFNTKPSRLLDDPQPVIENPPSANEVENFWRNVCESTTPIKENTPSLIYFRSYCTRLQQDQRYDPEITQEEVRKALEGTRNFSAPGLDGINNFWWKKFPSTHRHLARIFTSWLNGNEPIPEWLVEGRTTLIPKKGNLAEPKNYRPITCLNSCYKVFTRVLYCRLLGSVEPVLNDVVEQRGGKRGFEGCKENLLIDRCITQDSIQYKRNLSMAWIDYKKAFDTTSHELLLHLLQTLSVPMPLVRCIEQLMPLWKSKFSISTGNTKVITEPVAFRRGVFQGDCLSPLLFCISLLPVSVALRKTRGYQCGPPGNRTHKVTHLFYMDDLKLNATSDRDLQQSLKVVQEYTRDIGMEFGLDKCAVLKLQKGRRVDQPENEHLTDGSILRHLEEDETYKYLGVDQHQMHDTNNVKKALRSKYRQRLRKIWESQLSGINKVAATNMLAVPVLLYSFGVLKWKREELRELDRSTRKMMHMNRSIHPRSSVSRIYLPRQQGGRGLLSLERMHNRLTVSLACKVFKSADPLLRLIRDHETTGIGAFLFKAASKAADELGLRFAIDDDQSLTRLAPDQVKRQVKTAEQRLLLEDHVSKPQHGVFYRNIGDLNLSRELTFSFLRSAGLKSETEGFLLACQDGVINTLVYRAQFSNVADTRCRSCQQHPETLMHLLSACPVHAVSSYIYRHNAALRVLYYHLRHHYGIDETPVLPYAPDEIEAVVENNNCRIYWNYGFPTTTRLQANKPDIVLLDKQNNSMFVIEFSAPAETNILIKEREKRAKYIPLIGELRRLYPECRLKMVVLIVGVLGGIKDSMLTELQKIPACRDSSKQLVMRMQKAVVLGSLRLLRQMNLAEDH

SEQ ID NO: 15804 - protein, 1114 aa, Pissodes strobi
MPDNDPGNGHGRFRWTDELRDDLLDAYEDSEPGRRGYMARMHALWSGKRPELNHISKQHLRDHAAYLRRSGYVRTPRDEPEAPVLAVIEDQIQRERAPVQIQHVVHENTDNGLSLRNTRINNKCHIKTQDITNMDVALANELPEMSDIVTINNAVYHAACQLMPNANGDPFAGTVRKTERRIERIANKILMARQQASRIQCVVEYIAAKRPFTQKIKRIARQLRQEHHTLNKVTLLTIKQRCIDRIRSLGVIKNSLIKKARGIKDNNTFNTKPSRLLDDPQPVIENPPSANEVENFWRNVYESTTPIKENAPSLIYFRSYCTRLQQDQRYDPEITQEEVRKALEGTRNFSAPGLDGINNFWWKKFPSTHRHLARIFTSWLNGNEPIPEWLVEGRTTLIPKKGNLAEPKNYRPITCLNSCYKVFTRVLYCRLLGSVEPVLNDVVEQRGGKRGFEGCKENLLIDRCITQDSIQYKRNLSMAWIDYRKAFDTTSHELLLHLLQALSVPMPLVRCIEQLMPLWKSKFSISTGNTKVITEPVAFRRGVFQGDCLSPLLFCISLLPVSVALRKTRGYQCGPPGNRTHKVTHLFYMDDLKLYATSDRDLQQSLKVVQEYTRDIGMEFGLDKCAVLKLQKGRRVDQPENEHLTDGSILRHLEEDETYKYLGVDQHQMHDTNNVKKALRSKYRQRLRKIWESQLSGINKVAATNMLAVPVLLYSFGVLKWRREELRELDRSTRKMMHMNRSIHPRSSVSRIYLPRQQGGRGLLSLERMHNRLTVSLACKVFKSADPLLRLIRDHETTGIGAFLFKAASKAADELGLRFAVDDDQSLTRLAPDQVKRQVKTAEQRLLLEDHVSKPQHGVFYRNIGDLNLSRELTFSFLRSAGLKSETEGFLLACQDGVINTLVYRAQFSNVADTRCRSCQQHPETLMHLLSACPVHAVSSYIYRHNAALRVLYYHLRHHYGIDETPVLPYAPDEIEAVVENNNCRIYWNYGFPTTTRLQANKPDIVLLDKQNNSMFVIEFSAPAETNILIKEREKRAKYIPLIGELRRLYPECGLKMVVLIVGVLGGIKDSMLTELQKIPACRDSSKQLVMRMQKAVVLGSLRLLRQMNLAEDH

SEQ ID NO: 15805 - protein, 1114 aa, Pissodes strobi
MPDNDPGNGHGRFRWTDELRDDLLDAYEDSEPGRRGYMARMHALWSGKRPELNHISKQHLRDHAAYLRRSGYVRTPRDEPEAPVLAVIKDQIQPEQAPVQIQHVVHENTDNGLSLRNTRINNKCHIKTQDITNMDVALANELPEMSDIVTINNAVYHAACQLMPNANGDPFAGTVRKTERRIERIANKILMARQQASRIQCVVEYIAAKRPFTQKIKRIARQLRQEHHTLNKVTLLTIKQRCIDRIRSLGVIKNSLIKKARGIKDNNTFNTKPSRLLDDPQPVIENPPSANEVENFWRNVYENTTPIKENTPSLIYFRSYCTRLQQDQRYDPEITQEEVRKALEGTRNFSAPGLDGINNFWWKKFPSTHRHLARIFTSWLNGNEPIPEWLVEGRTTLIPKKGNLAEPKNYRPITCLNSCYKVFTRVLYCRLLGSVEPVLNDVVEQRGGKRGFERCKENLLIDRCITQDSIQYKRNLSMAWIDYKKAFDTTSHELLLHLLQTLSVPMPLVRCIEQLMPLWKSKFSISTGNTKVITEPVAFSRGVFQGDCLSPLLFCISLLPVSVALRKTRGYQCGPPGNRTHKVTHLFYMDDLKLYATSDRDLQQSLKVVQEYTRDIGMEFGLDKCAVLKLQKGRRVDQPENEHLTDGSILRHLEEDETYKYLGVDQHQMHDTNNVKKALRSKYRQRLRKIWESQLSGINKIAATNMLAVPVLLYSFGVLKWKREELRELDRSTRKMMHMNRSIHPRSSVSRIYLPRQQGGRGLLSLERMHNRLTVSLACKVFKSADPLLRLIRDHETTGIGAFLFKAASKAADELGLRFAIDDDQSLTRLAPDQVKRQVKTAEQRLLLEDHVSKPQHGVFYRNIGDLNLSRELTFSFLRSAGLKSETEGFLLACQDGVINTLVYRAQFSNVADIRCRSCQQHPETLMHLLSACPVHAVSSYIYRHNAALRVLYYHLRHHYGIDETPVLPYAPDEIEAVVENNNCRIYWNYGFPTTTRLQANKPDIVLLDKQNNSMFVIEFCAPAETNILIKEREKRAKYIPLIGELRRLYPECRLKMVVLIVGVLGGIKDSMLTELQKIPACRDSSKQLVMRMQKAVVLGSLRLLRQMNLAEDH

SEQ ID NO: 15806 - protein, 1000 aa, Pissodes strobi
MPDNDPGNGHGRFRWTDELRDDLLDAYEDSEPGRRGYMARMHALWSGKRPELNHISKQHLRDHAAYLRRSGYVRTPRDEPEAPVLAVIEDQIQPEQAPVQIQHVVHENTDNGLSLRNTRINNKCHIKTQDITNMDLALADELPEMSDIVTINNAVYHAACQLMPNANGDPFAGTVRKTERRIERIANKILMARQQASRIQCVVEYIAAKRPFTQKIKRIARQLRQEHHMLNKVTLLTIKQRCIDRIRSLGVIKNSLIKKARGIKDNNTFNTKPSRLLDDPQPVIENPPSANEVENFWRNVYESTTPIKENTPSLIYFRSYCTRLQQDQRYDPEITQEEVRKALEGTRNFSAPGLDGINNFWWKKFPSTHRHLARIFTSWLNGNEPIPEWLVEGRTTLIPKKGNLAEPKNYRPITCLNSCYKVFTRVLYCRLLGSVEPVLNDVVEQRGGKRGFEGCKENLLIDRCITQDSIQYKRNLSMAWIDYKKAFDTTSHELLLHLLQTLSVPMPLVRCIEQLMPLWKSKFSISTGNTKVITEPVAFRRGVFQGDCLSPLLFCISLLPVSVALRKTRGYQCGPPGNRTHKVTHLFYMDDLKLYATSDRDLQQCLKVVQEYTRDIGMEFGLDKCAVLKLQKGRRVDQPENEHLTDGSILRHLEEDETYKYLGVDQHQMHDTNNVKKALRSKYRQRLRKIWESQLSGINKVAATNMLAVPVLLYSFGVLKWKREELRELDRSTRKMMHMNRSIHPRSSVSRIYLPRQQGGRGLLSLERMHNRLTVSLACKVFKSADPLLRLIRDHETTGIGAFLFKAASKAADELGLRFAIDDDQSLTRLAPDQVKRQVRTAEQRLLLEDHVSKPQHGVFYRNIGDLNLSRELTFSFLRSAGLKSETEGFLLACQDGVINTLVYRAQFSNVADTRCRSCQQHPETLMHLLSACPVHAVSSYIYRHNAALRVLYYHLRHHYGIDETPDSSIARRSKNRSIGSLFNRAKRDLNRLSRQKIAK

SEQ ID NO: 15807 - protein, 1114 aa, Pissodes strobi
MPDNDPGNGHGRFRWTDELRDDLLDAYEDSEPGRRGYMARMHALWSGKRPELNHISKQHLRDHAAYLRRSGYVRTPRDEPEAPVLAVIEDQIQPEQAPVQIQHVVHENTDNGLSLRNTRINNKCHIKTQDITNMDVALADELPEMSDIVTINNAVYHAACQLMPNANGDPFAGTVRKTERRIERIANKILMARQQASRIQCVVEYIAAKRPFTQKIKRIARQLRQEHHTLNKVTLLTIKQRCIDRIRSLGVIKNSLIKKARGIKDNNTFNTKPSRLLDDPQPVIENPPSANEVENFWRNVYESTTPIKENTPSLIYFRSYCTRLQQDQRYDPEITQEEVRKALEGTRNFSAPGLDGINNFWWKKFPSTHRHLARIFTSWLNGNEPIPEWLVEGRTTLIPKKGNLAEPKNYRPITCLNSCYKVFTRVLYCRLLGSVEPVLNDVVEQRGGKRGFEGCKENLLIDRCITQDSIQYKRNLSMAWIDYKKAFDTTSHELLLHLLQTLSVPMPLVRCIEQLMPLWKSKFSISTGNTKVITEPVAFRRGVFQGDCLSPLLFCISLLPVSVALRKTRGYQCGPPGNRTHKVTHLFYMDDLKLYATSDRDLQQSLKVVQEYTRDIGMEFGLDKCAVLKLQKGRRVDQPENEYLTDGSILRHLEEDETYKYLGVDQHQMHDTNNVKKALRSKYRQRLRKIWESQLSGINKVAATNMLAVPVLLYSFGVLKWKREELRELDRSTRKMMHMNRSIHPRSSVSRIYLPRQQGGRGLLSLERMHNRLTVSLACKVFKSADPLLRLIRDHETTGIGAFLSKAASKAADELGLRFAIDDDQSLTRLAPDQVKRQVKTAEQRLLLEDHVSKPQHGVFYRNIGDLNLSRELTFSFLRSAGLKSETEGFLLACQDGVINTLVYRAQFSNVADTRCRSCQQHPETLMHLLSACPVHAVSSYIYRHNAALRVLYYHLRHHYGIDETPVLPYAPDEIEAVVENNNCRIYWNHGFPTTTRLQANKPDIVLLDKHNNSMFVIEFSAPAETNILIKEREKRAKYIPLIGELRRLYPECRLKMVVLIVGVLGGIKDSMLTELQKIPACRDSSKQLVMRMQKAVVLGSLRLLRQMNLAEDH

SEQ ID NO: 15808 - protein, 1114 aa, Pissodes strobi
MPDNDPGNGHGRFRWTDELRDDLLDAYEDSEPGRRGYMARMHALWSGKRPELNHISKQHLRDHAAYLRRSGYVRTPRDEPEAPVLAVIEDQIQPEQAPVQIQHVVHENTDNGLSLRNTRINNKCHIKTQDITNMDVALANELPEMSDIVTINNAVYHAACQLMPNANGDPFAGTVRKTERRIERIANKILMARQQASRIQCVVEYIAAKRPFTQKIKRIARQLRQEHHTLNKVTLLTIKQRCIDRIRSLGVIKNSLIKKARGIKDNNTFNTKPSRLLDDPQPVIENPPSANEVENFWRNVYESTTPIKENTPSLIYFRSYCTRLQQDQRYDPQITQEEVRKALEGTRNFSAPGLDGINNFWWKKFPSTHRHLARIFTSWLNGNEPIPEWLVEGRTTLIPKKGNLAEPKNYRPITCLNSCYKVFTRVLYCRLLGSVEPVLNDVVEQRGGKRGFEGCKENLLIDRCITQDSIQYKRNLSMAWIDYKKAFDTTSHELLLHLLQTLSVPMPLVRCIEQLMPLWKSKFSISTGNTKVITEPVAFRRGVFQGDCLSPLLFCISLLPVSVALRKTRGYQCGPPGNRTHKVTHLFYMDDLKLYATSDRDLQQSLKVVQEYTRDIGMEFGLDKCAVLKLQKGRRVDQPENEHLTDGSILRHLEEDETYKYLGVDQHQMHDTNNVKKALRSKYRQRLRKIWESQLSGINKVAATNMLAIPVLLYSFGVLKWRREELRELDRSTRKMMHMNRSIHPRSSVSRIYLPRQQGGRGLLSLERMHNRLTVSLACKVFKSADPLLRLIRDHETTGIGAFLFKAASKAADELGLRFAVDDDQSLTRLAPDQVKRQVKTAEQRLLLEDHVSKPQHGVFYRNIGDLNLSRELTFSFLRSAGLKSETEGFLLACQDGVINTLVYRAQFSNVADTRCRSCQQHPETLMHLLSACPVHAVSSYIYRHNAALRVLYYHLRHHYGIDETPVLPYAPDEIEAVVENNNCRIYWNYGFPTTTRLQANKPDIVLLDKQNNSMFVIEFSAPAETNILIKEREKRAKYIPLIGELRRLYPECRLKMVVLIVGVLGGIKDSMLTELQKIPACRDSSKQLVMRMQKAVVLGSLRLLRQMNLAEDH

SEQ ID NO: 15809 - protein, 981 aa, Pissodes strobi
MDVALANELPEMSDIVTINNAVYHAACQLMPNANGDPFAGTVRKTERRIERIANKILMARQQASRIQCVVEYIAAKRPFTQKIKRIARQLRQEHHTLNKVTLLTIKQRCIDRIRSLGVIKNSLIKKARGIKDNNTFNTKPSRLLDDPQPVIENPPSANEVENFWRNVYESTTPIKENTPSLIYFRSYCTRLQQDQRYDPEITQEEVRKALEGTRNFSAPGLDGINNFWWKKFPSTHRHLARIFTSWLNGNEPIPEWLVEGRTTLIPKKGNLAEPKNYRPITCLNSCYKAFTRVLYCRLLVSVEPVLNDVVEQRGGKRGFEGCKENLLIDRCITQDSIQYKRNLSMAWIDYKKAFDTTSHELLLHLLQTLSVPMPLVRCIEQLISLWKSKFSISTGNTKVITEPVAFRRGVFQGDCLSPLLFCISLLPVSVALRKTRGYQCGPPGNRTHKVTHLFYMDDLKLYATSDRDLQQSLKVVQEYTRDIGMEFGLDKCAVLKLQKGRRVDQPENEHLTDGSILRHLEEDETYKYLGVDQHQMHDTNNVKKALRSKYRQRLRKIWESQLSGINKVAATNMLAVPVLLYSFGVLKWKREELRELDRSTRKMMHMNRSIHPRSSVSRIYLPRQQGGRGLLSLERMHNRLTVSLACKVFKSADPLLRLIRDHETTGIGAFLFKAASKAADELGLRFAVDDDQSLTRLAPDQVKSQVKTAEQRLLLEDHVSKPQHGVFYRNIGDLNLSRELTFSFLRSAGLKSETEGFLLACQDGVINTLVYRAQFSNVADTRCRSCQQHPETLMHLLSACPVHAVSSYIYRHNGALRVLYYHLRHHYGIDETPVLPYAPDEIEAVVENNNCRIYWNYGFPTITRLQANKPDIVLLDKQNNSMFVIEFSAPAETNILIKEREKRAKYIPLIGELRRLYPECRLKMVVLIVGVLGGIKDSMLTELQKIPACRDSSKQLVMRMQKAVVLGSLRLLRQMNLAEDH

SEQ ID NO: 15810 - protein, 634 aa, Listronotus oregonensis
MAWIDYKKAFDTTSHELLLYLLKDLKVPLNLIRCIERLMSLWKSKFSITSGAQKVITEPITFRGVFQGDSLSPLLFCILLLPVSVSLRKTRGYCCGPPGRREHKVTHLFYMDDLKLYATSERDLQQSLKVVHEYTRDVGMEFGLDKCANLKLIKGRFGNDLEADQLADSALLRPLQNNENYRYLGIEQNRTQDVRAVKTELRSNYRRRLRRIWESELSGINKVLATNMLAVPVLLYFFGVVKWTREELRELDVSTRKMMHLHRSIHPRSSTSRIYLPRHQGGRGLLSLECMHDRLVLSLACQVANSTDPLMQLVRAHEIANVGAFLFKAAEKFGLRFAIDPNEDQSLVRLESKAVRTAVKKAEQQMLLEDHINKPQHGVFYRNIERLNLSRNLTFGFLKSAELKSETEGFLLACQDGVINTLVYRSQFSNIPDTACRACRQQPETLMHLLSPCPVHAVSGYIHRHNDALRVLYYHLRHYYGIDETAILPFAPGDIEAVVENDNCRIYWNYAFPTTHQIGANKPDIVLLDKRNNSMYVIEFSAPAETNIDIKEREKRAKYQDLLGELRRLYPEYNVRLVVLIVGVLGGIKENVLGELKCIPACQHSPEQLVMKMQKSVVLGSLRLLRQMNLAEDH

SEQ ID NO: 15811 - protein, 921 aa, Loxosceles reclusa
MLANIISEVHKQARIPPPKPPGGRPPPVNVEDARALQRLYRRNRRRAIRAILNGNSAQCTVAKQEAEEYFTNTWAERRFEDDIYSNVYDREPIQLHPFAEEEVARALRGAENTAPGNDRISYQTWREIDPEAKLFNICLAHKRIPNTWKTSRTILLPKKENPSCMSDWRPIALSPTAYKLFTKCLTARTSAWIMANNVLSHAQKGFTPHGGVFEHNYVLQTKIQRARTEKQPLQVAWLDCSNAFGSLPHGAVTKALESAGAGEGFIELVKDIYSNNKTTVATGQEDTAPIEIKAGIRQGCPLSGLLFDIAIDPILRRVQPDSSDDHQALAYADDIVLIARTPEELQEYIEKTEEGLRKLSIVLNPDKSAVLSYSPLKPAGPRDIEIQVHNRPVRCLKLGETYRFLGKPTGIASLPCMQEMKEYIDKGITIARSKLAPWQRIDALKSFFYPALHHAMRTGQFRKEDWAYLDRLLRAEVKKTLYLPQVASNDYLYGPLKNGCLAIPVAAEDADICAVDGAFKLLTSHDPRIRRMAYEDLQHTIRKRLHRAVDDRDLSRYLSGDSADEFHVASNAISSCWTSARMASHRLGVRWSFNGEAVCVTYKDNAIYERQRRVLSKMIRDRKRQERFESLLQHKSQGKAMECVALDPASSFFLSSGEYMRFGDWRFIHRARLNLLPLNGSKQWKTDNDRRCRRCGYHKETLPHAIQHCMRFSASIQERHAAILKRLKGAAGYKDKIIACEQPVGGDRRWKPDLVLKRGRDLTIIDVTVAFDNRQQALKEARRAKIEKYAELAESLRMQYQSVTVQALVVGSLGSWDPENDKVMRPIATRSYVRKFKQLCVADAIRHSRDTYCHFLTGSRPVSNSNGPSMQHTQNNPASDNSTQYQPPHRTAPLARVQPSSLPAPRPSSSETVRHRRNSIQ

SEQ ID NO: 15812 - protein, 1005 aa, Loxosceles reclusa
MDPARDIHVPILLTEWPEDCVDEDLEEIEIEGHELSPDPAAADIILPSLDAFHDNLDLLVGRTPSVETWNELQSTLEAITEAIHKQAKIPPPRPRKGPPPSVNTEDARALQRLYRRNRRRAIRALLNGNVAQCNIPGNEAEEHFRGIWRERQFNDRIYSTLHDRSPINMEPLTEVEVKRALSSAENTPPGNDRISYQTWRIIDPEAKVLTKIFNTCLLHKKIPKAWNMSRTILLPKKDHPTNMSDWRPIALSSTIYKLFTKCLTARVSEWITNNGVLSHAQKGFTPHDGVFEHNYVLQTLIQRARSEKRALQVAWLDCSNAFGSLPHAAVTKPLECAGAGADFVQLVRDLYTNTETVVATGQGDTAPIEIKAGIRQGCPLSGLLFDIAIDPVLRQIQSDTDNSHTALAYADDIVIMAKTVEELQARIDKTEKGLKMLSISLNASKSATLSYSPDKPAGPREVEVKVRNEPIKCLKLGETYRFLGKPTGIATLPSMSDMKEYIDKALIIVRSKLAPWQRIDALKSFLYPSLHHAMRTDQFRKGDWAHLDRVLKAEVKKTLYLPQESSNDYLYGPLRKGCLAIPVAAEDADICSIDGAFKLLTSRDPRIREMAFADLALTIRKRLKREVNDEDLTQYMSGVITDELHLSSNAISSCWTAARMASNRLGVKWTITGQAVCITYKNEAIYERQRNSLAKRIRNCKRQERCESLIKLKNQGKAIECVALDPASSHFLGSGDYLRFADWRFIHRARLNLLPLNATKRWKRDNDQRCRRCHYPRETLPHVLQHCMQFSSLIKERHGAVLNRLKRAAGYRYKVLSCEQQFGGDHRFKPDLVIKRGCDVTILDVTVTFDNRPDAFKEARRAKIEKYAELAESLRTQFHSVTVQALVMGALGSWDPENDKVMRPLTTRSYLKKFKQLCVADVIRHSRDLYVEFLTGKKPDTRTSREPACSTPCENEPANANPLSLHPNTSSYAAICSQSRARSLSPTSLHPTRQDSLRTRRHSLG

SEQ ID NO: 15813 - protein, 1826 aa, Loxosceles reclusa
MHQAKGNTSESDSEAESFIIDLGPEENSPPMPQTDTPSSESLSRQHMVYEGENPSWNLTDLLRTITTRRRSQGSPPPHESFHTPPVPEPNILLQEALDPPKMCIILSPPKPAQVSCRVSTSQEPTTSKAADLREIEELGRRIIRTSTSAGKGIVQRLTLRSKRALRKARELSRTSPILTPVIARTKSTVSNGVNKAIQELQDKSQHAPTPPPSPSTDSCTAWKNETLHVRFPLRGYFKCPRWGCPSTFRSPGAWQNDLRALKFHMKRAHDLTPVETQLWCKFCRQRIDEKPSLHKCLAGKKLREDEDKGPMIQCPECPYQTSLEKRLRNHRKRHVKAKDGENLPCSSNTSEPETCSPTTNVTIRQQVEQKHQDLSNNTQGEESNTSQDEKGPQSGGVSDQESPPLPHPCLLFTRMGTPAPPAFSFQRNLNGNEANAEDYAVIRRRTTMEHLIHRSPPRAAADETPRAPPQVASIPREEERIGQHNENSGAPTETPHHSPEPLFAIPEPVPPCTRPMEVQSRVCVNETPKRPETTSPQSTQVPNGQEQAGEDEDFQPVTRKMRKKTRRNSPQKKPEPSQQPEPPPVFPTVDAGTPEDAPLQPPPVLTANTAANDQRIELFGHELQLTFPVPAVFKCTFSRCNKEFRSAQSWSAAKHSLQRHIECHHEWKIEKETHWCGRCGDQIQARPSDHRCLIGVRLRDNLPNNLRYVCRRCRERFPSKKGLYNHIKVHDREELANAQASLTAPDTRQTRSLELGPSRDRSVNQSTTVPAQNPQSTPEPVPVIVDVWPDRQEALSPQPERDEELSTQSRQADNTQCSENMEPDPAPDLHVPIPITDWPEGDEEEEHEETEVEGHEPAPDPAAADLMVPSLAEFHETLDSFTDRSPSEENWEAFQDLLNNITAEVHRKAKIPPARPTGGRPPPVNTEDARAIQKLYRRNRRRAIRALLNDNASQCNVTVREAEKHFHNIWRERQFDEDVYNSTHDRSPIPMEHLTESEVARALTSAENTAPGNDRITYNTWRSIDPEAKVLTKVFNVCLTHRRIPRAWKTSRTILLPKKEHPTTMSDWRPIALSSTIYKLFTKCLTARVSAWIAANDVLSHAQKGFTPHDGVFEHNYVLQTRIQRARSEKQALQVAWLDCSNAFGSLPHGAVTKALETAGAGDEFIQLVKDIYSDTSTVVATGQGDTAPITIKAGIRQGCPLSGLLFDIAVDPILRQVQPDTSNQHSALAYADDIVIMAKTVGELQDQVNKAEEGLRKLSITLNANKSAVLSYSPIKPAGPRDVEVRINNQPIRCLKLGETYRFLGKPTGIATLPCLSEMQEYIDKALLIVRSKLAPWQRIDALKSFLYPALHHAMRTGQFRKGDWAHLDKVLKAEIKKTLYLPQESSNDYLYGPLRKGCLAIPVAAEDADICAIDGAFKLLTSRDPRIREMAFTDLSFTIRKRLKREIDDGDISRYLSGETSDELHLTSNAISSCWTAARMASYRLGVKWTIAGQTVCVTCKGDAIYERQRNSLARKIRNHKRQERFESLIKNKSQGKAIECVALDPASSRFLGSGEFLRFADWRFVHRARLNLLPLNATKAWKRNNDQRCRRCQYPKETLPHVLQHCMQFSTLIKERHTAILNRLKRAAGYRYKVLACEQQFGGDRRFKPDLVIQRGRDVTIIDVTVTFDNRPEALKEARRAKVQKYAELAESLRTQYQSVSVQALVMGALGSWDPENDKVLRPLTTKSYLRKFKQLCVADVVRHSRDLYFEFLTGRKPSPRSAGPAATTQPGGLDTGAEEPQTEISCSANHPSNNQSTRSKSLPPLRQLHLPRSTNTRRHSLG

SEQ ID NO: 15814 - protein, 1717 aa, Loxosceles reclusa
MEEDNCSDSGDDRLIVDMDHEDLFDIQLMARTKEQSDMQHVKLNEDGNPQVTTEAPVWSLSDLTSLFTPKRTSGYPPGSPTRAQQSPPLTDQNILLSDLNASPVPTVIISPPRPAPIPCRYSDSQTPMTSRQADLLEIGMLNQWGGRASHSTGGQDKQHRLRSKKALLRAKRTLHQTFGTTSGIARPKPKTSKAMPKAISEMLNPPPETPPNTHMNVDMRDDKLYLRFPISGALRCPKWGCYCKFISDGPWQGDHKALKTHLQRAHGVQEVVTKYWCTHCNKHIDTKPSEHPCLMGKKLRVDNPLATISQCEQCSYRTSNSKRFRNHVRRHARAISNDNDSPQGENRGDSPEDSPLTPGTANMNLHPALASEPLTPPLNNALNLQEPDSNVSTPDPRPIEQAGKATLQGTEQAAAENDDDFRVVVRKKKKKQKSRSDPFPENSPHTSPQQTLAESSTTALPPIIVSAPTSAVTQGAARTADSRISIVGHELHLTFPVPSVFRCTFTNCFKEFRSAKSWSAVKQSLQRHIETFHSWRIEKDVLWCGRCSDQIAGRPSDHHCLTGQQLRDPTPRNLRFVCQRCRERFPSKKGLYNHIKSHDRADAAERQPTLPAPDTGRANNARTNLVPPAANVNSSRTAAQPVPHIATPLTPQASTSPTTQAAGTPTSLPATPPTPDPVPITLDEWPPGTGTPSSPPPDIVTQNGTLVPDEDEFTPDPAPDMHVPIPITDWPDDCGDDDHTELDIDGIAPAVDPVAEDVALPTLQPFMEPLDSLVGRSPTEQNWGSFNDILEQIMADVHRQAKIPPPRPSGGRPAPINTEDARAIQRLYRRNRRRAIRALVNQNTTSCDTPTQDLEAHFRSIWGERQYDEELYHTRYDRDPIPMEPFSEEEVAQALRGAENTAPGVDRIPYQAWKEIDPEAKILARIFNICLAHKRIPQAWKTSKTILIPKTDHPSAISDWRPIALSPTIYKLFMKCLTVRVSNWITTHNVLSHAQKGFTPHDGVFEHNYVLQTRIQRARTEKKALQVAWLDCSNAFGSLPHGAVSKALESAGAGPEFVQLIKEIYANTETVISTASGDTKPIAVGAGIRQGCPLSGLLFDMAVDPVLRTVQPDTVQTHSALAYADDIVLLADTPEYLQTQIAKTEEGLRKLSITLNPGKSAVLSYSPKKPAGPRDIDIRVQDQPVRCLQMGETYRFLGKPTGIAALPCLNDMKELIDQALIIVRSKLAPWQRIDALKSFFYPTLHHAMRTGQFRKGDWAHLDKVLRAEIKKTLYLPQESSNEYLYGPLKKGCLAVPEAAENADLCAIDGAFKLLTSRDPRIRKMAHDDLSLTIRKRLRREIDDTDLCRYMSGDCSEDFHITSNAISSCWTAARMASQRIGVKWSFASESICVTYKDLSLYERQRNIIAKKIRDRRKQERCVALHELKSQGKAMECVALDPSSSHFLGSGEYMRFADWRFVHRARLNLLPLNGSKKWKSGNDRRCRRCQYQHETLPHVIQHCMRYSSLNKERHTAILNRLKKAAAYRYKILSCEREFGGDRRFKPDLVIKRGRHLTILDVTVPFENRPDALKAARRAKIEKYTELADSLRSQYQSVTVQALVVGALGSWDPENDKVMRPLTTRSYLKKFKQLCVADAIRHSRDIYFEFITGKKPDSRNAASQNHLSSDATTSGNLTQQTSAPDQPTQPSPRPARVRSFSAPTESQSSTAAIHHGRLSL

SEQ ID NO: 15815 - protein, 1828 aa, Loxosceles reclusa
MNQPLRKTSYVNQRDPRMRGQKFMATVQVIPTLQTRFTPPQRNTEEKQSNADSGQYGNSLATEGMPSEEMIHLDSFCPSPPLVMDIPELIISGSEDSQDEEDCTRMQEISETPAEAREPNLVGPKNQETPSPPRVTTLLLSGSDGRMCNMRAPEVAPSQPPVNAANTYSYSQTPTTLAQADAEEARRRVEETRRGSCSTGGSLPLPMRLRSKKALRKAKKQLIHEMTTPKAIAHHRKSPPIMPPKASHKIGRPDLVPVVNDKDIPHRLRQEEFILVDEDTLHVRFPLPGPFRCPKWGCTCSFRSAGSWQNDLRALRRHLDRAHWLDIKTTPFWCGKCFGRIEDKPSLHKCLVKQKLRADYEYATPLQCKKCPYFTKNQKGFRNHLRYHNLKERQETGASCGTLSTPTSSLEDANGCKETLTSPAAKTKTDDLGSSPMSVTTTPGHVSSDYATRPGVLKQSMLAQREENGKVSEQHASPPDGLNEGPLDATPPTNDGDDFKEVPRRRKKKSRSPNMKANMPVTVDSGACRTHLITPPTGLIRSNQLETTSFNPPLADPPVSGDARIEPNERSSGQYMATNGGPSTAQHSDPRISLQSHTLHLRFPVPDVFVCPFGGCQKQFRSAKSWSAAKQSLQRHIENHHEWKITEENLWCGICSDKILTRPSDHRCLVGIQLRGKTPNNLRYVCRRCRERFPSRKGLFNHKKAHDREDAMSKQPALPTPDTGRNRHTNEQQPQTETGGSMDSPRANHRPMPVTNTTPEQGTHAMARTVTPPEAGQVNTQTPNSVALVIDSWHEEFEGNESPGQGSGTATPAGISQMDERPSQDPVPDMSVPIAITDWPDDCVDEETPEEEVEGIVPAPDPLESDISLPSLAPFAEQLDSLIGRSVNQQSWDQFESMLESITEDVHRQIKIPPPRPPGNRPPPPINTEDARALQRLYRRNRRRAIRALINNNASYCNSPVDEVQAYFSNCWKDRDFDEEIYDVRHDRDPIPTEPFTEEEVARALRSAENTAPGIDRISYQGWREIDPEAKIITKILNTCLVYKRIPQTWKRSRTILLPKKDKPAALSDWRPIALSSTIYKLFTKCLTARVSTWLSQHNVLSHAQKGFTPHDGVFEHNYILQTRIQRARTEKRTLQLAWLDCTNAFGSLPHGAVLKALESAGAGPEFTELIQDIYSGTETVVATAQGDTAPIPIKAGIRQGCPLSGLLFDIAVDPILRLVQPDTDDHHKALAYADDVVLIAESPEELQAQVQKVEEGLQRLSIEINPTKSAVLSYSPKKPAGTRNINIQIRDQQVRCLQMGEAYRFLGKPTGIATLPSYEDLRDYIDTGLTIVRSKLAPWQRIDALKSFFYPALHHAMRTGQFRKGDWAKLDRVMRAEIKKTLYLPQEAANEYIYGPMKKGCLAIPMAAEDADICAIDGAYKLLTSKDPRIRRIASQDLSLTVRKRLRRDVDDGDLSRYLSGVSEDEFHTSSNAISSCWTAARMASHRLGIKWTVAAGSVCITYKEMSIYESQRNTVSRRIREKKRQERSDELKKHKSQGKAMECVALDPASSRFVGSGEYIRFADWRFIHRARLNLLPLNGCKRWKSSNDKRCRRCGYQLETIPHVLQHCMQLSSLNKARHAAILQRLKKAASYKAKIISCEREFGEGRRWRPDLVIKRGRDLTILDVTIPFDNRPEALKEARRAKIAKYSELADSLRDKYQTVTVQALVVGALGSWDPENDKVLRPLTTRSYLKKFKELCVADTIRHSRDIYVEFLTGKKPDSRARGAAQRQNLNNSPIVNNMNCTIPSAHAYPGPRTPFYRASSVPTRCDPPQDGTSTRQRRNST

SEQ ID NO: 15816 - protein, 1109 aa, Girardia tigrina
MTANLLRFDYGQMNNLLNILPPRPGWKMLSTLITHRIAKGDEIFIKKNISFSDFIDVDKVLCPVCLSDFQWFLIVYDKSNKTSTVYNTLDSLSADQTTAIDILTSNICSFFRIDKDGWTINNSNEIEKTTSFTGSGYWIANVIWQLFHDQPTKLDVRDIIHDLTKSDNKVKKLKHQNKIEKETVDRNKRFDLMTEFIADNKHRNVETLENLFTDYILSTRNKRLKSFNNSRTSKEGRHKKDKNIRYLYNVQPKKTIELILDDTEVDGALPLNELEAYAMSKAGESPKTDWTQSPDIKTGPGFSFRHLSSEEVAAKLKNTSNTSQGISNITYSDIDYCDPGCQFLTVLFNKIIDAGIIPTRWRKFLTVMIPKPGKTGTYDKIGSWRPIALLECIAKLFTSCLCSQLESWLTENDLISSFQKGTGPSDGCAEHNNVLRILLEDFANVHVAFLDLTDAFGSIPIEHVLGILRKKGLDNISCSLVRNLYSDCNSIYTCNDCSTNFTAINRGVRQGCPLSMLLFCIGIDPLLSTLQQNESFGIETDVGRVTCLAYADDIALVASDRETLQEMVNVANSIVSWSSMRFNVGKCGYLSCPLEADTIYIDGSAIPIVDDEEGYRYLGVDFTRKTKRTPEKLFKKLIRDLKKIANSILFPWQKIDAYKIFLHSRLIFFFRNYNIPNRELTDYGHHDTTTAVFKSGLDVEIRRFIKEICGTEPNSSNEYIYADKTLGGLGFISVRDEYSIQSIIQAFRNITCPDIVTRSLTQINLLNTVYKYHKTEIDCSLPDCLAWLNEGDKENGYRSWWTKIRNSIKYLDSIGLRIRFDHNEMGTCLKINTDKEAIIINSKQIKSASHQIHKLYGKLKFRKWSRQRVAGISATALCENPVSSSILYDNSLTNTEWRFLHAARTNSLPTNFIPNKPATETKCRACGSAVETQHHVFCICKRNSPLINARHDAVQNIFAEALLTELPILEIITNRECDWSMTKKRVDLQITNRGGRELWLIDVKTPYDTAKLLENARDENEKKYKQLFDEARQVHRGWTVRLGTLVVGCLGSWPETNNEMLKPFKLSQTTMTNLRRMCAISNVKHCSTTWGKHNTGQWNPLSDEKGRDA

SEQ ID NO: 15817 - protein, 1031 aa, Girardia tigrina
MKFLSKRISLLVTLDIDKVFCPVCLSDFQWFLIVYDKSNRTSTVYNTLDSLSADQTTAIDILTSNLCSFFRIDKDGWTINNSNEIEKTTSFTGSGYWIANVIWQLFHDQPTKLDVRDIIHDLTKSDNKVKKLKHQNKIEKETVDRNKRFDLMTEFIADNKHRNVETLENLFTDYILSTRNKRIKNFNNSRTSKEGRHKKDKNIRYLYNVQPKKTVELILDDTEVDGALPLNELEAYAMSKAGESPKTDWTQSPDIKTGPGFSFRHLSSEEVAAKLKDTSNTSPGISNITYSDIDYCDPGCQFLTVLFNKIIDAGIIPTRWRKFLTVMIPKPGKTGSYDKIGSWRPIALLECIAKLLTSCLCSQLESWLTENDLISSFQKGTGPSDGCAEHNNVLRILLEDFSNVHVAFLDLTDAFGSIPIEHVLGILKKKGLDDISCFLVRNLYSDCNSIYTCNDCSTNFTAINRGVRQGCPLSMLLFCIGIDPLLSTLQENESFGIETDVGRVTCLAYADDIALVASDRQTLQKMVNVANSIVSWSSMRFNVGKCGYLSCPLEADTIYIDGSAIPIVDDEEGYRYLGVDFTRKTKRTPEKLFKKLIRDLKKIANSILFPWQKIDAYKIFLHSRLIFFFRNYNIPNKELTDYGHHDTTTAVFKSGLDVEIRRFIKEICGTQPNSSNEYIYADKTLGGLGFISVRDEYSIQSIIQAFRNITCPDIVTRSLTQINLLNTVYKYHKTEIDCSLPDCLAWLNEGDKENGYRSWWTKIRNSIKYLDSIGLRIRFDHNEMGTCLKINTDKEAIIINSKQIKSDSHQIHKLYGKLKFRKWSRQRVAGISATALCENPVSSSILYDNSLTNTEWRFLHAAHTNSLPTNFIPNKPATETKCRACGSAVETQHHVFCICKRNSPLINAGHDAVQNIFAEALLTELPILEIITNRECDWSMTKKRVDLQITNRGGREPLLIDVKTPYDTARLLENARDENEKKYQQLFDEARQVHREWTVRLGTLVVGCLGSWPEANNEMLKPFKLSQTTMT

SEQ ID NO: 15818 - protein, 1109 aa, Girardia tigrina
MTANLLRFEYGQMNNLLSILPKRSGWKMLSPLRTHRIAKGDENFIKKNISFSDFMDIDKVFCPVCLSDFQWFLIVYDKSNRTSTVYNTLDSLSADQTTAIDVLNSNLCSFFRIDKDGWTINNSNEIEKTTSFTGSGYWIANVIWQLFHDQPTKLDVRDIIHDLTKSDNKIKKIKHQNKIEKETVDRNKRFDLISGFIADNKHRNVETLENLFTEYILTTRNKRIKNFNNSRTTKEGRHKKDKNIRYLYNVQPKKTIELILDDTEVDGALPLNELEAYAMSKAGESPNTDWTQSPDIKTGPGFSFRHLSSDEIVAKLKNTSNTSPGISNITYSDIDYCDPGCQFLTVLFNKIIDAGIIPTRWRKFLTVMIPKPGKTGSYDKIGSWRPIALLECIAKLFTSCLCSQLESWLTENDLISSFQKGTGPSDGCAEHNNVLRILLEDFDNVHVAFLDLTDAFGSIPIEHVLGILKKKGLDDISCSLVRNLYSNCNSIYTCNDCSTNFTEINRGVRQGCPLSMLLFCIGIDPLLTTLQENESFGIEIDAGRISCLAYADDIALVASDRETLQEMVNVANSIVSWSSMRFNVGKCGYLSCPLEADTIYIDGSAIPIVDDEEGYRYLGVDFTRKTKRTPEKLFKKLIKDLKKIANSILFPWQKIDAYKIFLHSRLIFFFRNYNIPNKELTDYGHHDTTTAVFKSGLDVEIRRCIKEICGTQPNSSNEYIYADKTLGGLGFISVRDEYSIQSIIQAFRNITCPDIVTRSLTQINLLNTVYKYHKTEIDCSLPDCLAWLNEGDKENGYRSWWTKVRNSIKYLDSIGLRIRFEHNEMGTCLKINTDKEAIIINSKQIKSASHEIHKLYGKLKFRKWSRQRVAGISATALCENPVSSSILYDSSLTNTEWRFLHAARTNSLPTNFIPNKPATETKCRACGSAVETQHHVFCICKRNSPMINARHDAVQNIFAEALITEFPILEIITNRECDWSMTKKRIDLQITNRGGRELWLIDVKTPYDTAKLLENAREENEKKYKQLFDVARQVHREWTVRLGTLVVGCLGSWPEANNEMLKPFKLSQTTMTNLRRMCAISNVKHCSTTWGKHNTGQWNPLSIEKGGDA

SEQ ID NO: 15819 - protein, 1260 aa, Strongyloides venezuelensis
MLRWSEEEIQILEEISKQEVKGRTLDDYKVIKNAHFPNRSTAAVKKKLLEIIKAKKEAEGKNTKKPAYWSNDEVEKLIQQFKTTSPRLTKTQRCQILVESNNFPGRSLKAIQNYLRTNFYELYEGIQRPSRNSATNLKLGESQKRPKFDDSTNEISRDIQTDEIKTNKKLTIRSPKICLISQSHPTETVTKTKNTEEEKGTNQSEERNDKQITTSCDETTAEVNCQPKTVEKTERNDMTKDNIEKMFNKFYGLLGNKEKKPKRLLKFNLNENNPVLTKVNQILSRKIQTLIDTVKKKNRRHVLCKRAILAAGYTLRKKIVGNLEGKKSEPCHKRTERKILKLQMRIKNAKEIQKNGDIKSKSLKDEVRQMKKLQMTPSQYIISTIDRIAQLEKEFIFQKEKYEAYKVRSKYSNTPSIKALGLKNKGTDELNFDIAEQFYTELYKKVDDDNLQTPIYDSWIDHINDLCLTRVDLELTESETDEIVKQNLKSMALWKTPGEDGIPNFLWKKLSAATSYLCHWIKEVTTGKYTLNERDVKGICTLIHKNDSKSEVTNFRPISLLNGDYKCLTKLIAEVILQNIPPNLIPKQQLARADTWGTLHGLMLDKAYTSLARYRKQNMFSAWYDFTKAYDSISHAQIRKLIRCLPIPDSLKKLVIRMMSIWNIELLRNDDKPRKRIYVKRGIYQGDSCSPLLFVLTTGSIIHKIETDVDIYKETSGRRRIIGYMDDIKAYSPTQPGIIKISETLERSAKELSLILNKRKCEIYSKNIANKEECNEEDVMFIPQIRKGYKYLGLIQLEKDLAEENFQKLEEKILSKTRMIFNSKLTTSQKRKIFNTAIISAGVYITGNIFPNEKMTSTMKRARQLDCKIRKIAIEEQIKTRPTSNARFYLPQNIGGLNFRSLEIETGIQFVRRYSYLMCKEEMEEAKKAFETIDKGGCRNPISDFNSIKNKYSLSPIDIKDKNYREVAKKWIDEIKQFEYKRMKSEWGKMMSYPKQILKYEEIIDFPGTNHIKLDSSKLMLLNASSEEQIFFRGKTAATAGGCESKCRYGCKVDETNYHIVTQCKAHSYNRRHDMIVYSILKRLKAKYKINTVLPVGRSVMNFEDNRIKIRAGHKLLTETPLTSNKPDLLIHLKNDNTIYVFEISVPHINNYVLQEKIKHTKYCKNSMVDITTDNVDKVCRDLNLMDMLERKERCKVKFGSLIIGCYGEYLRTEKALETETMLTEIGFTKNEIKKLIEEASYYVMTETSRILMKHSKKTN

SEQ ID NO: 15820 - protein, 1185 aa, Enteromyxum leei
MSVIALGVQCNRDPEVVCEEPTDQATEGVQQVVTIESDAETFASAKDDVSSECDIRGRIVSGAWLKEMSFFSHALGKRRREVPSFDVPSEEEESSQPKRWKTLGHNTLLPKAPVCSVSAVPELELNNPFLRSEEEAVEELNKEPEDLDPSMSSANVLKSVFGIFPKDAVDEQEELDIGGVQMNTDGEELMKQTTELTPPENLTTAGVEAEAVVEVAPVVTEAAVEVEAEAVVTNNSKKPKRLTYAEKNQRAEEAFKRLDKIVSTKSIPINDLYNDFLVEATLHAVDWKQFHKPMIPTVPNDADPNKERNATDVEQRSTRRLRGLYRNNPKRCFREITEKKPSWCKADVESIATSLNGINPNLPVATMDEDDVSNVNKEDDMVYDGPSNFYFGAEEIAVTIQRAKGDSSPGSDGIQMRFWKKLKNAEFILCKLFNKILREGRMPDSWLESRLLLLPKTETPNVMDPLDYRPISITQTLYRLFMSTLSRKLKNTYINLSPSQKGFQDGDGCVEHVFVLQEILDAARRDRRPLSAVWLDIAKAFDTVPHKAIVEELKNASVPASVRNLIVHLYNNCYSSVQDGSGNCAKIVAVGRGVRQGCPLSPLLFNLVMDKFLRKMDREEKGFKLNDVKVGVQAFADDIVMFAANDSELQEMLNMFEGFTKEHNLKVNNSKSAHLRIRWEGHTKLVNDSGRQNLTLNGEIVPYMEDYYKYLGTMSNLQSFKDKPEAIVEFERKLKLLHESKLFPFMKLEFLRVYLFPTLDYILKNTCLRIEDLKKVDRTLVATVRSWLGLPNECTNKMLYVPVAQGGLGLRNLVKDYKALRLAGALNVLHSRDSKIEHIAKKSLVKIVQKRKRGTRLTTLEYLNGDKEVIASKDIRSLLSSIRLNRKGLEVKLSLNDENDETSVDLDLQSLTCPQTITENQYRGASRIRRLRWNTQCGFMHAWNDLVDQGRSFECFTWTPVSNSWIRSCKIDLYAYTFALKGRANVLPSKYVLKRSKIVTNTKCRKCPVSTETLGHVLNGCRAHTAQYHLRHDEVVKIIAKTMTAKKDWKVFIGKKIPGIASQRRPDLVSICEKKKKANILDVTICYENSAGRMTEVRNAKLAKYADEKRQLEEKGFRVELGAVALGSLGSHHPENAQSYGMIGICGEAKLKRLMKSITENVIEQSAKIWKTHIKRPSESTAGVL

SEQ ID NO: 15821 - protein, 1269 aa, Enteromyxum leei
MSPEKHIQSSAESDKPFSSCSFATEKSAIAHFYKEYLAKRGKRRPLSNLLKLVAAYFRAQLEVRKILTREADKTKEVTTPTENEVFSFEVVSEDEVSRLASVLSSRDYARLRLQVTKLKSACANIEVELRSLYNAGKFPDELLGDNGLVSLAPNWSLTLLPAPPDCEGSNEVVVSEDPPSVVISVCEASVSPCEAPAEQMSVIALGVQCNRDPEVVCEEPTDQATEGVQQVVTIESDAETFASAKDDVSSECDIRGRIVSGAWLKEMSFFSHALGKRRREVPSFDVPSEEEESSQPKRWKTLGHNTLLPKAPVCSVSAVPELELNNPFLRSEEEAVEELNKEPEDLDPSMSSANVLKSVFGIFPKDAVDEQEELDIGGVQMNTDGEELMKQTTELTPPENLTTAGVEAEAVVEVAPVVTEAAVEVEAEAVVTNNSKKPKRLTYAEKNQRAEEAFKRLDKIVSTKSIPINDLYNDFLVEATLHAVDWKQFHKPMIPTVPNDADPNKERNATDVEQRSTRRLRGLYRNNPKRCFREITEKKPSWCKADVESIATSLNGINPNLPVATMDEDDVSNVNKEDDMVYDGPSNFYFGAEEIAVTIQRAKGDSSPGSDGIQMRFWKKLKNAEFILCKLFNKILREGRMPDSWLESRLLLLPKTETPNVMDPLDYRPISITQTLYRLFMSTLSRKLKNTYINLSPSQKGFQDGDGCVEHVFVLQEILDAARRDRRPLSAVWLDIAKAFDTVPHKAIVEELKNASVPASVRNLIVHLYNNCYSSVQDGSGNCAKIVAVGRGVRQGCPLSPLLFNLVMDKFLRKMDREEKGFKLNDVKVGVQAFADDIVMFAANDSELQEMLNMFEGFTKEHNLKVNNSKSAHLRIRWEGHTKLVNDSGRQNLTLNGEIVPYMEDYYKYLGTMSNLQSFKDKPEAIVEFERKLKLLHESKLFPFMKLEFLRVYLFPTLDYILKNTCLRIEDLKKVDRTLVATVRSWLGLPNECTNKMLYVPVAQGGLGLRNLVKDYKALRLAGALNVLHSRDSKIEHIAKKSLVKIVQKRKRGTRLTTLEYLNGDKEVIASKDIRSLLSSIRLNRKGLEVKLSLNDENDETSVDLDLQSLTCPQTITENQYRGASRIRRLRWNTQCGFMHAWNDLVDQGRSFECFTWTPVSNSWIRSCKIDLYAYTFALKGRANVLPSKYVLKRSKIVTNTKCRKCPVSTETLGHVLNGCRAHTAQYHLRHDEVVKIIAKTMTAKKDWKVFIGKKIPGIASQRRPDLVS

SEQ ID NO: 15822 - protein, 1269 aa, Enteromyxum leei
MSPEKHIQSSAESDEPFSSCSFATEKSAIAHFYKEYLAKRGKRRPLSNLLKLVAAYFRAQLEVRKILTREADKTKEVTTPTENEVFSFEVVSEDEVSRLASVLSSRDYARLRLQVTKLKSACANIEVELRSLYNAGKFPDELLGDNGLVSLAPNWSLTLLPAPPDCEGSNEVVVSEDPPSVVISVCEASVSPCEAPAEQMSVIALGVQCNRDPEVVCEEPTDQATEGVQQVVTIESDAETFASAKDDVSSECDIRGRIVSGAWLKEMSFFSHALGKRRREVPSFDVPSEEEESSQPKRWKTLGHNTLLPKAPVCSVSAVPELELNNPFLRSEEEAVEELNKEPEDLDPSMSSANVLKSVFGIFPKDAVDEQEELDIGGVQMNTDGEELMKQTTELTPPENLTTAGVEAEAVVEVAPVVTEAAVEVEAEAVVTNNSKKPKRLTYAEKNQRAEEAFKRLDKIVSTKSIPINDLYNDFLVEATLHAVDWKQFHKPMIPTVPNDADPNKERNATDVEQRSTRRLRGLYRNNPKRCFREITEKKPSWCKADVESIATSLNGINPNLPVATMDEDDVSNVNKEDDMVYDGPSNFYFGAEEIAVTIQRAKGDSSPGSDGIQMRFWKKLKNAEFILCKLFNKILREGRMPDSWLESRLLLLPKTETPNVMDPLDYRPISITQTLYRLFMSTLSRKLKNTYINLSPSQKGFQDGDGCVEHVFVLQEILDAARRDRRPLSAVWLDIAKAFDTVPHKAIVEELKNASVPASVRNLIVHLYNNCYSSVQDGSGNCAKIVAVGRGVRQGCPLSPLLFNLVMDKFLRKMDREEKGFKLNDVKVGVQAFADDIVMFAANDSELQEMLNMFEGFTKEHNLKVNNSKSAHLRIRWEGHTKLVNDSGRQNLTLNGEIVPYMEDYYKYLGTMSNLQSFKDKPEAIVEFERKLKLLHESKLFPFMKLEFLRVYLFPTLDYILKNTCLRIEDLKKVDRTLVATVRSWLGLPNECTNKMLYVPVAQGGLGLRNLVKDYKALRLAGALNVLHSRDSKIEHIAKKSLVKIVQKRKRGTRLTTLEYLNGDKEVIASKDIRSLLSSIRLNRKGLEVKLSLNDENDETSVDLDLQSLTCPQTITENQYRGASRIRRLRWNTQCGFMHAWNDLVDQGRSFECFTWTPVSNSWIRSCKIDLYAYTFALKGRANVLPSKYVLKRSKIVTNTKCRKCPVSTETLGHVLNGCRAHTAQYHLRHDEVVKIIAKTMTAKKDWKVFIGKKIPGIASQRRPDLVS

SEQ ID NO: 15823 - protein, 1085 aa, Enteromyxum leei
MSVIALGVQCNRDPEVVCEEPTDQATEGVQQVVTIESDAETFASAKDDVSSECDIRGRIVSGAWLKEMSFFSHALGKRRREVPSFDVPSEEEESSQPKRWKTLGHNTLLPKAPVCSVSAVPELELNNPFLRSEEEAVEELNKEPEDLDPSMSSANVLKSVFGIFPKDAVDEQEELDIGGVQMNTDGEELMKQTTELTPPENLTTAGVEAEAVVEVAPVVTEAAVEVEAEAVVTNNSKKPKRLTYAEKNQRAEEAFKRLDKIVSTKSIPINDLYNDFLVEATLHAVDWKQFHKPMIPTVPNDADPNKERNATDVEQRSTRRLRGLYRNNPKRCFREITEKKPSWCKADVESIATSLNGINPNLPVATMDEDDVSNVNKEDDMVYDGPSNFYFGAEEIAVTIQRAKGDSSPGSDGIQMRFWKKLKNAEFILCKLFNKILREGRMPDSWLESRLLLLPKTETPNVMDPLDYRPISITQTLYRLFMSTLSRKLKNTYINLSPSQKGFQDGDGCVEHVFVLQEILDAARRDRRPLSAVWLDIAKAFDTVPHKAIVEELKNASVPASVRNLIVHLYNNCYSSVQDGSGNCAKIVAVGRGVRQGCPLSPLLFNLVMDKFLRKMDREEKGFKLNDVKVGVQAFADDIVMFAANDSELQEMLNMFEGFTKEHNLKVNNSKSAHLRIRWEGHTKLVNDSGRQNLTLNGEIVPYMEDYYKYLGTMSNLQSFKDKPEAIVEFERKLKLLHESKLFPFMKLEFLRVYLFPTLDYILKNTCLRIEDLKKVDRTLVATVRSWLGLPNECTNKMLYVPVAQGGLGLRNLVKDYKALRLAGALNVLHSRDSKIEHIAKKSLVKIVQKRKRGTRLTTLEYLNGDKEVIASKDIRSLLSSIRLNRKGLEVKLSLNDENDETSVDLDLQSLTCPQTITENQYRGASRIRRLRWNTQCGFMHAWNDLVDQGRSFECFTWTPVSNSWIRSCKIDLYAYTFALKGRANVLPSKYVLKRSKIVTNTKCRKCPVSTETLGHVLNGCRAHTAQYHLRHDEVVKIIAKTMTAKKDWKVFIGKKIPGIASQRRPDLVSICKKIAYIMECNNIL

SEQ ID NO: 15824 - protein, 837 aa, Ramazzottius varieornatus
MLQWKASFLRLRNGREVDPKELDQLMSEFSDELSKCIDFLPGPRNPNKKYTGIRKKTIRRKSRVGYGTSSNPSRTSKREKAEKKEQLTYDQVQFDYYNQRRRVIRAVAGSGGKSCQIKIEKLVEAFEPRFATEKTNERAMYQSISDEEQAAIDAQFESTLSISDVRDAVKRIAVDSAAGPDRVLVRVIKQEAVMEVLAVIAAVLLEMNATKEHPLPSVLQLALTVLIHKGGDVTDGNNYRPISICSARRRVLERVVDRHLRRYGSVSRFRQGFTSAPGTHVNASILGSVSKKAQAEQSTVVVVLLDIKQAFEGILHVHLKKTLRASPLPTLVRNLILSLQGSNRTQLQVGGQRSSAIPVKKGVFQGVPLSPMLYNMSTDYVTRNMTEAPIAEEYGFPLCEGEQPVTFLGFADDSTVVGKSREEAIQLTEMAIGLFKEIGLEVSPTKSKAIVVENGVMSEVPLYLSSGAVIEATKKGEKVRYLGATVTDQLDFDQGEVIKQLTDQVDRLVHFAHLHADQKLNLLNQWLLPSIIYPLQTAPTNTILKVFLQTVDKIVKSTVREILQLPSDTAEAFMYAPRKYRGLGLMRAIWESQLQHISICHALLRDGNRYVVNVRDVAGEIETSIAALSIPPEKVPPRYNEYGGPVKPTRKIREELRTREFVRWSQMDRAAGVHQYRVHTQSNKWVYNRCGLTNAEWISCLKMTVNGVPVRSLHGRSKDGPACRAPGCEAERETLSHVLGSCHKGNLLRNARHNKIRTMIAEALRGKDGLEVYEEVPCIAENDSSRRVDIIIIDRGKSQAWIVDPIVRYEGGDQQATEVDNEKKRICEPCVRDLKRK

SEQ ID NO: 15825 - protein, 1278 aa, Hemaris fuciformis
METRSKSKRLGPLPGGDRRGTLGADAGCDSGRAVSGAELNRRAPTGLPENTTANVHDRLTDSRSSSPISSIVEPYSPSTISYAPSATDCESRHSSPSPIPALSATREVNTLLPASTKAGKVRLRMKWTVDVNTFIMRAYYQITKLETDMTTYRKSLHELFQNQYPGINVSEQRIADQRRAIVRNNYLSQETLEIIKKEVQAELQRNTTSVLSPTPQNSNRFETPDTASHHTPSPPRIYLNDLSTHYSQIGTRNNDKQISEIAPDGMTQKLQDEFQLTFIEYCGTDPTLRPPLPKLKYNRRLTLFLNIFNNNILTEFINSDHTLMDIHAIIYCTAMVISKQLGYKITHHTTHRPNSYNQKPAWQIRLEKNISHLRADIGRLTQYIQGNRSRKLVKHIEIIFKENKIHTKHENCNISPEEFLDTLKQKLSLKSHRLRRYMKGLKRKQQNKLFNTNEKIFYRQLNSKKNEEGENAEIPTKENLEEFWSKIWEKMVSHNEEAAWIKEEEKKWDWVKEMEFGDVTAEDILNVTSKLHNWKSAGIDKIHNFWFKKLHILHKSIAKNFTDIILGRQPIPQFITKGITYMIPKSKNTEDPSQYRPITCLPTIYKILTATITRKINTHLEINNIIAEEQKGCRQNHMGCKEQLIIDSTIHGHINSEKLNLHCTYIDYKKAFDSIPHSWLLKVLNIYKINPNIITFLKNIMTEWKTNLYLKSIVSRDISIKTGIYQGDSLSPLWFCLALNPLSTLLNKSQKGFLFQGSTHNTPISHLIYMDDIKLYSNTSKDMKHLLDITTEFSMDIKMQFGLDKCKTLHVKKGKAESEDYTVLDNQIISSMDTTEVYKYLGFHQSKKLDHFKIKRILTEEYKNRVTRISKSQLIGKNLVKAINTFAIPILTYSFGVIKWTKTDIHNLEIKTRTILTKHNHHHPKSAIERLSLKRKLGGRGLIDLRILLQKQTNNLKSFFYRKADNSIIHKIIVENDKKYSPLNLSENINVPDTHNRINADEDKLKCWKMKTLHGRHPYDLEQTYIDSEASNKFLTNGNLFPETEGFIIAIQDQIINTRNYRKHIIKDSSAADDKCRKCHKHPETIQHITGACPTLTQTDYTHRHNQIVNIIHQELAIKYKLLPNTQKPAPYYKYTPSPVLENKNYKVYYDRAILTDKTIHYNRPDITIQDKTNKITYIVDIGIPNTHNILKTITEKVTKYTELKEEIVRIWKMDKVYIVPMILSTTGVIPKHLHHSIKLLDLPPNIYILMQKAAILNTCRIVRKFLQCDNQLSVNDI

SEQ ID NO: 15826 - protein, 1278 aa, Hemaris fuciformis
METRSKSKRLGPLPGGDRRGTPGADAGCDSGRAVSGAELNRRAPTGLPENTTANVHDRLTDSRSSSPISSIVEPYSPSTISYAPSATDCESRHSSPSPIPALSATREVNTLLPASTKAGKVRLRMKWTVDVNTFIMRAYYRITKLETDMTTYRKSLHELFQNQYPGINVSEQRIADQRRAIVRNNYLSQETLEIIKKEVQSELQRNTTSVLSPTPQNSNRFETPDTASHHTPSPPRIYLNDLSTHCSQIGTRNNDKQILEIAPDGMTQKLQDEFQLTFIEYCGTDPTLRPPLPKLKYNRRLTLFLNIFNNNILTEFINSDHTLMDIHAIIYCSAMVISKQLGYKITHHTTHRPNSNNQKPAWQIRLEKNISHLRADIGRLTQYIQGNRSRKLVKHIEIIFKENKIHTKHENCNISPEEFLDTLKQKLSLKSHRLRRYMKGLKRKQQNKLFNTNEKIFYRQLNSKKNEEGENAEIPTKENLEEFWSKIWEKMVLHNEEAAWIKEEEKKWDWVKEMEFGEVTAEDILNVTSKLHNWKSAGIDKIHNFWFKKLHILHKSIAKNFTDIILGRQPIPQFITKGITYMIPKSKNTEDPSQYRPITCLPTIYKILTATITRKINTHLEINNIIAEEQKGCRQNHMGCKEQLIIDSTIHGHINSEKLNLHCTYIDYKKAFDSIPHSWLLKVLNIYKINPNIITFLKNIMTEWKTNLYLKSIVSRDISIKTGIYQGDSLSPLWFCLALNPLSTLLNKSQKGFLFQGSTHNTPISHLIYMDDIKLYSNTSKDMKHLLDITTEFSMDIKMQFGLDKCRTLHVKKGKAEPEDYTVLDNQIISSMDTTEVYKYLGFHQSKKLDHFKIKRTLTEEYKNRVTRISKSQLIGKNLVKAINTFAIPILTYSFGVIKWTKTDIHNLEIKTRTILTKHNHHHPKSAIERLSLKRKLGGRGLIDLRILLQKQTNNLKSFFYRKADNSIIHKIIVENDKKYSPLNLSENINVPDTYNRINADEDKLKCWKMKTLHGRHPYDLEQTYIDSEASNKFLTNGNLFPETEGFIIAIQDQIINTRNYRKHIIKDSSAADDKCRKCHKHPETIQHITGACPTLTQTDYTHRHNQIVNIIHQKIAIKYKLLPNTQKPAPYYKYTPSPVLENKNYKVYYDRAILTDKTIHYNRPDITIQDKTNKITYIVDIGIPNTHNILKTITEKVTKYTELKEEIVRIWKMDKVYIVPMILSTTGVIPKHLHHSIKLLDLPPNIYILMQKAAILNTCRIVRKFLQCDNQLSVNDI

SEQ ID NO: 15827 - protein, 1298 aa, Hyles vespertilio
METRLKKKMRGPLPGGDRRGTPGADAGCSSIRTVSGAELNRRAPTGSPENTTANVQNRLTDNLPQSPTSSVTEPYSPSTASYVPSASDEEYQIDITPSIPAASDTREAINAFLPASTKAGKVRIRMKWTMDVNIFIMRSYYLITKLETDLTTYRKTLHKLFVDRYPGVNVTEQRISDQRRVIIKNKYLSEDILNRIKEEVRLELEQDNLSTSSSHTPALTSSNIHRTRNIITSPNNLIESIDSYMPNNLPEYSMPSLAQTLTTGTRDNTSIVNASLPDGTTQRLSDELQSTLIKYTGTDPTLRPKLAKLKYCRKLTQLLYIFNNNILNRFLTPELDLLGIHTLVYCTAMVITKELGYNVTDNLEHRSQSTRIKPAWQRRLENNISQLRADIGRLTQYTRGIRSKKVVKRVEDIIRKNRIHTRHESDNSSLEEFLDTLKQKLALKAHRLARYTKGLKRQQQNNLFETNEKIFYRQLRSKNNNSDKNISEIPAKEQLEEFWSDIWEKTALHNTEAPWIKQEEDEWNCVDEMEFSEITAEEISVITSKLHNWKSAGIDNVHNFWFKKLNILHSCLAKNFSDIVLGKQPIPCFISKGITYMIPKSKNTQNPSQYRPITCLPTIYKILTSIITKRINTHLETNKILAEEQKGCRRNHMGCKEQLIIDSTILKQANSKKHNLHCTYIDYKKAFDSIPHSWLLKVLQIYKINPVIIKFLKEVMEQWKTTLYLKNNNNLMTTREIAIRKGIYQGDSLSPIWFCIAMNPLSNLLKRTQKGITLKCSTQNTIISHLIYMDDIKLYAKNSKDMKDLIDITAKFSNDINMQFGYEKCKTIHIKKGKVEAGDYIIHVDQIISSMESDEQYKYLGYYQAQQLDHIKLKEKLSIEYKSRVTSICKSQLTGKRLIKAINTFAIPVLTYSFGIIKWTKTDINNLEIKTRTILTKHNHLHPKSAIERLTLKRKYGGRGLIDLQTLWKNQIDNLRSYFYRKANESLLHKSIVENDTKYTPLNLSETQTDNRITSPDKEKIDRWKAKTLHGRHPHDLEQAHIDAEASNKWLSNANLFPETEGFIIAIQDQIINTRNYRKYIIKDPNTTDDKCRKCHRDSETIQHITGACPTLTQTDYTHRHNQVVNIIHQKLATKYNLIPDNNTYTPYYKYTPNPVLENNNYKMYYDRAILTDKTIHYNRPDITLQDKHNKITYIVDIAIPNTHNLLKTITEKISKYTELKEEIARIWRMEKVYIVPIVISSTGVIPNNLHHSLRLLDLSPHTYNLLQKAAILNTCRIVRKFMQCDNPEPDVTLQAQS

SEQ ID NO: 15828 - protein, 1298 aa, Hyles vespertilio
METRLKKKMRGPLPGGDRRGTPGADAGCSSIRTVSGAELNRRAPTGSPENTTANVQNRLTDNLPQSPTSSVTEPYSPSTASYVPSASDEEYQIDITPSIPAASDTREAINAFLPASTKAGKVRIRMKWTMDVNIFIMRSYYLITKLETDLTTYRKTLHKLFVDRYPGVNVTEQRISDQRRVIIKNKYLSEDILNRIKEEVRLELEQDNLSTSSSHTPALTSSNIHRTRNIITSPNNLIESIDSYMPNNLPEYSMPSLAQTLTTGTRDNTSIVNASLPDGTTQRLSDELQSTLIKYTGTDPTLRPKLAKLKYCRKLTQLLYIFNNNILNRFLTPELDLLGIHTLVYCTAMVITKELGYNVTDNLEHRSQSTRIKPAWQRRLENNISQLRADIGRLTQYTRGIRSKKVVKRVEDIIRKNRIHTRHESDNSSLEEFLDTLKQKLALKAHRLARYTKGLKRQQQNNLFETNEKIFYRQLRSKNNNSDKNISEIPAKEQLEEFWSDIWEKTALHNTEAPWIKQEEDEWNCVDEMEFSEITAEEISVITSKLHNWKSAGIDNVHNFWFKKLNILHSCLAKNFSDIVLGKQPIPCFISKGITYMIPKSKNTQNPSQYRPITCLPTIYKILTSIITKRINTHLETNKILAEEQKGCRRNHMGCKEQLIIDSTILKQANSKKHNLHCTYIDYKKAFDSIPHSWLLKVLQIYKINPVIIKFLKEVMEQWKTTLYLKNNNNLMTTREIAIRKGIYQGDSLSPIWFCIAMNPLSNLLKRTQKGITLKCSTQNTIISHLIYMDDIKLYAKNSKDMKDLIDITAKFSNDINMQFGYEKCKTIHIKKGKVEAGDYIIHVDQIISSMESDEQYKYLGYYQAQQLDHIKLKEKLSIEYKSRVTSICKSQLTGKRLIKAINTFAIPVLTYSFGIIKWTKTDINNLEIKTRTILTKHNHLHPKSAIERLTLKRKYGGRGLIDLQTLWKNQIDNLRSYFYRKANESLLHKSIVENDTKYTPLNLSETQTDNRITSPDKEKIDRWKAKTLHGRHPHDLEQAHIDAEASNKWLSNANLFPETEGFIIAIQDQIINTRNYRKYIIKDPNTTDDKCRKCHRDSETIQHITGACPTLTQTNYTHRHNQVVNIIHQKLATKYNLIPDNNTYTPYYKYTPNPVLENNNYKMYYDRAILTDKTIHYNRPDITLQDKHNKITYIVDIAIPNTHNLLKTITEKISKYTELKEEIARIWRMEKVYIVPIVISSTGVIPNNLHHSLRLLDLSPHTYNLLQKAAILNTCRIVRKFMQCDNPEPDVTLQAQS

SEQ ID NO: 15829 - protein, 1298 aa, Hyles vespertilio
METRLKKKMRGPLPGGDRRGTPGADAGCSSIRTVSGAELNRRVPTGSPENTTANVQNRLTDNLPQSPTSSVTEPYSPSTASYVPSASDEEYQIDITPSIPAASDTREAINAFLPASTKAGKVRVRMKWTMDVNIFIMRSYYLITKLETDLTTYRKTLHKLFVDRYPGVNVTEQRISDQRRVIIKNKYLSEDILNRIKEEARLELEQDNLSISSSHTPALTSSNIHRTRNIITSPNNLIESIDSYMPNNPPEYSMPSLAQTLTTGTRDNTSIVNASLPDGTTQRLSDELQSTLIKYTGTDPTLRPKLAKLKYCRKLTQLLFIFNNNILNRFLTPELDLLGTHTLVYCTAMVITKELGYNVTDNLEHRSQSTRIKPAWQRRLENNISQLRADIGRLTQYTRGIRSKKVVKRVEDIIRKNRIHTRHESDNSSLEEFLDTLKQKLALKAHRLARYTKGLKRQQQNNLFETNEKIFYRQLRSKNNNSDKNISEIPEKEQLEEFWSDIWEKTALHNTEAPWIKQEEDEWNCVDEMEFSEITAEEISVITSKLHNWKSAGIDNVHNFWFKKLNILHSCLAKNFSDIVLGKQPIPCFISKGITYMIPKSKNTQNPSQYRPITCLPTIYKILTSLITKRINTHLETNKILAEEQKGCRRNHMGCKEQLIIDSTILKQANSKKHNLHCTYIDYKKAFDSIPHSWLLKVLQIYKINPVIIKFLKEVMEQWKTTLYLKNNNNLMTTREIAIRKGIYQGDSLSPIWFCIAMNPLSNLLKRTQKGITLKCSTQNTIISHLIYMDDIKLYAKNSKDMKDLIDITAKFSNDINMQFGYEKCKTIHIKKGKVEAGDYIIHVDQIISSMESDEQYKYLGYYQAQQLDHIKLKEKLSIEYKSRVTSICKSQLTGKRLIKAINTFAIPVLTYSFGIIKWTKTDINNLEIKTRTILTKHNHLHPKSAIERLTLKRKYGGRGLIDLQTLWKNQIDNLRSYFYRKANESLLHKSIVENDTKYTPLNLSETQTDNRITSPDKEKIDRWKAKTLHGRHPHDLEQAHIDAEASNKWLSNANLFPETEGFIIAIQDQIINTRNYRKYIIKDPNTTDDKCRKCHRDSETIQHITGACPTLTQTDYTHRHNQVVNIIHQKLATKYNLIPDNNTYTPYYKYTPNPVLENNNYKMYYDRAILTDKTIHYNRPDITLQDKHNKITYIVDIAIPNTHNLLKTITEKISKYTELKEEIARIWRMEKVYIVPIVISSTGVIPNYLHHSLNLLDLSPHTYNLLQKAAILNTCRIVRKFMQCDNPEPDVTLQAQS

SEQ ID NO: 15830 - protein, 1298 aa, Hyles vespertilio
METRLKKKMRGPLPGGDRRGTPGADAGCSSIRTVSGAELNRRAPTGSPENTTANVQNRLTDNLPQSPTSSVTEPYSPSTASYVPSASDEEYQIDITPSIPAASDTREAINAFLPASTKAGKVRIRMKWTMDVNIFIMRSYYLITKLETDLTTYRKTLHKLFVDRYPGVNVTEQRISDQRRVIIKNKYLSEDILNRIKEEVRLELEQDNLSTSSSHTPALTSSNIHRTRNIITSPNNLIESIDSYMPNNLPEYSMPSLAQTLTTGTRDNTSIVNASLPDGTTQRLSDELQSTLIKYTGTDPTLRPKLAKLKYCRKLTQLLYIFNNNILNRFLTPELDLLGIHTLVYCTAMVITKELGYNVTDNLEHRSQSTRIKPAWQRRLENNISQLRADIGRLTQYTRGIRSKKVVKRVEDIIRKNRIHTRHESDNSSLEEFLDTLKQKLALKAHRLARYTKGLKRQQQNNLFETNEKIFYRQLRSKNNNSDKNISEIPAKEQLEEFWSDIWEKTALHNTEAPWIKQEEDEWNCVDEMEFSEITAEEISVITSKLHNWKSAGIDNVHNFWFKKLNILHSCLAKNFSDIVLGKQPIPCFISKGITYMIPKSKNTQNPSQYRPITCLPTIYKILTSIITKRINTHLETNKILAEEQKGCRRNHMGCKEQLIIDSTILKQANSKKHNLHCTYIDYKKAFDSIPHSWLLKVLQIYKINPVIIKFLKEVMEQWKTTLYLKNNNNLMTTREIAIRKGIYQGDSLSPIWFCIAMNPLSNLLKRTQKGITLKCSTQNTIISHLIYMDDIKLYAKNSKDMKDLIDITAKFSNDINMQFGYEKCKTIHIKKGKVEAGDYIIHVDQIISSMESDEQYKYLGYYQAQQLDHIKLKEKLSIEYKSRVTSICKSQLTGKRLIKAINTFAIPVLTYSFGIIKWTKTDINNLEIKTRTILTKHNHLHPKSAIERLTLKRKYGGRGLIDLQTLWKNQIDNLRSYFYRKANESLLHKSIVENDTKYTPLNLSETQTDNRITSPDKEKIDRWKAKTLHGRHPHDLEQAHIDAEASNKWLSNANLFPETEGFIIAIQDQIINTRNYRKYIIKDPNTTDDKCRKCHRDSETIQHITGACPTLTQTDYTHRHNQVVNIIHQKLATKYNLIPDNNTYTPYYKYTPNPVLENNNYKMYYDRAILTDKTIYYNRPDITLQDKHNKITYIVDIAIPNTHNLLKTITEKISKYTELKEEIARIWRMEKVYIVPIVISSTGVIPNNLHHSLRLLDLSPHTYNLLQKAAILNTCRIVRKFMQCDNPEPDVTLQAQS

SEQ ID NO: 15831 - protein, 1299 aa, Deilephila porcellus
METRSKKKLRGPLPGGDRRGTPGADAGCFSMRTVSGEELSRRAPTGSPEDTTANVHDRPTDNRSESPISSIMDPYSPSTVSYAPSATDEESQDPTPPSTPALSVTREVNAFLPASTKAGKVRVRMKWTADVNIFIMRTYYRITKLETDMTTYRKSLHELFQNQYPGINVSEQRISDQRRCIIKNKYLSEEILQNLREEVRVELERSNTTSELPQNSIENNVINTQNRSLHQDISLPSVYPPLLTSGCMQDTCERVTETVTDIITLGNTDTQVTENPIPDGMVQKLLIEMQSTHIQYSGMDPTVRPSLPKLKYSRKLTQLLNIFNNNILPQFITSDTTLLDIHTIVYCTAMVISEQLKYNITNHPQQRPTNKQKKPAWQIRLEKNIAQIRADIGRVTQYIRGNRSKKVVKHVENIFSKNKQHTRHENSNILPEEFLDTLKQKLSLKSHRLARYKKGLERKQQNTLFTTNEKNFYRQLNSQNSSTNRNREIPSIENLEAYWSSIWEETVLHNEEAVWIKEEEAKWDSIEEMEFSEISEEDILTVTTKLHSWKSAGIDKIHNFWYKKLHTLHKPIAKNFTEIVQGKQAIPEFIAKGITYMIPKSNDPHDPSQFRPITCLPTIYKVFTATITRKINTHLETNSILSEEQKGCRQNHKGCKEQLIIDSTIHGQINARNRNLHCTYIDYKKAFDSIPHSWLLKVLNIYKINKTIIKFLHDVMAQWKTNLYINSNTESIVSREISIKKGIYQGDSLSPLWFCLALNPLSSLLNKSKKGFQLKYSMNDIKISHLIYMDDIKLYADNTKDMKVLIDITSKFSTDINMQFGLDKCKTIHIKKGTIESENYTLSDNQIISSMEANDFYKYLGYHQSKKLDHVKLKQTLSIEYKNRVTKICKTNLTGKHLIKAINTYAIPILTYSFGVIKWTKTDINNLEIKTRTILTKHNHLHPKSAIERLTLKRKDGGRGLIDLQALLQKQIHSLKAFFYQKAYTSSIHKAVVANDKKCTPLNLSESVSTPVTEANPRDFNKEKINSWKTKVIHGRHPYDLQQTHIDTEASNKFLTTGYLFPETEGFIVAIQDQIINTRNYRKYIIKDPAAADDKCRKCHKYPETIQHITGACPTLTQTDYTHRHNQIVNIIHQKLAIKYKLIPDPPKPIPYYKYIPNPILENQNYKMYYDRAILTDRTIHYNRPDITIQDKTKKITYIVDIAIPNTHNIIKTITEKVTKYTELKDEIARIWRMDKVYIVPIVLSTTGVIPKHLHHSIKLLDLPSHIYISMQKAAILNTCRVVRKFMQSDDHQLEPYVN

SEQ ID NO: 15832 - protein, 1297 aa, Hyles vespertilio
METRSKKKLRGPLPGGDRRGTPGADAGCFSMRTVSGEELSRRAPTGSPEDTTANVHNRLTDNRPESPISSIAEPYSPSTVSYAPSATDEESRDPTPPPTPALSVTREVNAFLPASTKAGKVRVRMKWTADVNMFIMRTYYLITKLETDMTTYRKTLHELFQKQYPGINVSEQRISDQRRVIIRNKYLSDEVLHKIKEEVRAELDQTSTSIFSQNSIGNNTTHTPNRYSQHILTPLSASAAHLTSHSTQDTCETETVNEIITLRNNDNILLTENPIPDGMTQNLIDQMQATVIKYSGMDPTLRPSLPKLKYSKKLTQLLNLFNNNILTQFITSETTLLDIHTIVYCTAIVISKQLKYNISDHTQKRPNVENKKPAWQIRLEKNIAQIRADIGRLTQYIQGNRSKKIVKHVQNIFHKSKQHTRHENSNNQPEEYLDTLKQKLSLKSHRLARYKKGLQRKQQNMLFTTNEKIFYRQLNSQKSTTNRNTEIPTIENLEEFWSKIWEETVLHNEQAAWIKEEETKWEGIEEMEFGEITEDEVLIVTAKLHNWKSAGVDKIHNFWFKKLHVLHKPIAKNFTEIIRGKQVIPTFIAKGITYMIPKSNDAHDPSQYRPITCLPTIYKVLTAIITRKMNTHLETNSILAEEQKGCRQNHKGCKEQLIIDSTMHGQITARNRNLHCTYIDYKKAFDSIPHSWLIKVLNIYKINSTIVNFLQEIMTQWKTNLHLNCNTKSIVSREISIKKGIYQGDSLSPLWFCLALNPLSSLLNKSQKGFHLQCSMNDIKISHLIYMDDIKLYADNTKDMKALIDTTSKFSTDINMQFGLDKCKTIHIKKGTIESENYTLSDYQVISSMEANEFYKYLGYHQSKKLDHAKLKQTLSTEYKNRVSRISKSSLTGKHMIKAINTFAVPILTYSFGVIKWTKTDINHLEIKTRTILTKHNHLHPKSAIERLTLKRKDGGRGLIDLQALLQKQIHNLKSFFYQKASTSSIHKAIVENDKKYTPLNLSEFACTPFIADRPTDFDTDKFNSWKTKVIHGRHPYDLEQTHIDTEASNKFLTCGYLFPETEGFIVAIQDQIINTRNYRKYIIKDPAAADDKCRKCHKYPETIQHITGACPTLTQTDYTHRHNQIVNIIHQKLAIKYKLIPDPPKPTPYYKYIPNPVLENQNYKMYYDRAILTDRTIHYNRPDITIQDKNKKITYIVDIAVPNTHNIIKIITEKITKYTELKDEIARIWRMDKVYIVPMVISTTGVIPKHLHHSIKLLDLPPYIYISMQKAAILNTCRIVRKFMQSDDHQPEPNLN

SEQ ID NO: 15833 - protein, 1299 aa, Deilephila porcellus
METRSKKKLRGPLPGGDRRGTPGADAGCFSMRTVSGEELSRRAPTGSPEDTTANVHDRPTDNRSESPISSIMDPYSPSTVSYAPSATDEESQDPTPPSTPALSVTREVNAFLPASTKAGKVRVRMKWTADVNIFIMRTYYRITKLETDMTTYRKSLHELFQNQYPGINVSEQRISDQRRCIIKNKYLSEEILQNLREEVRVELERSNTTSELPQNSIENNVINTQNRSLHQDISLPSVYPPLLTSGCMQDTCERVTETVTDIITLGNTDTQVTENPIPDGMVQKLLIEMQSTHIQYSGMDPTVRPSLPKLKYSRKLTQLLNIFNNNILPQFITSDTTLLDIHTIVYCTAMVISEQLKYYITNHPQQRPTNKQKKPAWQIRLEKNIAQIRADIGRVTQYIRGNRSKKVVKHVENIFSKNKQHTRHENSNILPEEFLDTLKQKLSLKSHRLARYKKGLERKQQNTLFTTNEKNFYRQLNSQNSSTNRNREIPSIENLEAYWSSIWEETVLHNEEAVWIKEEEAKWDSIEEMEFSEISEEDILTVTTKLHSWKSAGIDKIHNFWYKKLHTLHKPIAKNFTEIVQGKQAIPEFIAKGITYMIPKSNDPHDPSQFRPITCLPTIYKVFTATITRKINTHLETNSILSEEQKGCRQNHKGCKEQLIIDSTIHGQINARNRNLHCTYIDYKKAFDSIPHSWLLKVLNIYKINKTIIKFLHDVMAQWKTNLYINSNTESIVSREISIKKGIYQGDSLSPLWFCLALNPLSSLLNKSKKGFQLKYSMNDIKISHLIYMDDIKLYADNTKDMKVLIDITSKFSTDINMQFGLDKCKTIHIKKGTIESENYTLSDNQIISSMEANDFYKYLGYHQSKKLDHVKLKQTLSIEYKNRVTKICKTNLTGKHLIKAINTYAIPILTYSFGVIKWTKTDINNLEIKTRTILTKHNHLHPKSAIERLTLKRKDGGRGLIDLQALLQKQIHSLKAFFYQKAYTSSIHKAVVANDKKCTPLNLSESVSTPVTEANPRDFNKEKINSWKTKVIHGRHPYDLQQTHIDTEASNKFLTTGYLFPETEGFIVAIQDQIINTRNYRKYIIKDPAAADDKCRKCHKYPETIQHITGACPTLTQTDYTYRHNQIVNIIHQKLAIKYKLIPDPPKPIPYYKYIPNPILENQNYKMYYDRAILTDRTIHYNRPDITIQDKTKKITYIVDIAIPNTHNIIKTITEKVTKYTELKDEIARIWRMDKVYIVPIVLSTTGVIPKHLHHSIKLLDLPSHIYISMQKAAILNTCRVVRKFMQSDDHQLEPYVN

SEQ ID NO: 15834 - protein, 1001 aa, Deilephila porcellus
MDPTVRPSLPKLKYSRKLTQLLNIFNNNILPQFITSDTTLLDIHTIVYCTAMVISEQLKYNITNHPQQRPTNKQKKPAWQIRLEKNIAQIRADIGRVTQYIRGNRSKKVVKHVENIFSKNKQHTRHENSNILPEEFLDTLKQKLSLKSHRLARYKKGLERKQQNTLFTTNEKNFYRQLNSQNSSTNRNREIPSIENLEAYWSSIWEETVLHNEEAVWIKEEEAKWDSIEEMEFSEISEEDILTVTTKLHSWKSAGIDKIHNFWYKKLHTLHKPIAKNFTEIVQGKQAIPEFIAKGITYMIPKSNDPHDPSQFRPITCLPTIYKVFTATITRKINTHLETNSILSEEQKGCRQNHKGCKEQLIIDSTIHGQINARNRNLHCTYIDYKKAFDSIPHSWLLKVLNIYKINKTIIKFLHDVMAQWKTNLYINSNTESIVSREISIKKGIYQGDSLSPLWFCLALNPLSSLLNKSKKGFQLKYSMNDIKISHLIYMDDIKLYADNTKDMKVLIDITSKFSTDINMQFGLDKCKTIHIKKGTIESENYTLSDNQIISSMEANDFYKYLGYHQSKKLDHVKLKQTLSIEYKNRVTKICKTNLTGKHLIKAINTYAIPILTYSFGVIKWTKTDINNLEIKTRTILTKHNHLHPKSAIERLTLKRKDGGRGLIDLQALLQKQIHSLKAFFYQKAYTSSIHKAVVANDKKCTPLNLSESVSTPVTEANPRDFNKEKINSWKTKVIHGRHPYDLQQTHIDTEASNKFLTTGYLFPETEGFIVAIQDQIINTRNYRKYIIKDPAAADDKCRKCHKYPETIQHITGACPTLTQTDYTHRHNQIVNIIHQKLAIKYKLIPDPPKPIPYYKYIPNPILENQNYKMYYDRAILTDRTIHYNRPDITIQDKTKKITYIVDIAIPNTHNIIKTITEKVTKYTELKDEIARIWRMDKVYIVPIVLSTTGVIPKHLHHSIKLLDLPSHIYISMQKAAILNTCRVVRKFMQSDDHQLEPYVN

SEQ ID NO: 15835 - protein, 1281 aa, Hemaris fuciformis
METRSKRKRLGPLPGGDRRGTPGADAGCYSIRTVSGEELIRRAPTGSPERTTANLPHRQTDSRLQSPLSTISDPYSPSTISYVPSETNEESPNTTPPPNPALSAAREANAFLPASTKAGKERLRMKWTKEVNIFIMRAYYLVTKLETDMTTYRQSLHRLFSDQYPGISVTEQRVADQRRAIIKNNYLSEEILNRIKEEVRLELEHENSPITSAHLIDNSARTQLPTNLAVNVTPLDNNTNDLVADTCIQIPLGITDSQVVVNPLPDGTTQKLLDELQSTLIQYSGMDPTFRPKLPKLKYSRRLTQLINFFNDELLAQFIKPDGELLDIHTLIYCTAMVISKELGYKILEDLEPRTHNNNTKPPWQIRLENKISQLRADIGRLTQYIRGNRSNKIIKLVEKIFRNNKIHTRHENDNTSPEEFLDTLKQKLALKSHRLARYKKGLKRKQQNHLFETNEKIFYRKLRSNNNSTDVSVETIEKEHMQEFWTNIWDKTAIHNNEAPWIKEEETEWSWIEEMEFSEITIDEISAITKKLHNWKSAGLDKVHNFWFKKLNVLHNSLAKIFTKIILGKQIVPHFISKGITYMIPKNKNVHDPSQYRPITCLPTIYKILTSVITTKINTHLETNKILAEEQKGCRRNHRGCKEQLIIDSTILKLTNIKKQNLHCTYIDYTKAFDSIPHSWLLKVLQIYKINPYIIKFLTNIMPLWKTRLQIKNNSNTITTDEISIRKGIFQGDSLSPLWFCLALNPLSSLLNKTQKGLHINCTSHNTIVSHLIYMDDIKLYAKTSIDMKKLIDVTVTFSNDINMQFGYDKCKTIHIKKGKIESESYTVCENQIISSMEPGELYKYLGYYQSQLLDHNKLKEKLTTEFKNRVSNICKSQLTGKRLFKALNSFAIPILTYSFGIVKWTKTDINNLEIKTRTILTKHKHLHPKSAIERLTLKRKHGGRGLIDLQALWKKQIHNLRSFFFRKANDSILHNVIVEIDNKYTPLNLADRNFIFNAPNTEIDPEKEKIIRWKGKVLHGRHPHDLEQPHIDPEASNKWLINSHLFPETEGFIIAIQDQIINTRNFRKHIIKDPTATDDRCRKCHRESETIQHITGACPTLTQTDYTHRHNQVVNIIHQKLAVKHNLIPNPHRFTPYYKYTPNPVLENNNFKMYYDRAILTDKTIHFNRPDISLQDKQNKITYIIDIAIPNTHNLLKTITEKITKYTELKEEVARIWRMEKVYIVPIVISTTGVVPKYLHHSLKVINLPTHTYNLIQKAAILNTCRTVRKFLQTDDQIS

SEQ ID NO: 15836 - protein, 1280 aa, Hemaris fuciformis
METRSKRKRLGPLPGGDRRGTPGADAGCYSIRTVSGEELIRRAPTGSPERTTANLPHRQTDSRLQSPLSTISDPYSPSTISYVPSETNEESPNTTPPPNPALSVAREANAFLPASTKAGKERLRMKWTKEVNIFIMRAYYLVTKLESDMTTYRQSLHRLFSDQYPGISVTEQRVADQRRAIIKNNYLSEEILNRIKEEVRLELEHENSPITSAHLIDNSARTQLPTNLAVNVTPIDNNTNDLVADTCIQIPLGITDSQIVVNPLPDGTTQKLLDELQSTLIQYSGMDPTFRPKLPKLKYSRRLTQLINFFNDELLAQFIKPDGDLLDIHTLIYCTAMVISKELGYKILEDLEPRTHNNNTKPPWQIRLENKISQLRADIGRLTQYIRGNRSNKIIKLVEKIFRNNKIHTRHENDNTSPEEFLDTLKQKLALKSHRLARYKKGLKRKQQNHLFETNEKIFYRKLRSNNNSTDVSVETIEKEHMQEFWTNIWDKTAIHNNEAPWIKEEETEWSWIEEMEFSEITIDEISAITKKIHNWKSAGLDKVHNFWFKKLNVLHNSLAKIFTKIIFGKQIIPHFISKGITYMIPKNKNVHDPSQYRPITCLPTIYKILTSVITTKINTHLETNKILAEEQKGCRRNHRGCKEQLIIDSTILKLTNIKKQNLHCTYIDYTKAFDSIPHSWLLKVLQIYKINPYIIKFLTNIMPLWKTRLQIKNNSNTITTDEISIRKGIFQGDSLSPLWFCLALNPLSSLLNKTQKGLHINCTSHNTIVSHLIYMDDIKLYAKTSIDMKKIIDVTVTFSNDINMQFGYDKCKTIHIKKGKIESESYTVCENQIISSMEPGELYKYLGYYQSQLLDHNKLKEKLTTEFKNRVSNICKSQLTGKRLFKALNSFAIPILTYSFGIVKWTKTDVNNLEIKTRTILTKHKHLHPKSAIERLTLKRKHGGRGLIDLQALWKKQIHNLRSFFFRKANDSILHNVIVEIDNKYTPLNLADRNFIFNAPNTEIDPEKEKIIRWKGKVLHGRHPHDLEQPHIDPEASNKWLINSHLFPETEGFIIAIQDQIINTRNFRKHIIKDPAATDDRCRKCHRESETIQHITGACPTLTQTDYTHRHNQVVNIIHQKLAVKHNLIPNPHTFTPYYKYTPNPVLENNNFKMYYDRAILTDKTIHFNRPDITLQDKQNKITYIIDIAIPNTHNLLKTITEKITKYTELKEEVARIWRMEKVYIVPIVISTTGVVPKYLHHSLKVINLPTHTYNLIQKAAILNTCRTVRKFLQTDDQT

SEQ ID NO: 15837 - protein, 1280 aa, Hemaris fuciformis
METRSKRKRLGPLPGGDRRGTPGADAGCYSIRTVSGEELIRRAPTGSPERTTANLPHRQTDSRLQSPLSTISDPYSPSTISYVPSETNEESPNTTPPPNPALSVAREANAFLPASTKAGKERLRMKWTKEVNIFIMRAYYLVTKLESDMTTYRQSLHRLFSDQYPGISVTEQRVADQRRAIIKNNYLSEEILNRIKEEVRLELEHENSPITSAHLIDNSARTQLPTNLAVNVTPIDNNTNDLVADTCIQIPLGITDSQIVVNPLPDGTTQKLLDELQSTLIQYSGMDPTFRPKLPKLKYSRRLTQLINFFNDELLAQFIKPDGDLLDIHTLIYCTAMVISKELGYKILEDLEPRTHNKNTKPPWQIRLENKISQLRADIGRLTQYIRGNRSNKIIKLVEKIFRNNKIHTRHENDNTSPEEFLDTLKQKLALKSHRLARYKKGLKRKQQNHLFETNEKIFYRKLRSNNNSTDVSVETIEKEHMQEFWTNIWDKTAIHNNEAPWIKEEETEWSWIEEMEFSEITIDEISAITKKLHNWKSAGLDKVHNFWFKKLNVLHNSLAKIFTKIIFGKQIVPHFISKGITYMIPKNKNVHDPSQYRPITCLPTIYKILTSVITTKINTHLETNKILAEEQKGCRRNHRGCKEQLIIDSTILKLTNIKKQNLHCTYIDYTKAFDSIPHSWLLKVLQIYKINPYIIKFLTNIMPLWKTRLQIKNNSNTITTDEISIRKGIFQGDSLSPLWFCLALNPLSSLLNKTQKGLHINCTSHNTIVSHLIYMDDIKLYAKTSIDMKKLIDVTVTFSNDINMQFGYDKCKTIHIKKGKIESESYTVCENQIISSMEPGELYKYLGYYQSQLLDHNKLKEKLTTEFKNRVSNICKSQLTGKRLFKALNSFAIPILTYSFGIVKWTKTDVNNLEIKTRTILTKHKHLHPKSAIERLTLKRKHGGRGLIDLQALWKKQIHNLRSFFFRKANDSILHNVIVEIDNKYTPLNLADRNFIFNAPNTEIDPEKEKIIRWKGKVLHGRHPHDLEQPHIDPEASNKWLINSHLFPETEGFIIAIQDQIINTRNFRKHIIKDPAATDDRCRKCHRESETIQHITGACPTLTQTDYTHRHNQVVNIIHQKLAVKHNLIPNPHTFTPYYKYTPNPVLENNNFKMYYDRAILTDKTIHFNRPDITLQDKQNKITYIIDIAIPNTHNLLKTITEKITKYTELKEEVARIWRMEKVYIVPIVISTTGVVPKYLHHSLKVINLPTHTYNLIQKAAILNTCRTVRKFLQTDDQT

SEQ ID NO: 15838 - protein, 1290 aa, Hemaris fuciformis
METRSKRKRLGPLPGGDRRGTPGADAGCDSGRAVSGEELIRRAPTGSPENVKANAQIRTSSPTSSITDPYSPSTVSYAPSATDEDSRDPTPLPNPAQDVTREVNAFLPASTKAGKVRLRMKWTTEVNTFIMRSYYHITKLETDMTTYRKTLHKTFTEQYPGINVSEQRVSDQRRAIIKNHYLPEKILNKIKEEVKLELESNAHSELYSHTLESSINTHSQDSLTNEITHMPLAHSEISSPPDAQNGNRDPSTEILAETLPLETTSSQTIINLLPDGTTQKILNDLHATLINYTGTDPTLRPKLPKLKYTRKLTQLVCLFNNDLLPQFMKADQELIDIHTLVYCSAVVISKELGYKISENSEYRPQYNTNNTKPAWQIRLENNITRLRADIGRLTQYIRGIRSKKLIKQVENILKNNKIHTRHENNNTSPEEFLDTLKQKLALKSHRLARYKKGLKRKQQNNLFESNEKIFYRQIRSRNNNNNSVPTETITKEEIEEFWASIWEKTTHYNKDAPWIKEEENAWNRIEEMEFSEITLEEISAITAKLHNWKSAGIDKIHNFWFKKFHVLHSPIAKNFTDIILGKQPIPPFLSKGITYLIPKGKTIQDPSQYRPITCLPTIYKILTAVITKRINSHLDKHQILAEEQKGCRKNHMGCKEQLVIDSTILKLINTKKQNLHCTYIDFIKAFDSIPHSWLIKILQIYKINSSIIKFLKYVMDRWKTNLYLKNKNSSITREINIKKGIFQGDSLSPLWFCLALNPLSTLLKKTQKGLCVKSSANDIIVSHLVYMDDIKLYAKTSQDMKILIDVTSKFSNDINMQFGFDKCKTIHITKGKIEKEDYIVNENNVISSMEPNEFYKYLGYHQSHQLNHNYLKQILSTEYRVRVTNISKSQLTGKRLIKAINTFAIPVLTYSFGIIKWTKTDINNLEIKTRTILTKHNHLHPKSAIERLTLKRENGGRGLIDLQSLWKKQIYNLKSYFYRKSNDSSLHRAIVENDTKFTPLNLADNNLCTDNRDMDLDKEKILRWKQKVLHGRHPHDLEQDHIDSEASNRWLVNGALFPETEGFIIAIQDQIINTRNYRKHIIKDPTAINDKCRKCNRDSETIQHITGACSVLTQTDYTYRHNQVANIIHQKLVLKHNLIPATQTYTPYYKYTPSPVLENKNYKIYYDRAILTDKTIHFNRPDITLQDKLNKITYIIDIAVPNTHNLLKSITEKITKYTDLKEEIARIWKMNKVYIVPIIISTTGVVPKHLHHSLKLLDLPPQTYNIIQKAAILNTCRIVRKFLQSDDQIS

SEQ ID NO: 15839 - protein, 964 aa, Habrosyne pyritoides
MVLSSSQAAATSENLVQCSQCSQPRLFKGTRGLRIHTTRCHQVTHTGTHADVASNPSITSLTNSLVPRDVSAVSQPFWKTLSNSKNTVPILKRIPRGARTLVAQKLTEVIRHTLRDNSKQAWEKLLTFPYRVLHVEKDPQSNVSLTIRVKQNCSTYLLHKGPNNISKTFSPNIFRSVENKLSDGDIKGAARLLFSDDAVAPDTPETLAALRDKHPVAPLDYLFPDALTAEDPLQSLSTSADEVRGAILSFLPGSAGGLDGLSPQHLKDLTAASSGNAGEALLLALSSLVNALLSGRVLSEITDILYGANLCALKKKGGGIRPIAVGTTYRRLAAKISCQAISGKLSTYFQPLQLGFGSRGGCEAAVHSLRTFLENKGGEVLLKVDVKNAFNSVDRAVLLTQIKNHIPEIFNFLWQCYSTPSKLLYKNNLLYSSVGCQQGDPLGPAIFSLAIHQIIQKLKSKFNVWYLDDGTLGGDAATVLSDLRLLILEFRAIGLELNFNKCELFILEGTADRDAIISQFSTIAPNIITVNRESLRLLGSPILDESLPDFINDTILKFNETSERLLKINCHMAFAIIRFCLFVPKFTYVLRCCQLWKQPNLLTNLDNTLRRTLSTVFNIDLDTRSWAQATLPVRFGGLGIRNTSDVSLPAFLASVHATLPLTTKILEPCKITEISFLTEAKNAWCAACPNTDPPTSLCSQRLWGEPLCKLVRNNLLTSSNPAERARLIAVGKWESGLWLQALPSGNTGTLLDNTTFRIVTCLRLGAPIIIPHTCRCGAAVNRLGQHGLSCSRSAGRIPRHQNINDVIRRALATAGVPAILEPNGLTRDDGKRPDGLTLVPWRIGRALVWDATCVDTLAPSHLHGTSTEAGAAANNAENLKRHKYSVISSTYIFEPFGVETLGPWGHRAHHLFREISKRLVEATRDPKAGGYLAQRISLAIQRGNAASILGTLPPGEELGEVFYL

SEQ ID NO: 15840 - protein, 969 aa, Habrosyne pyritoides
MVLSSSQAAATSENLVQCSQCSQPRLFKGTRGLRIHTTRCHQVTHTGTHADVASNPSITSLTNSLVPRDVSAVSQPFWKTLSNSKNTVPILKRIPRGARTLVAQKLTEVIRHTLRDNSKQAWEKLLTFPYRVLHVEKDPQSNVSLTIRVKQNCSTYLLHKGPNNISKTFSPNIFRSVENKLSDGDIKGAARLLFSDDAVAPDTPETLAALRDKHPVAPLDYLFPDALTAEDPLQSLSTSADEVRGAILSFLPGSAGGLDGLSPQHLKDLTAASSGNAGEALLLALSSLVNALLSGRVLSEITDILYGANLCALKKKGGGIRPIAVGTTYRRLAAKISCQAISGKLSTYFQPLQLGFGSRGGCEAAVHSLRTFLENKGGEVLLKVDVKNAFNSVDRAVLLTQIKNHIPEIFNFLWQCYSTPSKLLYKNNLLYSSVGCQQGDPLGPAIFSLAIHQIIQKLKSKFNVWYLDDGTLGGDAATVLSDLRLLILEFRAIGLELNFNKCELFILEGTADRDTIISQFSTIAPNIITVNRESLRLLGSPILDESLPDFINDTILKFNETSERLLKINCHMAFAIIRFCLFVPKFTYVLRCCQLWKQPNLLTNLDNTLRRTLSTVFNIDLDTRSWAQATLPVRFGGLGIRNTSDVSLPAFLASVHATLPLTTKILEPCKITEISFLTEAKNAWCAACPNTDPPTSLCSQRLWGEPLCKLVRNNLLETSSNPAERARLIAVGKWESGLWLQALPSGNTGTLLDNTTFRIVTCLRLGAPIIIPHTCRCGAAVNRLGQHGLSCSRSAGRIPRHQNINDVIRRALATAGVPAILEPNGLTRDDGKRPDGLTLVPWRIGRALVWDATCVDTLAPSHLHGTSTEAGAAANNAENLKRHKYSVISSTYIFEPFGVETLGPWGHRAHHLFREISKRLVEATRDPKAGGYLAQRISLAIQRGNAASILGTLPPGEELGEVFYLWGAG

SEQ ID NO: 15841 - protein, 965 aa, Habrosyne pyritoides
MVLSSSQAAATSENLVQCSQCSQPRLFKGTRGLRIHTTRCHQVTHTGTHADVASNPSITSLTNSLVPRDVSAVSQPFWKTLSNSKNTVPILKRIPRGARTLVAQKLTEVIRHTLRDNSKQAWEKLLTFPYRVLHVEKDPQSNVSLTIRVKQNCSTYLLHKGPNNISKTFSPNIFRSVENKLSDGDIKGAARLLFSDDAVAPDTPETLAALRDKHPVAPLDYLFPDALTAEDPLQSLSTSANEVRGAILSFLPGSAGGLDGLSPQHLKDLTAASSGNAGEALLLALSSLVNALLSGRVLSEITDILYGANLCALKKKGGGIRPIAVGTTYRRLAAKISCQAISGKLSTYFQPLQLGFGSRGGCEAAVHSLRTFLENKGGEVLLKVDVKNAFNSVDRAVLLTQIKNHIPEIFNFLWQCYSTPSKLLYKNNLLYTSVGCQQGDPLGPAIFSLAIHQIIQKLKSKFNVWYLDDGTLGGDAATVLSDLRLLILEFRAIGLELNFNKCELFILEGTADRDAIISQFSTIAPNIITVNRESLRLLGSPILDESLPDFINDTILKFNETSERLLKINCHMAFAIIRFCLFVPKFTYVLRCCQLWKQPNLLTNLDNTLRRTLSTVFNIDLDTRSWTQATLPVRFGGLGIRNTSDVSLPAFLASVHATLPLTTKILEPCKITEISFLTEAKNAWCAACPNTDPPTSLCSQRLWGEPLCKLVRNNLLETSSNPAERARLIAVGKWESGLWLQALPSGNTGTLLDNTTFRIVTCLRLGAPIIIPHTCRCGAAVNRLGQHGLSCSRSAGRIPRHQNINDVIRRALATAGVPAILEPNGLTRDDGKRPDGLTLVPWRIGRALVWDATCVDTLAPSHLHGTSTEAGAAANNAENLKRHKYSVISSTYIFEPFGVETLGPWGHRAHHLFREISKRLVEATRDPKAGGYLAQRISLAIQRGNAASILGTLPPGEELGEVFYL

SEQ ID NO: 15842 - protein, 394 aa, Habrosyne pyritoides
MAFAIIRFCLFVPKFTYVLRCCQLWKQPNLLTNLDNTLRRTLSTVFNIDLDTRSWTQATLPVRFGGLGIRNTSDVSLPAFLASVHATLPLTTKILEPCKITEISFLTEAKNAWCAACPNTDPPTSLCSQRLWGEPLCKLVRNNLLETSSNPAERARLIAVGKWESGLWLQALPSGNTGTLLDNTTFRIVTCLRLGAPIIIPHTCRCGAAVNRLGQHGLSCSRSAGRIPRHQNINDVIRRALATAGVPAILEPNGLTRDDGKRPDGLTLVPWRIGRALVWDATCVDTLAPSHLHGTSTEAGAAANNAENLKRHKYSVISSTYIFEPFGVETLGPWGHRAHHLFREISKRLVEATRDPKAGGYLAQRISLAIQRGNAASILGTLPPGEELGEVFYL

SEQ ID NO: 15843 - protein, 965 aa, Habrosyne pyritoides
MVLSSSQAAATSENLVQCSQCSQPRLFKGTRGLRIHTTRCHQVTHTGTHADVASNPSITSLTNSLVPRDVSAVSQPFWKTLSNSKNTVPILKRIPRGARTLVAQKLTEVIRHTLRDNSKQAWEKLLTFPYRVLHVEKDPQSNVSLTIRVKQNCSTYLLHKGPNNISKTFSPNIFRSVENKLSDGDIKGAARLLFSDDAVAPDTPETLAALRDKHPVAPLDYLFPDALTAEDPLQSLSTSADEVRGAILSFLPGSAGGLDGLSPQHLKDLTAASSGNAGEALLLALSSLVNALLSGRVLSEITDILYGANLCALKKKGGGIRPIAVGTTYRRLAAKISCQAISGKLSTYFQPLQLGFGSRGGCEAAVHSLRTFLENKGGEVLLKVDVKNAFNSVDRAVLLTQIKNHIPEIFNFLWQCYSTPSKLLYKNNLLYSSVGCQQGDPLGPAIFSLAIHQIIQKLKSKFNVWYLDDGTLGGDAATVLSDLRLLILEFRAIGLELNFNKCELFILEGTADRDAIISQFSTIAPNIITVNRESLRLLGSPILDESLPDFINDTILKFNETSERLLKINCHMAFAIIRFCLFVPKFTYVLRCCQLWKQPNLLTNLDNTLRRTLSTVFNIDLDTLSWAQATLPVRFGGLGIRNTSDVSLPAFLASVHATLPLTTKILEPCKITEISFLTEAKNAWCAACPNTDPPTSLCSQRLWGEPLCKLVRNNLLETSSNPAERARLIAVGKWESGLWLQALPSGNTGTLLDNTTFRIVTCLRLGAPIIIPHTCRCGAAVNRLGQHGLSCSRSAGRIPRHQNINDVIRRALATAGVPAILEPNGLTRDDGKRPDGLTLVPWRIGRALVWDATCVDTLAPSHLHGTSTEAGAAANNAENLKRHKYSVISSTYIFEPFGVETLGPWGHRAHHLFREISKRLVEATRDPKAGGYLAQRISLAIQRGNAASILGTLPPGEELGEVFYL

SEQ ID NO: 15844 - protein, 965 aa, Habrosyne pyritoides
MVLSSSQAAATSENLVQCSQCSQPRLFKGTRGLRIHTTRCHQVTHTGTHADVASNPSITSLTNSLVPRDVSAVSQPFWKTLSNSKNTVPILKRIPRGARTLVAQKLTEVIRHTLRDNSKQAWEKLLTFPYRVLHVEKDPQSNVSLTIRVKQNCSTYLLHKGPNNISKTFSPNIFRSVENKLSDGDIKGAARLLFSDDAVAPDTPETLAALRDKHPVAPLDYLFPDALTAEDPLQSLSTSADEVRGAILSFLPGSAGGLDGLSPQHLKDLTAASSGNAGEALLLALSSLVNALLSGRVLSEITDILYGANLCALKKKGGGIRPIAVGTTYRRLAAKISCQAISGKLSTYFQPLQLGFGSRGGCEAAVHSLRTFLENKGGEVLLKVDVKNAFNSVDRAVLLTQIKNHIPEIFNFLWQCYSTPSKLLYKNNLLYSSVGCQQGDPLGPAIFSLAIHQIIQKLKSKFNVWYLDDGTLGGDAATVLSDLRLLILEFRAIGLELNFNKCELFILEGTADRDAIISQFSTIAPNIITVNRESLRLLGSPILDESLPDFINDTILKFNETSERLLKINCHMAFAIIRFCLFVPKFTYVLRCCQLWKQPNLLTNLDNTLRRTLSTVFNIDLDTRSWTQATLPVRFGGLGIRNTSDVSLPAFLASVHATLPLTTKILEPCKITEISFLTEAKYAWCAACPNTDPPTSLCSQRLWGEPLCKLVRNNLLETSSNPAERARLIAVGKWESGLWLQALPSGNTGTLLDNTTFRIVTCLRLGAPIIIPHTCRCGAAVNRLGQHGLSCSRSAGRIPRHQNINDVIRRALATAGVPAILEPNGLTRDDGKRPDGLTLVPWRIGRALVWDATCVDTLAPSHLHGTSTEAGAAANNAENLKRHKYSVISSTYIFEPFGVETLGPWGHRAHHLFREISKRLVEATRDPKAGGYLAQRISLAIQRGNAASILGTLPPGEELGEVFYL

SEQ ID NO: 15845 - protein, 965 aa, Habrosyne pyritoides
MVLSSSQAAAKSENLVQCSQCSQPRLFKGTRGLRIHTTRCHQVTHTGTHADVASNPSITSLTNSLVPRDVSAVSQPFWKTLSNSKNTVPILKRIPRGARTLVAQKLTEVIRHTLRDNSKQAWEKLLTFPYRVLHVEKDPHSNVSLTIRVKQNCSTYLLHKGPNNISKTFSPNIFRSVENKLSDGDIKGAARLLFSDDAVAPDTPETLAALRDKHPVAPLDYLFPDALTAEDPLQSLSTSADEVRGAILSFLPGSAGGLDGLSPQHLKDLTAASSGNAGEALLLALSSLVNALLSGRVLSEITDILYGANLCALKKKGGGIRPIAVGTTYRRLAAKISCQAISGKLSTYFQPIQLGFGSRGGCEAAVHSLRTFLENKGGEVLLKVDVKNAFNSVDRAVLLTQIKNHIPEIFNFLWQCYSTPSKLLYKNNLLYSSVGCQQGDPLGPAIFSLAIHQIIQKLKSKFNVWYLDDGTLGGDAATVLSDLRLLILEFRAIGLELNFNKCELFILEGTADRDAIISQFSTIAPNIITVNRESLRLLGSPILDESLPDFINDKILKFNETSERLLKINCHMAFAIIRFCLFVPKFTYVLRCCQLWKQPNLLTNLDNTLRRTLSTVFNIDLDTRSWTQATLPVRFGGLGIRNTSDVSLPAFLASVHATLPLTTKILEPCKITEISFLTEAKNAWCAACPNTDPPTSLCSQRLWGEPLCKLVRNNLLETSSNPAERARLIAVGKWESGLWLQALPSGNTGTLLDNTTFRIVTCLRLGAPIIIPHTCRCGAAVNRLGQHGLSCSRSAGRIPRHQNINDVIRRALATAGVPAILEPNGLTRDDGKRPDGLTLVPWRIGRALVWDATCVDTLAPSHLHGTSTEAGAAANNAENLKRHKYSVISSTYIFEPFGVETLGPWGHRAHHLFREISKRLVEATRDPKAGGYLAQRISLAIQRGNAASILGTLPPGEELGEVFYL

SEQ ID NO: 15846 - protein, 965 aa, Habrosyne pyritoides
MVLSSSQAAATSENLVQCSQCSQPRLFKGTRGLRIHTTRCHQVTHTGTHADVASNPSITSLTNSLVPRDVSAVSQPFWKTLSNSKNTVPILKRIPRGARTLVAQKLTEVIRHTLRDNSKQAWEKLLTFPYRVLHVEKDPQSNVSLTIRVKQNCSTYLLHKGPNNISKTFSSNIFRSVENKLSDGDIKGAARLLFSDDAVAPDTPETLAALRDKHPVAPLDYLFPDALTAEDPLQSLSTSADEVRGAILSFLPGSAGGLDGLSPQHLKDLTAASSGNAGEALLLALSSLVNALLSGRVLSEITDILYGANLCALKKKGGGIRPIAVGTTYRRLAAKISCQAISGKLSTYFQPLQLGFGSRGGCEAAVHSLRTFLENKGGEVLLKVDVKNAFNSVDRAVLLTQIKNHIPEIFNFLWQCYSTPSKLLYKNNLLYSSVGCQQGDPLGPAIFSLAIHQIIQKLKSKFNVWYLDDGTLGGDAATVLSDLRLLILEFRAIGLELNFNKCELFILEGTADRDAIISQFSTIAPNIITVNRESLRLLGSPILDESLPDFINDTILKFNETSERLLKINCHMAFAIIRFCLFVPKFTYVLRCCQLWKQPNLLTNLDNTLRRTLSTVFNIDLDTRSWAQATLPVRFGGLGIRNTSDVSLPAFLASVHATLPLTTKILEPCKITEISFLTEAKNAWCAACPNTDPPTSLCSQRLWGEPLCKLVRNNLLETSSNPAERARLIAVGKWESGLWLQALPSGNTGTLLDNTTFRIVTCLRLGAPIIIPHTCRCGAAVNRLGQHGLSCSRSAGRIPRHQNINDVIRRALATAGVPAILEPNGLTRDDGKRPDGLTLVPWRIGRALVWDATCVDTLAPSHLHGTSTEAGAAANNAENLKRHKYSVISSTYIFEPFGVETLGPWGHRAHHLFREISKRLVEATRDPKAGGYLAQRISLAIQRGNAASILGTLPPGEELGEVFYL

SEQ ID NO: 15847 - protein, 965 aa, Habrosyne pyritoides
MVLSSSQAAATSENLVQCSQCSQPRLFKGTRGLRIHTTRCHQVTHTGTHADVASNPSITSLTNSLVPRDVSAVSQPFWKTLSNSKNTVPILKRIPRGARTLVAQKLTEVIRHTLRDNSKQAWEKLLTFPYRVLHVEKDPQSNVSLTIRVKQNCSTYLLHKGPNNISKTFSPNIFRSVENKLSDGDIKGAARLLFSDDAVAPDTPETLAALRDKHPVAPLDYLFPDALTAEDPLQSLSTSADEVRGAILSFLPGSAGGLDGLSPQHLKDLTAASSGNAGEALLLALSSLVNALLSGRVLSEITDILYGANLCALKKKGGGIRPIAVGTTYRRLAAKISCQAISGKLSTYFQPLQLGFGSRGGCEAAVHSLRTFLENKGGEVLLKVDVKNAFNSVDRAVLLTQIKNHIPEIFNFLWQCYSTPSKLLYKNNLLYSSVGCQQGDPLGPAIFSLAIHQIIQKLKSKFNVWYLDDGTLGGDAATVLSDLRLLILEFRAIGLELNFNKCELFILEGTADRDAIISQFSTIAPNIITVNRESLRLLGSPILDESLPDFINDTILKFNETSERLLKINCHMAFAIIRFCLFVPKFTYVLRCCQLWKQPNLLTNLDNTLRRTLSTVFNIDLDTRSWTQATLPVRFGGLGIRNTSDVSLPAFLASVHATLPLTTKILEPCKITEISFLTEAKNAWCAACPNTDPPTSLCSQRLWGEPLCKLVRNNLLETSSNPAERARLIAVGKWESGLWLQALPSGNTGTLLDNTTFRIVTCLRLGAPIIIPHTCRCGAAVNRLGQHGLSCSRSAGRIPRHQNINDVIRRALATAGVPAILEPNGLTRDDGKRPDGLTLVPWRIGRALVWDATCVDTLAPSHLHGTSTEAGAAANNAENLKRHKYSVISSTYIFEPFGVETLGPWGHRAHHLFREISKRLVEATRDPKAGGYLAQRISLAIQRGNAASILGTLPPGEELGEVFYL

SEQ ID NO: 15848 - protein, 965 aa, Habrosyne pyritoides
MVLSSSQAAATSENLVQCSQCSQPRLFKGTRGLRIHTTRCHQVTHTGTHADVASNPSITSLTNSLVPRDVSAVSQPFWKTLSNSKNTVPILKRIPRGARTLVAQKLTEVIRHTLRDNSKQAWEKLLTFPYRVLHVEKDPQSNVSLTIRVKQNCSTYLLHKGPNNISKTFSPNIFRSVENKLSDGDIKGAARLLFSDDAVAPDTPETLAALRDKHPVAPLDYLFPDALTAEDPLQSLSTSADEVRGAILSFLPGSAGGLDGLSPQHLKDLTAASSGNAGEALLLALSSLVNALLSGRVLSEITDILYGANLCALKKKGGGIRPIAVGTTYRRLAAKISCQAISGKLSTYFQPLQLGFGSRGGCEAAVHSLRTFLENKGGEVLLKVDVKNAFNSVDRAVLLTQIKNHIPEIFNFLWQCYSTPSKLLYKNNLLYSSVGCQQGDPLGPAIFSLAIHQIIQKLKSKFNVWYLDDGTLGGDAATVLSDLRLLILEFRAIGLELNFNKCELFILEGTADRDAIISQFSTIAPNIITVNRESLRLLGSPILDESLPDFINDTILKFNETSERLLKINCHMAFAIIRFCLFVPKFTYVLRCCQLWKQPNLLTNLDNTLRRTLSTVFNIDLDTRSWAQATLPVRFGGLGIRNTSDVSLPAFLASVHATLPLTTKILEPCKITEISFLTEAKNAWCAACPNTDPPTSLCSQRLWGEPLCKLVRNNLLETSSNPAERARLIAVGKWESGLWLQALPSGNTGTLLDNTTFRIVTCLRLGAPIIIPHTCRCGAAVNRLGQHGLSCSRSAGRIPRHQNINDVIRRALATAGVPAILEPNGLTRDDGKRPDGLTLVPWRIGRALVWDATCVDTLAPSHLHGTSTEAGAAANNAENLKRHKYRVISSTYIFEPFGVETLGPWGHRAHHLFREISKRLVEATRDPKAGGYLAQRISLAIQRGNAASILGTLPPGEELGEVFYL

SEQ ID NO: 15849 - protein, 1116 aa, Campodea augens
MRATVPNTCKIPTPSNKITVVTAITGVAQNSNLSPSSPLVLNGGPRPSHSRGASNIPTACFRRVTPVVPVTVSPPTSSLERLSPSRTLQVTSSHEHTSVSSISTSEHNTSFVSSGSADHTTVVSGQEPNTSIHEGGINIPTVDQQNTINVAVVPLAIVLDEVTQTPPPMPAAKPRPCLSKSFKAPSVQTPIREVSRINGPPSFSAYWGTTFKNCSTWEEVELQYIRYIDCIREHLSDQERKISSNNNSKKKNNPPVVRFDPEEAKRIQQLYRQNRKKAFRQVVEGDSPYCEIPIRQLEQHFTAVWKEVERGETNLSPLLANPVGQELLIQPFKVEEVRNRLYKSPNSAPGPDGVNYYLLKKLDPSGISLTHLFNQCLHHRHVPSPWKESATVLIHKKGERIDPTNWRPITLSNCIYKLYAALKSDRLTKYIDLNSLISSNQKGFRSFSGCTDHNFTVQTLIAEARRNGGEVAFAWLDLSNAFGTVPHSAIILAMERLKIPQAVIDIVIDIYCNTTTTIKGSKLSRSIPINRGVKQGCPLSPLLFNMVLQAAMDTVTSKNFPTVSTLGQQYNYLAYADDIVIMSHPDHLQAYLDETTSTFSDLGLSINVAKCATLHVDCKQTRTAPQSQFTINDVPLPIMSEEDSYKYLGCPVGLFTKNSFNEILDKFELQLNLLSTSLLAPWQKLDALHTFIIPQLEFYLKYSTSVKKRLHGLDATIRETLKEWFNLPNRAATEFFNLPILSGGAGLIPTNVNLDIQLVLHAQQVLNSKDSKTSSLAQNFLHSVVRRKIGDIPDERDIAFYLNGSMEGSLARDGGDIQTIFSQARKATRRLKGMIDIKWVATTKGAHLVVPTNMPKSNKNPTMAAKIKSALRSHWFNELTTKKKSQGKPFHLLSKSPVSNHFIRNGSFTTFSSWRFIHRARLNLLPLNGCNPVSVDKRCRRCGYHLESTPHVLNHCMINAKMYQDRHNNIQSRLHKAIPKTYNEIRVNQTVPDLDGGLRPDIVVVNSKTKSCTIVDVTVPFENGPKAFADASDYKSRKYQEVVQHYRSKGFTTNYHTFIVGSLGAWDPYNYQVLKALRISRRYIHLMKRLMVSDTITWSKDIYVKHIKGEDQEADP

SEQ ID NO: 15850 - protein, 1082 aa, Labeo rohita
MKSVVTAGETDDSRKDGNLGWRGLAAQTASSERKNPKQATKPKEERYPQGCPRGGGNEHPSRTDLRMTTQDNGTTTTTVQCICGKSCKNERGLRIHQGRMRCLKAAVTTTQRTEVTTSGKTQEEPGLEATHSAQSLLVSPTSAASHSHAMLGCPQVTVPSDSSQSPQYQQAAATRTDCGPLAQPRIQWPQASKKAEWHQFDEDVNQILEVTGKGDVDHRLLTMTTLIVNFAAERFGTVTSKPTPLAYTQSHRVRKIKYLREELKLLKRQYKAAGEEERVGLVDLRGILRKQLLTLCRAESHRRRRKERARKRAAFLANPFKLTKQLLGHKRTGQLTCSKDAINNHLKATYSDPNRERLLGPCDALLIPPEPTSEFNLKEPCQSEVEEVVRRARSSSAPGPSGVPYKVYKNCPKLRHRLWKALKVIWRRGKIAQSWRYAEGVYIPKEEKSVNIDQFRVISLLSVESKIFFSIVAKRLSNFLLSNKYIDTSVQKGGIPGVPGCLEHTGVVTQLIREAREGRGDLAVLWLDLTNAYGSIPHKLVEVALEKHHVPQKVKGFILDYYSKFSLRVSSGQLTTDWHQLEVGIITGCTISVTLFALAMNMMVKAAETECRGPLSKSGVRQPPIRAFMDDITVTTTTVPGARWILQGLERLMVWARMSFKPGKSRSLVRKKGKVTDEFRFRLGQHQIPSVTEKPVKSLGKAFSCSLNDRDSIRESSTDMEGWLRAVDRSGLPGRFKAWVYQHGILPRLLWPLLIYEVPMTVVEGFEQKVSSYLRRWLGLPHSLSNTALYGKTNKLRLPFGSVREEFIVARAREHLMYSGSRDAKVSGAGIVVRTGRKWRAAEAVQQAETRLKHKAILGSVTQGRAGLGSLTANRYDLASGRERQRLVQEEVRASVEEERSSRAVAMRQQGAWMKWEQAMERNVTWKDIWTWNPQRIRFLIQGVYDILPSPSNLYTWGRVETPACPQCSTLRPDIILVSEATRQLILLELTVPWEERMEEAQERKRGKYQELVEQCRINGWRTRCMPVEVGSRGFASHTLSKAYGTLGITGVNRRRAISNNVEAVEKASRWLWLKRGERWGR

SEQ ID NO: 15851 - protein, 941 aa, Harpegnathos saltator
MNVYLYDKLGSSRTIESIKGIRRKQSYKSLVAEYRECWVEEAIEQAVAPTIEFDSLVVCSQGASVIAIGGEGRKSARQWLENKLDHIVPEMNGGIWIRTAIRRLMESGDPDTNLEDWWRNVFPDLVGPEYKRRKRGEYVAPMLSKRRARRREYRRTQKLWTINMTKAAHKILDGDTGELPHPRLAEQVAFWRPVMEKRGTGESEESGEQAFQVLNDVWSPITEGEVITIRLPMTSAPGLDGITVRRWFTEVPAILRATIFNIFMATGTVPSRFRNSRTVLLPKSSDYLVPANYRPISVASVLLRHFHKILVTRLARYNLIDDRQRAFISVDGCAENIAILSSLLHDAHVNLRQVHIISLDVQKAFDTVSHSGIMKVLKKYGIPESMIAYLRELYATASTMLEVDGSYSEEIKPGRGVRQGDPLSPFIFNLIMNEVLAAVPNNVGYMIADYNINALAFADDLILIGSTRVGTQISLDCVTEALRGYGLSLSPLKCSAFSLMPAGKYKKMKVLTDPQFRANDSEVPQLNIIQTLRYLGVHFNHRGPIMNAVEMGPTLERISRAPLKPQQRVKILTTYLIPRYVHVLVLGRVTHGLLRRMDRLVRAVTRKWLRLPADTPNAFFHAPVADGGLGIMSFETAIPELALQRLERLKSSQFRLACIAGQSAWAAKKNNWCKMSKRRSSEWSKLLVKSVDGFELREASGVAASTHWLRDDMAHIPSRDWLQYLKVWINALPTRIRTTRGERRNRQDVKCRAGCEVNETAAHVIQQCFRTHGGRVLRHDNISATVAGEIDRMGYGVRREHLFQTSVGGRKPDILAAKNGKGYVLDVQVVSGAGSLGDAHRRKQQYYAGNEELVKAISALLQVPQNNLEFSTITLTWRGIWARKSADTMIKIGIPRTIMNGITTRVLKGSALNFRRFNQTTMVMRRGRSYMRMTGWGPPQN

SEQ ID NO: 15852 - protein, 1059 aa, Aleochara bilineata
MNNLAVSSQSVCECGRSFATIRGLNAHKTRFCRQRAASSSCHQCDVCDADFTTAEGLSQHLRQKHPAIYNSRCAHGTEHKHIRWTQMEIQYMALLEAKWNGQLGFINKFLHSQMKERPIESIKKKRQAPEYKEMVMRLRSERSEAVADEDLQHITISVDPPTPPQNHPRGEVEECSLLAPRSAPPNINNTFFYPDQREDFASVLADSHERALIDILLTSRDDATKAVDLLVADITPTKRSPVSTRTTDRVNSSTNNITLSNRAAKRNHRAHEYRVAQTMFVRDRARLARSILDGTPLTHNDINPPIGLVESTYKEIFENEGVIDNSNCDELTSESLDSNILQKLNGPITCEEIDKAMGAMTSKSVGPDGISIEAIRRWDKNMRLLCVNLIYFWAYIPKENKACRTTLIPKTKTQLENISNWRPITIGSMLLKILSKVLLRRITLHVDIHHAQKGFTSDDGVMYNTTLLETIVKDRRRNFRPYTILSLDIRKAFDTVSHKAIRNALSNKGISGRISAFIAESYNGCSTNITCGNSKTSSIAMKRGVKQGDPLSAALFNIVLDQFLRSIPPECGVNVGTERLAVMAYADDIILLTPTKREARLLLERTDRFFRSQGMTLNPSKCHSLIVETVPRAKKLVVRPESYFVIHGQNITPVATNHFKYLGNLYNYKGVEGPSADSIQAEVDRLCKAPLKPYQKLNIARTYLFPRISARLQHPRLSRRILKRVDFICRAFVKRSLHLPKTTANAFLHADRKDGGLGIPEFASRIPAIMYKRLENCLVSAGVSEFAREAFVSTQTHFLRLSNGNIESRDSMRRRTAVVLETGYCGNGISQVGNHKNSSQWIEAPPSNWSAATYVKAVQLRGNLLPTVGTPSNPPGQRKCRGGCNKIESLSHVLQGCYVTHGSRIARHDHICNLLRRFATRNDWQVITEPKIRLSDGIMLKPDLLLIKDDTVAICDVAIHWEGQKNLEQHYNSKLRKYSSVAFLNEIRKRYPGLNIRVHPLILGARGTSAKKNIDILTLLSINERDHTKLILDSIVGSLACHSFFMKQVWSGNRSARHH

SEQ ID NO: 15853 - protein, 973 aa, Aleochara bilineata
MEIQYMALLEAKWNGQMGFINKFLHSKMAERPIESIKKKRQALEYKELVRRIKAERADAAADEDLQHISINVDPPTPPHNHSHGEIEECSLLAPRSAPPIINDSFFYPDQREDFASVLVDSHERALLDILLTSREDATKAVDLLVADITPTKRSSLTNTTTDRANSSTNTATLSNRAIKRNQRVHEYRIAQTMYARDKARLARSILDGTPLVNNSNNPPLDHIETTYKEIFENEGVTDNNICDELTLENLDSHTLQKLNGPITYEEIDRAMGAIKSKSVGPDGISIEAIRRWDKSMRLLCINLIYFWAYIPQENKACRTTLIPKTKTQLEDINNWRPITIGSTLLKILSKILLTRITLHVKINHAQKGFTSDDGVMYNTTLLESIIKDRRKHFRPYTILSLDIRKAFDTVSHKAIRNALRNRGISGRISTFIAESYNGCSTNITCGNVKTSSIAMKRGVKQGDPLSAALFNIVLDQFLRSIPSDCGVNVGTERLAVMAYADDLILLTPTKREARLLLERTDRFFCSQGMTLNPSKCHSLIVETVPRAKKLVVRPESYFVIHGQSITPVATNHFKYLGNLYNYKGVEGPCADSIQAEVDRLCKAPLKPHQKLNIARTYLFPRVSARLQHPRLSRRILKRVDFICRAFVKRTLHLPKTTANAFLHADRKDGGLGIPEFASSIPAIMHKRLENCLVSAGISEFAKEAFVSTQTHFFRLSNGNIESRNSMRRRTAVDLESGYCGNGISQVGNHKNSSKWIEAPPSNWSAATYVKAIQLRGNLLPTVGIPSNPPAHRKCRGGCNKTESLSHVLQGCYITHGPRIARHDHTCRLLCRFATRNNWQVITEPKIRLHDGSMLKPDLLLLKDDTIAICDVAIHWEGQKNLEEHYNNKLRKYSSAAFLSEIRKRYPGFNIRVHPFIMGARGSSAKKNIDILTLLSINERDHTKLVLDSIVGSLACHSFFMKRVWSGNRSTRHH

SEQ ID NO: 15854 - protein, 1022 aa, Blattella germanica
MGEDPLSSCPFCSDNNNYPDHLLICCDFCNIWFHGPCVGLCNEQVQSFAASSSTWNCPTCKIKGNPLDSSLVDKSLVACSLCDNKFFKGTKGLRIHWSRVHPGKHLPFDSHEQIISSSLDDSIHKTLALCKRNVKVMKRIPKGARYFAAEKLCHIIENCISVNSVECWHDFFLYPYIAFRIPDKSEKKSEKNVTKSLVSTIKHNLLEFQLSIPDNNKKLTFSKNRLVESKVSDGDIRGAVRILSSNFGLAPPSLSSYEAMKDKHPPPSPTRPLSFPSPPTSPATNLTVSADLVLQAIATFPNGSSGGIDGLRPQHLKDLLSSSSGDAGRKLLLAITNLCNFMLSGKVNAKICNILYGASLIALEKKDGGLRPIAVGNVFRRLVSKLACTYFRDQMTTYLFPTQLGFGVRSGCEKIIHAVRSFLTSPNIGNQILCKIDFQNAFNCLNRDVMLKVVQEKIPMLYAFLWQVYRHPSNLYFNTDIILSHNGVQQGDPLGPLLFSLTLHPIISKLKSNLHLFYLDDGILLDDPQCVLSDLQSLLVSCKSIGLDINIKKCELLFCSEPDSAILSSLCDFAPGIQIVSKSELTLLGCPVFSEGLEDAFLEKLSVMKILFHNLLSLHSHIAYFLLRNCLSVPKILYFMRTSSLWCFPALLNQFDSQLRSCLESILNLPLDDVNWTLATLPTKFGGLGIRSLSDLCLPAFIASAYGAIDFVKSFHTFHGDKIEIYHLSEALQEWSVLNGNLSPTASLEIQKQWDLINITRIHNSLVTSSFSLVDKARLLAIQEREASAWLNAIPSSNIGTLMDNLSFSIAIALRLGCRFCQPHTCHCGTVVDELGHHGLSCLKSSGRISRHSALNDIIKRSLTSAGFPTILEPVGISRSDGKRPDGLTLIPWAKGRSLMWDATCVDTVAPSHIASTQKIAGAAAESAVQIKKRKYSHISNNYFFVAFAVETFGTWCADAKDLINRIGRLLQDLTNDSRATNFLRQRIGIAIQRGNAISVMGTFPPASNFDEIFYFLNYKSF

SEQ ID NO: 15855 - protein, 1226 aa, Craspedacusta sowerbii
MFTIIENNCGPGRSPNLTQGGIVEAVRAQTAPRRLAYELRGTTVPTEASCLQLPINTIRPRRVRWNADLEQSLYDIYLEVLPVSHGHVHRSLHTRWCEVHPELAFISANALSKKLGGVRRMKQRTAPTSDEEVVEVPVTTEVTEKPLEAGPTWADKVRGPRLRTENPPATVAEGHSVEGGSIVTPPSEREPTPEIVTADTPATTQALVAKHHLEFTKLLERASDFSKRNTPARNRWIDETMLACMDELVATSWIATPEAERTPFRLNCLVWAASCLGQTSRSASRTEGVPSKEYMASGKRYRQLIAWIDIELKRNDKPNKSEHKIRMRLRRECKTLDKSKLSRLRETLVGKLRVWSSKVRDTNRETKFKKANSQYALTGRWQPEMSNGRITQPPSAECVSEFWTGIVGSAAEVDLADPALQGWKREIASKAVKTDGGPFVITDPIWELLMKKMRAFKAAGPDCIYAFFWKRLRKTNAILRRLVTEELNRPQFPGWMVNGRTVLIGKTEDQLELQNPSNYRPIAVLNVMYKVCTGVIARSLVSHCENNGLMPIEQRAARKGLWGTMDCLLADNLIMQWCKIKKVDLTVSWIDYQKAFDSVPHGLIDWLLDSIEFSSTLSAALRCAMKSWASRYTLRVSNKERLVTSLIQNKRGVFQGDQLSVVLFQLAMCPLSYALRTELPHLKMKGIRGTISNHLMFLDDLKVYMPNLAAFEKAVDVITRVSAATGLHLGYSKCKYASLVKGKLTLTNDLTGGISPLRDGASYKYLGVKQFLGHGDCAETAQEGEKRLRSNLQQILAAGLNGKHTTNLINTVAVNGLLYYLVAGVWSRSDISKRLDREMRGILTKGKYHYKSASAKRLYLPRVEGGRGILSLLNAYDSATVNIATYMASHTDALVCGIWELSKYLSKVHSRKTIYSEANKIAKALEIDCSFEDAIRLQGERIGAESRQRVTRVLKERHAQVLRLELESSKIHGVFFKKTNVRGAHSHVWLDQGKLRCETEALACILQDGSLRTRAYEKRILKIRADEKCRLCGSAAETIGHILNVCPKSLVKGIKDRHDEVAKVIYSAVTQNHQIEDSVYRCKPRPVVTQNSIKLLWDCLIPTRDHIAHRRPDIVLFDYKQKIVSIVDVAVCWETEKAHKRAFDEKVLRYEQLRVDLVRQLRCWKVRSIPIVIGSLGSYDPERLNNSLRDLLPGVSNEKLEYVRNEMQRVVVLGSVRVAKTHLAER

SEQ ID NO: 15856 - protein, 1376 aa, Hestina assimilis
MDKKVYNLRSLPGGRRGASGADAGCSSMRTIGGEELIRRAPANKEVTAEIVTHHIQSSSSSHLSYHSSSDSSSSTLSSLSPLVDVVREAQAFKSEPTTRQTRVRKKWTQEMNMFIWRTYLIVTKLETNTRGYLNSLHQTFATKFPEMNASKQRLGDQRRAIVNNKLLSPTILNEIRSEVAKYVKENTPPSQEITKTEERMRWSNEINEAIIRIYFDITELETNVTSYRKKLRDKFLEIYPHLSQLSEQRLSDQRRAIINNKMILESRIQEIRQEVEIEKQQLFCQGNIQREIITTTQNHTITNNLARTQNEVNIPTGESFASSLLTLSESQNMTVTDYQLNTTQTQAQVLTQRNLQIGKNIDKAFEDALLLYTPTNPLNRPYIPRQRASRKLAEIVNYINNNILPKYINSDTTFESFQTSIYCAALTAAKMNGAKIVNLGAENAAQPSVKKIKPKWQIRLERKIEDLRKRIGQLTQYINGNRTRKVCKQIEVILNKYKIHSVHETINTNLIEFLDTLKQKLAVTSKRLQRYKACTLRKKQNSQFIFNEKQFYRTLKENSSNISHNSHTTENYIHLQDLKNYWASIWENPLCHNYNAEWIDTEKKRHENTQVMNFEHITIETFIKILSKQHNWKSPGSDRIHNFWYKKFTFIYPFLHSFVNSFIQDPSTLPDYITAGVTYMLPKDPKNLTDPSKYRPITCLQTIYKIITSCLTDSIYRHIENNKIVAEEQKGCKKFSQGCKEQLTIDSVVINTAYKEKRNIHSMFVDYQKAFDSVPHSWLLQVLDIYKIHPIITQFLKCTMQKWQTILKINQEHISITTEPIRIQRGIFQGDALSPLWFCLALNPLSKLLNDTSYGFTLFNTDSSYTLSHLIYMDDIKLFASDKNQLFKLADITQKFSKDIEMQFGINKCKILSVSKGKIENNSFILNTGEQIEPMNENSTYKYLGFNQCKQINQKQTKNELIIKFKHRLNHILKSLLNSRNTIKAINTFAIPILTYSFGIIKWSRSDLKNLQRIINTHMTKHRKHHPKSCLQRLTLPRQEGGRGLIDITNLHNMQITTIRNYFHTKSQYSTLHKHITEADNKNTPLNLKDRRKQSTENTTNIEEKIVSWSEKSLHGRHRSDLSQEHVDKDKSNEWLTRGELFPETEGFMLAIQDQVIVTRNYSKHIIKDPNFSTDLCRHCQAASETIQHITGACKSLVQTDYRHRHDQVAAIIHQYFAQQFKFIDTNVPYYKYKPEPVLENNNYKLYWDRTILTDKTIHYNRPDITFHNKIQKKIYIIDIAIPNTHNLKSTIADKLSKYQELALELKIQWKAETVQIVPIVLSSTGIIPKSLVQSLETLQIPKHTLYTLQKATILNTCRLTRKFLTSSSVSATITL

SEQ ID NO: 15857 - protein, 1531 aa, Trypanosomatidae sp.
MPKDKLPLPKSARSGSKNPEKTKSPRSARDKGATVHMEKQQQRTHFSRANSASGGGRGEVEKTVIKKQFLPQFDALPAQIRYGKELDKAIAEHSGLMAQLFDRHTDMLKRHFAWANPVKRAFYYCTAIELSGSPCTFAGDTEKEVQDHIRERHPGTGAVPRRFGLSRFQGGMANIGPSCSVTAVVAALATISKEETGFHQHDLLRRAFRTSSAEDSRALLRGLGLQLPTAPGAVLEALAAQDPEIARLFAVNECHDIVCKECGTTTEGLREQSPAILTYEAPPGPPRNGTAKALEAAFGPDSADKLLDCSVCGRQRQPAVSITHYLFGGAVAVTVVPPETTPDTQGLPDLPLEVGFATRPLAATPFLLHAVLCATSPTHVVAYVAERDAEKITWHRYNGTVHETGVKAPNPRTLDTMIFLPAPPPPAAEGADENEESDPNARRTGAGGPQQPPQPPSRPRDAKGRPLYGLESSNEETDDEEDPHSAVGHDRAGRADRTGAATGAEGADDDDDDDTSGLEDAPGAPQALPADFVVNKTLVPPVRGGLKCPLCDHSWTSTTRRHQQTDHANHKHLRQECSTEALERACLDRCRRCGQFVVASDRARAAHASQCGPFQTRAARNRKRTRRDTDVADDAVTGGWGQLPEARWPPRRGEPPTEEDIAWVKTLPPTIRTLRKQEWGIWSEAVGTALLGYTAAGPEERCRRQLAITTLVRNRLSKPSPADEEAREGGATAAAAEERRGERGEGEERGNDGGGERDESEEALRARALTAPRPRNTDEELPQASRQTPEERRQRRILHQLSLGALGKAARTLFSAQLPRARAADVAEQLQTLHPQEDPAGYPLPPEVLYPYNLEPAKVRKVVVKSLGRASAPGLDGWTRELLIPVVENKTLLQELTTLLQDILAGRVSASFAYRVRACVVHPFLKEVGSPKVRPITPESVWLKMASHLAVDKVDKTFREVFKGWQFGVWGDAAEAVRQIRAHYASTSADTLVALDATNAYNRMSRAHVLRACFAHPELRSMFGVVDLALGEAGPLGVYENGLRTQELASTKGVRQGMVMGPLLFATAMAEVLRPVIARHPDAHVAAYLDDLTVVGSRAAVQGFLDEAGPLLAQVGFDINPAKSHHLTKQVAPQPVTVAGAVVPVAAGVVRILGAGFSGANESLEPWVFAAASKYEAYFAALADEGLPRHARLNLLRASALPRLTFLLRTHRPEELDRSARLFDDSVRRVLAGLVGEPALDETAVLISRLPLSMGGLGLRSQQPIAKFAAASVGRKGAQREQTSAVDAEVARTLLSLLPEPALTLLKANAAPGATRALVDPAVRLSDFAFEVLVRQRLCLRVLRPGTVCTCGADADNAHVNVCPSLPGGPRISRHNRVVHAIGAWARQLGLSVVTEPRAGTDNRERLDVTIAAAGGTFATDVVVTYPGRARGEAQSALQQSHAEKRRKWANWAHDCGANFAPISLESTGGLHKESFQWMLAVAGSTPFPYSARTALSELLSAVCKAVHEGNALIFSKVRHSWARTLLRSEV

SEQ ID NO: 15858 - protein, 1531 aa, Trypanosomatidae sp.; identical to SEQ ID NO: 15857

SEQ ID NO: 15859 - protein, 1508 aa, Leptomonas pyrrhocoris
MAGKNSRGRSVGGKKKVQSPSGRTFSKSPKKTGGKKEVQSPPGRTFSKSPKKTTKEPNTRNIGPSKTEEKSQMPQFDQLAAQYATAAVLDKAIAEHTELAGRLMERHASILQRHYAWANPVHQAYFYCTAVDVTGAACTFASDAEEDVQKHIRERHPGSGAVPRRFGLSRYTGGMANIGPSCSVTAVVAALATVTGGYQQNDILRKAFRTSSAEDSRAFLQALNLRLPNSPAAVLGALAARDAATDAFFGATECHDTFCKTCGTTIEGPRVKSSGVLTYTAPPGSPQGGTAKALENAFGPEATDAVQYCSVCGCDAQPCVNMVHYLFHNAVAVTVVPPPTQPNNRGLPEIPLEVGFATRPLAATPFILHAALCVTTPTHLVAYVAERVEETTYWHLYDGTVHTKGVKAPDAAKVRMLLYLPVPIRHDVGEGDNEDEEHSNGRPAGAPPPPPPPPPPPTSLGTDEYGHELFGIVLPEGSADTVPDDEDEAEEDQPTAPSPHPLPNHPLTIPDTPPARRAEEDGEDGTSSDDIELVQPEGQFLHGDNVHIAPAEGLSCPFCAHRWTSAARRAQQTDHANHTHGQERCGAEALKRAGLDRCLVCGQFVVASRRGRAAHLPKCGPYETRAVRNSKRARQDPATPVEGEDDVADTPPTVAPQQRRREPPTEEDLEWVKTCPPTIRTLRKQEWGVWCEAVGQTLLGYTAATQQERHRRQIAMTTLVRTRLAKPQPEGAEEAPRSGTEGVAAGDDQRQRNTEEELPTTRQLTPEEKRNKRILHQISLGALGKAARTLFHAQLPRARVSDVVEQLQELHPQEDPAGHPMPPQVPFMHGLKPEKVSRAIVQRLGRASAPGLDGWTRELLIPVAENKNLLQEFTTLLQDILSGRVSPSFAFRLRACVLHPFLKEAGSPKVRPITPESAILKIASHVALDAVPKSFREVFRGWQFGVWGDAAAAVKQIRAAYASASADTLVALDATNAYNRMSRAHILSAFYSHEELRPAFGVVDIALGEPGALGVYEHGRRTQELASTRGVRQGMVLGPLLFATAMEEVLRPLIASHKTVKVTAYLDDLTVVGPRRDVQLFLDAAGPLLSNVGFDINPAKSHHLSKMVAPVPVTVAGTVVPVATDVVRILGAGLQGNSAPVEEWVWDKTQKYESYFAALEDDKLPRHSRLNLLRASALPRLTFLLRTHCPQELERSATWFDQRVLRVLSALVGDAAPDNTAHLIAKLPMVMGGLGLRSQTAISKFAAASVGRKSAQRDQTRVVDKEVRETLLPLLSEPCLALLKANAAPGATRALVDPAVHLPDSAFEVMIRQRLMLRVLRPGVCCACGADADNAHVNVCPALPGGPRISRHNRVVMAIDAWAKQLGLSTVVEPRVGTANRERLDLTIATAGETFATDVVVTYPGRSCGDAQSPLQQSHGEKKRKWANWAHESGTVFAPVSLESTGGLHKESFAWMLAVAGSMPFPYSARTALSELLSAVCQAVHEGNSFQFAAVKNVWARSLQRRVD

SEQ ID NO: 15860 - protein, 1510 aa, Leptomonas seymouri
MAGKNSWWRSVGGRKEVQSPSGRTFSMSPKKAEDNKKHVQSPNRRTFSRGPKTAVKEPQKEHRDTHKTHGEPQMPPFDQLAAFYATATVLDKAIVEHTELAGRLMERHASTLKRHYAWANPVHQAYIYCTAVDANGTACTFASDAEEDVQKHIRERHPGSGAVPRRFGFSCYTGGMANIGPSCSVTAVVAALATITRGYPQNDLLRKAFRTSSAEDSRAFLQALNLRLPNSPAAVLGTLAEHDAATDAFFEATECHDTFCKTCGTTTEGPRVKSSGVVTYTAPPGSPQGDTAKALENAFGPETTDAVHYCNVCGYEAQPCVNMVHYLFHHAVAVTVVPPPTQPNNRGLPEIPLEVGFATRPLAATPFILHAALCVTTPTHLVAYVAERVEEATHWHLYDGTVHTTGVKAPDAAKVRMLLYLPVPIRHDDGEGDNEDEEHRSGWPAGVPLPPPPPPPPPPTSLGTDEYGHELFGIVLPEGSADTAPDDEDGAEEDQPPAPPPHSLPNPPLTIPDTSPDRRAENEGEDGTSSEDNELVQPEGQFLHGDNVHIAPTEGLSCPFCAHRWTSAARRAQQTDHANHTHGQEQCGAEALKRAGLDRCLVCGQFVVASQRGRTAHLPKCRPYETRAVRNSKRARQDPATPVEGEVDVADTPPTVAPQQRCREPPTEEDLEWAKTCPPTIRTLRKQEWGVWCEAVGQTLLGYTAATQQERHRRQIAMTTLVRTRLAKPQPEGAEEAPQSGIEEVATGEDQRQRNTEEELPTSRQLTPEEKRNKRLLHQISLGALGKAARTLFHAQPPRARASDVVGQLQELHPQEDPTSYPLPPQVTFMHGLRPEKVSKVIVQRLGRASAPGLDGWTRELLVPVAENKNLLQEFTTLLQDILSGRVSPSFAFRLRACVLHPFLKEAGSPKVRPITPESAILKIASHVALDAVPKSFREVFRGWQFGVWGDAAAAVKQIRAAYASASADTLVALDATNAYNRMSRAHILSAFYSHEELRPAFGVVDLALGEAGALGVYEQGRRTQELASTRGVRQGMVLGPLLFATAMEETLRPLIASHKTVKVTAYLDDLTVVGPRRDVQLFLDAAGPLLSNVGFDINPAKSHHLSKMVAPVPVTVAGTVVPVATGVVRILGAGLQGNSAPVEEWVWNKTQQYESYFAALEDNKLPRHARLNLLRASALPRLTFLLRTHCPQELERSTTWFDRRVLRVLSALVGDAALDDTAHLIAQLPMVMGGLGLRSQTAISKFAAASVGRKSAQRDQTRVVDKEVRETLLPLLSEPCLALLKANTAPGATRALVDPAVHLPDSAFEVMIRQRLMLRVLRPGVRCACGADADNAHVNVCPALPGGPRISRHNRVVMAIDAWAKQLGLSTVVEPRVGKANRERLDLTIATAGETFATDVVVTYPGRSCGDAQSPLQQSHGEKKRKWANWAHESGTVFTPVSLESTGGLHKESFAWMLAVAGSMPFPYSARTALSELLSTVCQAAHEGNSFQFATVKNVWARSLQRRVD

SEQ ID NO: 15861 - protein, 1510 aa, Leptomonas seymouri; identical to SEQ ID NO: 15860

SEQ ID NO: 15862 - protein, 1337 aa, Hoplolaimus columbus
MSSSSKHNKNTNPHSKGEGEEADRDVNLLSTHNPSRSLRKVNSPSPSRTVVTRSQTLAGGAKGAFIALETEPQCSISRAVTPEMLNDGMATLRTKPSDSAAANKNTTSVALIQGAFLASPGRKSNAQKWAIEDCILAYQLREDSKKPNSKKANWDEVVKAWTSLINDPNSALPRCKSIRSKGSLVYAASRGEVFHRQNLEAHTDASQSANKTLIEESDASQSEPIQMPDPTPKSSPPKGGLYRMTEDGGFEQFLLEYIKEFKLARLKRTPLYKPNRKIPDVLYAYGEKAIQLTIEIGTSNSRTESISTESLNCAVYAAASVITNRLKKASWDATHVSRLTKRDLVFKLTKLRRSLAIIQQEINCRLNHTQTTDKHRQAISQLSRRLGKSLRKLRDLRNVKESMVVQVKTLSNTLKVKTEEEYRKRIRNLPPKKALDAQVAGKDTVQPVSLNRLRSYWAEIIGTPRQFSETKETREWANTFVGKPTYNPSKDEVDIDWVEVCKRSKPWKAPGPDGIPNHWWKHFSSANSELKKQILEFKEGKRDIPNWFCKGRAIALYKKGDSSDPSNYRTIVCLNTCYKLCTGLITKWIMRQLGEQGLPPEQLAIRPGTWGCVEAHILDSTVTMDAILNHKPLSVGWIDLRQAYDSPPHEYANYGLEKIGLHGDIINLVSNLMANWSITYEQKVGKVKKRSEPLKVKRGLLQGDSLSPLMFCICFSPIQHWLNTKVPKYRTSFNEHNMDENHRQLVLNHIVYMDDAKLFQNSPKLLEGTIKRLKEIAAGIGLHLNELKSGVAHLNCDEIELDTDTQFGDIPCIGDGTVYKYLGIEQDTRISPNNLWERIEELVMSRTNLIFSSVLAIGQMVKCYNTMVAPVVRFAGMCTIIGRGKHASELLRMKELDKKVRMKLAELKIRFNSQSEYRLYAKPECGGLGLLRLEEALEQSTVYAYTYLVTTPRLQTAHQFMYHLYEVKHKRSLASDMERILRKYDICTDSNRPDSVCKIHRDKTYRQACIWVNGSKFEAPTPAARAIMELINNARNKSLEEKLGKHGSAPAPGYGVMARLLDHEAQGTDPNFNWQWLKKGMVSALVARNVLAAQDGQILCAHRNMHLVCRMKCSKPGTKETIAHIVSGCEYWRANKMLERHNMVASNIYYIFSQKIGLPTTHYSSRKDKVRCNANGKLYWDRVVDEARILSSNKPDIVFFKAAPNQTNDQSAAKYEKIWIIEISVTWVSRLASVEQEKRRKYAVNSVNEEEGPDANLANELQKAHACPVIVVPIVIGVFGEASKNLMDNIRLLELSDKETVALVERMQRSAVIGTHAILKAHLASPPLSALPARIVA

SEQ ID NO: 15863 - protein, 1061 aa, Bradysia odoriphaga
MAGCSGINNLKDLIEQVKKEYTVIFPDMKEWPCPFCYNKSKDILQCRIHIAREHPSISRADRSELAKFYNEFNDKVDLSKSFEKNELSNSQSQESSSQDRPGYDTQCEICKQFCKGKRGLAIHTSKKHKTQQRQKIVNTYAKKNENESVVTATEPIPETDPVNAEKSEFKVFCNKMVRDLDYLLINQERENDKCENIVNELVIKLKEMQDKLPGPKNPATKFYKIRKNKNFQNVDRTYATSSNPQRHSKRDREKRNQKFNRDWIQWLYYNQRKRAVREISEDNNNVCPIKLSTLHEKFQERWGTPNINVIPQKPIPKSEQEYIDSDYSAEITSEEMKDAIKRTSSDSAAGPDYIIPRTLKAHSEDVSRVLSKLATIMLQWNYVPECFRKARTVLGYKGNDKEDVKNWRPLTVCSILRRIIEKVLDRHLRSYLVVSSTQTGFTNQPGTFINTTILSAALNSAKAKKDTLVVVLLDIRQAYDKIGHSQIRMSMEAQPLPSQLRSLVLKLDDGNYTQIRTKEGLTKYIDFKCGILQGAPTSPQKFNVATKIVLDELNEYEMLHKYGYKINETLDPITNLAFADDTGILANSRDSAAVLVHETSENFKKIGLEINYEKSVAIVIENGKLNSIDLMVNDEISIRALKANETIRYLGVTFADEISFDEEKTIRNLNEKLDKIVSTTTLRPDQKMKIINIYIFPTLTYQFQTAPLCKLKKGFLENVDKIIRHAVKEILQIPDDTPNNMLYSCNSMKGLSLIRAEWEAYIQTINAITVLKKSDHPIVNEVRDMEKEIDHCLAKLNLPTDFLESSNSSKPSNLLRSKLRQREYVQWQRLKSKGKGVVLFQECPNFNRKIYEKHGLSTSEWITYFKMVGNVAPVRVIPGRSSGTNRCRIDSCDEIETLAHVLGFCRQGELLRHDRHNKVVRMLANDLRESKWSVIVEFPCVSTDGSNRRVDLIVYDNNTKEGFILDPTIRFETDENQPEAVDEEKRRLYEPCIQDIKIKCKLKELKVIGLLLGARGTIPKFFVNFCKQFKIKNSVIENIVIEVVRGSSRILHNHTYDPTRS

SEQ ID NO: 15864 - protein, 1075 aa, Bradysia coprophila
MGDIRSNVAGSSGINNLKDLIEKVKKEYSILFPEMKEWPCPFCYTKSKDKLQCRIHIAREHPSISKADRSDLQKFCEEFNKDEEISINTNESAVSTSMSQMNEDMSTQDRPGYDTQCEICKQFCKGKRGLAIHKSKKHKTEQRKKIVDTYSKKKTDKEDPVSSSGDTIDPEVIPENNGRSDFQIFCERIENQLNCLLMSEIKETEKFENLVAEIVEKLKLTQELLPGPKNPMSKFYRIRKSKNFQDVNRHFKQSSNPQRQSKQDREKRKQKYQRDWIQWLYYNQRKKAVREISDEKDNNCPIPIASLCDKFQERWGTKNDKTIKQAPFPIKDQEVIDAEYDNEIKAEEIKLAIKKTSSDTAPGPDYIIPRTLKTHSNEISTVLSKLATLMMKWNYVPTCFKKSRTVLGYKGNDRNDVKNWRPITVCSLLRRIIEKVLDKHLRFHLTVSSTQNGFTNMPGTFINTTILSAALNSAKAKKDTLVVVLLDIRQAYDKIGHKQIEMSLNSQPLPSKLRALVLKLDEENSTQIRTKNGLSRSIQFNCGILQGAPTSPQKFNAATKIVLDELNEIEIKQKYGYKIADQLEPITNLAFADDTGIFGNSRESASFLITETVNNFNRIGLEINYEKSIAIVIQNGKLNTENLYVNEEITIPALKLNETIRYLGVTFADEITFDEEKTIQNLNSKLDKIVSTVTLRPDQKMKIINMYIFPTLTYQFQTAPLNKLKKSFLENVDKIIRHAIKEILQIPDDTPNNMLYSCTSMKGLSLIRVEWEAYIQNINAILVLIKSNHPIVNEVRDLEKEMTICLRKLSIPTDFLDNEETRTRKPSELVRSELRKREYEDWQRLKSKGKGVVLFQESPKLNRLIYEKHGLTTSEWITYLKMVGNVAAVRVIPGRSSGTNRCRIDSCNEIETLSHVLGSCPQGELLRHNRHNKVVNQLANELRKNWTVLVEFTCISTDGSIRRVDLVIYNEDSRNGYILDPTVRFESDENQPESVNEEKKRLYEPCIADIQTKLKLKQLSVIGLMVGARGTIPKFFAEFCQKFKINKSVIQEIVTEVVRGSCRILHNHTYDPGRT

SEQ ID NO: 15865 - protein, 1231 aa, Chrysotoxum bicinctum
MSNRSKWRNNVQLIIPTHTKHGVLKTNMNRENQRIQQRVGIYTQTSAEATAAGVGLAPGGDESPVAEQYLGTPLQTRQEDNQQPSLVRSASVTTSQPLTTLAGLTRRRVQWSNEMNEFIIRAYFRTTRCETSTPGYRQRLHTMFVEKYPNLGHVTEQNIADRRLAIIRKNLLPRPLIDSIKEEVATEFDAQNQVNIVNFSESTEEENIGNTPAHPTLNGNIDENNNTVLNINVDLETQKLQQEFNRALTKYTSLDPTLRPRLPKQQQNYQMSSKIQIMNNDILPNFLLEISNYKELDLFLYCSAYAVIKSTNKNIPGEQRVQRPPSVRKNPPWLRRLNDKVESLRRDAGVLTSFITQPNPKLKRKAMRIKRKYIMHTQYDDINNTATEALDTVKQKISLYAKRLRRYKESKQRKEDNKLFKTSQKKFFDRCRGNNGIANQFPNMRSLERFWTEIWSSSSHHKQSSQLLQQSEEMSQLTPMLEFYVTSEDFQTVLKRLHSWKASGIDGLHNYWLKSFSALHNVMRREVNRFIQNPTCIPDYMCEGITYLIPKDDNPQDPSRFRPITCLNNFYKLTTSCVTELINKHCLSNNIMAEQQKGCVKGAFGCKEQLAIDAVITGQACAGQRNLFAAFIDYKKAFDMVPHSWLIEALRLYKINPQLITFCETVMAKWCTKLRAQNTTSGLIQIKRGIFQGDSLSPLWFCLALNPLSSLLNKSKYGFEVKNNIQSARITHLMYMDDIKLYASTANSLEQLLKIVEKFSNDIKMEFGIEKCKTTQIIRGKMSKGLEYITSNGKSINSLEEGEIYKYLGMEQSRMISHTSIKNRLHEMFKNRLEQLLKTLLNSKNMVTAINTYAIPIITYSAGVVKWSTTDLDSLDRKVRTLMTKYRQHHPKAAVERLVISRNKGGRGLISIRNLVEKQNHKLFSYFTAKASTSNLHSAILHSDENFTPANMKNASQLDEPTQSFQQLLITNWKSKPLHGRHPNELYASNIDVLASNSWLTFGTLFPETEGFMVAIQDQVLPTRNYLKFIVNDQNISSDNCRRCGTQHETIQHILAGCTVLVSDVYKRRHDNIGKILHQELLRKYGIQTSFVPYYKYTPDSVIDCPGYLIYWDRTILTDTNVAFNRPDIVIYNKSRKDIILVDFAVVNNNNMDSTYTTKIQKYTNLCFELKELWRAKTAITVPVIISTTGLVPKSTTSAFEKLGVPKKIVYEMQKSVILDSCRIVREFLAL

SEQ ID NO: 15866 - protein, 961 aa, Chrysotoxum bicinctum
MSSKIQIMNNDILPNFLLEISNYKELDLFLYYSAYAVIKSTNKNIPGEQRVQRPTSVRKNPPWLRRLNDKVESLRRDAGVLTSFITQPNPKLKRKAMRIKRKYIMHTQYDDINNTATEALDTVKQKISLYAKRLRRYKESKQRKEDNKLFKTSQKKFFDRCRGNNGIANQFPNMRSLERFWTEIWSSSSHHKQSSQLLQQSEEMSQLTPMLEFYVTSEDFQTVLKRLHSWKASGIDGLHNYWLKSFSALHNVMRREVNRFIQNPTCIPDYMCEGITYLIPKDDNPQDPSRFRPITCLNNFYKLTTSCVTELINKHCLSNNIMAEQQKGCVKGAFGCKEQLAIDAVITGQACAGQRNLFAAFIDYKKAFDMVPHSWLIEALRLHKINPQLITFCETVMAKWCTKLRAQNTTSGLIQIKRGIFQGDSLSPLWFCLALNPLSSLLNKSKYGFEVKNNIQSARITHLMYMDDIKLYASTANSLEQLLKIVEKFSNDIKMEFGIEKCKTTQIIRGKMSKGLEYITSNGKSINSLEEGEIYKYLGMEQSRMISHTSIKNRLHEMFKNRLEQLLKTLLNSKNMVTAINTYAIPIITYSAGVVKWSTTDLDSLDRKVRTLMTKYRQHHPKAAVERLVISRNKGGRGLISIRNLVEKQNHKLFSYFTAKASTSNLHSAILHSDENFTPANMKNASQLDEPTQSFQQLLITNWKSKPLHGRHPNELYASNIDVLASNSWLTFGTLFPETEGFMVAIQDQVLPTRNYLKFIVNDQNISSDNCRRCGTQHETIQHILAGCTVLVSDVYKRRHDNIGKILHQELLRKYGIQTSFVPYYKYTPASVIDCPGYLIYWDRTILTDTSVAFNRPDIVIYNKSRKDIILVDFAVVNNNNMDSTYTTKIQKYTNLCFELKELWRAKTAITVPVIISTTGLVPKSTTSALEKLGVPKKIVYEMQKSVILDSCRIVREFLAL

SEQ ID NO: 15867 - protein, 1132 aa, Cassiopea xamachana
MSNNELFSNGVNESGTSCEALSPGRCSTGQQRGPGRQPATARMKWSKDVNKVVMRCYLKSDPVNENGAPIRGYRRRMFQIWQEIGPFESTEQRVCDQARAIRKNGWLSEVEIESLKRQIEIEDWTGATECDSKVENEHTTAEVENVYISLQQREMDNENDTVRLLNFDERDELSMEDELVIAEILEVYRSGERMNVNFKRANQQQLKNIIVEVNKVMDKIPTSSITETNDLVYAVSVYAAKKLGIKSGKGGPRKDPWWKRRINEDIKRIRRDLNILQRELKGQVRNRAKIEELENKYHFKSKKLNKVIEELKQRLVAKAEKVKRYEQRGEQFKQNQLFNLDQKRFHQQLNGNIRYEDIIPNAEESKTFWSDIWSKGQRHNNNAEWLRSLRADLRNQQQEDMIVTKEMVAKQCTRMANWKAPGMDGVQGFWLKKLTSLHERIAEQLSLIVNRDASLPHWLTLGRTILCLKDPKKGNAVDNFRPISCLPMMWNLLTGVIADNVYEHLENNELLPEEQKGCRRRTRGTKDQLLIDKAILMDCKRRHTNMAMAWIDYKKAYDMVPHSWVVECLEMFGIAKNVREFLKNSMQSWRTELTSCGHVLGRVKIFQGDSLSPLTFVLCMIPLSLVLRKVKAGYAWGANEVKTNHLLYMDDLKLYGKSYDQIETLVETVHMVSKDIGMEFGIEKCGMLLLKRGKVVSSEGVSLPDGQVMKEIDDTGYKYLGILEYDKVKEKKMKDVFGAEYKRRIKLVLKSKLNGKNKILAINAWAVAVLRYSFGVLDWKKEELTAMDRMTRKVMTIHGALHPKSDVDRVYVSRCNGGRGLISVQMCARTEGNNLARYVTMSTERLMKGVKIAKIIDCEEPKEKNAFKREVQNEYIARWTGKRMYGQFVREMPESVDKDRTWEWMRKSDLKVETEALIFAAQEQALRTNAVKCNIDRTKNSPLCRLCGELSESVTHLVFGCKVLAQKEYKRRHDNIARIVHWMLCGKYDLRRVDKWYEHYPEGTLESESVKLLWDMTIQCDHYIEARRPDILVVEKSSRKALIIDIASPGDRNVGEKEKEKIEKYQDLKREIMKLWNLRRVEVIPVVVGALGAVSKKIGQYLEQIGIDIRIGLLQKTALLGTARILRKVLET

SEQ ID NO: 15868 - protein, 1048 aa, Heligmosomoides polygyrus
MEERFSLFYRTATITHERQPIRKPKREISKVLLQVGNEILKEKLASITNRTISALNAAVYAIGRAITSVINDSGAEKTGYKHQQIREAKGQRDTLLSFISTLANELTRREKTERTPPSEAYLRIAELSGARKTGEVLRLLRKLKDELHISNQEIQKNENAARRYKERKRGYPAVAREPRDMNIKIPVEEIREYWKGIVGTPQPFTPTPQLIDWARREGRAPYKNNSNITEEEWKSIFSKIRPWKATGPDGIQGYWWKHLPEAKLRLKKWCEAATRNPERAIPNWLCKGKVVLIPKGKTGSSGPGDYRPIACLNTCYKIITAMMARKIHQCIESRFPTEQVAMRKGVWGCTHAHILDQTICKDARWRNKELHMLWVDMTKAFDSVSHGAIKWILTKLGVAPDIRKLLAVLMSKQTVRYCGYQGQEYVKSTPLQIKNGIMQGDTLSPLLFCIAMMPVSDWIRTHITPYQTATGAAKGVQEPMRIGHIFYMDDLKVYTTTYNDLVKAKQGIQRIALQIGLKMNPAKCAMKSINQKNTREGRRGMDEIPLLGTNSLYKYLGTEQNTLVNIEELWQRVRDNAMATATRIMSSDLVVRQMVNGYNQVVIPKLKYAISCIVFGTGKLCEMRKKAKEFDAQVRKLMAQTKLRFGHSCAARLYVSKEEGGLGLKTMEEEMEHTIVYTWCYISSKKEFNVPYKLAESLRTSSRRSITSDFSAVLKDNGLEAEVTRIDDQKIMVKGIIYRTATEAARAISTLVHERWVCTHKAQWMEKEVASRILQINPQDNQPYICHKDSFLWSKKGWLSAEAFRNVWAAQEAALTTKASASGVGMLGATNQLCRMRCNAKENAEHIVSACNHWRTNIMVERHDDVANVIYTSLKKKYKLQNKITNMREPHVVETDDVVIHWNEPIQTSGTLKHNRPDIIVRDKRHNTIWIIEISISWYTRILNQELRKAFKYSINSNLPEDTPVEEYLPGPNLMAELQKDYKARVEMVPIIIGACGECTPNLRRHVRKIGLPDSTDYIIEKLQRCAALGTNRLMKCHLSNRDPQRHE

SEQ ID NO: 15869 - protein, 1389 aa, Heligmosomoides polygyrus
MLRQGTARKGRSPKEAAWSLVPRTAAGQHCMQEQWPNTTSEQNATSESTGMSQDLDVRPYQPDTSTPMPVGEGADRRRQSILGKRPFQATLSPLPTLEGNEASQPPTYGRTIETGNDLRTRQRNLRRQSQQQLTQRPATSTTPMLVGNGADRRQSILGKRPYQNTIGTVPMLDGTDASQQPTSGQIIETGKSPRLRVRGLRRQPQRGNMWTAHELEKLAMLAHRHRTNRGVRWKSLVEDWEKQRNPNDPKRTIPALQKALRGLVPRREQNQENNLSQPGTQEAEGDQTTNVRATAEAVTLQTNEETEEEPIQGSEGNNRNGRIQWNEPNTELRNLMEERFSLFYQIATKTYDRQPIRRPRGEIPKVLLQIGNEILKEKLTPITGAAISALNAAVYAIGKAITSVVNDSGAEKTGYKRQQIREAKGQRDTLLSFISTLANELARREKTGRTPPSEAYLKIAELSGARKTGEVLRLLRKLKDELHISNQEIKKNEDAARRYKERKRGYPAVAREPRDTNIETPVEEIREYWKGIVGNPQSFTPTPQLIDWARREGRAPYKNKVSVTEEEWKSIFSKIRPWKATGPDGIQGYWWKHLPEAKLKLKKWCELATRNPGEAVPNWLCRGKVVLIPKGKAGPKGPGDFRPIACLNTCYKVLTAMMARKIHQCIESRFPTEQVAMRKGVWGCTHAHILDQTICKDARWRNKELHMLWVDMTKAFDSVSHNAIKWILARLGVASDIRKLLSVLMSKQTVRYCGYQGQKYVKSTPLQIKNGIMQGDTLSPLLFCIAIMPISDWIRTHIMPYQTATGAANGVQEPMRIGHIFYMDDLKVYTTTYNDLVKAKQGIQRIASQIGLKMNPAKCAMKSINQKHTREGRRGMDEIPLLGTNSLYKYLGAEQNLMVSIEELWQRVRDNAMATATRIMSSDLVVRQKVNGYNQVVIPKLKYAISCIVFGTGKMCEMRKKAKEFDAQVRKLMAQTKLRFGHSCAARLYVSKEEGGLGLKTMEEEMEHTIVYTWCYISSKKEFNVPYKLAESLRTSSRRSITSDFSAVLKDNGLEAEVTRIDDQKIMVKGIIYRAATEAARAISTLVHERWVCTHKAQWMEKEVASRILQINPQDNQPYICHKDSFLWSKKGWLSAEAFRNVWAAQEAALTTKASASGAGVLGTTNQLCRMRCNAKENAEHIVSACNHWRTNIMVERHDEVAKVIYSSLKKKYKIQSKITNTREAHVVETDEVIIHWNEPIQTSGTLRHNRPDIIVRDIRHNIIWIIEISISWFTRVVNQELRKTYKYSLNSNLPEETPVEDFTPGPNLMAELQKDYKARVEMIPIIIGTCGECTPNLRRHIRKLGLPDSTDYIIEKLQRAAVLGTNRLIKCHLSNSDSERYEHQQDEA

SEQ ID NO: 15870 - protein, 1056 aa, Andricus grossulariae
MPTGLSVPAVAANPSRELVFPCDFEGCEKICKSNTGLLLHKRWKHPEEEILIDPIQIQCEFEGCGEIFPTRISMRQHVRHRHPELMDETTNTERLKERWTEEESRMLARREAELVVQQERGGRRINVNVNLQAVFPHRSRESVKGHRNKTPGYKGMVAQMAAEIREGIIERQPIRRRGRRSIILDPPIEEMEDEEDRFRKFFRELEPPPQDSTSYNIQELFQICRETRTDSKDTTLTRLSLYLQNILPTSRPRAHRGPTRQPDPPQSRRKCRRSEYARTQRAWLRNRSMCIDNVIYDMANTIQPPREVMEPFWVNIITQRSEAKPILVMSEQKPELWSPITLEEVIRVSKSRNTAPGPDGLTEKDIRGFPKGMLLCLYNLFMWCEELPESLLASRTIFIPKQGFEHEPEKYRPITIPSVIVRGFHSILAGRLVAGIDIDERQRGFRNMDGCRDNTFQLDMILRQHYRSLRPLYLASVDIAKAFPSVSHSSLLECMRSFGVPSKFVRYVEGVYKRGYTILQGQGWTSDKIYPRRGVRQGDPLSPPIFNLLTHRLLERLSPDVGVTVGEKHANASAYVDDLYLYASTPAGLQDSIYRMNEFLTSCGLSINIDKSFALGFRPSGRDKKMTVDTKNTFEIDGRRLRSINRGDEWTALGVHYNWAGRVQISPEQILRSYLEALAKAPLKPQQRLFALRCNVIPKLYHQLALGDVLIGSLNRADMAIRSAIRKWLNLPHDVPNAYIHSSVRDGGLGIPSLRWMAPLLRLNRLKGLRQEEHLGSMNQFLEKEISICEHRLSHNRGRISSLGDVYKFWANQLYNSVDGGGLRDSAKTPGQHHWVSDGTRFLSGRDFINSCRIRISALPTRSRTSRGRFRNRRCRAGCDQPETLNHVLQICHRTHAARIRRHDAVTKYVAQRLRDQGSKVFLEPRINTSEGLRKPDLIALKDLRAIVVDAQVISEQFHLRTAHNNKIRKYQQNPDVTAYICREYGLLPQNIAFTSATLNWKGVWESHSALDLRGWGFCQKDIKILSSRVLVGGLAAFKIFNAATSHLTRDRMGIG

SEQ ID NO: 15871 - protein, 1597 aa, Teleogryllus occipitalis
MPCKKKLFRKKGAQFAQSPPTLMAPPVTSTPNTQDAISIDGESQNLSRISSSPLSTRRPIAYTILLDGDSIDPPTTISLVKSFARPSVEPLEEPAPHSPVPHPFPDSLLQAEASGDPRLDWEEEPQEIPAAATPFRFLRGLDSLRREEGLFTISETPRREELSYVASTSLATPLPPRETGPPLRDEGFFTISETPAKTPKKKTSRTRASTSSSSAGSWHVSKSSAPSLCNSHSPPSDLSGFFTRSRIQSIFDPLETGSVATIVANNPSTITTADKPSTSTSSMENSGSFLTVSEASIDQSSVLENPRGSGPVTGASLHSLPRHPPKVVGKYNLELCFPSPRKTGCPYCEFTISSGTVQERRTSLRSHLIFFHEWPASLNILIRCSGCHKSASKRDHTRTCTALRTKRPNAPIAPDSAVVAPNDAATNSPPERPAHPFLPSLQPVLSGDSVLFPLPAAKFTRCPSCPANHHPVSSANKWTTRLNSLKRHLTAAHKSKLPVKKICCGCFNSVGLWNAHRASCPDLNHLVLPNGLTCSGGFRCPERGCSAVFATERQLKNHSRSHARVTRTERIPPPPTYDRRQQTLRRVRGLVQGEQRDPSESPASTSPGSERVATAPTTYGANRPPAEPILSSSTSSTNTPPTRDSAQTRQRSNSWQSPSAEQEPLHASPAGTRPAPSARPSPPDPDLVGKLHPDLEELRGAILEAQKAPVTGVNWLQVEDFLDQAVSKVQQLCLRNPPTAYQPNTGNRRPPNAAATRERISSIYKANSRRAMRLISEQEGPRCAIDASIMADHFSLPTFTDPAHKECYTLAEGRPPVKNEPFSTKEVIDRLQAAANSAPGDDRLSYEHWRNVDPACKLLTAMLNACLKFRRVPSTWKISKTIFIYKGAPQDSPASWRPIALSQSVAKIYTSLWTRRLNDWAEENGAFSPAQKGFRPHDGVYENNFLVERLIEDAKAKKTNLCLAFDLSNAFGSLSHEAVLEGLRAANVGQKLVDIVQDLYTNNSTAYLSAHGLSAMVPCQRGVRQGCPLSPSLFNLAIDPLLRSTLALSNLDIKGGAYADDIWLAASNPTTLNRMLSHLAHQTAKLGIKINFHKSDTLAIRDGSIRLQPFSIDGRELNILNSHDTTKFLGKPVGFTVLPSLAKVQDVIEQCNKISIANLAPWQKLDALLTYVLPRLSFPVRMRTLLTSDGKDLDAWMRQFVKDAIGLPTNASSHYIHAPKSGAGIGLPEFNKEVHFAFLEGAFKLLTSPDLTVRTVASNQLRLTTATHLPNRDITPDDVADYLSGTADIEHRGRGSLWSRARMASKAINATWAFDLRDGLLSPSLIIKTQDGQKVITPRQRKSVLQSLRRANQASHLNDWKNQKDQGRAAHDLSSAGGKSSHFLRTGAHLKWVDYLWVHRARLNLLRGLRAGAPWAENGGDDGCRHQCSDNDDNPRRETQAHVLCHCRHNWPAIKKRHDEIVNAVKGAATAMDWRVIAEDEVFGSDGKRPDLVLVNRNSAAYKIVDVAVTFEGGKGCLAAARKKKLEKYSRTLDETRAIAGVRSADPIAVGARGAWDPANDKLLKALVHEEYLPTLRKRIICAAIRGSHNVFKGHFS

SEQ ID NO: 15872 - protein, 1632 aa, Teleogryllus occipitalis
MPRGKCARKVQSPLVVRSPKFMTPPFTSTPNSGDSDLMVGNSQSVSPIEAAPSTPRPPIAYTIFLDGKSSDSPKIVSMVKSFARPSIELLEGPAPRTSVPFPSPPPLVVIPVGDPRLDIDDDLNEDQGVLASNTYELTTGASLTPQGLDTLRRAEGLFTISETPARTPKRKARRPCASPSSSFEEQAALAPSSHEPIASVSSTPQGIDTLRREEGLFTISETPARTPKRKVPRPHAPSSSSSSGAWHVTASLPPSSSDGHSPPPDTQCFVTRSQIVSIFDPVAEPETRAMASDEGISPFATQRPSTLSPSGDSARSFITVSEASIDPSTANAQRVQGPVTGATLKKLPRLPLKVLGNHCLEMCFPSPRRIRCPLCTFEISSGTVQEKRTSLRSHLIFSHDWPATLRINIRCSGCGKPAGRKDHSRTCTALRPRRQPAPAQRTEANAQTNTGSDPPPERFAHPFLPSLQPTLSDDAVLFPLPAATFTRCPSCPANHAPVSSAGRWTSRMLSLKRHLKSVHNSRLPVKKICCGCFNQIERWNQHRSSCKDLDSLVLPEGVPCSGSLRCLESGCAAIFATQRQLNNHMRCHTRAVRTERIPPPHTYNRQQQTLRRVRGLVQDERNTPSESSDSRSSRCHQGSNSDRSTIVPAATQANIPQREPVLSSSSASASTPPTRHPPPERRHPDSWNNSPAEEEPLHAAPTRPRPAPSARPSQPEPDLVGRLHPELEELRGVILEAQNAQPTGVNWLQVEDLIGQAVAKVQQLCLRNPPSAYQPNAGNRRPSNSAAAKAKISALYKANSRRAMRLITEQEGPRCSIDPAVMANHFSLPAFTDPAFKDCYPETEGRPQVRHEPFTCKEVSERLQATTNSAPGEDRLSYDHWRKVDPSCRLLTAIFNACRKFRRVPPEWKHSRTIFIFKGGAQDSPSNWRPIALAQSIAKLYTALWTRRLNDWAEENGAFSPAQKGFRPHDGVYENNFLVECLLEDAKARKNNLCLAFIDLSNAFGSISHEAVLEGLRAAGVGPHLTEIVKNLYTDNSTVYLSAQGLSDSFPCHRGVRQGCPLSPSLFNLAIDPLLRSTLALSNLEIKGGAYADDIWLAASNPACLRRMLHNLAEQAAKIGVVINVAKSDTLAIKDGAIRLEQFSINGCHLNALRQGESTQFLGKPVGFSVLPSLAKVDDVVEQTNKIAVSNLAPWQKLDALLTFVLPRLSFPVRMKTLLVSDGKDIDAWMRQFVKDAIGLPTNASSHYLHSAKSGAGVGLPEFAKEVHFAFLEGAFKMLTSPDLTVRSIASTQLRLTAAMHLPNRDITPDDVADYLSGTAEIEHRGRGSLWSRARVASKAINASWAFDLKDGLLSPSLIIKSKEGEKVITPRQRKSVLQSLRRANQAHHLSDWKDQKDQGRAAHDLSAAGSKSSHFLRTGAHLKWVDYLWVHRARLNLLRGLRAGCPWVENPSEDGCRHQCRDKDGNPRRETQAHVLCHCQHNWPAIKRRHDEIVAAIKGAATAMDWRVIAEDEVFGSHNKRPDLVLVDRRSATYKIVDVAVAFEGGKGCLAAARKTKLDRYAATLEETRAIAGVRSAEIVPIVVGARGAWDPANDKLLKPLVHEDYLPTLRRRIVSAAIRGSHNIFKGHIN

SEQ ID NO: 15873 - protein, 916 aa, Ganaspis sp.
MNIELGKVFTERSMEAIKSHRKANGYKELVAEYLASGSERQESEGEEPVLFEESSIIDNSFIRFFGEMERPVNDQNNEKFKVDQLYQICTDTCACTKEVIFERLSLYLAEVFPKEPERARGRRRNMEGVTLSNRKKRRVDYAKVQKAYGRNRGRCIKAILEGEASAGQPQRRLMEPYWNHVLTQEAQEEPDMSEYKESALGEVWSPVTLEEVKANLVEITTAPGPDGISGRRYHEIPPMVLMCLFNLIIWLERLPEVLLASRTVFIPKKGFENDPSKYRPITISSVLVRGLHRIMAKRIDLAIKWDERQRGFRTGIDGCRDNVFLLDYVLKHQHQKFKSLYMVSLDVAKAFPSISHKALLAGLRSFGAPAQLIKYIDFVYSQGFTVLEGQGWRSEKIVPRRGVRQGDPLSSPLFNIIMHRMLQKLPSEVGVRIGGRKVNATAFVDNVNLYAQTPRGLQLLMDVMSEFLGTCGLFINSEKSFTLGFRPSGKDKINTVDVKNKFKIDGKILRCMARNDTWSYLGIEFSWAGRKRCSVKESLNSFLEALSRAPLKPQQRLFALRTNVLPKFYYQLSLGNVLMGTLKCADKIVRGAVRKWFRLPHDVPNAYIHASVLDGGLGVPSLRWVAPLKRLERLASINENVMEKEDQFLLAEIGVCKRRLNNQGESVDTWNKAKVMWARMLHSSVDGCGLKDSGKVKSQHRWVSDGTKFLNGRDFINSVRLRISALPTRSRQSRGRATERQCRAGCQEIETLNHVLQGCFRTHVCRVRRHDSLVNYVVRKLVQKGYVVQKEPKISTSMGLRKPDLIAIKGSAAYILDGQVVSEQSCLRQAHRRKISYYNIDEISAFVAKEWSVNLDDIKYSSITLNWKGVWCKESVEELRLLGVMSNDMKVMSSRVVIGGIAGYRMFNQTTRLVSL

SEQ ID NO: 15874 - protein, 1283 aa, Azonax typhaon
MRLRSGNKLPQAGTGAKSNGESRPEQSSSGSPTYSGGDTVSQTSAQCSTVADNSHESREGQDRKSRISSCSRVTTPAEDVSQAVLTAQPATTKAGKPRVRMQWSNDMNLFIMRTYFYITKLETDRTMYCKKLHDKFISQYPEINVSAQRIADQRRVIIRNKLLSDKVITDLKKEVSNILKQEGSNDLFLQPTDFGQTVDNNRIARPISNTLSHQISTDSIIATTQYTSHASTQTNTFPSIRAVMHTEHEYPGENANTSTQELIDQLNTALIQYTGIDPIFRPKLPRLRENKTLYSLVNKFNEHILDRFYTLDSDINTIHTLIYCSALVISERLGYKINPNNYMPQTRNRKYPNPSWQTRIENDIKNLRANIGRLTQYVNNNRSKKIVKAVEEIFKKAKVHSLHENNNTRPEEFLDTLKQKLALKSQRLNRYLKALRRKEDNKLFSNNEKGFYRKLKNNNLKANNELPQTEDLKNYWANIWKNKGNHNDQDSWIKEEEKRWETTVQMDFVELTVDDIAEVTRRMKNWKAAGIDHVHNFWYKKFFVLHDMLAKNITDLIKGQQILPKFMTKGITYMIPKSSDTTSPSQYRPITCLPTIYKLITACITNKINKHLECHEMLAEEQKGCRKNHKGCKEQLIIDTTTLKHAHTHKRNLHVTYIDYKKAFDSVPHSWLLRVLEIYKINPLIINFLKSAMMEWRTSLHVSNNSVSVSTGDITISNGIFQGDAFSPLWFCLALNPLSYLLNKSNTGYKLTPNAAITHLMYMDDIKLFAKSKQDMRNQIEITSKFSTSINMTFGLDKCRTINIIKGKVETPHNDDQNIDINNVFAVMDPTDTYKYLGIHESNIINHTQIKNNLTTEYTRRLNLICKSKLNSKHLFKAINTYAIPVLTYSFGIVKWTYTDIKRLEIKTRTTLTKHNYLHPKSAIERMSLKREEGGRGFIDVMTLWQNQLKYLREFFYSKNKTSAIHSAIMEIDDNYTPLNLKKKELQFKTAAELTKEKLQSWKSKELHGRHLHDLEQSHIDFKASNKWLKQGYLFPETEGFIIAIQDQVINTRNYKKYILKETIETDKCRKCLRQPETIQHITGACVSLLQTDYTHRHNQIVHFVHQKLAHKFKLISDKPQPYYEYTPRPVLENADIKMYYDRAILTDRTIHHNRPDITLLNKVTKTAFLIDVTIPNTHNIHKAITEKISKYTDLKEEVIRIWQLQKVHIVPLVLSTTGVIPKHLLHSLKILDLPQDSYQTMQKASILNTCHIVRKFLSTTTHEETDMTDRPDDSNALDTLGH

SEQ ID NO: 15875 - protein, 1270 aa, Agara michaeli
MRLRSQYKLPQAGTGVINNGESRPEQSNSGSPTYSGGDTVSQTTDQGSTAAEHSSKSRDERKNNSNRSSCYRVTTPAKDVSQAAQATQPTTTKAGKPRVRMQWTNDMNIFIMRSYFYITKLETDKTMYCQKLHDQFILQYPELNVSSQRIADQRRVIVRNKLLSDTLINDLKKEVSNTLTEEDSNDLLIQSTTKHVTLQVQNSILTHDIDHNSTTLTQQTQIHSETTIIQHTSHASTNTIQNAIALTQTEHEYLDKGDDITTEELTDQLKIVLAQYRGTDPVLRPKLPRLRENKKLYDLVDIFNKRIIGRFYTLDSDINIIHTVIYCSAIVICKYLGYEINNDLSQIQKRKQKNPSKPNWQIRIENNISNLRIYIGRLTQYINNNRSKKVMKTVANIFKNTKVHSTHENNNTRPEEYLDTLKQKLSLKSQRLSRYLKALRRKENNKLFHNNEKGFYRYIKNETQKIHNNMPEIEELKNYWADVWKNRGNHDNQEGWIEEEEKRWETTEQMDFVKITLDDITEVTSRMKNWKAAGIDHIHNFWYKKFVVLHDVLAKNVTDLIKGQQTLPKFMTKGITFMIPKSPDTTNPSEYRPITCLPTIYKLISSCIANKINNHVEINNILGEEQKGCRRNHKGCKEQLIIDSTVLKHAHTHKRNLHVTYIDYTKAFDSVPHSWLLRVLEIYKINPLIINFLKSAMREWKTSLHVSNNSTSISTDEIAISNGIFQGDAFSPLWFCLALNPLSNLLNSTNNGYKLAPNTALTHLMYMDDIKLFAKTKKEMSNLINITSQFSKNIKMTFGLLKCKTLHITKGKIETPDTDDQRLDLSNQFTLMNPTDTYKYLGIHESNIINHIRIKNNLKAEYTRRVEGICKSQLYSKNLFKAINTYAMPVLTYSFGILKWTITDINKLEIKTRTILTKHKYLHPKSALERMTVKRDKGGRGLIDMKIVWQKQIIYLREFFYKKSHISHIHKAIVHLDNNYTPLDLTHNNKKFKSHKEQEIDKIVKWRSKELHGRHLLDLEQTHVDAESSNKWLKLGSLFPETEGFMIAIQDQVINTKNYSKYIIKNLNRQNDSCRKCHRYPETIQHITGACPTLTQTDYTHRHNQVVHIIHQKLSLKHKLLADRPKPYYQYSPRPVLENSTHKLYFDRAILTDKTIHNNRPDITLIDKIHKTVHIIDIGIPNTHNIQKTITDKIQKYTELKEEIRRIWKMQKVYIVPLILSSTGVIPKYLHHSIKLLDLPKNIFITMQKAAILNTCRIVRKFLQEEAFKT

SEQ ID NO: 15876 - protein, 1281 aa, Agara belti
MRLRSQYKLPQAGTGVINNGESRPEQSNSGSPTYSGGDTVSQTTDQGSTAAEHSSKSRDERKNNSSRSSCYRVTTPAKDVSQAAQATQPATTKAGKPRVRMQWSNDMNIFIMRSYFYITKLETDKTMYCKKLHDQFISQYPELNVSSQRIADQRRVIVRNKLLSDTLINDLKKEVSNKLKEEDSNDLPIQSTTKHGTFQIQNSILTQDTDHNINFSNSLSTINSKTLTQQTHIHSETTTIQHTSHASTSTLQNAMASTQTEDEYLDKGGDITTEELTDQLKIVLAQYRGTDPVLRPKLPRLRENKKLYDLVDIFNKRILDRFYTLDSDINIIHTLIYCSAIVICKYLGYKVNNDLSQIQKRKQKNSFKPNWQIRIENNINNLRIYIGRLTQYINNNRSKKVMKTVANIFKNTKIHSTHENNNTSPEEYLDTLKQKLALKSQRLSRYLKALRRKEDNKLFDNNEKGFYRYLKNKSQEIHNNMPEIEELKNYWADVWKNRGNHNNQEGWIEEEEKRWETTEQMDFVKITLDDITEVTSRMKNWKAAGIDHIHNFWYKKFFVLHVVLAKNVTDLIKGQQILPKFMTKGITFMIPKSLDTTNPSEYRPITCLPTIYKLITSCIANKINNHVEINNILAEEQKGCRRNHKGCKEQLIIDSTVLKHAHTHRRNLHVTYIDYTKAFDSVPHSWLLRVLEIYKINPLIINFLKSAMREWKTSLHVSNDSTSISTDEIAISNGIFQGDAFSPLWFCLALNPLSNLLNSTNNGYKLAPNTALTHLLYMDDIKLFAKTKNEMSNLINITSQFSKNINMTFGLLKCKTLHIIKGKIETLNTDDQSLDVSNQFTLMNPTDTYKYLGIHESNTINHLQIKNNLKAEYTRRVQGICKSQLYSKNFFKAINTYAIPVLTYSFGIVKWTITDINKLEIKTRTILTKYNYLHPKSALERMTVKRIKGGRGLIDMKLLWQKQIMHLREFFYKKSYTSHIHKAIVHLDNNYTPLDLTHNNKIFKSHKEQEIDKIGKWRSKELHGRHLLDLEQTHVDAESSNKWLKLGSLFPETEGFMIAIQDQVINTKNYSKYIIKNLNRQNDSCRKCHRYPETIQHITGACPTLTQTDYTHRHNQVAHIIHQKLSLKHKLLADRPKPYYQYSPRPVLENSTHKLYFDRAILTDKTIHNNRPDITLIDKIHKTVHIIDIGIPNTHNIQKTITDKIQKYTELKEEIRRIWKMQKVYIVPLILSSTGVIPKYLHHSIKLLDLPKNIFITMQKAAILNTCRIVRKFLQEEVSKI

SEQ ID NO: 15877 - protein, 1281 aa, Myscelus epimachia
MRLRSHYKLPQAGTGVINNGESRPEQSNSGSPTYSGGDTVSQTTDQGSTAAEHSSKSGDERKKNSSRSSCYRVTTPAKDVSQAAQATQPTTTKAGKPRVRMQWSNDMNIFIMRSYFYITKLETDKTMYCKKLHDQFISQYPELNVSSQRIADQRRVIVRNKLLSDTLINDLKKEVSNTLIEEDRNDLPIQSTTKHVTLQIQNSRITHDTDHNINFSNTLSTINSKTLTQQTQIHSETTIIQHTSHASTSTIQNAMALTQTEHECLDKGDDIITEDLTDQLKIVLAQYKGTDPVLRPKLPRLRENKKLYELVDIFNKRILDRFYTLDSDINIIHTLIYCSALVICKHLGYEINNDLSQIQKRKQKNPSKPNWQIRIENNISNLRIYIGRLTQYINNNRSKKVMKTVENIFKNTKVHSTHENNNTRPEEYLDTLKQKLSLKSQRLSRYLKALRRKEDNKLFDYNEKGFYRYIKNKTQKIHNNMPEIEELKNYWADVWKNRGNHNNQEGWIEEEEKRWETTEQMDFVKITLDDITEVTSRMKNWKAAGIDHIHNFWYKKFVVLHDILAKNVTDLIKGQQTLPKFMTKGITFMIPKSPDTTNPSEYRPITCLPTIYKLISSCIANKVNNHVEINNILGEEQKGCRRNHKGCKEQLIIDSTVLKHAHTHRRNLHVTYIDYTKAFDSVPHSWLLRVLEIYKINPLIINFLKSAMREWKTSLHVSNKSTSISTDEIAISNGIFQGDAFSPLWFCLALNPLSNLLNSTNNGYKLAPNTALTHLLYMDDIKLFAKTKKEMSNLINITSQFSKNIKMTFGLLKCKTLHIIKGKIETPNTDDQRLDVSNQFTLMNPTDTYKYLGIHESNTINHLQIKNNLKAEYTRRVEGICKSQLYSKNFFKAINTYAMPVLTYSFGILKWTITDINKLEIKTRTILTKHKYLHPKSAIERMTVKRDKGGRGLIDIKILWQKQIIHLREFFYKKSHTSHIHKAIVHLDNNYTPLDLTHNNKIFKSHKEQEIDKIGKWRSKELHGRHLLDLEQTHVDAESSNKWLKLGSLFPETEGFMIAIQDQVINTKNYSKYIIKNLNRQNDSCRKCHRYPETIQHITGACPTLTQTDYTHRHNQVVHIIHQKLSLKHKLLADRPKPYYQYSPRPVLENSTHKLYFDRAILTDKTIHNNRPDITLIDKIHKTVHIIDIGIPNTHNIQKTITDKIQKYTELKEEIRRIWKMQKVYIVPLILSSTGVIPKYLHHSIKLLDLPKNIFITMQKAAILNTCRTVRKFLQEEASKT

SEQ ID NO: 15878 - protein, 937 aa, Parelbella macleannani
MARTEARLILEGTRFMNQALIKHTHRSIEAVKGQRRTKKYKDLVQTHLDDLRARQARPPLTSPPRGGGTGEAEVCGSNRQDTPFIEKINSLLVEAKAEEQNGDLYVLCKNLGTTVGSERRALLSRYILQLSTPKGKARERAKGQSLQHLSRRKQRRLEYKRTQTLWSKNPSKCIKTVLGVHKSSCATPPKEVMIPYWNKIMTSVNDISPGVTEPPKTHSNLWSPIEVDEIKSSYPPLQTAPGPDGILSRTLRERDPIELAILLNMLMICDRPPQSLLDSRTVLIPKMQNASDPGEFRPITISSVLIRMLHKIIAKRIDSTIVIDERQRAFRAVDGCSINTYLVDLAIKYHREKFKSLYMASIDISKAFDSITHNSIYDTMINYGCPQALVDYVKSVYKHSQTRLSCERWYSENIKPSTGVKQGDPLSPILFNLAIDRLITSLPEYLGARIGDFKINAAAFADDIVLFATTKKGLQNLIDVAYSTLGSMGMSINAAKSNSIAIVTIPKAKRCAVDVDTKFKCGGYEIPALAKTSQWRYLGITYTAEGRQTSPVLEQIQSKLDILTKAPLKPQQRLFALRTVVLPSTYHALTLGDTTIGYLRKIDAVIRKRVRKWLSLPADCPMAYLHADYKDGGLSIPSLRWNIPELRKRRLQSLQNISYHYGPLLAREIDKCDHRLNDHGTCLNNLQSIKERWASRLHKHVDGAPLSESAKTPQQHRWIIEGTRFLSGRDFLNACKLRINALPTRSRCARGRPQNDSQCRAGCSAVETLNHVQQICHRTHAERVRRHDAVSDYIEKKLSKKNLKVLREPRIRTKDGIRKPDLVAFNESEAYVLDAQVINDQFDLDRAHENKVNKYKALEQHIRDITGATSLHFGSITLSWKGLWSQRAIKQLLAWKIISAADAKILSTRVIIGGLSCYWHFLATTAVVKRKPRKGIG

SEQ ID NO: 15879 - protein, 1377 aa, Apostictopterus fuliginosus
MLKRTLPQAGTSADSEGESRPKSNDLGSSTYSGGSNVAQSSYRLRPRSTSGKVLQRTQNQQSPTSSSVRSLFSSLPSSNSFIDNNHSSSTPSSILQEDVAMEENLISYSVPTSSSSRTRNKWSSEMNKFILRTYLQLTLMDTDQKGYLSPLHLKFIEQFPERQNVSRQRIGDQRRAIVNRKLLPQEEIDKIYIEVQTEITNMKRITDTTQNTISHSITQNTKTAHTINQRMSWTTELNESLMRCYYKITTLGKHLTAYRKTLHTEFLNKYPCLAHLSEQRIADQKRAIVQNRYISNERLKILQEEVAAEINISIEEPINQYSPNHTQNNQSSVHQPHTTQISQNQNHPNQIHNTSHAKQNASHTYKIPLDTQKIDNTFEESWQLFCNSHPTSRPYIPKQKSSRKFSQIVDYINSNILPKRVTIDHSFEVTHTLVYCAAHTAATCNGSKINQYNTQHILKYQTPAWQKRLQNKIANLRKDIARLTQYIRGNRSLRILQYMYQIKKTYRIHSQHEEPNQTDDQFLDTLKQKLNAAASRLKRYLTCTTRKKQNTQFKHNERQFYRTLSTCSQNMQTSPNKITGPSPNALHHFWSTIWTIPTHHTYDAEWIQKDAARYVNVADMEFSAVTAETFITALKKTHNWKAPGSDNIHNFWYKKLTTVHPVLHNHINGFIQTPSSMPDFITQGTTHLIPKEGDSKDTANYRPITCLQTFYKILTSCIAEHIEKHVTDNGILAEEQKGCRKRSQGCKEQLIIDSIAIKQALKGKSDISTMYIDYQKAFDSVPHSWLIYILQHYKIHPSLITFLKHSMQHWQTKLKIITPVDSTVTETEEISIRRGIFQGDALSPLWFCLALNPMSNMLNFSDHGFTIASEHTNTSLTHLMYMDDIKLYSNSTQSLHKLADITYTFSQDIQMKFGIDKCKTFTFKKGNFIENNYTIPNGSLIKALDQEGSYKYLGFHQTGQINQKQTKTHLKKKFNHRLNSILSSHLTSRNIIKAINTYAIPVLIYSFGIISWSQAELKALQRKINTSLTGQRKHHPRSCVQRLTLPRVEGGRGLIDINNLHNKQITSLRSYFHDRARHSSLHKSVVQADKRLTPLNLHNNNTQRNELIVKETEKIAAWEHKSLHGRHRQDLLQPHVDKEASNDWLRYGELFPETEGFMIAIQDQVIETRNYQKFICHIPNISTDTCRRCHSASETIQHITGACKSIAQTDYKHRHDQVAAIIHQHLAYKHKLIDHTVPYYKYTPQVILENNKFKMYWDRTVITDKTIHFNRPDILIVNKHEKTVQIIDIAVCNTHNLQNTHAEKIAKYTDLQIELKTQWKIKEVRTTPIIISSTGVVPKCLHTSIKTLDIHPSVVTLIQKATILNTCRIVRKFLSLN

SEQ ID NO: 15880 - protein, 879 aa, Thymelicus sylvestris
MHYIDQIKSTYKTHSKHEEPNLTNEQFLDTLKQKLNTAASRLKRYLNCTKRKKQNTQFKNNERQFYRTLTKNSQNTQIIQNTNKAPPPDVLHHFWANIWAKPVQHTRNADWIKTDYEKYSFVPDMEFKTVTTDTFIKVLSKIHNWKAPGNDNIHNFWYKKLTTIHPMLHNHINDFIKTPNMMPHFVTQGTTYMIPKNNDTQNPANYRPITCLQTFYKILTSCIATHIDDHITHNNILAEEQKGCRKMSKGCKEQLIIDTVAIKQAIKRKADVATMYIDYQKAFDSVPHSWLIYILHHYKIHPSLITFLEYSMQHWRTKLKLMSSDSDESDEIPIRRGIFQGDALSPLWFCLALNPLSNMLNSSDQGLTVTHEHILTSLTHLMYMDDIKLYSNNTQSLHNLADITHTFSQDIHMQFGIEKCKTFTINNGTVVNNNYTLATGNQIESLDHRSSYKYLGFEQTGKINQKQTKTDLKKKFRHRLNAILRTQLNARNMIKAINTYAIPILTYSFGIISWSQSELKALQRIVNTSMTGQRKHHPRSCVQRLSLPRDEGGRGIIDINNLHNKQITSLRFYFHKHAEKSLLHRATVQTDKRLTPLNLHSNNTQRNEQVISEKEKIAAWEHKSLHGRYRQDLLQPHVDKKASNAWLRNGDLFPETEGFMIAIQDQVIETRNYQKFICHIPNLPTDSCRRCHSASETIQHITGACKAIAQTDYKHRHDQVAAIVHQHLSFKYKLIDQKLPYYKYTPETILENRNFRVYWDRTIITDKTIHFNRPDITVLDKIKKIAFLIDIAVCNTHNLLNTHTEKLAKYMDLQIELKTQWGIKTVKTVPIIISSTGIIPKTLHTSLNTLDIHSSIVALMQKATILNTCRIVRKFLSLD

SEQ ID NO: 15881 - protein, 1377 aa, Thymelicus sylvestris
MMEATRKRKIPQAGTSAKCEGESRPMPTGLGSSAYSGGSNVARTFYELRPRSTSGKVLQKTQNQTSPSSSSTQSLFPSLPSSNSFTRPEPTASTISSILHEDVALEENLVSNSEPTSSSSRTRNKWSSEMNKFILRTYLHLTLMETDLKSYLPSLHLKFIEKFPERQNVSRQRIGDQRRAIVNKKLLPQEEIDKIYTEVRSEIQNIRNTTQNTITHPNTQRINAVQTVNQRMSWTTELNESVIRCYYKVTKIETYLTAYRKSLHTEFINRHPNLAHLSEQRIADQRRVIMQSKFISNARLKTIQEEVAAEINISREEIRNHSSNNETQQANCVSTSLNVSNTPNQPNHTHTTHTMQDTQQNPSHPHSIPYLDTEKIEKEFQKSWNLFFNSNPTTRPYIPKQKTSKKFYHIVEYINSHILTKRVTKDDSFKLTHTLVYCAAYTAAICNGAKIIQINYTPYTNRYRIPGWQKRLQNKIANLRRDIGRLYQYIQGNKSVRLMHYIDQIKSTYKTHSKHEEPNLTNEQFLDTLKQKLNTAASRLKRYLNCTKRKKENTQFKNNERQFYRTLTKNSQNTQIIQNTNKAPPPDVLHHFWANIWAKPVQHTRNADWIKTDYEKYSFVPDMEFNTVTTDTFIKVLSKIHNWKAPGNDNIHNFWYKKLTTIHPMLHNHINDFIKTPNMMPHFVTQGTTYMIPKNNDTQNPANYRPITCLQTFYKILTSCIATHIDDHITHNNILAEEQKGCRKMSKGCKEQLIIDTVAIKQAIKRKADVATMYIDYQKAFDSVPHSWLIYILHHYKIHPSLITFLEYSMQHWRTKLKLMSSDSDESDEIPIRRGIFQGDALSPLWFCLALNPLSNMLNSSDQGLTVTHQHILTSLTHLMYMDDIKLYSNNTQSLHNLADITHTFSQDIHMQFGTEKCKTFTINNGAVVNNNYTLATGNQIESLDHRSSYKYLGFEQTGKINQKQTKTDLKKKFRHRLNAILRTQLNARNMIKAINTYAIPILTYSFGIISWSQSELKALQRIVNTSMTGQRKHHPRSCVQRLSLPRDEGGRGIIDINNLHNKQITSLRFYFHKHAEKSLLHRATVQTDKRLTPLNLHNNNTQRNEQVISEKEKIAAWEHKSLHGRYRQDLLQPHVDKKASNAWLRNGDLFPETEGFMIAIQDQVIETRNYQKFICHIPNLPTDSCRRCHSASETIQHITGACKAIAQTDYKHRHDQVAAIVHQHLAFKYKLIDQKLPYYKYTPETILENRNFRVYWDRTIITDKTIHFNRPDITVLDKIKKIAFLIDIAVCNTHNLLNTHTEKLAKYMDLQIELKTQWGIKTVKTVPIIVSSTGIIPKTLHTSLNTLDIHSSIVALMQKATVLNTCRIVRKFLSLD

SEQ ID NO: 15882 - protein, 1363 aa, Nerula fibrena
MMEATRKRKVPQAGTSADCEGESRPKPSVLGSSTYSGGSNVAQTSYKLRPRSTSGKVLLKTKSQTSTSSSTQSLFSSLPSTSSFIRPNPTASILSSILQEDVSLEENFEISNSVPTSCSSRTRNKWSLEMNKFILRTYLHLTLMETDLKSYLPPLHLKFIERFPERQNVSRQRIGDQRRAIVNKKLLPQEEIDKIYKEVQAEIQNVHNNTITHPNLQYTQPTHLVNHRMSWTVELNESVMRCYYKVTNIETCLTAYRKNLHLEFTRKHPNLAHLSEQRIADQRRTIIQRQFISNDRLKSLQEEVAAQIGISTRATSPHLNTSHTSQNHTNQTYNIHSKQTESQTSISHSHSHSIPHLDTRKIENVFQESFKLFSNSNPTNRPYIPKQKTSRKFSQIVDYINSKILPKRLTKEDSFEITHTLIYCAAYTAAICNGAKLTQTNSTLNTRRYRIPAWQNRLQNKIENLRRDIARMYQYIRGNKSVRLTQHIEQIKNTHKIHSKHEETNQTNDQFLDTLKQKLNTAASRLKRYQNCTLRKKQNTQFKNNERQFYRTITKDSQNIQASPNTNMHPPPNVLHDFWANIWANPVQHTHNSGWIQTDYKKYANVPEMEFDTVTADIFNKVLKKTHNWKAPGSDNIHNFFYKKFTTLHPMLLDHINDFIKKPMMMPQFVTQGTTYMIPKNSDNQNPANYRPITCLQTFYKILTSCIAEQINKHITHNDILAEEQKGCRKMSKGCKEQLIIDSVAIKQALKKKTTISTMYIDYQKAFDSIPHSWLIYILHHYKIHPTIIRFLEHAMQHWRTRLKLMSSVTDEVDEIPIRRGIFQGDALSPLWFCLALNPLSNMLNSSDHGLNIAHESSRTLLTHLLYMDDIKLYSSSTQSLHHLADITYKFSQDIHMQFGIDKCKTFTVKNGKIAENNYTLATGNIIESLDHRNSYKYLGFHQIGQINQKQTKTDLKRNFRHRLNAILRTQLNSRNMIKSINTYAIPILTYSFGIISWSQSELKALQRTINTSLTGHRKHHPRSCVQRLTLSREEGGRGIIDINNLHNKQISSLRSYFHNYAEHSSLHNTIVHTDIRLTPLNLHNNNAQRNEQLIDKKEKIAAWEQKSLHGRHRQFLLQPHVDKNTSNAWLRHGDLFPETEGFMIAIQDQIIETRNYQKFICHIPNLPTDTCRRCHGASETIQHITGACKAIVQTDYKHRHDQVAAIIHQYLAFKHKFITEKLPYYKYTPETILENHDFKIYWDRTIITDKTIHYNRPDITILDKRQKIAHLIDIAVCNTHNLLNTYTEKIAKYTDLQIELKSQWGVKYVKTVPIIISSTGVIPKTLHTSLSSLDIHPSIMTLLQKATILNTCRIVRKFLSIE

SEQ ID NO: 15883 - protein, 1365 aa, Dalla cyprius
MMEAMRNRKLPQAGTSADSEGESRPESTGLGSSTYSGGSNVARSFYRLRPRSTSGKVLHKQQNQTLSSSSSVRSLFSSLPSTNSFIQPTSTASTTSSILQEDVALEENLLSDSVPTTCSSRTRNKWSSEMNDFILRTYLHLTSMETDRKAYLSSLHIKFIERFPERQNVSRQRIGDQRRAIVNKKLLPQEEIDKIFREVQAEIQNVHNTTQNTTAHLITQNTQSAHSINQRMSWTTELNESVMRCYYKVTKIGTQLTAYRKYLYTEFISKHPSLAHLSEQRIADQRRVIIQSKFISNDRLKTLQEEVAAEMNISLEQQTTNQSSTNQTQPDSPLLYTPQTSQNQTHTLIHTPLNTLHTHNIHLDTQKIEKLFQESWQYFFNSHPTNRPYIPKQKTSRKFSQIVEYINFNILPKHVTKDDSFEVTHTMVYCAAYTAATCNGAKLTPFNFTQQTRGYRTPNWQKRLQYKIANLRRDIARMTQFIRGNRSPRLVHYIDQIKNTHRIHSQHEGPNITNEHFLDTLTQKLNTASSRLKRYLNCTLRKKQNTQFKNNERQFYRTLTTDSQNIQTSPNTTMTPPPKALHHFWSKIWTNPVQHTHNADWIQEDYEKYASVPEMEFIDVTVETFTKALTKTHNWKAPGSDNIHNFWYKKLTTIHPMLHNHINDFIKTPSKMPHFVTQGITHMIPKGGDYQNPANYRPITCLQTFYKVLTSCIAEHIDQHITANDILAEEQKGCRKRSQGCKEQLIIDSVAIKQALKKKADISTMYIDYQKAFDSVPHSWLIYILHHYKIHSSLITFLEHSMHHWRTKLKIMGSDTDEIPIRRGIFQGDALSPLWFCLALNPLSNMLNLSEQGLTIPNADTRTSLTHLMYMDDIKLYSNSTQSLHHLADVTHAFSQDIQMNFGIDKCKTFTVQNGNVVQSNYTLASGSQIESLDQKSAYKYLGFQQTGQINQIQTKVDLKKKFRHRLNAILRTQLNSSNMIKAINTYAIPILTYSFGIISWSQAELKSLQRTINTSLTGQRKHHPRSCVQRLILPREEGGRGLIDINNLHNKQITSLKTYFHNRAEHSSLHRTIVHTDIRLTPLNLHNNNTQRNEQIVGETEKIAAWERKSLHGRHRQDLLQPHVDKKASNAWLRYGELFPETEGFMIAIQDQVIETRNYQKFICHIPNLPTDTCRRCHSASETIQHITGACKAIAQTDYKHRHDQVAAIVHQHLAFKHKLIDQKVPYYKYTPEVILENSSFKIYWDRTIITDKTIHFNRPDITILDKRKKVAHLIDIAVCNTHNLLNTHTEKLAKYMDLQIELKTQWKISTVRTVPIIISSTGVVPKTLHTSLNTLDIHPSIATLIQKAAILNTCRVVRKFLSL

SEQ ID NO: 15884 - protein, 1549 aa, Tuta absoluta
MEESQERRYNLRPLPGGRRGTPGAGAGCHSMRTTGGGGLTRRVPPEKNTTAETNRSPISLLSSDSHNLFPYLSPSRYNHINTSGLSSPNSSIETVYHTPDSSPHAFCIEHKSRSSNLSPAGLDSPIPSTLRSPFSTPNPFEYPIMSTVPYNKTDLDPAGLSAEGDVLPVTNKRYSLRPRTAISSRVFHRSNPTNDDNSLSPSSTRSLFPSLPSTRQSYRSSRLSSRLISRSTSVTNSILQEDVALEANLATNPVPTTSRLHTRNKWSSEMNRFILRTYLQLTLLESDVKSYLPLLHTKFIEAFPDKQHVSRQRVGDQRRAVVNKNLLPQADIDKIYKEVEAEIGNITRNSHTQNSHSNTQTTHINTQTSHTTNIQTSHTTLTQQRQRMAWTNELNEGIMKAYYKVTELETNLTAYRRLTHQEFVNRFPHNAHLSEQRIADQRRAILLNRYISQDRLIALREEVRNEQNFPINDNNPNTDDIAPTADNHINSTQQDNITTETLIGNSTYPATSQQERSTQCEEFSVETEPTRTITISATDQEKIKQRFQETLDRFCGTDPSLRPFIPKQKTSRRFAEIVDFINIQILPIHVSKDTDFTTTHTLVYCAAFTSAICNGAKIKENVSNDLRTPNIRETRIPAWQKRLQKRIAKLRENIARLTHYIQGSRGERLIEHIQTIKNTYRIHSQHEGPNFTDSQFLDTLKQKLNATSNRLRRYINCTLRQKQNSQFINNEKQFYRTIESHTQNFQNTPNTTPNPSPQDLHNFWSNIWSKPVRHNEAADWIQQDKEKINGVAEMVFEHIPVEIFKRVLHKCHNWKAPGNDRIHNYWYKKLTTIHPMIHNHINEFIQTPHTMPPFITQGVTFLIPKDTDTQNPAKYRPITCLQTFYKILTSCIAEQINEFVTENNLLAEEQKGCRKRSQGCKEQLIIDSVAMKQALKSKQSISTMYIDYQKAFDSVPHSWLIYVLRHYKIHPTLITFLEITMQHWRTKLKVINNKCYTETADIPIRRGIFQGDALSPLWFCLALNPLSNMLNSSEEGLTILTENTHAFLSHLLYMDDIKLYSNTPNSLHTLAEITQSFSQDINMNFGIDKCKTFTVEKGKIVKNDYILDSGSIIESLDQHSSYKYLGFQQAKQIDQKKTKAELKKKFKHRINCILRSQLNSRNMIKAINTFAIPILTYSFGVINWSKSELGILQRTINTTMTTQRKHHPRSCIQRLTLPRDEGGRGLIDINNLHNKQITTLRQYFYSRAQQSELHEAIVKADKRLTPLNLVKQETLRSEQIIDNKEKIATWQRKSLHGRHLNDLQQSHVDKSASNAWLRRGELFPETEGFMLAIQDQVIETRNYQKFICRIPNLPTDKCRKCQSCSETIQHITGACKSIVQTDYKHRHDQVASIIHQHLAFKLKLITEKVAYYKYTPETILENNDYKIYWDRTIITDRTVHFNRPDITMLDKRNKIVYLIDIAICNTHNLLSTHTEKISKYTDLAVEIKTQWKVNNVRTVPIIISTTGVVPKTLHTGLKTLNIPSQIYTLLQKAVILNTCRIVRKFLSFT

SEQ ID NO: 15885 - protein, 1549 aa, Tuta absoluta
MEESQERRYNLRPLPGGRRGTPGAGAGCHSMRTTGGGGLTRRVPPEKNTTAETNRSPISLLSSDSHNLFPYLSPSRYNHINTSGLSSPNSSIETVYHTPDSSPHAFCIEHKSRSSNLSPAGLDSPIPSTLRSPFSTPNPFEYPIMSTVPYNKTDLDPAGLSAEGDVLPVSNKRYSLRPRTAISSRVFHRSNPTNDDNSLSPSSTRSLFPSLPSTRQSYRSSRLSSRLISRSTSVTNSILQEDVALEANLATNPVPTTSRLHTRNKWSSEMNRFILRTYLQLTLLESDVKSYLPLLHTKFIEAFPDKQHVSRQRVGDQRRAVVNKNLLPQADIDKIYKEVEAEIGNITRNSHTQNSHSNTQTTHINTQTSHTTNIQTSHTTLTQQRQRMAWTNELNEGIMKAYYKVTELETNLTAYRRLTHQEFVNRFPHYAHLSEQRIADQRRAILLNRYISQDRLIALREEVRNEQNFPINDNNPNIDDIAPTADNHINSTQQDNITTETLTGNSTYPATSQQERSTQCEEFSVETEPTRTITISATDQEKIKQRFQETLDRFCGTDPSLRPFIPKQKTSRRFAEIVDFINIQILPIHVSKDTDFTTTHTLVYCAAFTSAICNGAKIKENVSNDLRTPNIRETRIPAWQKRLQKRIAKLRENIARLTHYIQGSRGERLIEHIQTIKNTYRIHSQHEGPNFTDSQFLDTLKQKLNATSNRLRRYINCTLRQKQNSQFINNEKQFYRTIESHTQNFQNTPNTTPNPSPQDLHNFWSNIWSKPVRHNEAADWIQQDKEKINGVAEMVFEHIPVEIFKRVLHKCHNWKAPGNDRIHNYWYKKLTTIHPMIHNHINEFIQTPHTMPPFITQGVTFLIPKDTDTQNPAKYRPITCLQTFYKILTSCIAEQIDEFVTENNLLAEEQKGCRKRSQGCKEQLIIDSVAMKQALKSKQSISTMYIDYQKAFDSVPHSWLIYVLRHYKIHPTLITFLEITMQHWRTKLKVINNKCYTETADIPIRRGIFQGDALSPLWFCLALNPLSNMLNSSEEGLTILTENTHAFLLHLLYMDDIKLYSNTPNSLHTLADITQSFSQDINMNFGIDKCKTFTVEKGKIVKNDYILDSGSIIESLDQHSSYKYLGFQQAKQIDQKKTKAELKKKFKHRINCILRSQLNSRNMIKAINTFAIPILTYSFGVINWSKSELGILQRTINTTMTTQRKHHPRSCIQRLTLPRDEGGRGLIDINNLHNKQITTLRQYFYSRAQQSELHEAIVKADKRLTPLNLVKQETLRSEQIIDNKEKIATWQRKSLHGRHLNDLQQSHVDKSASNAWLRRGELFPETEGFMLAIQDQVIETRNYQKFICRIPNLPTDKCRKCQSCSETIQHITGACKSIVQTDYKHRHDQVASIIHQHLAFKLKLITEKVAYYKYTPETILENNDYKIYWDRTIITDRTVHFNRPDITMLDKRNKIVYLIDIAICNTHNLLSTHTEKISKYTDLAVEIKTQWKVNNVRTVPIIISTTGVVPKTLHTGLKTLNIPSQIYTLLQKAVILNTCRIVRKFLSFT

SEQ ID NO: 15886 - protein, 1387 aa, Tuta absoluta
MMMNNRRRNYTIIMRPRTAISSRVFHRSNPTNDDNSLSPSSTRSLFPSLPSTRQSYRSSRLSSRLISRSTSVTNSILQEDVALEANLATNPVPTTSRLHTRNKWSSEMNRFILRTYLQLTLLESDVKSYLPLLHTKFIEAFPDKQHVSRQRVGDQRRAVVNKNLLPQADIDKIYKEVEAEIGNITRNSHTQNSHSNTQTTHINTQTSHTTNIQTSHTTLTQQRQRMAWTNELNEGIMKAYYKVTELETNLTAYRRLTHQEFVNRFPHYAHLSEQRIADQRRAILLNRYISQDRLIALREEVRNEQNFPINDNNPNIDDIAPTADNHINSTQQDNTTTETLTGNSTYPATSQQERSTQCEEFSVETEPTRTITISATDQEKIKQRFQETLDRFCGTDPSLRPFIPKQKTSRRFAEIVDFINIQILPIHVSRDTDFTTTHTLVYCAAFTSAICNGAKIKENVSNDLRTPNIRETRIPAWQKRLQKRFAKLRENIARLTHYIQGSRGERLIEHIQTIKNTYRIHSQHEGPNLTDSQFLDTLKQKLNATSNRLRRYINCTLRQKQNSQFINNEKQFYRTIESHTQNFQNTPNTTPNPSPQDLHNFWSNIWSKPVRHNEAADWIQQDKEKINGVGEMVFEHIPVEIFKRVLHKCHNWKAPGNDRIHNYWYKKLTTIHPMIHNHINEFIQTPHTMPPFITQGVTFLIPKDTDTQNPAKYRPITCLQTFYKILTSCIAEQIDEFVTENNLLAEEQKGCRKRSQGCKEQLIIDSVAMKQALKSKQSISTMYIDYQKAFDSVPHSWLIYVLRHYKIHPTLITFLEITMQHWRTKLKVINNKCYTETADIPIRRGIFQGDALSPLWFCLALNPLSNMLNSSEEGLTILTENTHAFLSHLLYMDDIKLYSNTPNSLHTLADITQSFSQDINMNFGIDKCKTFTVEKGKIVKNDYILDSGSIIESLDQHSSYKYLGFQQAKQIDQKKTKAELKKKFKHRINCILRSQLNSRNMIKAINTFAIPILTYSFGVINWSKSELGILQRTINTTMTTQRKHHPRSCIQRLTLPRDEGGRGLIDINNLHNKQITTLRQYFYSRAQQSELHEAIVKADKRLTPLNLVKQETLRSEQIIDNKEKIATWQRKSLHGRHLNDLQQSHVDKSASNAWLRRGELFPETEGFMLAIQDQVIETRNYQKFICRIPNLPTDKCRKCQSCSETIQHITGACKSIVQTDYKHRHDQVASIIHQHLAFKLKLITEKVAYYKYTPETILENNDYKIYWDRTIITDRTVHFNRPDITMLDKRNKIVYLIDIAICNTHNLLSTHTEKISKYTDLAVEIKTQWKVNNVRTVPIIISTTGVVPKTLHTGLKTLNIPSQIYTLLQKAVILNTCRIVRKFLSFT

SEQ ID NO: 15887 - protein, 1137 aa, Atrytonopsis hianna
MSWTTELNESVMRCYYRVTKIETNLTAYRKNMHTQFINKHPNLAHLSEQRIADQRRIIIQSKYINGDRLKTIKEEVAAELNFSIEEIRSQNSNNDTQHASSTLSSLYTLQTTQNQLNHTHTLHDTHQNTSHSKSILDLDTQKIEKTFQESWNLFFNSNPTTRPYIPKQKTSRKFSQIVDYINSKILTKRVTKDDSFEVTHTLIYCAAYTAAICNGAKLIGVNFTPHCRYRTPAWQNKIANLRRDIGRMYQYIQGNTSSRHIYHIDQIKNTYKIHSKHEEPNLTNEQFLDTLKQKLNTASSRLKRYMNCSMRKKQNTQFTNNERQFYRSLTKHTQNIQISPNTNTAPPPNVLHDFWANIWANPVQHTRNADWIQRDYEMYASVPEMEFDTVKADTLIKVLTKTHNWKAPGNDNIHNFWYKKLTTIHPMLHSHINNFIKTPNMMPHFVTQGATYMIPKNYESQNPGNYRPITCLQTFYKILTSCIAVHIDQHITNNNILAEEQKGCRRMSKGCKEQLIIDSVAIKQALKRKADITTMYIDYQKAFDSVPHSWLIYILHHYKIHPSLIIFLEYSMQHWRTKLKIMGSDDEYDEIRIRRGIFQGDALSPLWFCLALNPLSNMLNLSDQGLIFTHEHSRTSLTHLMYMDNIKLYSNTTQSLHHLADVTYIFSQDIHMQFGIDKCKTFTVQNGNVVQNNYTLATGDQIESLDQRSSYKYLGFQQTGQINQKQTKTNLKKEFRHRLNAILRTQLNSRNTIKAINTYAIPVLTYSFGIISWSQSELKAFQRTINTTLTGQRKHHPRSCVQRLTLPREEGGRGIVDINNLHNKQITSLRSYFHKHGEQSLLHKTIVDMDKRLTPLNLHSHNTQRNEQLISEKEKITAWEHKSLHGRHRQDLLQPHVDKKESNAWLRYGELFPETEGFMLAIQDQVIHTRNYQKFICHIPNITDTCRRCHSASETIQHITGACKAIAQSDYKHRHDQVAAIIHQYLAFKYKFIDQKIPYYKYTPETILENRNFKMYWDRTIITDKTIHFNRPDITILDKNKKIVYLIDIAVCNTHNLLNTHTEKLAKYMDLQIELKSQWGVNTVKTVPIIISSTGIIPKTLHTSLHILDIYPSIVVLLQKATILNTCRLVRKFLSLD

SEQ ID NO: 15888 - protein, 1373 aa, Duroca duroca
MMEARRKRKLPQAGTSAECEGESRPRPTGLGSSTYSGGSNVARTSYTLRPRSTSGKVLQKVQNQTSPSSSSTQSLFSSLPSTNSFIRPNSTSSTVNSILQEDVALEDNLVSNSVPTSCGPRTRNKWSLEMNKFILRTYLHLTLMESDLKSYLPSLHLKFIEQFPERQNVSRQRIGDQRRAIVSRKLIPKEEIEEIYREVQAEIQNTHNTTQSILPHSTTQHITPVSLVNQRMSWTTELNESVMRCYYKATKIETLLTAYRKSLHTEFINKHPNLAHLSEQRIADQRRVIIHNKYISNDRLKTIREEVASEINESIEETRDQSPNNKTQHTNFSSPGLYTTQTLQNQSNQIHTTHDTQQNTSHSNGSRYLDTKKIEKEFQESWNLFLNTHPITRPYIPKQKTSRKFSQIVNYINTNILPKHVTKDDSFEVTHTLIYCAAYTAAICNGAKLTGIGSIPRTRRYHSPAWQKRLQNKIAKLRRDIARMYQYIRGNKSVRLMHYVEEIKSTYKIHSKHEEPNLTNDDFLDTLKQKLNTASSRLKRYLNCSLRKKQNTQFKNNERQFYRSLTKHSQNTQISPNTNTTPPPNALHNFWTNIWANPVQHTHNADWIQRDYEKYSSLPEMEFSTITADTFIKVLTKTHNWKAPGNDNIHNFWYKKLTTIHPMLHSHINNFIKTPSMMPHFITQGTTYMIPKSGDSQDPANYRPITCLQTFYKILTSCIAVHIDQHITHNNILAEEQKGCRKMSKGCKEQLIIDSVVMKQALKGKSDISTMFIDYQKAFDSVPHSWLIYILHHYKIHPSLITFLEHSMQHWRTKLKVMSSDSDESDEIPIRRGIFQGDALSPLWFCLALNPLSNMLNSSDQGLTFTHEHTRTILTHLMYMDDIKLYSNTTLSLHHLADITYKFSQDIHMQFGIDKCKTFTVKNGIVVQNNYTLANGNQIESLDHRSSYKYLGFQQTGQINHNQTKTDLKKQFRHRLNAILHTQLNSRNMIKSINTYAIPILTYSFGIIFWSQSDLKALQRTINTSLTGQRKHHPRSCVQRLTLPREEGGRGIIDINNLHNKQITSLRSYFHNHQSLLHKIIAHMDKRLTPLNLHNNNTQRNEQLLSEREKIADWERKSLHGRHRQDLLQPHVDKKASNAWLRHGELFPETEGFIIAIQDQVIDTRNYQKYICHIPNMPTDTCRRCHSTSETIQHITGACKAIAQTDYKHRHDQVGAIIHQQLAFKYKFIDQKIPYYKYTPETILENKNFKVYWDRTIITDKTIHFNRPDITILDKTKKIVHLIDIAVCNTHNLQKTHTEKLAKYTDLQIELKTQWGVNTVKTVPIVISSTGIIPKTLHTSLNMLDIHPSIVTLLQKATILNTCRTVRKFLSLD

SEQ ID NO: 15889 - protein, 1149 aa, Chamunda chamunda
MSWTTDLNESVMRCYYKVTEIGANLTAYRSKLHTEFINKYPNLAHLSQQRIADQRRIITENKYISNERLKTLQEEVAAECNISIEETTRTPLNQTQHTRLSSPHLHSPRTIQDPNHVEQTHTSPNTQQNTARIVTNVPPDTQKIERTFQETWKYFINSHPTTRPYIPKQKSSKKFAQVVEYINAHILPKRVTKDDSFETTHTLIYCAGYTAASCNGAKLKQHNSTQQIRTYKTPPWQKRLQNKIANLRRDIARMIQYTRGNRGVRLMQHIHQIKNTHRIHSQHEGPNLTNEQFLDTLTQKLNTACNRLKRYLTCTLRKTQNTQFKNNERQFYRALATRSQNVHTSPNVTTTPPPNALYQFWSNIWTNPVRHTHNADWIKKDRENYTSVSEMEFIAVTVETFVKALTKTHNWKAPGSDNIHNYWYKKLTTIHPMLHNHINDFIKNPNMMPHFVTQGITHMIPKGSDYQNPSNYRPITCLQTFYKILTSCIAEHIDEHITDNNILAEEQKGCRKRSKGCKEQLVIDSVAIKQALKSKADISTMYIDYQKAFDSVPHSWLIYILHHYKIHPSLITFLEHSMQHWRTKLKIMGSDTSMIVTDEIAIRRGIFQGDALSPLWFCLALNPLSNMLNHTDQGLTIKNEPLHTSLTHLMYMDDIKLYSSNPQSLHRLADITYTFSQNIHMKFGIDKCKTFTINNGNVVQNNYILATGNQIESLDQNSFYKYLGFQQTGQINQKPTKAALKNKFRQRLNAILRSQLNSRPMIKAINTYAIPILTYSFGIISWSQSELRALQRTINTSLSGHRKHHPRSCVQRLTLPRKEGGRGIIDINNLHNKQITYLRAYFHDQAGQSTLHKTIVHTDKKLTPLNLQNYNTQRNEQIVDNKEKIAAWEHKSLHGRHRQDLMQPHVDKKASNAWLRYGDLFPETEGFMLAIQDQVIETRNYQKFICHIANLPTDTCRRCHSASETIQHITGACKSIVQTDYKHRHDQVAAIVHQNLAFKHKLIDQKVPYYKYTPSTILENSMFKIYWDRTIITDKTIHFNRPDITIHDKHKKTVYIIDIAVCNTHNLLNTHTEKIAKYMDLQIELKSQWKVHTIRTVPIIISSTGVIPKTLHTSLNTLDIHPSIVTLLQKAAILNTCRIVRKFLSLDPA

SEQ ID NO: 15890 - protein, 1306 aa, Alychna victa
MMEATRKRKVPQAGTSAECEGESRPKPTSLGSSTYSGGSNVARTYTLRPRSTCGKVLQKSQDPTSPSSSSTQSLFSSLPSTNSFIRPNSIASTLSSILQEDVALEENLVSNSVPTSCGSRTRNKWSLEMNKFILRTYLHLTLMETDLKSYLPSLHLKFIEQFPERQNVSRQRIGDQRRAIVNRKLLPQEEIDKIYREVQAETQNIPNTTQNTTTRSKIQHTKPTKLGSQRMSWTTELNESVMRCYYKVTKIETFLTAYRRSLHTEFVDKHPDLAHLSEQRIADQRRVIIQNKYISDNRLKTIREEVAAEIDIVIEEVQNQSSNNETQHISCSPPDLYTTQTPQNPSNQLHTPHDTQQNTSHSHITRYLDAIKIEKEFQESWNLFYNTHPTTRPYIPKQKTSRKFSSIVNYINSNILTKCITKEDSFEVTHTQIYCAAYTAAICNGSKLTAINTTEHIHRYHTPAWQKRLKNKIAKLRRDIARMYQYIRGNNSVRLMHYIDQIKSTYKIHSKHEEPNLTNDQFLDTLKQKLNTASSRLKRYLNCSLRKKQNTQFKNNERSFYRSLTKHSQNTQISPNTNTGPPPNALHQFWTNIWAKPVQHTHNADWIQRDKETYSSVPQMEFSTITVDTLTKVLSKTHNWKAPGNDNIHNFWYKKLTTIHPMLHNHINNFIKTPSMMPDFVTQGTTYMIPKNDDLQNPANYRPITCLQTFYKILTSCIAAHIDYHITLNNILAEEQKGCRKLSKGCKEQLIIDSVVMKQALKSKADISTMYIDYQKAFDSVPHSWLIYILRHYKIHPSLITFLEFSMQHWRTKLKLMSSDFDESDVIPIRRGIFQGDALSPLWFCLALNPLSNMLNDFDQGLTFTHEHTRTSLTHLMYMDDIKLYSNTTQSLHHLADITYTFSQDIHMQFGIDICKTFTVQNGIVIQNNYTLESGHQIESLDQKSSYKYLGFQQTGQINHKQTKTDLKKQFGHRLNAIFRTQLNSRNMIKAINTYAIPVLTYSFSIISWSQAELKALQRTINTSLTGQRKHHPRSCVQRLTLPREEGGRGIIDINNLHNKQITSLRSYFHNHQSILHKTIVCMDKRLTPLNLHNNNLQRNEQLISEKEKIAVWEQKSLHGRHRQDLLQPHVDMKASNAWLRYGELFPETEGFMIAIQDQVIDTRNYQKYICHIPNLPTDSCRRCHSASETIQHITGACKAIAQTDYKHRHDQIAAIIHQHLAFKYKLIDQKIPYYKYTPEIILENRNFKVYWDRTIITDKTIHFNRPDITILDKNKNITHLIDIAVFNTHNLLKTHTEKLAKYNLC

SEQ ID NO: 15891 - protein, 1250 aa, Dalla quadristriga
MMEAMRQRKVPQAGTSADSEGESRSKSTGLGSSTYSGGSNVAQSSYRLRPRSTSGKVLQKPQNQTSPSSSSARSLFSSLPSTNSFTRPNSTASTTSSILQEDVALEENLLSNSMPTTCSSRTRNKWSSEMNEFILRTYLHLTSMETDRKAYLPSLHLKFIERFPERQNVSRQRIGDQRRAIVNKKLLPQEKIAKIHREAQAEIHKIYNTTQNTNTHSLTQCTQSAQPINQRMSWTVELNESVMRCYYKVTKIGTQLTAYRKYLHTEFIIKHPALAHLSEQRIADQRRVIIQNKYISNDRLKTLQEEVAAELNMSIEDITNQNSPNQVQHTRPNSPHLYITQTPQAQTHTTIYPRHNTLHSHNILLDTHKIEETFQESWQIFFNSHPTTRPYIPKQKTSRKFSQIIEYINLKILPKHVTKDISFEVTHTLIYCAAYTAAICNGAKLTPPNFTQYTRTYQTPGWQKRLQNKIAKLRRDIARMTQYIRGNRNVRLMQYIDQIRNTHRIHSQHEGPNVTNEHFLDTLKQKLNTASSRLKRYLNCTLRKKQNTQFKNNERQFYRTLTTNSQSIQTSPNTIMAPPPNELHHFWSNIWTNPVQHTHNADWIQKDYAKYASVPEMEFNAVTAETFIKALTKTHNWKAPGSDNIHNFWYKKLTTIHPMLHNHINDFIKTPSMMPHFVTQGTTHMIPKGSDGHNPANYRPITCLQTFYKILTSCIAEHIDQHITDNDILAEEQKGCRKRSQGCKEQLIIDSVAIKQALKRKADISTMYIDYQKAFDSVPHSWLIYILHHYKIHPALITFLEHSMQHWRTKLKIMSSYTDEIPIRRGIFQGDALSPLWFCLALNPLSNMLNVSDQGLTITHEHIRTPLTHLMYMDDIKLYSSNTQSLHHLADITQTFSQDIQMKFGIDKCKTFTVENDNVVQNNYTLATGNQIESLDQKSSYKYLGFQQTGQINQNQTKTDLKKKFRHRLNAILRTQLNSRNIIKAINTYAIPILTYSFGIISWTQSELKALQRTINTSLTGHRKHHPRSCVQRLILPREEGGRGIIDINNLHNKQITSLKTYFHNQAENSSLHRIIVHTDKRLTALNLYNKNTQRNERIDSEKDKIAAWERKSLHGRHRQDLLQPHVDKKASNAWLRYGELFPETEGFMIAIQDQVIETRNYQKFICHIPNLPTDTCRRCHSASETIQHITGACKSIAQTDYKHRHDQVAAILHQHLAFKHKLIDQKVPYYKYTPEVILENSNFKIYWDR

SEQ ID NO: 15892 - protein, 1365 aa, Panoquina ocola
MMEATRKRRVPQAGTSARCEGESRTKPSDLGSSTYSGGSNVARTSYRLRPRSTSGKVLQMTSPSSSSTQSLFSSLQSTNSFIQPNFTASTLSSIQQEDVALEENLVSDPVPTSCSSRTRNKWNSEMNKFILRTYLHLTLMETDLKSYLPSLHLKFIEKFPERQTVSRQRIGDQRRAIINKKLLTQEEIDKIYREVQAEIQNIHKTTHNANTHSTIQHIKPVNQRMSWTTELNESVMRCYYKVTEIETQLTAYRKSLHAEFISRHPNLAHLSEQRIADQRRVIIQNKYVSNDRLKIIQEEVATEINISIEEMRSRHLNHQIQHTSNSSPTSHIPQTSQNESNQTQNTHDTGHNESLQNLSHLETQKIEKEFQESWNLFFNSDPTTRPYIPKQKTSRKFSQILQYINSNILKKRSTKDDNFEYTHTLIYCAAYAAATCNGAKLTGMKSMPQNHRTSSPAWQKRLQNKIEHLRRDVARMYQYIRGNKSKRLKHHIDQIKITHKIHSKHEEPNLTDDQFLDTLKQKLNTAASRLKRYLNCSMRKKQNTQFKNNERQFYRSLTKHTQNIQISSNTHTPSSLSTHHHFWSKIWANPVNHTHNAEWIQRDLEKYTCLPEMEFDTITVDTFVRVLTKTHNWKAPGNDNIHNFWYKKLTAIHPMLHIHINNFIKVPNTMPQFVTQGRTYMIPKNSDLENPANYRPITCLQTFYKILTSCITSHIEQHITHNNILAEEQKGCRKMSKGCKEQLIIDSVAIKQALKSKADISTMYIDYQKAFDSVPHSWLLYILHHYKIHPTLITFLEHSMKHWRTKLKLIGLDESDEIPIRRGIFQGDALSPLWFCLALNPLSNMLNFSGQGLTFAHEATHTPLTHLMYMDDIKLYSDTTQSLHNLADITHEFSQDIHMQFGIDKCKTFTIQNGTIVQNNYTLTTGNQIESLDERSSYKYLGFQQTGQINQKQAKTDLKRKFGHRLNAILRTQLNSRNMIKAINTYAIPILTYSFSIITWSQSELKAFQRTINTSLTGQRKHHPRSCIQRQTLPREEGGRGIIDINNLHNKQITSLRSYFHNHAKQSQLHQTIVHMDKRLTPLNLHNNNKQRNEQLIDDKAKISVWEHKSLHGRHRQDLLRPHVDKKASNAWLRNGVLFPETEGFMIAIQDQVIETRNYQKFICRIPNMPTDACRRCHSASETIQHITGACKAIAQTDYKHRHDQVAAIIHQYLAFKYKLVDQKLPYYKYTPETILENRNIKIYWDRTIITDKTIHFNRPDITILDKNKKIALLIDIAVCNTHNLLNTHTEKLAKYMDLQIELKTQWGVKTVRTVPIIISSTGVIPKTLHTSLNTLDIQPSIVSLLQKAVILNTCRIVRKFLSLD

SEQ ID NO: 15893 - protein, 1370 aa, Piruna aea
MMEATRKRKVPQAGTSAERDGESRPKCTGLGSSTYSGGSNVARTSYRLRPRSTSGKVLQKTQNQTSPSTSSTQSLFSSLPSTNSFIRPKSIASTPSSILLEDVALEENSVSNSVPTTSSSRTRYKWSSEMNKFILRTYLHLTLMETDRKAYLPSLHLKFIEKFPERQNVSRQRIGDQRRAIVNRKLLPQEDIDKIYREVQTEIQNIHTQNDITQATTQNTQSAHTSNQRMSWTPELNESVMKCYYKVTKIGTHLTAYRKPLHTEFTNKHPHLAHLSEQRIADQRRVIIQNKYISDERLKILQDQVAVEINMYTDETTNQITPNQIQHIETNSRHQHPPTTFQNEENVSQTRISTNEPLITSRKVHLDTGKIEKTFEESWKTFLNSNPTTRPYIPKQKTSKKFAQIVEYINSNILSKRVSKEDSFEVTHTMVYCAAYTAAICNGAKLTHFNCNQQPRRHTPAWQTRLQNKITTLRKDIARMTQYIRGNRSIRLVEHINQIKHTHRIHSQHEEPNLTNEHFLDTLKQKLNTSSSRLKRYLNCTLRKNQNTQFKNNERQFYRSLTSQTQNVHKAPHIVSAPPPNILHHFWSNIWTKPVQHSHEADWIQKDCSKYAHVPEMQFNNVTVETFNKTITKAHNWKAPGSDNIHNFWYKKLTTMHPMLHNHINDFIQNPSLMPHFCTIGTTYMIPKDTDYQNPAKYRPITCLQTFYKILTSCIAEHINEHVTENDILAEEQKGCRKRSQGCKEQLIIDSVAIKQALKNKADISTMYIDYQKAFDSVPHSWLIYILQHYKIHPSLITFLGHSMQHWRTKLKIMSSDIETKEISIRRGIFQGDALSPLWFCLALNPLSNLLNSSNQGLRIPKGHTHKTLTHLMYMDDIKLFSNATESLHKLADITLSFSQDIQMKFGIDKCKTFTVKNGCVIQSNYTLLMGCQIDSLNQESSYKYLGFEQTGHINQKQTKTDLKKKFCHRLNAILRSHLNSRNTIKAINTYAIPILIYSFGIISWSQSELKALQRTINTSLTGHRKHHPRSCVQRLTLPREGGGRGIIDINNLHNKQITSLKKYFHERAEKSPLHDTIVHTDKRLTPLNLHNKIKQRNEHIISEKEKTATWSQKSLHGRHYQDLQQPHVDKKASNDWLRYGELFPETEGFMIAIQDQVIETRNYQKFICHIANLPTDTCRRCHSASETIQHITGACRAIVQTDYKHRHDQVASIVHQHLAFKHKLIEQKVPYYKYKPETILENSNFKIYWDRTIITDKTIHFNRPDITILDKRQKIVHLIDIAVCNTHNLLNTHTEKIAKYMDLQIELKSQWKVNTVKTVPIIISSTGVVPKTLHTSLKTLDIHPSTVTLLQKATILNTCRIVRKFLTLT

SEQ ID NO: 15894 - protein, 1372 aa, Carystus phorcus
MMEATRNRKLPQAGTGADCEGESRPKPTGLGSSTYSGGSNVAQTSYRLRPRSTSGKVLQNMQSQTSPTSSSTHSLFPSLPSTNSFIKPKSTASTLSSILQEDVALEENLVSDSVPTSSSSRTRNKWSFEMNKFILRTYLHLTLMETDLKSYLPSLHLKFIEQFPERQNVSRQRIGDQRRAIVNKKLLSQEEIDKIYREVQTEIHNVHNTKQNTITHSTKQRIEPALPLNQRMSWTTELNESVMRCYYKVTRIETNLTAYRKSMHKEFINKHPNLAHLSEQRIADRRRVIIQSNFISKDRLKAIKEEVAAEINISPEGVRNQSQNNETQHAGCSPPSLHTSQNQTDETNNIQDSQQNTTQLQSVPYLDTQKIEKVFQESWSLFLNSHPTTRPYIPKQKPSRKLSYIVNYINSNILTKRIKIDDSFEVTHTLIYCSAYTAAICNGAKFSKINNKSHTRKYRIPAWQERLQNKLENLRRDIARMYQYIRGNKSMRLIHHIEQIKKTHRIHSKHEEPNLTNDQFLDTLKQKLNTTSSRLKRYVNCSMRKKQNTQFRNNERQFYRSLTKHSQNIQSSSNTSTAPPPNALHHFWANIWANPVQHTHSADWIQNDYKKYSSVPEMEFSTITADTLIKVLTKTHNWKAPGNDNIHNFWYKKLTTTHPILHKHINNFIKTPSLMPRFVTQGTTYMIPKNSDSKNPANYRPITCLQTFYKILTSCIAVHIEQHITHNNILAEEQKGCRKMSKGCKEQLIIDSVVMKQALKRKVDIATMYIDYQKAFDSVPHSWLIYILHHYRIHPSLITFLEFTMQNWRTKLKLMNSETDESDEIPIRRGIFQGDALSPLWFCLALNPLSNMLNFSNQGLPVTHEHTRTSLTHLMYMDDIKLYSNSTQSLHQLADITHTFSQDIQMQFGIDKCKTFTVIKGSITQNNYMLDHANQIESLDYGSSYKYLGFQQTGQINQKQTKSDLKKKFRHRLNAILRSQLNSRNMIKAINTYAIPILTYSFSIISWSQSELKALQRIINTSLTGRRKHHPRSCIQRLTLPREEGGRGIIDINNLHNKQVTSLRSYFYHRAKQSLLHKTVVYMDKKLTPLNLHNSNTQRNQQLIDEKEKIAAWEHKSLHGRHRQDLLQPHVDKKASNAWLQNGELFPETEGFMIAIQDQVIDTRNYQKFICHIPSILTDTCRRCHSASETIQHITGACKAIAQTDYKHRHDQVAAIIHQYLAYKYKLIDQKIPYYKYTPETILENRSFKMYWDRTIITDKTIHFNRPDITVVDKNKKIAHLIDIAVCNTHNLLNTHTEKLAKYMDLQIELKSQWGVSTVKTIPIIISSTGIIPKTLHTSLNTLDIHPSTVTLLQKATILNTCRTVRKFLNLN

SEQ ID NO: 15895 - protein, 1369 aa, Hesperia comma
MMEARRNRKLPQAGTSAVCEGESRPRSPGLGSSTYSGGSNVARSSYTLRPRSTSGKVLQKTRNQTSPSSISTQSLFSSLPSSNSFIQPNSKSSTVSSILQEDVALEENLDSNTVPTPCSSRTRNKWSLEMNKFILRTYLHLTLMETDTKSYLPSLHLKFIEQFPERQNVSRQRIGDQRRAIVNKKLLPQEEINKIYREVQAEIQNIHNITHNTITHSNIQHIDSTQSASQRMSWTTELNESVMRCYYKVTNLGTCLTAYRKTMHAEFVKRHPHLSHLSEQRIADQRRIIIQSKYINEDRLKIIQEEVATELNLEDTRNPSSNNETHTSLSSPNPHTPQITQNHSDHIHTLHDTQQTTFHAQSILPYLNTQEIEKVFQEAWNLFFNTNPTTRPYIPKQKSSRKLSQIVDYINTNILTKRVTKDDSFQITHTLIYCAAYTAAICNGAKIAINFASQSRHRTPAWQKRLQNKIANLRRDIARMYQYIRGNKSLRLLHHIDQIKHTHKIHSKHEEPNLTNDQYLDTLKQKLNTASSRLKRYVNCSMRKKQNTQFKNNERQFYRSLTNHSQNAHISPKANTPPPSNVLHNFWANIWANPVQHSYNADWIKKDYDGYSSVPVMEFNIVTVETLFKVLTKTHNWKAPGNDKIHNFWYKKLTTIHPMLHSHINNFIKTPHLMPHFVTQGTTYLIPKNSDTHNPANYRPITCLQTFYKILTSCITTHIDQHVTNNNILAEEQKGCRRMTKGCKEQLIIDSVAMKQALKRKADVTTMYIDYQKAFDSVPHSWLIYILHHYKIHPSLITFLEYSMQNWRTKLKVMGSDIESDEIPIRRGIFQGDALSPLWFCLALNPLSNMLNRSEHGLTFTHDHTNTSLTHLMYMDDIKLYSNTTQSLHHLADITYLFSQDIHMQFGIDKCKTFTVERGTVVQNNYTLATGNQIESLDESSSYKYLGFQQTGQINQKETKLHLKKKFRHRLNTILRTQLNSLNTIKAINTYAIPILTYSFGIISWSQSELKAFQRTINTSLTGQRKHHPRSCVQRLSLPREEGGRGIIDINNLHNKQITSLRSYFHKRTEQSSLHKTIVDMDKRLTPLNLHNRNTQKNEQLIDEKEKIAAWEHKSLHGRHRQDLLQPHVDKKASNAWLRYGELFPETEGFMVAIQDQVLHTRNYQKFICHIPNIIDTCRRCHSASETIQHITGACKAIAQTDYKHRHDQVAAIIHQHLAFKYKLIDQKIPYYKYTPEIILEDRNFKIYWDRTIITDKTIHFNRPDITILDKNKKIAHLIDIAVCNTHNLLNTYSEKLAKYTDLQIELKTQWGVKTIKTVPIIISSTGIIPKTLHTSLNILNIHPSIVILLQKATILNTCRIVRKFLSLD

SEQ ID NO: 15896 - protein, 1370 aa, Euphyes dion
MEAKRNRNVPQAGTSAKCEGESRPKPTGLGCSAYSGGSNVAPKSYSLRPRSTKGKVLQNTQKQSPSSSSTQSLFSSLPSTNSFMQPNSIASTHSSILHEDVALEQNLVSNSMPTSCSSRTRNKWSSEMNKFILRTYLHITLMETDQKSYLPSLHLKFIEKFPERQSVSRQRIGDQRRAIVNRKLLPQEEIDKIYREVQAEIQSIHNIRQKSITHSKILHKKPCQSVNQRMSWTTELNESIMRCYYKVTKIETCLTAYRKNMHTEFINKHPNLAHLSEQRIADQRRIIIQNKYISSDRLRIIQEEVAAEFDFSIEETRNQSLNNDTQNTSKSPSPCTSQIPQNQTHQTYTACEARQNTYFAHNTPYLDTQKIEKEFQKSWDLFFNSHPTTRPYIPKQKTSRKFSQIVDYINSNILTKRVTKDDSFDFTHTLIYCSAFTAAICNGAKIRDINFTPPSHKYHTPAWQKRLQNKIANLRRDIARMYQYIQGNKSIRLIHHIELIKNTYKIHSKHEEQNLTNDQFLDTLKQKLNTASSRLKRYLNCSKRKKQNAQFKNNERQFYRSLTNNSQNIQISPNTHTAPPPNTIYDFWANIWANPVQHTRNSDWIQKDYDKYSSVPQMEFDIIPADTLSKVLTKTHNWKAPGNDNIHNFWYKKLTTIHPMLHSHINNFIKAPNMMPHFVTQGTTYMIPKTCEYQNPANYRPITCLQTFYKILTSCIAIHIDQHITHNNILAEEQKGCRKMSKGCKEQLIIDSVVIKQALKTKADISTMYIDYQKAFDSVPHSWLIYVLHHYKIHPSLITFLEYSMQNWRTKLKLMNSNAESQEIPIRRGIFQGDALSPLWFCIALNPLSNMLNLSDQGLTLTHEHTRTSLTHLMYMDDIKLYSNNTQSLHHLADITYNFSQDIHMQFGIDKCKTFTIQNGSVVQNNYTLPSGNEIESLDQRSSYKYLGFHQSGQIIHKKTKADLKKKFSHRLNAVLRTQLNSHNMIKAINTYAIPILTYSFSVISWSQSELRAIQRTINTTLTKHRKHHPRSCIQRLTLPREEGGRGIIDINNLHNKQITSLRSYFHKHAEKSLLHKTIVHIDKRLSPLNLHNHNTQRNEQVIHEKEKIAAWEHKSLHGRHRHDLLQPHVDKKASNAWLRYGELFSETEGFMVAIQDQVIETRNYQKFICHIPNITDSCRRCHSASETIQHITGACKSIAQTDYKHRHDQVAAIIHQQLAFKYKLIDQKTPYYKYTPQTILENRNFKVYWDRTIITDKTIHFNRPDITILDKNKKIAHLIDIAVCNTHNLLNTYTEKLAKYMDLQIELKTQWGVNSVKTVPIIISSTGIIPKTLHTSLKTLDIHPSIVTLIQKATILNTCRIVRKFLSLD

SEQ ID NO: 15897 - protein, 1136 aa, Carterocephalus mandan
MRCYYKVTKLETQLTDYRKNLHTEFISKHPELTHLSEQRIADQRRVIIQNKYISTERLKLIQDEIAAEISMSIEENTHFNSNNQTPNTHASSSQLHYLQTSQEQNQTDQTPSNAQQNTSHAQNIPLDTQKIDKTFEDTWQAFYNSHPTTRPFIPKQKTSKRLSQIVEHININILTKHITPNLSFEVTHTLIYCAAYTAAVCNGSRLTPPNMLSQRTPRCRIPAWQKRLQIKIENLRRDIARMIQYMRGNRSVRLIKHIDLIKITHRIHSQHEEPNLTSEQFLDTLTQKLNAATARLKRYLSCTLRKKQNTQFKHNERQFYRTLTTHSQNIQTPANTYITPPPNALHNYWSNIWSNPVQHTHNSNWIKEDSEKLASVPEMEFSTIDVEIFLKALAKSHNWKAPGSDNIHNFWYKKLTTTHPILHNHINGFIQTPNIMPHFLTHGLTHMIPKGNDPQNPANYRPITCLQTFYKILTSCIAEHINIHISDNDILAEEQKGCRKRSQGCKEQLIIDSVAMTQARKNKADLSIMYIDYQKAFDSVPHSWLKYILHHYKIHPTLITFLEHTMRHWQTKLKIFGSDNLITETEVIPIRRGIFQGDALSPLWFCLALNPLSNMLNSSDKGLAISNEHTCTTLTHLLYMDDIKLYSNTTKSLHHLADITHTFSHDIHMKFGVDKCKTLTIKNGTIIQNNYVLASGTQIDSLDQDSVYKYLGFQQTGQINQKQVKIDLKKKFKHRLNAICRSQLNSRNIIKAINTYAIPILTYSFGVITWSQSDLKALQRTVNTSLTAHRKHHPRSCVQRLLLSREEGGRGIIDINNLHNKQITSLRTYFFNRATHSLLHKTIVHTDKRLTPLNLNDNNTQRNERIVDDKERIAAWEHKSLHGRHRQDLLQPHVDKKASNAWLRYGELFPETEGFMLAIQDQIIETRNYQKYICHIPNLVTDMCRRCHSASETIQHITGACKSIVQTDYKHRHDQVAAILHQQLAFKHKLITEKVPYYKYTPETSLENNNFKIYWDRTIITDKTIHFNRPDIVVLNKLKKTVHIIDIAVCNTHNLQNTHTEKIAKYIDLQIELKSQWKVNQVKTIPIIISTTGVIPKTMNTSLNMLDLNPSIVPLFQKATILNTCRIVRKFLSLDI
